United States Patent Application Publication US 2014/0057251 A1 - sequence listing, part 116

SEQ ID NO: 218234 - DNA, 2721 bp, Cannabis indica
ttagtgaataattcattggaataagaaagttaataaaagtgatctatacatacctgtaggaaaatcataggagctaggttctattacaagggattcgaagcagaattcggtgctcttgaatcctttggcaagcccttctttcgatcagctcgggacagtgatggtcatggatcacacacagcctcaacaataggaggatcagtggttgacaatgtcagctatttcggaatagcaaaaggcacagcaagaggtggtgctccaagtgccaggcttgctatctacaaggcttgttggtttgatttatgtagcgatgcagatattctcgctgctctagatgatgtaattcatgatggagttgatgtagtctccctttcgctcggtcctgatcctcctcagccgatttattttgaagattccatctctgttggaactttccatgcattccagaaagggattttcgtttctgcttctgctggaaattccggtcttcctagcactgctagcaatgttgctccttggatcttcactgttgctgcaagcactgttgatagagagttccctactaatgtctatctaggaaattcaagagttctaaaggtgaatttagcattctcaaaagtcgaaacagagctgttgaactaagtaacatgttgttaactgaaaaaactgaatgttgtggtttcagggttcatctataaatccactgaagatggacggctttttcagcttgatcgatgggagtgctgcagctgccaaaggtatcccaagtgagaacgccaggtattttttcgtctccaaagctcccttaatagtttcagtggctcgaaaagctcccttcttctctaagctcgatttgttttgctttgtctttcagcttttgcaataacaatactctagatagcaacttaattaaggggaaaattgtggtgtgcactctcgaggctgtcaccgatagcagaagagaaaagggcttgtttgtacaacaaggcggtggagttggaatgatccttatagatcctgtgctcaaagatgtcggttttcagtttgtcatccccgctactctgattggtcaagaagcagcaatagagcttcaagattacattaagacatcaaagtgagttttcaatcttaacatactatactagatgatgattctaagatgacgacaacgacgatgatgttatttctactccacaggaatccaacagctaaaatcggtagaaccaaaacaattctacacactaaaccagcacccgaagtggcagccttctcttctgcaggaccaaatattataagtccagacattatcaaagtatgtcatataagttagaaataaatttcattttagttttaagcaattcaacatgatgtactcaactatatgtattcctctttagcccgatattacaggaccaggagtgaacattttagcagcatggtctcccgttgcagttgaatcaactggtggaaggtctgttgatttcaacataatctccgggacatccatgtcttgcccacatgcatctgcaattgcagccattataaaatcctaccgaccttcatggagtcctgcagccataaaatctgcaataatgacaacaggttaaagcagtgattataaagatagcaactttatcatttttgtgattgaatgagctataaatttgtgttctttttctgttgttgttgcagcaactgtcctcgataacactaaacgcctcattggaagagatccaaatggcatacaagccacacctttcgatcatggatcaggacacataaacccagttgcagctatagatcctggacttatatacgattttaattctcgtgacattatagattttctatgtagcaccggtgcaagcccttcacagctgaaaaacctcacgggacatataatctattgccagaatcctccaataccttcctacaactttaactatccttcaatcggtgtgtccagtctcaatggaagtttatctctttacaggactgtaacttatcatggaaatggctcaactgtctatgttccatgtgtggattccccgacgggtgttaatgtggtagtttacccaactaaactgaagtttacaaatgccggggaaaagaagacctttaaagtcaaactcacccccatggcgagcagcaatggaagctttgtgtttggagctttgacatggagtaatggtatccataatgttaggagtccaatcgccctcaacgtagtttaatcatgagaacaagtggttcatagtgatttcggttattaatttatagaacatgagctagaaaatttggttttgtaattggtcagagattaaaacaattacaaatatctatctatctatctatttaaatcattatgcaactgtcctgaaatttaattgcagttaaatactttgcaagttttcatatctgaattcatagtacaaatacttcataacatccaaatgcaattgacaataaatccattaagatacttaaaatcatatattcatgaatttatggcaatttgactcgttcgatgagaatgataagaaccgaaaactccaaactcaagcacacaataaaacagtagcaaaataataggaataatatatcgaatgtatgagaaatccaattacaaggagctcttaggcccttctgatgcaaataaagattcacttaatacattgcgtaccttatctattcactaactcacctatatatactattcta

SEQ ID NO: 218235 - DNA, 2075 bp, Cannabis indica
agttagtgaagttcaagagctttcatgaattacaattaatttcattttttttaatatgatagtatgatatattttctttttaattttatgataacaaagtattttttttatccccaaaattgaaattggtgaactttctttttatgatacatcgtggttctttgaacacaaaataatgtttaccacctcttgaatttttttttcttggttactttttcttccattcttaatatgtcttttattttgatggttaaagtctttgtgtaatataatttgtcagagagtggtaggagggttaaagagtagcaagatttggataatttgaatcatcatgatgtttgcttctaaaagcatttcctcatactaattaaaggagatatataacacatgtgtggataagttgagttgttctcttttttttttttttttttgtttaattttaaatacatgtattctatgttatttcaatcatcttctttatttgtcacaaataactacatttttgtttacatattttgtaaataccaaattttattttttaaatcctatcattctatcatgttacttttttttaataattctaacatcacaatgtcatattttatattgtaccactgaattaatactaaaaaaaaataacaaatattgtgcaataccgcgcgaagcgcggcttagttctctagttaaatgataaaacaatatatcaaatagtgtttagtgaaatcgtgtagctagagtcttatttaagctaagaggtcaactaattaatctctaatttttactttttaggattatattttggaattctttgagagttttttaaatttttttttactattactccaaactactaaaattattattttaaaaataattaaattatttatataaaaggctcaaaaatgaattttatcttaggtcccatataattagcggccagcacaccaacacagaaaataaaaaagacacctatttgtcatccacattaatgacatgtcaatgtatttactccatattgataaagctttgatttgagtaagccatacagttccaaacatttaatactacattaactccaagcaaaagattttttttcgttatttatttattttttatttttcattaaaaaataaataaaaagaagccacacaccaaactcagtgagggattgaaccaaatacatgttacatatgtagaatataattatagtcaaatagcttatattagctataacaaaaacaacatccatccactataggacaaacgtgaaacgaccatgttctgattttgatttgatctatttacctctttgttacttaaactgtattatatgataattagtatataaatttaaattaaagagctgacaaattcaagatatctagagtgtaatgtcgttggtgcgatagagactcttgcactatcaaataaagtgtttggaaaatcaatttttcaacattttgaataccaataataatagattggacgaatatgcattaattacttcaatagatttttatttaaattatgtaaacgcaaagactagtttatctattctttaatttaataaaaacatatatcatcatcaattcatgatcatgataaccatatatatatatttttatttcattacagaattgatttctacgtttgacttttgcctatttatcctgattttaaaataccaccaaatacacacattattttttccccctttgatttcaaaataggtctgaaaattatcaagtatggaggaatgtttttaccttttttgtaccagagcacaaaataataagagtacgtaggtgtcacgcaagttttatcggcgggggtaatatggtaaaagagaatgaaagtggaatttagagacgacgacgtttgatctttcatttcattccctttgctctggtgtggtgttcatattcatacaaaagaacagtcttcttcttccaaaaactataaattctcattcaatgcaattcttcagtcaaattcctaatcccacgagattttcgttatcgtaataacgcgtattttcttccaacctccaaatcatatatattaatattattcta

SEQ ID NO: 218236 - DNA, 3427 bp, Cannabis indica
ccagctttacttcgagtgatcatgctgtgtttattaacaggctgtggggatgaactagaggcagtaaattgaggatgttgaatgtcacttggaatgaggcttggttctggttcatggtcaacaataggtgaggctgcagcagcaatgggagtggggatagtttctggtataggggatgcagcagatgacaaaatcggttgtggtattggtgatgagggctgagaggtatcaatgtgggaataatcttgtgggagaattgtgtctgaggtgttatgaacgagtgtaggggatggtggaataggaaaggcatctgtgggggctgtaggagtagatgttgatgtgggaatatatttgggaaatagtgtgtcataaggaaaactaatttcattgaatttgacagatcttgctatataaattctccctgatggatgcatacatttatagcccttgtgacttgggctatatccaagaaataagcagtgggctgtgcgaaaggcaagcttgttggtttggtagggtcggagcaatgggtaacaagaacaaccaaaggtctttaaaaatgtatagtctggtttttgatgaaagagaacctcaaatgggtttctaagttgaagaacaggtgtggggagccgattgatagtgtatgctgcagtggtaaaggcatccaccagtgtgtaatggcatgtttgcctgagcaagaaaggacagccccatatcgacaacatgtcgatgttttcgctcagctctgccttgctgctgatgtgtatgagggcaagggtgtctgaagttgattcccagaggtgcaaggatagagttaggaacggggtctatattccacccaccccagtcagattgaatagccttgattttggtgttaaaattgtaaattcaacatatgctttaaaactgtcgaaaaataccagcaacttcagattttgctttcataggatacaaccatgtaaatttggagaaatcatcaatgaagctaacatagtatctgaatcctctattgaactataaaaaggagggtccccatacatcagtgtgaactaattgaaaacaagaagtagttttaggtgtggaactactaaaaatgaacactatgaagtttgccatactgacatgcttggcagaaaggtaaagagttacatcttgttttcagatttagagtaccgagaacagcctgtaatattcttggtgatgcatgcccaagacgatgatgccaagtttggacttcagagaaggatgcagcctgattgttcttgacacagttgaaagcagcaggtgttgagaaaacacttttatgtgactgagaggaagtgcgtgtggctttggacagatccaaatggtacagtccgtttttaagatggccctgaagaagagcctgccccgtactcttgtccttaagcacacatgtatcagaatcaaaaagaagagttatattattatctgtagtaatttttgaaatacttaacagattttttgtaatctttggggcaagtaaaacatcatttagcaataatttcttgtttggattagtagtatgaaaactagaatggccaatatgagagattgaaagttgagagccattaccgactgttatcttggctttgcctttgtagtcagtggtggtggtgatattttgagaatcaggggtcatgtggtgtgtggcaccactgtccacataccatccattatcctccataggcgtgtttgaatcagaaatgagagcctgaggattatggccagggttctgagatgttgaggaagatgcctgactgtcattatcatatctatgataacatttgtaagcaagatgcccaatcttgccacaaatctgacaaacaggtcgagaacctcttccacggccattggaggagccacgacctccattttgagaaccacgaccttgagtgttgccacggcctgtggcctgacccctgccagtattggtgcgattggatccagaagaatttctgttgaattgcgcataattggcctgaacagaatccaaaattggaggagtagtttgctcaatacgcatttcttgattttgaagcatgtattggacttcttgaagggtgagatcatcagctcttgccgtgagtagaaccaccacagtttcatattcagtacccacacctccaagaatgtacatagccaattcttgatcagatagtttgtgtccagcagctgcaagagaatcggcaagattcttcatcttcaagatatattcatcaacactcatagatcctttcttggtgttttgaatggccaaacgaagttgaagctgtcgagcttttgactgagtggcaaaaagacttgcaaagacattccatacaccagcagcagattcacaatgaaggacatgtcccagcatagcctcagagagagaattcattagccagctcattaacagagcatcacagcgaatccaatgatcaaaagcagggttaacagtgttcgtacctgcaagaagtggctcaggccgtggagttgtaccaagaagaatgccatgaagaccatgagcacgaacagatggtaaaatcagagagcgccaataagaatagttgtttcgatccaggcgaatattcagagggaggagattgtttggaatatgaaactgaggaggaggaggaggtggtgcggctgccgtgtgaacgatcggagcttcgggcggagtaggagcatgggggcgaggatcgtcaggatcggccataggtatgataccatgtaagagcagagtgagagagaagaaaacacagagaaaatgtagaaagaagctcagttcaaagactggagctgagattgcattatatagggtcaagaactgttacaaccatttacatcacgtgggaaaatagaaacagagaaataacagaattaacaaaactaacagaccctaataactaactctaacatagaccaataaaatatcaacacgtgatatttttgggagcaataaacgaagccttacaaacgctctagaatctcgagcttgtgaactatcactgtaattttttgagattgggagcttatatacatcaaagtaaaaatttttgaggatttatgccggaatttaatatcaacatgtggaatttttggaagcattaaacgaatctattaaaatgaggaccaacggacctacaagaatctcgggttactataaatttttaaggttgaagacttattattagcatcaaaataaatttttggaggacttatatatttgataggtactttattaaattaatatattaaattttggactacccatattatctatacagcgtacggatgagctctcacgatacaacattcaattaatatttagagaaatgctaagggacatcttaagctgtcaagcatcacaagatatgacacactactattagtgtatttcaatatcaagtctcacaaattttaa

SEQ ID NO: 218237 - DNA, 11157 bp, Cannabis indica
tttggaattatatattttattataaacacagtagtcatcaagcggggatagctcagttgggagagcgtcagactgaagatctgaaggtcgcgtgttcgatccacgctcaccgcatttttgttcaaccagtatgaatttttgtatcgaacatagctagaaactcattatcttttacttagaatttatctacagacagatagtatatacaaattaacatagaatctattttctttggacaaaaagaaaatgttttataatccttagcatagcctaatatccttagtgaacgacgattgtttgttctgttgttcattgaagtaaaatatacacacacacacacaactggtaatctcttttatccaaataaaccattaacaaaacgaaaataaatctttttcagtatgtctaaaaagaaagtgagcttgatcaacaaaggtccccatgtgagttctcatgaacatttgactctcaattttgtctctcaaattcattatcatcatcaatctatttcgacattgcaggttatactcaacaatggatatgtgaaactaacgatatcaaagccacaaggatacttaagtgggattacttatggaggaatggacaatgttttggaccccaattcaaatgaagccagtagagggtataaccttcaaagtttgaatatgtcatagtggtattggaatatctctaccaagtctcataattcttccttaattttttttttggttaatgtgtagatattgggatgctaattggagttggcctggtggtcaagacagatataagtacagatataagttgtatgttttttgacatattttctacactgaactaatgaaatttataattaattagtgacccatttttgtataaacacagattgagtggagctgaatatagtgttgtcaaaatgagcaatgaccagatagaagtttcattcaggaatatatatgatccatctattaagggaaacaatttgccacttagtgtggacataaggtcttactttcatttcaatcttgcttgattaagaagctctgcaaactcttgctcaagtgtttgtagattacttgtcaactttgtttaggtacatattgaagactggtgtttcgggtttccattgctacgcaatatatgagcggccttcaggcagccgtgcctttgaccttgctcagacaaggatggcttttaagctgacaccagaaaagtagaatatttaaacttagtctgtttggaggcctaactttttagatatttatgttaatttagtatcttgtgagttgaattaggttccactacatggctatttctgatgagaaacaaagagtaatgccaatgccacaagatctgcttccagacagaggcaaagtgctaattgtaccagaatcagttttgttagttgatcccattaatccagatctcaaaggcgaggtgatgttgcattacacgagtttatttgagtatgtttgtgtagtggaacaaccttaatgaattcctagttgaatgcaggttgatgataagtatcagtattcaatggacaacaaagatggtggagttcatggatggataagttctcgccctgttataggtttttgggttatctttcccagcaatgaattttgtaatggtggtccaacaaagcaaaatctcacagcacacaccggtccaacatgtcttgcggtaatgaccaagattatccagcttcatgagatgacaattttccaatattctcaagctgaaaaaagtttgaaagtatgagatagaacatctaaattttattactacatttcaacagatgttgcatggaactcattatattggagaagacatattagctcattttgaagagggagagacatggagaaaggtttttggtcctttctttgtatacctcaattcaacctcagatgtatcaaatgcacacaacctatggttagatgccaaaaaacaggtactaaaacttcactcacattgataatactttgttggtctaacataattctactatcatcaatgactgaaacatttgttggttgattggttatgtgcatggtttattgtagaggctgttagaagagatggcttggccttacgattttgtctcgtcgccatactatcttaatgctaacgagcgtggttcagtttcaggaaaacttcttgtccaagacaggtaagaatattgcattcatgtcctatactttatctctactaaaattacttctacttattcaaacatttcacattacttcaggtatatttctgaatctctgatacctgccaaaaatgcatatgttggactatcaactgcaacaaccgaaggatcctggcaaacagaaagcaaagtaagcaacttgtttaaaatttctaagaaaagttctagattagtcaatttgaccagcaattgtgatgtaatatacagggttaccagttttgggtgcaaactgattcatatggaaacttcactataaagaatgtcatccctggtgcgtatgggcttcatggatggattcccggtttcattggagattaccttgacaaagcaatcattactgtctcagctggtacttctttatcagtaattaccaatgctagaatttggtgttagccacaactgaaatctggtcatttcttagacaatgttctaaattagtggtgtaataatgttatgtgtactaattaccaatgcttctcaggttcacactcagaacttggcaatctgacctatgttcctctaagagaaggtccaaccatatgggatattggcttccctgaccgtacagccatcggttactatgttcctgatgtcaacccaatgtatgtcaacaagctatttctcaactcccctgaaaagtaagcaaaactctctgcaatcacagattatgataactgttgttaactttctatgttgctgtctcaagcttcactatatcaaaattcacaggtttaggcaatatgggttgtgggatagatactctgatattcatcctgaatttgaccaaacttttactataggcatcaatgatccaaagaaagactggttctttgctcatgttgacaggtttcaccaaccccccttaactcattaaccttagcatagttgaatggcagggttaaaatttgtgactagaataataatgctggattttgtttacaggagagacgcggataataagtacataccttcaacatggacaatcaagtttaacctcaaatcagtcaacattggaactcacaagcttaggctggccattgcatcagcaactcgttcaaatctcaaggtaaggtttggatggtaaagcatatatagacatgtattgtgtcccagaaaaacatacatagacttgtcttgggttatttccttaaccgttacatatgttgtaggtttatgtcaataagatagatgaagcccatgaggtgtttcaagtgctgcagttaggtgcagataacacagtttgtagacatggcatacatggactatatcggttgtttagcattgatatactatctacattgttgatgaggggagacaactctttatatctagcacaggccaagggtggagattcactttgtggaatcctctacgattatttaaggcttgaaggccctgcatcttcagagacatgactaataaaggacttgttgtatcatttgaattaagacaattttattagttttggtatgtaatatcatttgacttttgagttctgacttttgattactcaactattgtcttgctttgcctttgctattgaaatgtcttataagaaagcaaagcaataattaagtctatataatcaacaatactcagaggcaaattggcaatgatcaagtgcgacaatacacagtggcacattaattaacaccaataatggctatcaagtcaatatacagcaagaatggaggtccagacaattgataatcagtaggtaggtagggcacacaatagacagagtgatgatgtaatttaacccaagagtgataagaaataacaacgtgaaatttttccttacaaaacaaacaaagaacgtgaattttttttacatttaatatatagctaaaaaataatatataatttatataactaacttgtcaagacgacaaaaaaataatatttctcgagacttgagggtattttttattccctgagcgaaatactaaaaagaagataataggggtaaaacaaaaagtatttcatatccatttcactggaaatctaagttcaaaatgaaccagctttacatcgtcccaccgatatacacaaaattgcatgcctagcacgcacggtgacacaaactattagagagtaaattgtaaatgacagatgaaaatgtatccctttcactggaatatctacagttcaaaatgaaccagctttacatcgccccaccgatatacacaaaattgcatgcctagcatgcacggtgagctatacaaaacaaacccaagcacaaacttgaccacgtacttcttgtttccctttatagtttcatatgaactcatccacaaaagaaacttcacttgctacagatggtcaaaagcaggccataatgatcactaggcaaaacaggtagctccaacttcttgatttcttttttcactttcttttccttaatatatgatactcctggtattgcatccttcccaatcatttcaattcgatgtatcttgaagtcacatagcttgcaaacgaatctatccaaacgcttctgcagtgtgcggtttccagacaacatctggttggacttggtatcatatgtatatccattttcctctggctttaactttgcccaagcatccaaccatccatcaggtaaaggaaactggccatccaacttgtcatcccagttcatgtcaccagcaaataccacattttggtttgtcttgaggaagttaatggcctcatttgcctgttctacacgttccttgctaaacatctggtcccacgtaggaggacctgggcacggactttcaagatggctagtggcgatgaccaaagatttatccttctgaatttcaatttcagcaacacaaagttctctacccatagcagaattggagaagggtttacagctaaatattttcactggaagtttgcttagctacatagagtaaacaaatctataccaggttatccaaattaaccataaaaatcaatacaagtgataacgtatttgaagcagaataaaatacaaaacaacaaaaactgtatcccaagcagaaaacatatataaccaaccactagactagtgaaaatcaggtttaacagaaccggtaaatgggatgcagacatggccttaccggatttgcagtaagagaataatggattggcaacagaaaatattttgtataggatagaaggagcaataaataattcttctggcattaatcatatataaatcaattcccagaaatggactcattccaccgaagatgcttactgtactaaaaactatttcatctgattcaaaaatcattattataatactccatttcatattcaacaatttcaatccaattatttctatgtcatatatgagtgtttcatgtacctgaatgcagaagtacgaccctgggaaagccatttgatttgtaccggaacaattatacattctccaccaattagattgcttaaagatattgtatatattgggggttacctcctgcatggtaaagaaaagaccatcatatgaattatcaggtgagaagaattaatgaacatcagatgcatttttgcaaaagaggtaaataaaaatggttcatttctttctggagtggctaatgaatgaggaaaacctgaaagcatataatttcaggggaatgcagttctataaggtccccgatagctttcattcttttctccggttcaaggtcttctcgaaaccaaacgttgtagcttaaaatcttcaatgtagtctgggctgtaccagaaccagcttcctctggacacggtaaattatagtcaaaaccaagcattgctaatattacttacaacttaacagagaaaaagataaagcaatgcaagtaaaacatagaaaactaagagcccttatgcaaactaacaggtaaaacaacgtgcaccaaagtcaatttctgcactacaacttagaatccaccagaaaggtgacgattatagaaagaacctaaaaaaagattgatagcattatttctcctaatcttataactctagcacttactgtttcccaaagctccttcacaaaagaaaacaatgaccccaaacagaagactaagataaattatgtattcacctagacatctccaaaataataatcctaacacaagaagtgaacaatcaatgcccattttagtaacaaatatacatgagattaaaaacaaagtgatcgacttcttcttagttgcaatacaatatgaatgatacccaacaaaacccagaaagctaaataggaacattctaacgaaccagatacagtcgctcccttgtcggaagccttaacggattgaaacccacccaatttggcagaatcaggttcgaccccgactggttcagaaatcttcatcctcttacaaggctgcaagggcaagaaaacagagcccactgaagagtccagttcagaatccggacccgtatcgttcaaatcctcaaagctcgaaaaagacgagacatgtgccctagtgtcgcaaacttcgcagttggaatttttatacggattgaggaaagtacaagctttgcaagaccatttcggggtagaagcaagagaagaggaagatgatgatgatggcaatgacgacgattcagatgaaaagcagatttggcaagtggatttctgagatgaggggttgagaaaggtgcatcttttgcagccccaagacatttgtagagacaaggaataagagattctgctaaggtttagtccaacggagcaacaatggaaaaaggttttgggtagtaaagctaacattgaagaagggttagggttgtcatgtcaatttatattcccaaaatttcaaactatgtggccttagcctaccctttcccgctttctatgaactaatgcccaaaactattaagcaaacacagctggatcatcatatataagcttcaaacagaggaccaaatgttcgttttcatcaaaatattaataaaattaaactcaaaaacaggtctataataatcaccttgaactttacccctagaaccgtgacgaagacgacgtcgttttgctcttttctcattagccattacttcttctgcgatcattgccactaacaaaaacccgaaaaatcctcatcatcgctatcatcatctaaaagcatatccagtaatcgatttcgattattactacccataattgttgttgagcttgaaggtatattttgttgatagatggagtttagatgagtaaataaatgttgctactacttttagaataacggacaatagaggcaagctattttagctaaaaacaatatatcaaagcggtaaagtttatttagcattgctattaccactttctccacatatcgcgttgcgattggctagcgatatttcctaaaaattattattaaattgtatgagactcgatacttagtgggaccaataacgatattgacacataagaggatgttagacactgctggtgccctttagcatatctcttacttttactctatcgagtctacagtgtgcaccctagaaaggagtattgtggtaaatttattaaaaattttgtacagtttataatgcatggtaagtaacacgacgcatgctaagtaactgtttaaatcttttttcaatgttgtaaagtgtttaaaattttctaaaaatttataaatgaatctaaatagctactacgtatgcaatcatgaaaaaataattaaactaaaaagataatttaaatatcaaaacaaatatggaatctaacaaatttttaagaggatttactactcaaattttccaaaatatataggcataaagtaaactatttcattttattaaatagactccatttttttttttttgttcattcaccacttcttgcgagttaaagcttgaacatattcaaatttacaacaataactttacaacaccaagctgagttctttttcaagggagaagatatgaaaaatggaaagaaggaaaaagaaaaattgttttttttttctacattttaattgttcttttttaccgggagacaactaaactaacaactcaatagtcaacttacataaaccatatgttaattacagacttaaagtagaagcccaccaccaaaaaaatcatctgcactactgcactctcaataagaatagagattttatacacaacactggctcatcaagaaaaataccattagattacatatttctttttttaaaaaagaaatgctttattttctgcctcagcatggagtcattatatcaaagaataacaaactagagagagctacaacaaaaaatgagactaattctttgactaataaaccactaattattggaatattgctccttcttcttaaggttaaggcaatgaattgtaatctgtcccctgctgcattacttgaatgtggtgttgttgtgttcattacctcccttgtcttattactgctcaacttcttactgtaatcaaaaccacataaaatttgacttaacatcacatgtgcaaagcttggtttcttgctctaataaatatgtgagaatgacagtaaatattttaaagagataaaaacaaatatgcaaatttcagagcctgagagaagaaaccatttcctctcaccttccaggaaaaagacagttcccgtgacctgaaagtacattcccaaaagaagaagaaataagaatctatatcaatacaaggggaaactagcaaaattatgtacaaactaatatttgcccccacatgttttgttgcacaagatggaaaaatcacattataaaaaaaaattatgtaatggtgaaatcagagtttgtctgttttctgcaagaatatagcaatgaccgacattgtttttatttttaacacaatcttatcttctggtccagaatctttctaagtgagtgagtgtgtgctcttctttcacctttgtaaatagagaagaaacaagtctacaggactaccatcatcagaatatcatttcgtgtaggaaagatatagcaaagattctatgttttttctattctctccattactgatgtgcctttgtgggttggcagtgggtaccacaaaccactgtctagtgtctattaacaaagaaaaagaaaagatgaaatagcacagttgagctaaaacattgcttagtggtttatctttcattagacttaccaatatctaaagcatgtgtaaaatattagtaccattgctcaaataaaaattaagcacttggctcttactaaacatactcttatcaaggaaaacacatggtttcttctcccctagtagcagtactcaaagtttggaactgggacataacaactaaactacaaatttaagaagaaaacaacatattcattcagttcttattgtttacaacaaagtaaagcatgtcaattgtgaaaaccaaaaactccagtaaagaaaacttacttgggtcagtggtagtgattgtggccacacccttgaaatcacaagaaccagcagccctcccttccttctggtaatagctatcaaaggcataagaagcatggtttttgacattattaggataataacaatcatctccaggctgaatctctgtacaattagctctccctggtccacaagcccaatccaatgccgcctgcaaagtcttcgaatcaaccccatccatggcaatgcagtaagtctggtttgtggtatcattagccagaaaagtgccactatttgatacgtgaagcaaataaacggccgttgtgttcccatagaaaagaccccaatgagcctcagaaatcggtggtgacctcaaatcctcattaaacaactcatatatgtaaacactcgaagttgtttccgggtgtaaaggggttccactgcggtcaagaacatgcttaatcaggttcgaattatacgtatttgcattatcaatagttgcatatggctctttggaatccccttttgaaggccaaccactctccgagacaagaaccacgacatctgttatgttaagattcttcatggaaaagtaagcagcatcaaccatggcgtcgagcacactagtgtaatgaagcagagtattagggtcaaccatctctttagagggtgttaatggcttaaacaacgcattatcaagaggaacaacccctttgttctgcatataaacgtagtaaggataaaaattcatcataagaggcgaacccgttttggacaagaactgtagaagaggaagaacgaactgggttagactctgattgaagaaagcttgggacggtgggaatgggtctagaataatcgaagcagcgttaggggtcgaaatctttatctgggtatggaggttcgatgcgactaaaccattgtagagggactgaatcgccgggagaagcataggagctgaactgggtaccgttgtaaaaacctcatccccaactgcaatgcccgatataagggtttctgggtagtaagcgacgacgttccgatcgatccatgcggcggcggtggtgttggaggacccaatagctaaaatctggttattgggtacactaatcattacccgaatcttagttttggccaaagccttaagaatatctgggtctgcatcgtaaagcctaacatggtttatcttttgaaattgaagaaacgatactagttcagccggcgataaaagattcgaaacgtcggtgcctatgttcacacccacgtacggttcattgtcttgttcatcgttttgcttcttaatctccgaaaccaatggaaaaaatttagctgaaccaacaaaaaacagagtgagtaaggtaaagactcaaactttccaattttaggggttaatgggggcataagcattaccttgtgataatgtagagagttgaactaagaaaaacaagtagtagaaggagataagagtgagcttagttatggccattgaagaggaactggagcttagcttcctcatcctctgtttctggttcagctgctgctactacagcctcttgcattatcttctgaaaatatgtctacttttttgggtcttattgttaaaataatat

SEQ ID NO: 218238 - DNA, 3679 bp, Cannabis indica
gaagacagctaactgtaccaataataataataataataccaagaaaaaaaataagtaacaataaaagtagaatagtacaaaactaagaaaaaagaagtctccttcttcctcctcatcctcactctctctctctctccctgtctctctctctctcttgtacaaagaatacaagtgtaattttaatattaggaatgtgacaaatcccaaaacgaatcaaacccaccattttataaaccaaaatggtaaattaaatcaagtatgaataaataagtagtgagcgaggaacatggggaagaaaaaagaaaagattaaaataataaacgacaataatgagcactgtcttttctctcatctctagaggatcaaagccaaaaatccccatcccaatgcaagccctcccaccatcttctctgctccactctgcagatccaacattttgtaatttaattaattaatttaaaactccaaactcataaataaaaaaaaaacagttaattattaattactttcttacttgattaagctgtgtttatttatttatttatttattttaagtaattgactgcagtaattgctgtcacgcacaagcgttccagacacataattatgacactctgacatttctttctgtaaaattcaagtgcctacttattaaatccaactaacccacatctagggcggagcgtggttatcaccgccgtgtttcctaatctaaactcgtctttgtgcgcgcgtgagatatgttgaactaaaaaagagtgttttagtttcattctgttttaacgagttcactatccataacacaagactgtcggttcattttagataaactaaaccagaattaactaacgtgcgccaaaaatagacaatctttcagatctagatacgcattgcgccattgctgcttaattaagctttttctttttctcttatgaacgaagaaaattatgagaaatgtaatacgtaccacgtcagcaagagaaggaccgggtgaagaagcatcatctgagttgggtccgggagcttcgcccggaggagcaggtgggctaagcatatcaggagctggggctggagacggagacttactatgcttcttactcttcttcttgctaggagctggagcaggtacctcgacggcgggtggtgcggcggcaggagctggaggagtagcagcaacaggtgctggagtcggaggagagctgaccggaaccggagctggaggagagctgacaggaactggagctggtggagcacttactggagcagctttaggtggagaagatgctggagccttagcaactggggctggcgccgctggtttcggtggagaagctaccggagcagaagctggtggagtcgatgtgggtgatgcgactggagcaggagattttggcttagtgggtgcgactgctggggaagtagttggagcaggagtggtgggggtagtagtagtagttggagctggagcagctggtgtttttgatggtgctgcggccggagattggcctccgactccggctaccacaatgcagatcaatgctactatgaatgcacctctcgtatccatggcttcactcttttggatttagaaagaagaagaagaagagtgatgaaaaacgaaaggacggtgtgattaaaaggtagtgtgttggacatatataggcctgttaaaggcccatatcatcaacggtcggaagataataaatctggaccgtcagatgttaagaggataaaaaagatgagacgggggcccattttgacaagtgggcccaaagtagccgtttgttcaacgtgtagtaaaagaaaagaaggttcgggccgggtagggccagaaacaaccaaaaacgccaccgtaacgtggcgcgtgacagtctgtctgggccccactttggttgattaggtgcatgtgatcttgttacttacattcgaccgacggacccagtacgtaccttaattgcggctttattaattacgcgtttcgccacttatctctaattcacaagcagcttcaaatgtaattactattagagagtattttctcaacataattataatattttaattaaaacatcaatttgaagttcacttagtttagaaatattttaagatctggttaaaattaatttattttctaaaaaagccgtcaaactatttttttaagaaaccccgttaaagtatttttaaataaactcaaattattatagtttttttttatttcagcattttataaaaaatatttgtctttataaattagatttactagatatatttatcacattttttggaaattaaattaataaaatattaaattgaggaaaaatgtttaaaaaataaagaagaagaaaattttacgtggttagagtgttaataattattagtcagcgagtcaatattattgagctcttaccaaaatttctatccagaatgtgtagccaaaagtcttaacccttaacatgaaaggttaaagctaatattgacattgagccaggtaggtgaggctcaaattgaaaggtttccattgtccaaacaagttcatacaacctgatgttgacaggtggccatgcgccactaatcgtgtaaagaatgtcagaatagtggacgctaaaaagatgtgattttgtttttttttttttttgttgcgccttccttaggtctgacacaagggataaatccctgattttgtgggatttggtgttagaaacatgccacgtcggattgatctcggagggtcgacgctctgcgacaccccttcgattgttcttccaggatccccttggggtactcgtttgtttctcctcagtagtccgatagtttggttaagtgttattattctggatctatttgtccgactttacccatagttgagtgaggattaaatctggatcccagtctggttttcttctcaaactagtctattagcttatttgggccttgggaatcggccagcaagtaaacttgaaatgttgtgttttacacatgtcatgttctcgaaaacatagataacatttaccctaaagccttcagggcttgagagttgcgaaggcttgcagccaccatccagatattttgtagtgtgtgggaatgggtagctcaaaccttttgaaattccaaggtggaaggtcatggatgtttgcgaactttacatattacacgagtggaatacatgtgtcattgcctttttggttcgtgtgtaccacgcgacttgagaaagcacgttgttgtgcttatattttgagtagtaaatatggtcatgacacgtgtactagaacccaaagttcagtaggctaaattgcgagaagcatcctaatgatgtatgccaaattatttgtgttattagcgaggaggataaatatcgagtagaaagatggtttgatacataaccgctcaaagatgagatcaaaagtgacgtttatttgagttaatcaaatttagacagttattgttattattcgcacatgttaaaataatataaaatgtgagaaatattcacgtttcatgaaccgtcattgagataagatcaaaaagaataatggtcgtagtaagtccctataaatagtgactgaaatcattgtaaaggagatggtcagttctttcttgattgagagtttatgttaagttgtatcttgtaatcagaaaattcagacataagagtgacccgtggactatgtagatttaacta

SEQ ID NO: 218239 - DNA, 6364 bp, Cannabis indica
gataactaatcagattgtaaagagttttatttagggcataaaacctaacagttccccggtgtactccatggctacctaccttttccctaaaagcctgtattataaaatggatcaggctgttcagaagttctagtggatgggtaacgagtctaaagataggttcctggctctttgcgattggaactctctatgcttacctctggatagaggtgggcttaattttaagaagtttggagatattaaccttgccctggttgcgaagcttggatggaaacttgcaaaggaggaggactccttatggtgtaaggtcttcaaggctaagtattgggggaatagggatcaggcttttcggacttcggatgtgccaaggaatgcttcttttggtgctaaaggtatcatggcgacgagagatttgattcgaaatgaagcttgttgcatccttgcggatgggagtaaggttgatctgtgggcttccccttagatgccttggctagactagaataagtctagagctgccttcaatccattgtgtgtgccaaatccaatcaaggtctttaccctgattggagcggatggtgagtggatagctagttagttcggttcaaagatggtttgttcctagtgtagctagctctctgcatctaattaagcggttgccaagttcacaggatgctctcctcgggtggaaagatgctactaatggtatgttttcccctagcatggcgtataagtccattatcaagaggcgctggggagagactgatcaattatggctccggatttggaagctccaaattactgagcggttgaaaatgttcctttggaaactctgtagagatatcattccgtttgggaatcggcttcaaaggatctttgaaaatagcactagatgtgtgatttgtggtgatgcggatgactcggcccaacacctattcttcaagtgtccgcttgctaaggccgtgtggtttgcaagtcgttgggatattaggagtgactcacttaactttggtgctcctagagacatggtggagtggctcttatcccctgaattcttacaaggtgctgatggagatgacttgggtgagtttttgagatttggcatttgcttgtttgatgctttgtggactgcccgcaacaaagcttttcatgatcagattaatccaacttggagaggcgtccttgccaaggtgattagtgctgctgcctgccttcgtacaacttgggagtctccaagtattgttggtggttcgcagaatagtcctactgcaatctactcaggtaaaccggtgttgctggtggatgcaacgttcaaagatcttcgtgatgcagctgggattatggtggctgtctcggagggcaatgtgtcggaggctatggcagtgtgctttgaggcaaaccagccgctggaggctgaatctttggccttggttaacgcggtgaagtggtgcaatcttaggggctggaagcagatggttattgcttcggattgtcaagcgctggtgcatggattacacactcggagggctccagattggcggctggctggcgtcttctggctgctggtggagctgctcgacgcactccctgaagtggagattgtgtggactccctgtgttggtgttcttgctgctcacaagcttgctaagtgagcgtttttcaactatttttctagtttttttatctgctgaggacttggcccctcttgtggccatgtgaaccttgtttttttctgattttgtttgcaatagagaatgtttctccagcaaaaaaaaaaaagacaaatattttaaaagccaataaacttgtaccgtgttcaaatccgtatcaaacttaaatcaatttattttttaaaataataataataattattattgttaaattattgagttttaaaatttatcatactttcgaatctattagtacaagtcatattgaagtttatattttttttttatcatgtcatattggtgatatcttttaaaagattgtactatgacaaacccaacattattttgtaaaaattatgtgtcacaaatacctatttttttcacctaatatttatgattgcagatgatatgtacattatattagtgttgacttaaaaaacttgtgtcactttgtaattggtccagctcaattttatttaaaaattaatttaatagaactggtctgaaaacaacataacatattataactttgtttgttagaattttgacttggtttatgtacaacaaactcaaaatcattgtaagaaagagtaaggtaacttgctaaagaagaaattacatttcatttcaatcttcaaatattataaatattctataactatataataaaatacaagaagaaaaagagtataaatagaatggcagctagttattaatagattaaaaagaacatatatagtaaaatttgattggatgaaaagatgaaaaacaaataaatatattatgtctcctacaataagggcttatctcaaaaggagtcaaaacctttctttctattgtttttgtttttgaactcctaaggttatggaggttcatacataatccaaaccaagtaaataaccaacaacacaatactataaaatggcagttcaatacatcatttctcaataaataagcaaaagggttttcctttctcacctccaaaaatgactacctcaaaccatttgatacaattccaagttgtagtctttatcatcttggtctcaatttctttctcctatacacacaccccaccacatgagggttctcctacttcgcccccacaacaacaatctccgccatcgccacaaaaacaatcttctcctcctccatcttcgcaacgaaaatccccaccatcaccacaaaaaggatcttcttcccctccatcttcacaacatcaatctcattcttctcaaacaacagtggaatacaaaggatgttggtcaaaggtctttgcattcggagactcaaacacagacactggtaacggctacttggttggcggcctaaaatcgttcacaaacacatcattctctaagtcattctatagttcatcatcaaatggttacttaaaaggtcacagactttccaacggtcgattaatagttgaccacttgactgaatctctggcttgtcctcccttagcagcatacaaatcatcttcagtcgatatcaactacagcggtagtgtcaacttcgccattgcaggaacttcaacactgtctagagattacttttataacaataacattggtcacactttcatgtggagtcgagttccagagagttatcgaactgagatgacttggttcaacaactttcttcatgaaaggactcaaagacatggttctaaagcttgccgaaaagaaatggctgacaccctcttttgggttggtggtgttggaagcaatgattacctccgcatgtatggatcttctgttacctctcgtatgcttactgacctttccattggtcacgtatcaagaattttaacggtatatatgtacatttgattcctaatttcctatataagttatgttaaagaaatgatgacaactcaagaatgttttatttcagtcactgctagaccaaggggcattgtacatagttgtacaagggttgccacctttgggatgtcttccgtcgcagctgtcaatgtgtccattgttagatcgcgacgaaaggggatgttccaaggccgccaacaacatagtaagggctcacaacaaactccttcaactaaggttggacaatattagaagacggtatcctcacgcaatgatagcctacgcagacacctatggtgcttatgaggacatattggctaactaccaaaaacaccatttcaaagagccattcagagcttgttgtggctctgatgaagatggtccttttaacttcgatgtacattgcctttgcggggcttcagggacaaccatttgtaagaactctggtcagtacatgagctgggatggtatccatttcacagactccatgaatggaaaactcactgaccttttcctcaacaaaggttactgccaaccttcatttaaggaacttgccaagaagaagaaacagcaagtaatatagaagagacaagcttgtcaagagcaataataagatgtttaattagatgaagctccgaatggttacactcacacattcagagagctagaatgtaatatttttttattttggagtttattcccacttagtaatttattttcccattctacaatgtaatattttattcttttttttgagtttataccaggtgagtattgtaatgtttttcacttcttgtcatttggtccaaaaaagtactagataagttctttttgtcgttttagcaaaacatgtgttagctcctatgaacgacatgtcgtttcctactctgttaaactgggaaaagacaagcttcgtagttcgtgtgaaacaaacaaatttgtcgtttctcgtccaaaaacttcaatctcaagttttccacataaacaacacgccattttttattgtataaaacgggccaaatttcaagcaataaaaaacaaaatagtcaattttggctaagtgagggacccattgaggaggctgctaaaggaggaggaggggtataaggcaatagaaaatgtgaggtggaagctgaaagtagctgagcaatatatatatatatatacaaaaatattatagtaatggctagagtaaatgaattccaagcagaaaaaaatgaaaataatgagaggaccatgataagaatcagcaaccacaaatgaacaagtatcaagtttcaaccataacttatctcattagcattattcaattaaatgcatatttttttgattgaaagtggtgaaattgaaacaagttagtacaagaagtgagaacctttcatatattactaaacaaggtacctcacactaatacttaaaaaaagctcaacaagcatacatactatggtagctgtaatttttcctgaaagaatccaaaaggacattccttaccagactctatttacatttgagggtcggcattttctctctgtacaccaccaccaacaccaccatcatcatcttcatcttcatttacttccaatcagattagattagatattcatagtatactaagaaaagggcatcagggtgaacttttgggaggctgttgatatagagatagaacctcaacaattcctcttgtgaaaccgtttcattgtcaaccacatcatcatcacaagtgagtacccataaatcttctgaattaaccctcttgatactaccacggcagaaggggcatgattctgatttggtgttcctgtttgaattggaggaaaaattaaatcaaaatcaatatcaaataactcattagagatacataaaagagtgtaacaaatggcttttatttcttttctacttaccaattgcgatagcatttgatgcacattgcgtgacagcaattgggcaagactattttggtgcaaggctccaagcaaattccacactcatcttctctttccatgtcaatattggcaagattaacttctgacttgacccttttcttcttggctgaaacctcaatgcttagacgcccttttttagcatcatccaaatcccccaagtcagcgtggagccgctgaagatatggcaatataacagctgaagttcagttttttttaatgaaacaatgtcagaatcacttcatcaaactaaacattatagatataaatgagaattttcagaaaaagaagataacttgacataccatagaagtctttaatactagcttttcttccatgtgctgatatttttggccttccatctgtatatacctgtttagcataaatacccaaaatcaatgacaatccaactttctagaaacagtcaatatgatataccaacaagttattaaagagactgaactaaccttgtaaacaagaatgtggtaaaaatttagatatcttggcaataaacatgtgcaagagcaatctagccattgtaacaaaaatagaaagaggggtgcccagttattatagaccaatttcatttgtagacatacaccacccttggctcttggaattgaagcagcactgtacataagacaaactaaaattcattaataacactacaacaaaaaattcaaactagtatccatcttttcaattacagcaaagaagaatacttcaattgatgacccactaaagaaaaattacttttttccccctcttccactagaaaaggggaaagaaaggaatccaatttaagaatggtatgaatgaagtcctcaattgggtttctattctttcatgtaattttcacaaaacgaacagattttaagtaaacaaattactgattatcaaacaaacacgcaaatgggttgtctttttcttt

SEQ ID NO: 218240 - DNA, 7154 bp, Cannabis indica
aatagtaaggctctataatacactataattattgtatttatgttatctacatacttgggtaagtcattttcactcactgtattgttttcgatggttttaaatattcgtttatcttattaaggacaattcatgaatattatttctttgtttttacacaacatagctatatcactaattcacttgcaacaattttggaaagaaagataagaacaagaatcacaagaacaagaaaataattctaaaaagggtaaaaaaagcaaagataattaagcggtgtggtaactacatgtatgagtcctattatgtatatgtgattagataagaacgggtgtttttttaaataggcatatgtaataatatgtttatacagtgagttcatgatgaactagttaagaaatgggcaagagctgattctttgtaggatgaagtggcagaagatccctggtgtgaataaagtactgtactcttgttaacagaagtattagcattgctcttattacccaaagttttcatgcctctgcaagacttcatatgcgagtgcagtttctctggtttgaatgctttcccacattgcctgtaacaacataacacatttcaaaattttgtcaggataaaattctttgcattttaatattgtgttttatttagttaagctagactatttgttcatgtccattttaaaggagtaatttattagcttcttaattatttataataatgatgagcattgactttgacatggccaaactcatagtaattcatggataagcatgattcatttcagaaagcaaaaaaaaaataaaaagtccacctcttaaaaaattataacaacacaattcatcctagcaagtagcaaagctctatattatatattatttgttatataatgaatatcaaataatattattcttagttttaaaaatgtttttttattgctgttgatcttttgacttttgtttgatgttatagtgtcacgtaccgtcggcagttgggaaagcttgttctcaactgatgttatataacgttgttttaattaaatatttaagcagatttattactttttggacttaatggttaggatttttctcgaccagtgtcctcattgaactaatatgtattcatttcatagagaaaaaggtgtatgtagtctttatttatataaatgtatatattttttaatttggtcaaaaattaagattataattttttttgtttgtttgtaaggactatataattaatcttagttctcttaatcatttttgtagttatttaattataacacatttttcatataaccattatagacagataaatcattccccctaatcaaatcattaatttttttccattaaaaaaaacattaatttttctaatataaatttgtattatatcgaaaagaaaaaacaaaagcaaacaaaaataaaatgaagatagtcaattaatttttacaatgacttacgagcaattgggctctctggctggcctgtaagctgatggaattgttctttgtttagagaattcgctctgctgctgatccttctttgatgagcttgcagtagtactactcctctcatcacagcttcttctgtaatacaaataaccgcaccagctttaatttaacaaaattaattagcaacattccatacacatgtattacatggttaaataaatatgaatctactctttcgtatacggacaaatttaattaatcttcatttatattatatatatatgtttaatcataaagttgttgagcagaatcagtactacttgtgttaattaagatatgatagaatgaaaattgagataatttttaaatttcgtgtacctagcattgtaattttgaggctgttgtacttcaaactcctggtacttccaacaagtatggaaagaccttcgcccacccgtgaaaacgtactgatcgtccttctcattgttattattgttatttggttttgtattacctttaacggatccagtactcttttggaagccgccactgcatccaccgtggtgttttactgtaactaaaacggtgtcgtttgtatccacagcgcggcaagtaatgaagctcttaagtacgtttgaagctccaccagaaaagctctttctctttgcagataaaggtactgatttagaagatgatgatggtgatgagaaagatgaagagccggcggccctcatactatcatccaattcgttattgttcttcgatctcttgaccttgttgttgttaaataaaggagtagaaatttcaagtttcttggtggtggtggagtgctgttcttgattgtgatcttgttttatattacaaatactcaactggtagttgtcgttctcctgcttcactgaatctaattcatcagtcaaagaagatttttctgaacaaaaactagacagtgatgaatcctcgttaatttcggagaaagtttttgttgttgttgctgttggttgtggagaaatttttggagagcatgaatttttacaagagctaatttgtttatgagctgctttcacatcatcttcaaccctcataattgtagtctttacagctttattttcggtacaataatgatatgaactggcgttgataatatctgttttctcaccatctacaaattaaatgaaataattaagtatagcagatcaaaatatatatatacgtaattaagggactagtatatttctaaaatttttattttggaaatggcacgcattattagtagtcaactcaagtagtgatattttttttttttttatcgtttttcgatagattaatcacacaagtaactgattttaaatacacggtaagtttgcatttaattgattttaaataataattaccaacgggggtggagataatttcggatccttttaggacgtattcattgtcggaaagaggggtaatgagatcttcatctaccaagtcttgccaaacataaccacttttgtacctcctgcgttaacgagtaaataccaaatatataacgaaattttaacgactaatacaaaattaatttgattatgcatgatataataattctttgaattaacttagtctctctattatttgaaaacaaaaaagtcttggtaattatcattataagttaccttttataagaccaagcataagcttctgccatgtcctttcctcgtaagtccccaagccatctcttaacatcttccgtccaaatgacaataacaataatatagatataagtcaaatttgtattttgtatataaaatgataaatattaattagtccataaaccaaaaattacaaattaattaataatgagctgtgttaattaatgtgggagatcactgaattacctcgaagataaacgccggtacgtgtgagatggtgaactcgaatgagatgaggatgttctgagcgaccaagatgagtgagaaagtagatgatgtggagccttcttatttccccacattttcctagttgtccctccatagctaacatcaaaatataattacgaaaattattaattcttctaatattcaaaacttcacgaacaacaatatataaatatatttatttattaggagcacatgaatgtatactatataaactttagaagccctcgagagatctttgtctcactgccggccagcgctatatacgaaaagcttatacaagagtacataccaacacaatatatatagtatacaatttatatgcataaagctattctaacttaaataaatttatataataaaaataatgtgttacatacaatttgacaaataaaggaatagaaaaatgcaggcatgcagattatacatataaaatattaattaacaagctagtgtttggcaaatgggaaatttactttctcgcagaaaggaaaagggtaccacggtttgtttattatcgtagtattcgagattctattctaccccggccccgccaagtgttacttcttctataatggactgttttatacctttttctgttctcatgtggagctgataagctttgaaagaagagttcgttaactgattggtatttaaagcagaaaaattaggaggatttttgtgaccagatttccaaaaaagtagccgatgtagataaaagcttaaacccactcactcacccagcttagttttctcattccgacattgaacaaattttgtatgttgaaccagccagcttttagttatttattttaattatgtatattttatttttatataactgcctaatatatatttttttaattgattgccacatatatattttgttaaaggttacaattattaacaaaaacaaattagttcacacacaaatatgacacatttttttaattggtaagataaatcttaaataaaaatgattaattgaaattattttacaatgtgtatcagagtagtgtttgaattttttgagcacatattattactcatattctaaacactcatatacaagttgaataaaattttattaatatgcttttattagtttcctaaaagttcaaactcacacaaccaacaataaaagtgattttagagtttagaagctcaaaaaccataacttgaataaaatttttgatcggatatattatttttctgcttaattaattactcaaaagtccaaacaaaagtttatggtgcgtttggaaaatgtataattattatggcagtatattttaaaatataaagtatgtttggatataaaaagataattatttataaatttttaatctcttatttagtaaaataattagtaattaaacataaaaataataatttgcaattacactcaatttttataggggtataagaattgagagtatacttaagtcaaattatacaattatagtgtaattatatggttagacaaacacgcaaaattgtataattaccttaatttacatcattatgattcctcttaatttttcaaatgtgctcttaaagtcttaaggttcttatagattaagaatagtctcatatcgataatatgaaaaaataatatccctcattgtcaataaattttaaaataaaatatcatccacttaatcctaaattctaaattctaacagtattatacattcaaaatattatatatatttaatatattgtatattcatgcaaagacagatacaaaacgactctacttaactaatatatatgtatgtcaattttattcccattttcaatgtattttgaaacataatcatttaagagtacttgtgatgacttggtaaccatttaaagatataaataatgtacttcgatgttggtgaacaatagtgtgtaatctaacaaatcaatataactattacgtgtactggaaaggaggttagagggatatatcaccacattagaaaattaattgttttttggagatggtttggtcaccaattcatcatcaaagatggattagtttatctgtttctctctcacatttatgctcttatttatgtataataataatgtataaattaatatccacatgcaaaccaaggcatcatagtttacgggtcatttcaataataaatttgaggcctggttaactaatatatatggtcacatacaacatttacatttaatgattataaaacactagagatatatagtttttttctcaacaacagtacatatacggcaaatgtccatataaattaaaagattcgaaaaatttaagttccacacatagataagataaaaacaaaaatgtaaagtccaattttaaaatacattaagcacgaaaaggaaggtttaacaccttaattattatgtattttattacatacgaagttaaacgatgaaatagaacgatttgaggggccaaatttaatattacatatatatatttggatacaattagatatattacgctttcttttttaaaagattaaatatattactcttaaattatgagtcttttgtaatattcttaaaattgtcttttgcagtgcggctacatccatcagcaaactaattcaagcacagtcctctccaatatagaaaatactaaaaagaaaaatatcatgtgaaagaaaaataaaataaaaccatataatatcaattaatggaaaaatccctcaatattaagtattaaataaatatttagtatttggatataaaaataagctattattaattagatttggtgtatattctaaggttagatatcctccccttatatatataaacttttactatgtgtcatttattacattcaatatttaaaatatccactttactaatatggtatcagactctctcctctagaagaccaagatccccttttcacgcaccagatttggatttcacggatcatgccaatcctcatggcacgaactcaccgattccctattgctagctctgatcttcccttagcttttccctctgtcgttgcttccatcgtcggcaaggtcattgccgattcaaccactgttcccgtggtgtcctcagttgatgctccgatcgttcaagaaacgattccaccacctgctaatgctccgatcgagctccctgttgcggctccaaatctctagcacactatcctgtctccacctaaggatatcggttcctcttcagctattccacctctgatcggagctacttccatggctgctccgaccatgccttcaagatccattccccccgtgactcttggtaatgtttctctccctaaccttggttcacacagtgctgatcccatttctttccagcctccttcttacgatcatccaaccaatgaagacaatccatacttcgttggctccggtgaccttctgaggttgattcttgtgacaccaccttttttcgaccataacttttagcaatggcattgggactttcatctagctctcagagctaagaacaaaatcgaattcattgatggaatccttcctcaacccgatcctactagtcatctcttctattcttggactcgctgcaaccaaataataatgtcttggattattcattgtgtttctttagatattaagagcagtataatgtttcttgatattgctcattagatgtggactgagcttactagcagttttagtcaagaaaatggatctcgtctttttgaactttaagaatctcttacagatttacaccaaggagatgaatctatcactacgtattttaccaagctttaggctatatgggatgagatcaat

SEQ ID NO: 218241 - DNA, 8457 bp, Cannabis indica
tatcttaaggtttttttttttttttttttcttgttatattcaacggttgcggcattaagttcttacgtatataggtagatatatatatttgtccttttctagatttttatgtgtttggttacagggaaaaataattatttcctctcaaaatatctgggctggtttttcttttccttctaatctttcgacccaggtaacgaattatatggctaaactgatatttttaatgatttttgacaattgggtatagttttattttgtttgtaatgatctctgggcaacatgcagtcgctagataatccaatctgattccttttgctaaagtcatatatcaagttcaagttaagatcacatgtttttagaaattttacttggtttcaaatgattttgattctgcaccacaatttctgtagttctatgttgaagccgttccattccttgtttctgtggacttgtttttatcttcatttttattttggtgatttttgtgcaggcaatttgaaagaggagagttattgttggatgatagttggctaagagcagagcaatgggtgaccgtccatatgagcttgggagaccttcatcaggtatggttgtaattgtaaatgtaataatgctattcattcataagggtaatcgttttctatgccaagtggggtttttatttgcactttggtagttgtagattttcatctgcattaaaggttattttattaggctaaccatattatatgcagctgcaagagcaggattacagtcaaaggtgctttaattttgtggattttcccaccaagatatagttttttctgcattaatgaagggttttccatgattcgaaaatactatttgaagaagggtattatctgatattagagtttatggtgtacttctgacaagatgagagaaaattattgaaagggacatgatttttgtagaataggatgattggacttttctcattgtctttctatttggtttcgtttctacacatattactgaaaagtttttgttattatttcttttatatagttatgtgcagcttttttacttgaaactttccataaagtagctggtactatgcatttcttttacagggaaaagaagattaaaggatttattgcatgaaaaagataatcgtgtatgtgctgattgtggtgcaccagatcctaagtgggcgtaagttctgtcaccttgatacactgatactgtatgttaactgtgaaaaaggtgttttctgtcataaagttgttctgggaaaagaggtggatgagtgagaacaactaaaaattcatgattttatcctatgttcttctccatgtgaagtttacaagagattgactgcatttccaggtcagcaaatattggagtttttatatgcttaaaatgctgtggtgtacacagaagccttggttcacatatctcaaaggtaatttttttatactggctggctcaccttgtgtattgtcatagttatagagtaagggaattattgttgttataaacatagtaagtaacaaattttatgtacctttttgaataacatgaacttgaattcttcaggtcttgtctgtgacattggatgaatggtctgatgatgaaattgattcaatgattgaagttggaggaaattcttctgctaactcaatttatgaggcttttatcctgaagattaaaaagccaggaccaagtgctagtcacgatgagcgttcaaaatatatccggtgagctcaaacttattttgtcaaacatgacatataatcttgaactctacgccatgatgaattcagcttatagatcttctttactcttaaagagagtacttatcaaaactgtaatacttcacataggtcaaaatatgagcttcaagaatttttgaaacctagcttgagaatttcatccatttcttctgcaaagacctctcttcaatcgagtttctctaggaagcttatggatagttttcggagttcaaattcacatagtttggtaagtttgttattgccttagttgtttgtcttttgtgatggttccctagaataatgttgatgttgataagatttgtacattaatgattcactttttcatcaaaactgaagatttcaagcacccgggtagtttaagtcatttatacttatgtggtatttgagcttttcattaacttgactggaccagcaacagtcttaaccatgaaaataagagatgaaacttaccacattatttgtttctttggatttttaatgataattatgaactttttggcagcttagcttctgtacaactgaccgtcgttgaatataattacaggaaggaatggtggaatttattggtttattgaaggtgaaagtgataagaggcaaaaatttagctgtcagagatatgctgtccagtgatccttatgtcattttaaatcttgggcaacaggtcttctttctcttccctttgtcttttttgtagttgtaactactcttaacatatctgctctaatactaacattttccccctttaatagtactcaaccctgtgtgtagtgtgcttacaatgtgtacgtagatgaaatatagcttcttttatgcaagaaagaaatgagcacagtgcaataaagcactagtaatggttgtggttaagaaaagtggtagttaaagaaatggaggcataaccctgattatgtagcagttgctgcataatccttatgtctatgcttccatcaagtgcatcgctttcacctacgttggttttctatacttatactcttaggctatgtttggaagttgaattttggcgaggaaagaaatagataaggaaaatgtaggaaaaaaaaagtggaaaataaaaaatagtaaattctcattttggtatggaaagaaaaattgtatagaaaaacactctattcaacaaaattttccatatcaaacttgaaaaattaattaatttttttgatctccacactttttgtttcctacatttttcctacctttttctttcctcacgcaaatccaacttccaaatatagccttagggtacatttggttgagggtgatgaaatggaaaggaattgtttttcattcttttgtttggttctactccattgaaataattttttttactatattatttttattccattcttattccctttctatttctcattcccattcctctattttcattactcccaatcaaacacacccttacgctatgtttggttgtgagtaatgtaatagaacagattgaaatcaattcacacttctttgtttggtttcattttaaattgttaaagtgttatcttcctataaatggatagaaaggtcattcctatggaagatgaagaagaaaatgaatactttttttttatcggtttcatttttttttcttttttggtgaggaataacattattattagttagttagaacaagagagtacaaattagaggagagattcctctaactaacataaactcattttctagccaaagtgcgtgcaaaaatattctcggaaatttatacaaaagtttaaaaatatttaaagcataggttgaaaattgttcaaagccaaacaagcaataaggaatcaaattgctcattccattcctttccactcttattaccaatcattctgtgagttaaggagtgccatcaccatgtcatcctcatcaaggaaggctcattgtgtgatccactatttgcacttcttacattcacaaaactggaatcataacctcccggtctgttgcagttagccttacgatgtgcctgctggaaagtctgccatctcgatgggatttccttttgcaggcttctcctcaagccttcgagtgtcgatcttcgcttgggcctcttgcagatcttcattttgaacctttgcatctactctctcttaaaggatgaaccatgtcttcaccaattttcattactcccaaccaaacacccccttaggttgtgtttggttagaggtaatgaaatagaaaataaaggaaaagaattcattttcattctattcctatgcttgattgcatttgaaagtactagaatgtcattccaatagaatgtcttttccactattttggtggaatgactgttccattcgatgaaaaaaaagttaataattttttttatcattttaaattttattccattcctattctctttcccatttatattcttgtgtattcattccttccaacggaacgcaatgtcatgttgaattttatcactccaacattttaagtgaaaaacatgagaacctgaacaatagcttagtattagttggaagccaatttattcattagctgctataaatatgatttaattgtttcgtgtgataagagaatcatcttcataagaatatttctatcacctttttatcagatttttcaagctggttttgttgttgttaaataattgaagtttttcgataatttagatggccatattaattgtgtgatcatgataagttgttgatactgcagagtgttcagacgaccgtggcaaagagcaatttgaatccagtctggaatgaggaacttatgctttcggttcctcagccattcggacccttaaagttggtaagtatattttatatgttttttcaaatttcaaatttgttagacttgcttttctctatgcttgtgaacgcaaaattaatctacatgaatctaaatagtaagagaccccttcttgcttgtgaatagtatggatcgggagcttaggtgttttcttgttgatttccatactgttgtttctggcaatatatctcaacccgttcacattcagaaaatgtagattgcatttgtagaatatcgaattttttttaagtaagaaaaattttaaaacagttttaaaaaacctgtgtcaaacactattaaatttttaaaatgataaaaaactattttctattcttacttttgaaaacacaattctgaaaactgaaaactgaaaacacagccaaacaacttgcatttgtattctttagaattctttgcacatatgttttattgatgactcaatactgtgatcaaatcttagtgaaaattgtgataatcattggtctttcgatgttgcagcgggtgtttgatcatgaccttttctcagcggacgacataatgggagaagccgaagttgatcttcaacccttgataacctcagcaatggcattcggtgatgcgggaatgtttggaaacatgcagattggaaaatggttgaagtcaagtgacaatgcactcatagaagatagcactgtcaacattattgatgggaaggtaaaacaagaggtgtcactcaagcttcaaaatgtggaatctggagaactagagctagaactagagtggatgcctcttgaacaataggtacatatcttgttattctttcgattttcttctaataagaatttgtaacttcaatgatgaggatattcgcaggacaatggaaccgaacaacttaccttctttttcttgtatttaactatttataacctaaaatctctcccccttttctctttaagttactcagattttgtccaatgatgaagatgaggttgtatgtcttttccactttgtgtttgttcttgttgattattagttctgtatttgaatgtacatgagaatatttaggctatatgctaattgctaaatgtgctttgattgcttatatgagaagatctcattacctttgttctgattctttttttgtttgtctctttttctttgaacccaacaaggtaaggtattgagtagaccacatttccaaaagtaaatgctttgttgactatacttaggagcttttgacagaagtatgttttggagtgccactactttttttattttgtaattttctacagtaaaaaggtgcttttgacatttgacaacaagccaaaattaagtactccaaaacgaaatttgattcttaagaagaggtgggttgtgaagattatttgtttttagccaaaaagaaaaaaatggtggaaacctatacttgggtgggaatcaacttttgacattacttgtcttaatttcagcttagaatgacattttctttgttgagttgtcaatttctcaatagttctatgctatggtatatcttcctttttttttttctaaaacaaacccagaagtcatttcactccaagaaacttgtagaagagagttgtaatgttttctacccaaaaaataataaataaataaatctgatgaacagaaaaatgatagagatgcttatcaaactttcagaagcaagctaaccactttaggctagttcaggtggccataggtgggtgtgtatgtgtgttggaggtcctggattgagtcccacgtaaaacatggttgtaatatataaacgcttaaattaaaaaaaaaaaataaaaaaaaaaaaaaaaaaaaaactttaagaaccaagaaaaaaaaaaaaaaaaaaaaactttagaaccaagctaccctcaaatgtagtagcaaatgaaaaattagggatgaattagtgaaaagagtgataattactacaaaacataaatggtttccagtcatatagacactcactctcctttatgacattttcaattagtaaattttaaaattttacctaacctacctaaattttaaccactgtccttttcaaaaatttcagaggaaaagatattatgattgcagagattatcataagtactaattaaagacattttgatattaggaattgagtttgacagaacagggtgtatagtgtatactgtataagagagaaaaaaagaatgggaaatgtggtggtccaatctaataatggaaactgtccaaaatttcacatgtgcaagctggtatggcaattggcaatatggaagtagatagtttggatttggaatgggtcaagttagtgaatctgtttgagaaagaactcataagagtttgggaaataataaatatttgcattgattgtaataagatggtccttaaattatgagaaatgctctaatcaacttggtgcttaacactctcttatgtatcaatatcgttattggttaaactaagtatcagatttcatatagttatgtgtaataatttttaggaagtattgctagctaattgtaaggtgacatatctagaaatattaaaaactattggtgcttaataacaatgtttttttaaataatagagtaataatcttttttttatgaatatattagttaataaattattatttcaaaaattatattataatttttttgacaataggataaaattacctttatgattatatcaatgattcttcttttttgtagtgaccactttcataatttttctactctatctctcaaaatgtatgattaattatttttttttctatattttgcctcaaatttttatattacatcatacattaattactttaaaatacatcaccgaaacatcactttttgtaaatttttaaatatattttatttatttcaaatatgtaatattaatatatacatatttctacacataaaaaaaagttagctatgaataatattctataaatatattgcatgaataagaaatttaagaaaactttaaataagcagtttaaagtgtctaatgtagtgtattttttgtttgattatttaaatattttaaaccatctctattttacgttatcaatcgtgagggctctaaaacttggtttatacaccagtataaaattagcaataattatttatattatgaacttgtatacttgattatagaatgtaaaacaataatcaatatcgctataacatagtaagtagagaactgttaaaggttcttaaacacaactttaagtagacattattattgatacaatttagtatcaaattatttactttgttaattaaagtaaaagatgtgaaattcattacttaattacatcatcatatattctagtgttagataggccatagcaatgttcaaaacactatggtgctcaatagtcataccatgttcatgaatgtagctaatgccatttaatatcaaattttatataaagttaatttaaatataaataaactgaagattttaatattaaattaaacctaataacaataaatacatataaaattataaaactgatgtagcatattataaatataaagtatatatcaatattaataattttaattaagtattgctataaaacaccttacacctatgtcaaattattattaataaagtaattaaatagcaatatgtgacttgatattaaataatcttaataataatcactatagtctctaaatagcaataagtagttaatttttttaaaaatattattagatcacctccaattgtggaaaaaaaagagagagaagaaaagtgggccgtcactataaaacaaccaatcaaaatgttgattttttttgtttttgttctttttttttttttttgaacaagaggcaacatgttggatataatgatggaaatgttgctcttgtattttttttttttttttttttttttttttaca

SEQ ID NO: 218242 - DNA, 2371 bp, Cannabis indica
aaaataaaaaaaaaaaaagtttaatattttctctcaaaatatagaatgggggagtgtaagaaacataaacctaacaaataggctgaaatggaaaagaagaaggcccatattgagatatgagaatgggggctatacttaatttaagctaaatataggatctgtctgcaaaataagtactataaaaacatatctagggttttagtcgtaacccttcagtctggtgtgctagttcagctctaccttcgccgcacgagaagctcaggtttccttccatttctctcttctctgtctctgcttcatatgtgtttttctctaagataacgaaaatggaaatgaacttctttctgttcattctcctacattttgtgatgatacacactgtgttttagcaacatttcttgtactctcgttagtttgtgttagttcatattagatctggattcatgggttttcattagattgttttatatgtttgaggataagaaaataatgggttttgattcttttgttgcatttctgttttagcacttaaaatttagagcttttttgtttaacttttaatttgattatattcttatgaaactatatttgttattgccagtaggaagaagagaatgtctcacaggaagtttgagcaccctagacatggttctcttggatttcttccaaggaagagagctgcccgtcacagaggaaagggtaagttatttcttgtgtattttagtatttacttttgattttttttattatatatacataaatgattgaatagatttagtttgttcaaatgtttaaattctcattttcaatttatgtatgataaatttagattagttctattgataaatagttcatttaaacgttgttctggattgtatactattacattgtttcattgggtttttagaatctaatagccttttgttatattttgtatttgtgcagtgaaggctttccccaaggatgacccagctaagccctgcaagttgactgcctttttgggatacaaggctggcatgacccacattgttagggaggtggagaagcctggatcaagtaattgactttcaaatgatttaattttttcttaaaacttgtttcatttgtctttttgtcttatgattttttgttttaatttggttagagcttcacaaaaaggagacatgtgaagctgtgactattgttgagacacccccaatggttattgttggtgttgttggttacgtgaagactccacgtggtcttcgtaccctgaacaccgtctgggctcagcatctgagcgaggaggtgaagaggaggttctacaagaactggtgcaagtccaagaagaaggccttcaccaagtactccaagcaatacgaaaacgaagaaggaaagaaaagcattcaagctcagcttgagaagatgaagaagtatgctactatcattcgagttttggctcacactcaggtactttcacaatctctgttattgtgctgttgtgattttacttttttcattttgaatctctggtgatgtatctgttttgctgtgtatattcagatcaggaaaatgaagggtttgaagcagaagaaggctcaccttatggagattcaggtcaatggtggttccattgcccagaaggtggactttgcttatggtttcttcgagaagcaagtccctattgatgctgtcttccagaaggatgagatggttgacatcattggtgtgaccaagggtaagggttacgaaggtgttgttaccaggtggggagttacccgtcttcctcgtaagactcacaggggtcttaggaaggttgcttgtattggtgcctggcatccagccagagtgtccttcacagttgctagggctggacagaatggataccatcaccgtaccgagatgaacaagaagatctacaagctcggcaaggttggacaggagtcccacactgcttccactgagtttgacaggttggtaaaatgactgattatttatagtttgaacaagggattgaattggctttctatttcgtcgttagacaattctaacttaattttttatattttaggaccgagaaggacatcactcccatcggtgggttccctcattatggtgtggtgaaggatgactatctgatgatcaagggaggatgtgttggacccaagaagagggttgtcaccctccgtcagtcacttctcaagcagacctcccgtgttgccatggaggagatcaagctcaagtttatcgactcctcttcgaagtttggacatggacgtttccagacaacacaggagaagcagaagtactatggaaggatcaaggcataattttgctaattatgaatgaattttgggctatcaaagtaaaactaggaaagtttcagttttta

SEQ ID NO: 218243 - DNA, 5768 bp, Cannabis indica
tacatacattaaaatatttttattatgctaataaaattatatacatatcataataaaaaataaatatcatctaagaataataatataccatacaacaaaataaaaatataccgtacaacaaaatctatatatcaacaacccaaaacaactcataaaaaattaaaagaattgacataaatttaaaataaaaaagattttaacaaaactaatatagatttaccataatatttaaataatttgcttctaattccaaaaaaaaaaaaaattaaatgattttgaaataaggacatttactaacatgatattatgatttagggtcatttgctatatttttttgaattgaggatataaactaacatagttgggccatttactatcatttctacaaaaaaaaaaaaaaatactcctcaagtgatcaaattgtcgtttgattgtattatcgttcgagtaggattaaatagtaaataccaaatagtataacgttgtatttgggtccaaacattcttgtcctttctgcccaagaccaatttttctcttcttagtttttgcctttaccactttcctgttaacattttctcgagaaacaaacaccacataaaaaattttcctttttatctggaggtgttaatacatacgaacatttctctaatatatataatatatgtaatatataacaattccaaaactttccttcctcaacacatattccttctcatctcaccatattagaattatatccctttctccttcttcgaggcaatttattgacccagatccatttttagttcaaacccagaattctctctccagttttccatgactgcgccttcactaaaagcagttaccctaacccacgtccggtaccagagaggtgatcagctgggtcactttctggcatggatttcactagtaccagtcttcataagcctcggcggattcgtctctcattatatcttccgccgtgagcttcaaggtatgttcttcgctctgggcctcttgatttcccaattcataaacgagctcatcaagaaatcggtccagcaagatcggcccgagacctgtgttatactcgaaatgtgcgactcccacggctggccttcgagccattcccaatacatgttcttctttgcaatgtatttcactctcttaacctataaagcaaccggggtttgggagactaagaagagggtgtttgtgaattttctcaactggtcaatggcacttcttactatgtattccagggtctatttggggtaccatacagtggctcaggtctttgctggtgctgctcttgggatcataattggggctagttggtattggattgtcaattatgtgctttacgtatatttcccagccattgaagagagctcattggggcgtttcttttatatcaaggacacttctcatatacccaatgttttgaagtttgagtatgacaatgccagagctgcaagggcggcttctaaagacgattgaattgatcaaaagcgcatctgggtaagtgggatttcttttgattcttatttctgaattgatgtgtttgaagaccatacctttgttatactaactaattacattttcacctggaatttggctctttaacatgtttaactgatatatacaagaatagaggagttttaaaatttagtacttgtttagttgttttataattcccataccaatatttgtctaaaactttgaggtctgccttatggctggtgtaccttggtgaatcattaaaaaatgtgacccaacattttagatttgtggtatgatcttctttctacatgcgttgtgctaatgagattagtaaaatgacgggattagctttgcttgcctaacctaattagggaatagctaaccaagccactttagctagtctagtggtgaggtttgagggttggggtgggataagttaggatctttgagttttttttttttatttgaagcgtgttttatatacatagttgcacaacttgaacttgagattcgatcgcagaactccccacacacccacccaccttaactagcctcaaagtggtttaggatcctgagtttaaaatttattatttttgcatttttatttagtactatgagtgtttccgtacctgtctagtttttctaataaagaaatggttactagtcttttaaaaagttgacaggggataggtaaataaagagcattactattaggcaccagtagtgcctagcaccttctcgacatgtcgcgttgcgattggctagtgatactctttaaaagttattatattaaattatatgggacccgatacttagttggaccaatattaacacataagaggtgctaagcactactggtgccctttagcatttctcgtaaaaaaaacatatgttaagcaacttggccaagtgtcaaacatttacatgtattaatttactattttttgacacaattggttccatttaactaagtttctataaaataagtatacattttgacttatttttaccgttagataactattatatgaagatttttttttgagtgaaaaagtatttttcaaagtgtttggatatcataaaaaaaaatttagaagtaaattaagaatcatgtaaattatttttatgagaagctacaaatcttagctacttccaaaagtaccatttgatgagtaaattagatgagatcatgtgtagttttttattttttggataaagatgtgaagttttgttttcaaaactattctaaaagaaaagttttgaattttagacaaaggtaatgtaaatgaaccagtgaagctattagaagaatagtgaatctgatatagcataatatgtattgtttgtcaccaatagatatggagctgtcagctcctcctcctccgcctccatcttctatgcacccttttacggctgtttggtatagtaatatcaaaaaaatattgctttttcattaaagttaggccttttttttaagcccagaaaaatagtattaaatccatctaaatgtgtggggtttagatgttcttgctttataaatatgcagaaatcacgtccacatatgagcattttcttgtgtaaccaaatatggttatgggatatagctatcagtctaatagattctcatacaaaattaaaagctgttttacatgatttcggtcttttatttttatattgttggctgtaatcaattttctcaataatctgaaaatttctcttcttgattccctttttaatattttcagtcattccaaatttggtagtcagcaatagtcactattcttcattgctcttttgtattccaggtgaattgcttcagatatgctggtcctggtcctggtcctgcttttattggaggctgttatggtctgtcattgtacggtgataagggaatgttatgagcttggactgagaagaaacttctatttttcccccagttcttttgttcttctttctttactttacacaagaacacaagtcatgttcttacacataagaaaataaaaataaaaaaggagacttggtagctcacttatctaattgaatacaaactaaactagtgaagatggtcacatattttgaaggaattaactgcactttagcttggtgtgttcaaatttacactttgtatatcagtttatcatcaattaactacattacaaataagaacattgctaagtatcacttagagtttattgtttttcgattggttagcgatattttttaaaagttatcatatcaaattatataagacttgatatttaattagaccaataatgagatgacacattgaaaagtactaagcactattgttgctttttaagatatttctacaaattattagtaaataacaaatattgacaatagataatgttgttggacaaaaatagacaacatttaaaaaaagtgagtattcaatttatacaagaacactaataagtaaaactgagtattcacttagattggtgaatactcaaagaaaaacagtgattaataaaatgtacacaaaaaatacatcaaagatagattgtaattagttttatttaactagagttcggtctgcttagtctaccttagaagatagattgtaattagttttatttaagttggatcactccattatatagaaaataagtgatccttcaatttacataattggtcagacaagatcattatatcatttattatacttaattgggataaaatacgtatataaaataaatgacaacaacttcgaccgttcatatttaatattcaaacaagtgcaattattgaagttgcacattggtcgatcatattccgagtaacacatgaactcacaagttcgttggagttactcgcatattgggtcttcagaccattcgggaacgcataaaccactcgggcttttatagatgtgcaaacctagtattttatggaatagaaagcctgcgactataccgatcgcgtattgggtatttatgtaatgactgttagttttgtggtattaaatcaggtacgcgaagaaagtatttatttagattatcattgtaccacaatcaaagatctctatatgtacatatattaaatctaaaattaaaagatgaaaggaaatatttacctcttgaagcgaatcagggtatcctcgaattttttcgtaagttgtatcctagaaatagtgacgtcaaactcacaccttgatcttccaccacacacaaaaattagtgtgggcaaataggatatagctatataatgtgttcttgagtttatctcaacatatgagcattaattttttttttctctaagtgaataatgatgtgattaaactttttagggtttttaaattatacgtatatagagatttaggatgataccgtatattaatttaaactaataaaataataataaagtgttaactaaaagaaatatttattatttcaaatattaaaagaataatatttaaatatttagataaatatatgtaaccaattctgttatagataattattttgaatttaaatatttagtttaaactaaatatctaataatgatgaggaaatctctcaactacttaagataatatctcaatcaccataaatatctgtaatcacttattaaattcaaatctatataaatatttatcttttattaattaatccaaaaataaatctaatgggacccatcttatcttctaagcgcctattaatgtgtcctaacataatgactgatgtcgccattgtcttaaccagataatggtgatgtgtttgtctggacaacactttgtctttttcctaatttatttaaataataatttttaaaaaatatttattacaaaataaataattactaatttggcaatttaaaatagatttttccaaacatcattatatagctttatccatcttttgatagtgttgtaaggtagtgatccggggaccatggacttataatactaagctctaataaatgagattatttattaaatctcatcaactaaataatattaattattaattccatgattactccactataaatatgaaattgaactcatagtaattatagaatcatcatatttaatgagtttattgtaatgttcatcgatataatcaattctaataattagccctccttgtgtcggttcgtaattagttttggtcaaattaccaatttacccttctatttacttctttatcctttagtagtgttcatccactagtgaaagtataatttaaatccaatctaaatttgtgcacaacttttcatgtaaagcccgcttagttaatttggaaattagcagttgttta

SEQ ID NO: 218244 - DNA, 6288 bp, Cannabis indica
aaaaagaaaagttaaatacttcattttcaaggtttttgagctagttaaaatgaaagtatttttgtcccacattctttatacatttattaatttgtggtctttatattacaaatcaacctaatttgataattaggtaaatgttgtctttactataattaaatttattttttccctccatgttaattgcctaaacatcctcccattcttctttataagctaacttttttttttttctccaaattgagagagtgagagaagaaaaatgaagcacttttctttggctattcttttggtaattttgatccaccaacacaattttgtagaagcaacaaaaaatggtttcatcagaacttgggggcaccattttatgctgaatggtaatccatactatgcaaatggattcaatgcctactggttaatgtatgtagcttctgacccatctcagaggttcaaagtttcatctgcttttcaagaagcttctagccatggcctcactgtagcaagaacttgggctttcagtgatggaggttatagacctcttcagtatgctcctggctcatatgatgaccaaacttttaaggttagtatcctatagatctacccttttatgattttgtctttaatttttaacaatgataatgttgtctaatctttcctttaattgggtcctgaaggggcttgattttgttgtagctgaggctagaaaacatgggattaagcttatactgagtttggttaacaattatgagagctttggtgggaaaaagcagtacgtgaattgggctagaaatcaagggcagtatttgacatctgatgatgatttttttaggaaccctattgtcaaaggctactacaagaatcatgtatctgtaagttcaaatttaaaaaattgagtcttgattattaaattgggtcaattttttgtttgtgctgtaattctgattatatatatgtatatatatttatatatatcttttgtagactgttcttaacagatacaacagtttcactgggcttcactacaaaaatgacccaacaatcatggcttgggagcttatgaatgagcccagatgcacttctgatccttcaggaaggactattcaggtttggaaacttctcatgaattttaaagattgaaattttaaattcagctactactattgattaggtttaataaaattgtacaatgctaaatacttttttattgattctaggcatggataacagaaatggctgctcatgttaagtccatagacagaaatcacttgcttgaaattggttcagaaggattttatggacaatcatctcctcatagaaggagtctcaatcctggtttaaatattgggacagatttcattgcaaacaacagaatccctcatattgattttgctactgttcattcttatcctgaccaatggtaattttcaactatttaccatactttcaaactgcatgaaaagtactacaatttgatatggaaaacatctagtttatacttgattgtgttaatctgaattgggttcaaatcaatggctaatcttgataagcaattatcaattagtactaagatgatatctgactggacttgtccatttttctcttgtttacattattaggttaacaggagcaaatgatcaaaaccagctttctttcttgaaccaatggctagattcacacatccaagattcacaaaacattcttcgaaagccattacttctaaccgaatttgggaaatcttcgaaagattctggctacaacacataccagagagaccagctcttcaacacagtgtacaacaaggtatactcatcagctaaaagaggaggagttgcagctggggcaatgttttggcaacttttaaccgacgggatggactcttttcgcgacggttatgagataattctgagccaaagttcctcaactgcaaatataattactcaacagtctcacaagcttgatcaggttagaaaaatctttgtaaggatgagaaatgttgagaggtggaagagggcaaaagcagctagaagagcccaatggttaagccgaaacagaggaaaacgcataggaaactaaagaaaaataaggactttgactaaaaattatagaatgaacaatgccttaaaaaaatacttatttatatacttgtttgagcttaattagtttgtttagtgttttgcttgaaattgtttctcttagagatgaatgtgttattcgtccaggagggtagtgagtattgttttttgtttcttcgttatatgtcccaagttgctattttttaatcaacaagagtgactaaagtttgtgtcattttgtttcaagttgttgtaaccaattaaagaacaaatgtcatttggtgtttaaggttttttttgttctttgatgtttttttgttgtttcctgagtttaaaataaatttgtgaagttttgttattaggtactaatactatggtgtctaatactagatcttaagggccctttggtactcagaaatggattaaaaaagattggattggaacagattagataggattatgctaaatttagtactgtgtttggtaatgaataaaaaaagcactaagaagaagttatgtacactacattagttgagtttctaaaaagagtggtccatgtgttgttatctttcttaatctcacttttttttgttaagactatttatctcataccaacaagattaattttggtcaaatgaattatttatctgatcaaacattatcaccaagcatgagattgtgattatttatcctaatcctaattccaattctactagccaaaccggtcctcgaaagaagttgtatgttgttattggtgcaattgagtaacgggtatacatcataacattatctttagcattttaactaaagctaaacacttctaaaatttttaatttcttctaaaatattaaattaaaagaaagacaactaattttacataaaattgaatgtttaaaaggatggccataaaggaagttataagtggtaccataaccatagtaataatagtacctacctacctatctaataatactaattcctctctattctaccacttttaagagaaataaaagatgttgattattgtcctcctcatttaataaatttaattctaataaatatttggttcgcttttggatgatttgtacttattttttgtcgcaacattgtttatttagctttaaaaaaaaccaatttaataatccaataaattgaataatttgaaatgatatgatatttaatttatacttaacaaaaatataggaattattatgtcaatatatgtatataatatataggataatacgaacttgacaagacgacccgctctctctctatttatttatcttgtgtgtcgaaggtttaacagcgtttcttcgtaagtatgaacagaagggctggatacatgattgtaaagtagcaaacagagtccctagaatttcgcacatatttgttgatgatagttacttgtattgtaaagtaactaagggtgaagctcgtcgaattcaagaagtacttggaaagtttgaacttgcttcaaggtgaattgttctaaattatctatcttttacaacttcaatactgaagttagtttgaaacataaattggggcaatttcttggaatgtcgtcagctactgataatagtttctatttgggtctttctagcactatgagccacaataagacaatcatcttgggttacttaaaagaaagagcgcagaagcgtctccaagggtgggaatctaaatttttgtctcgagcaggtaaagaaattctaatcaaaatcgtggcccaatccttaacaagttatgctatgagtatctttctcttgccttttgaaattacacgagacattaagaagcttatgggcaagttttagtgacaatcatcgaatagctcgacttcggaatccattggatgtcaatacatatatatatataatatatatataggataatatgaactatatttttatcaacttatatgggaattattagtaaaactatggcttaaatctaactttgtacatttttgttaattccccttttaagctaaagttcacaagttagcgaatggccagaaagtattcgatgaaatgccacaaagagatgataataatattaacataatttttggctatatccatgaatcaataacaaccctcttatacatcatttgatccattgcctataagaatcatagatagagtttgggatgaacattattataaagagctgcatttcgtataacaattgaatacaagtaaatttttacaattcaagaataattggtacacaacagttagttggagcttacaattttatgtgaatttgtatattttgtacagttcattattcatccctaaaccagtactgaaacacgtagaaaacaaatcccaagcatgatccagcagctacaagtaggacaattatttgaacccataaagaggattcaaaggcctgcagcaagaaagcattccatgaccaataccaaaaaacagagaatattgaacctataattgcaccaacaaccacttggctgagagtatgaagccgttgcgagactcgtaaccatgtctgtacacatagatcatcattagccacagatcaaaatggcttctgtttcagaagcaatacgtttatggaaatgaaattgaaagagctatctgtttttcaacaaaatagtatcaaaaggatcatcatacttacaagatatgaaccaaaaatcaagataaatccactgattgcaagtgtaatatcattaatacctagccattccacaactgccaaacatggaagaaaataataacatcaccatatgattaagataaagctaaaggtagctgtaaacaagctaatgtaagggaattacttgagaaattggcaaacatgaagttaaagaaaatggattgagcatgtgaggagggcattccagggtctgatttcactgcagaagcaggtctttcttggtttagtattcgttttaatgcaacagatagcaaagcatttataatagatcccatggcaaaccaaacggcttctgcatcatgcctcccaagaagcacagcagcaaaaatcccagatacaatccacttactctgtccaaaaaagctaatcagctaaaagtttctatgttcatatacacattattatttcacaaagagatattgctattctgatgagagcccaagtccaatctcaactttcattactaattaatctacacactaagacaaccagacaacataaaattgttaaatttgcaaaataaccaggttgaatttacactgtccaatattaatgctctcacaatgtaaatttatggtcacaaaacgatctcacagtgtaattttgggcttctccaccaactaaatttgtagaatttaaggcacaataaaagcaagagaaacaacaccacaaatctgtttagccatatttttcatttaagataatgaaaatcaaaatataagtatgcttaatctatcagataaataaaaaataagtggaacccagaactctaataaccaataaataaataaagctatgattgagaaactaatcaatgaacaaaatcactaaccagtcgattaagggttgactcaagcccattactcaacaacccagaagaccctccaactaaagcttcttgttcaatcgttttaacaccttcttcaccattaccgttcctaaaagcagaagctttcatcaattcaaacatggtgttgggacccaagtaagtgagtttcctccgacactgagagaggcctttggagagaagaaaagaagttgaaagattcgattttgatgtggggaaaagggcaagtgagggagaaaccgtgatgggtttggaagaaaagcggggaaagaagtttagaccaagggtggtcggtcctgacatcttcggtccacttgagatgggagaaagtgtcatattatacaacatcattagccttagccaataccactaatcactaatgctttttttttggattaaaaaaaaaaagaaaagaaaagaaggaataaacattttcttggcttttgtaagattaagattttcaaacttttgtctttttctaataacaactctaactataaatactataattatattagtttaacacaaaaataatagagtagttttagaattatattatttttcgactctaaccatcaacactaaaaattaccaaaaaaaacaatttcttaattaaaatataatatttttgtacgtactattatattattaaacatagcaaaatatatatatattttttct

SEQ ID NO: 218245 - DNA, 6719 bp, Cannabis indica
atgtaaatttcccaaaaatatttgcatagatagtgctataaggataaaatttaagagtgtatatgcgtaattttaaaattaatttttgaatgtttaatgttcccatatttggttccaaccaatttaaattagttaaaatagactatcatactgtaaatatatatatgtgtgactcatgagtacaataataaattatctacaaaaaatgaataaaatgcaacacgaagggatacatttgtactatagtttgagaaattgtctttttttttaataaaaaaataattaagagtaaaatgcgtcttaatttaaaggataagaatattgtttaattactaaaaaaaatgcaaacaagtaaaaaaatgtggagatgacacaaaaaaacattggaagatgatgactatttacattagggaggtaagttgatatttggtctttttcctaaattcccaataaataattaatattaataaataagtgaaaaggaacaaaagaaaaacatggaattattctttgcttgttggtgttacgttcaataaataaattgaagctaactcttggtgtccaagcaaatagaactctattttttttttcattttataaactaaaaaacgagccaacttttgatgactatcttccaggttccaaaaaaacaatttgtagttcacttttaagaagttataagttttggaaactttacataatacatttttttttctacaaaattccttttgtactatttgaattttagtgatttgccatctagtaaatttcgttggcttgaccttatttcccaagaatattaggattagcatcttcctttttttagtgatgaatctaccaatcgtaatactcatgctcatatggaaactaatcttcagtctcacaaataccaatgcaggactttttttcattgatttcccatttgatgcctaaaattctttttggctttgttgcatgtcatggctttagtataggaaatcatttgtaattacccagcagcaaggcactccaaaaaaaaaaaaaaattgggaatgtgatccaataagaagaaaactctctaattttttatcacgattgatacgaatacaagttcaattaatctttaggaagttttcccagaaaatatctcaaataacaaagtacatgccattgaatgaataaaaaaaataatcaaaactaggaatgaacgagaaataataattaatgataaaaatttctgcagaggtaaaggaaaatttgtttgagtaacatctaattaaatttaaacctaattaaccatcattagttggtaagcagggttggtattggtgacgatacacgagaaattattatcctggctcgttgtctcattaaaatctcgggcaatcgctcctctgtttagtttgaaaggatcgctaaatttaaacgagaaagtcaaaaacactttcctcggcgatattattgaagccgttttactcctcgtcatcaccacccgataaacggcaacattagcgctgtcgttttggatttgatcacatttattattttttttattattatgatcagatgcagatgtcgttgtcgttttctcatagaggtccttaagaggaacgtaaacttccccaataatcttgtccagacaaaatggtcgtttgcttcggatttgaatcatgacgatcgccgagttttttagaagcttcgattctttctcgtaaaatttcatcggaaccggcgaattccacctgtactggttcttggtttcaaagttacctgtttgggttttttgggtagaaatggaggtggtgtttacgagtgaaacgacggcgtaaaactccgtcttcatcaacgttgacaataacccgttgcttggtttgagaccttccagggatgtaatcgcaaggtccaagcaacggtaatccatgattataattaaggttaattactaaaagaaaaattattatatgaagaggtttattaattgtgggggtttcatttatagtgatgggagacttgaagaataaagattcttaatttagattttctcataaataaaagtaaaaagacttgtaatccactgaataattataaagtaataaattagtattattatacttaataatctaattatagaaattgctttgcttgcatttttctaaactgagtgtcatgtacgttgactcctaatttaattaattggttaatcatttgatttgaccaaaaatttactatttattcaacaaatttcgtttcactctttcaagtttcaagaactcaaaatgaaaatgtattctttcaattaatttatcaaaaattatttcagtaaaagattggtcaaattatatcatcatcaaacaactaatatatgacatatttaaataacagttaagattaccaatcattcatttcaatatctattggtaatcatagatataacatgaaattatatgagaagtgttcacgctaaaaataatgacaataatttcatttgataatgataatgtaatataaaagcagtactaaagagttacgaacacaaaacttttatagtattcggccccttttcaacaatacaatgacttgtgtctcctagtagttttattatgaccttgtactcgagatcaaaagaacgagactgatctaatgagtttctcaagcataagattgaaaactaataacaaagctagcacgagagtatttattatatatgataagaatcgatacttaattaaactacttttattaaactagctgtttactacaaaattttaatttatatcacaatgataatcaattagtacatcgacttaaattatgaatttatatttatgctattagtttctttgattcactcgtaaaaatttgcattcatgacctaaatcacctatacccttatatatataaaaattagggttgcattatatctttccctttctatttctctagctaaaccagcaccacaccagtccaacaatttcgaccttgccctctccatccagatcccttcgacttcgaccttgtccttttcatctaacaattcgaatcccaagcagccttctccgtccaacaaagccccaaatcccaagcaaccctctccgtccaacgattcgaatccaaagcagcctttttcgcccgatgaagccttgaatcctaggcaaccctctccatccaatgagcaagtcccatgtagccttctctgtctaacgaatccccgaatcgcacgtggacaagaccatgcgtatccttctctagccatccaacagagtactgaatcaacatttcaagtgacaatgttgggagttcacagaggtgacgacaacagctagagtcaaccggagctcgctggctagggttgaccgagagcaatagattttttttctttttcgtgtccaagtgagaatgagagtgagagttagagtgagaatgaaagaagaaatataagagagcttggactatgattgggtttcgtggtggtggtggtggttgtggttggtgggttcctattctagggtttgaaggagagggagagagagatgtagagagttctaaatgtttgaacaaaatgatttttttggggtttatatatttaacatggtaccctcgacggttttaaacacctgggataccattttaactcatttttgaattttaaattgtgattattttgcacagttggggattctaaatgacttttaaaattgtcaagaatagtggagtatttctgatgattttaaatagtcacgtaactttattggagattgttagatccttttttttaccaaaatatgtggcatgcatatgaagtctcgcatggcagagaggggcccattcatagacagatcaatattccttgtggatttactccactcccagactctacgagtgaagagacacccagaagtggacctcccattgtcaaggaaaataatagagtaagttttcagttgtccgggaggttccaagccctgagattacaggtactctaggagatcatcatcgtgagtctaacacagattccaaagaacattactattgtacaagaccataacggtgcatgattagcatcattgcaaattcgtactgattctgacgacccattcacttaggcagagaaatagtgacagctatgcactatcacatacctcgcatatgggatcaatcttatctcaccaaactcctaccatggaggctaagtagtatctagagactaatagttcacgcacccttttaccttctattgccctttatttttcctataaatacctagatacacaatacgaaaggggacttttagactcacacacaaaaagtgaactctgatatatatatatataacttgaatattctctaaccaagagaacattccaatcacaaataaaagtgactcgtgtactacttttcattaacactagaaccacgtaaaaatcctatcttcatttttctaaattgtccttattgacatttacttagtggttgctaaaaatctcgttcaatattttggtgctttcattgagagttgtagaaggctttcaaaaagaaatacaaaccaacgtctagatggtggtaacaaggaacaatcaaaagtgcgagttttggatatctcaggtgtcctttcttagatacattgtcagtaaagagggaattaaagtgaattcgggaagatagaatccttcagggattggccgagactgaaaacagttacagaggttagaagtttcttgggtctgactggttattaccatcggtttgtagaggggttttctcagatttcaacacccttaaccgagcttactaaatagaatcagtgatttgtgtgggcagacaagtgtgaagcaagctttctggagctgaaacagagattaatcacagctccagtgttagccctaccttttgataaagaaaagtttgtagtttattgtgatgtatccagaaagggtctggggtgtgtattgatgcaggccaattgggtcatcgcttatgcctcctatcagttgaaagaatatgaacagcgatacctgactcatgatctataacttgtcgcaagggtgtttgccttgaagatttggcagcattatctctacggagggaaatgtgaaatttatactgaccataagagcctcatatatttttttactcaaaaagattttaatatgagacagaggcattcgttagagttggttaaggattatggctgtgaaatcctttaccatcctgggaaggccaatgtagtggttgatgccctaattaagaagggtcccaggtaggtaactagtatgattcagatttcacctcagttagcagaggacatggtcagatcaagcatcgagtttgttgtaggcaaacttcataacttgacgctgcaatctgatatattagaacaaattacagctgctcagttagctgatccagaattagtgaatatcagagaagatgttccaagtggtcaagccaaagattttacagtattaggtagtgggatgctgttgtttaaggccaaggtttgtattccaagtagtgaaaaacttagaaacgaaatcctcgaagaagctcatatcactccctatttgttgcatcccggcactaccaagatgtaccaagaccttaaatcctacttctggtggagcgggaagaagaaggatgtggtagaatttgtatctcggtgcctaacatgtcaatagatcaaagttgaacatcaaagaccggcaggtttgttatagcctttgacacttcctgagtggaattgggaggatgtcaccatggactttgtggttggattacctagaaccacgggtttatttgattcaatttgggtcgtggtagatcgattcacaaaatctgcacattttctaccggtaaaagcaacatttacagtggatcagtatgcagatttgtaaattaaggagatagtgaggttgcatggtgtttcaaagtctataatttcggatagagattcgaagtttacctctaagttttggcagaatcttcagcgagtatgggtaccaagctaaaatttagtacaactttccatcctctgactgatggacagttcgaaaggacaattcagatactaaaagacatgttacgagcctgtgttatggatttcaagggctcctggagcaagtatctgccattgatagaattttcatataataacagctaccagagtacaatggggatggctccttatgagttgttgtatggcaggaagtgtagatctcccattcactaggatgaatcaggggaaaggaaatacatgttggaactattttcccaggatctagatttactaacaagtatgtttcattaacatctctttctctccttcttgagcccaattctccttcttgttgattggattcttcatagtcttacacactatgattgagataccacttgatatgtgtgggcactcactctatcactcaaggcttgaaaatatgaagagacgaaagaagagaatgtggtttcggcttaatagaaagaaggcttaggaaaaattatctgaaagtgaaatttcatcaatctttaagtgtgagccatcactatctatttacaggcaaccactaggtttaggttagatttatttggcattaaaatattagaaaaataaatggtaaaatccatgcatagtggcgggccatgggttggataatgggcccaactttacaattttaccattttgtcattttcctatcttattttttcaaaaacgccaattttctaatttaaccacttaaatgcca

SEQ ID NO: 218246 - DNA, 7852 bp, Cannabis indica
taatattatttattatttaatacgaattttatttaatataaaagagaatcaagttagtgacatatttttattatttaaacatcattaatgccttgcagaattttgtttttctatactttgaaatatctagaagactggaaaagaaaatgaaaagagtgaggacctctccagattactatgagaaacaactttggagcgttgtatttgattgagcttgagaattctattatattggttagatttaatatagtgaattctctataaattacacattcttatcaatttagatttgacaatggggtgttttggtctttaaaccataaagattaagttacaagtcatcagttaactcttcatggttttttgccacgtaccccaccatcatactcatcattttttttttctttggattacgtgttaaatgtacaaaattatcatcttcatcatttggccaccacttcttcttcttgttattattcttgataagatacaactttgagattacaagacaagtaagtaattattgaattttattctactccattttcaaccaatctttccttttctgtttttaacttcataccaatatttatgacatgcattttttattttattttttccaagggtaaaaaatcagattgagaaggaaaaaattaaggtcagttacacttgtatttatcatcttttttgttgttggatattttagtatatatatattgtcctatgaatgaacagacaagtttatttagtgatgcaatttttaagttcttagttttgatttgtgatttgccaagtgaaattatagagaaaatcatgttgttggtacctgcagattctctagtacaatttaaatctgtgaataagttttgttattcttgtatttccactctcatcaaccatccaaaatttgtggccaaacaccctatttccttaatatgtttcaaacagcctttcctacatccatgaagaagatagtaagaacaatcatatgttggaactgcacaacaactctcaacataccacatttggatctgaatcatgggacaacatgcatcactgtgatggactcattttgctagtaaataatcgtcttaggactatgatgttatgtaactgatcccatcataggatttggatttgattctaaaagcaataattacacaatgggttctgattcttggagagagatcgacatgtttgatgaaggaatgtgtgatgttatgaatgcttatgtatgcaatggtgcatggtatctatgttgaagtaatcctttgttttgatttgagtaatgaggaattcaattacatttggtcctgcaaaggttactattaccaatttgcaatgtggaatgattcgattgtgttgtgtttgatctcccatgatgagaccatcatttttatcttggaccgctagaaaagcattattatcattttctaccgttatgtaagaatgatgagattttgatggaagttttggaagacgatgggagtgaaaaacacttggtttcttgcaacattggtagtcataagttgagaaatgttgattatgatatgggtgaaatcgggctttatatttcggtttgtttgttgaaaagagtctggtttctagttaggggaatgtgaagtagtttacctctaaactctaaactcatctctagtttggttagacttgtagatcaaaatgttatgttttagtgtttttgtgaaccaagttgttttttatataaacattatcaatgtaattaagttatccattcatggagttttgttttgtcccaactatccttatttaggggatttttggtgtaaaaaaattggagataaattctaactatccttatttaatttagattacttatttatataatttaaatttcaaattgcatagagtaaaatataagcctaataatattgccacttcaaaatatgttctttacttataacgaaattaaaatgaagggcattgatcaagtaattatggtaaaacaaatttcaaccaaaaagaagaaaaaaattagtcttcatattcagtttcttcatcatcatcctcattttgttcagcgtatcgccaaccatcttcaatattatcacgatcttcctccgtttcttcactgtcttcctcgtaaacttcgtctttaaccgaccatggtttcttcactatgttcaccctagccggtggtggagtcgagcccttcctctgcgcaatttttgcaggaggtaacttcacactaggcttgggcctgctttgtttctgggatttgccattatgcatacggtttccaccataggcgtcttggtcacttccttcatcaatctcgtgagcagtgttgattgcggggttttcaacattctcatcagaagtatgcccgggatgctctcttctaagatgtagttttagtttgtattcatgaatgtaagccttatcacacccttcgtaaggacatgcataagggcgatcggaagatgcagagccataaactcctgcgctcggcttgagcgttctagctggcttttctggaggtggagttggggtaaattttgttacatccacagtcccactctgtaaaataacacacatggtaaatatatttcatcctgcttagtagaagatgtatattatcgaaaaatatcagtaaaatggtaacaaccttttcatggtgagatgaaatatggttttttaatttgtattcatgagcatatctctttccacaatcttgatatgggcaaatatgatagttctcttgtgaatgagtcttcatgtgtgatcttaagttgaaatccaacgagaacgcctgcaagtttgacatttgaaatgagtaaaatgctcgaacattccataatctaaacgattacatttcagagttcagacgaacgatgaaaaaacagatcagagaggaaaaattatcaccttaccacagccttcatggggacatacaaaatccctttctccggtatgaataagaaagtgtctctttaactttgaactatccaaaaatttctgcaacaaaacaaaagcatttttccaattacagcatagcaacaaggacattgcccaaaagggttgacatttctctcttgagaagtttaaaatagtgaaaatcctatctcaatccaacagactttcaagctaatttccaaaaagataacgaaatggctttgattaagaacttttctgcacaatttaatacctttccacatccctcgtaatgacagacatattgtctctctccatggatgtgggaatgcttcttcaaagcaccggcatcaataaaggtctttccgcaactttcatagctgcaaagaaaaagtacttctgtagttggttctggttctggttccggtacctctggttcttttgctttctcttccaacgactttaatgtatcctctgagaaagtgagtacaaaacgtacaagcacaatcatagtcttgatcaagaaacacaacacatgaatttgaatacgagataaaatggcgaaaaatgtagcaagcaagagatacctgttacccatttatagagaaagcatttcccaccagtggccacaacatcttggggaaccctaaaaagaagacacactagttagctaaagtcacaaaaggagcacaatatccatctacatattaaggttcccaaatcactacattacttggccacttcaaatttaatattttgaagcttagctaaccctacaatatttaagaaacataaaactatagaatcttctatttaagtacttagggagtgactaaaaaggcacgcaccagaggtgcctaacaccaccttaaatatttattggtccaattcaatatcggatcggatctcacatgttttaatttaataactaataaagaaaattgctaacgcttcacctcaaggtggtgtggttttgggcacagtgtctaatagcaatgttctttccatatgttctttttgtgtgccacttcatatttatcatacatatcaagagttaaatagagtgttttgtaaaaatagactttatgaaagaatttatgagcaaaataactttacaacaaattttattagcaaaacaactatgtggccgcacaagcaaccaaaaaacgactattatagtagttttgttatcatagatttgcactgtgcgaccatcactgtcatggttgcaatagagtaaatcgagtgtggttatttttcaaacattactatttcacattgttagtttagaaaatctccgagttatgactatgatcatacaattttaacacacaactaatatccatgacagtgctctgatacagctacaaggcatagattatcttagtttaacatgttcaaatttcatcctaaagaaacaaaattcgatccccaaaaacaaaaagtttttaacttttaatacattctcaacactcgatttttgtattcgaactaaatcacagaataagaaacaaccaagaatcaattttactaaaaattcaatgaattttctaatttcaatttcaacaatttggaaaagattcggcgacaagcagacagtacatgaaccctagaaaccgaatcaatgaaattggaagccaaaattaaaactttctgcaaaaaaaaaaaacaataataaaagatgaagaatcgaaattcaccattctctgaaccatttaacagcaggagtcttggacctgagaattggtcgcctctcgaaaagattgtgattgaaatgggtctccattatggtttttccctgtagcttaaaataagataatcaaacaaaggctaaagctttggcatcattcagctatgggtttaggattagggttagggttagggttcaacatgtgatgaaatttaaggaagaagaagaagaagagtgttttgtatttcaatggcttttttcttcatagattcatttctgaaccggaatcaaaccggtctggacaaccttagtggggcccactcataaatcataattatgtattttttcacttctttttttaatgtcgttttattcttattgaacatataaacgacatcaacagattttacttctgcccacacacatagaataggggtaagttgaaaaataccccttttattaatcaattaatcaaatttacctctaattttatatttatttgaaacatacctctttttatatgtattgtacccaaaataccctgacataagaaaatcacatggagagtatcttgaagtgacagggcaaaattggtacaatgtttgaaaaaataggtaaaaatgatagactttaaaaaagagggtaaaaataaaagaggacaatataaaaaaggtatagagtgtaattttctccatagaatatggttttcgggttgtttgaatcgggtaggcgccccgacccgtttttatagttttatatatatataaacacaaaatttggcaaaaataattaaaagtttggggtgtaaatttttaagtttgattttcgattattgataaaaatttaagttatatttctgtaatttctacaagaagttaaaaaaaaaaataatagttcttgattggtttatagattattaaatttttatttttatttaaatataccaataaaaaaacgacacgtgaatattgacttagcacttaataatcaggtatgaggtatacacaaaagtttcataccataaaaaataaacttaggtatttatctataactgaaagttaaatttaagtatttaccctacagattaaaaatgtaattttattttaaaaatatttggagaattttatttttaaatttttttttttcaaatttacggtttggattattttggtagtttctatatgagctgttaaatataatatgctaaaaatcctctaatattttttctccaaaaatataaaaataaaaatacaaatcctttgatctatgtccattattttctacttatgttgcaagtaagatgtccataattctagtatttactttacaagatgttgcaaatttattgctccaattttatttataaaaaaaaaaaattaaaaaacattattattatataagttataactaacaatttgagacataattagaatggcattgtatacttttttgtaatggaacaaaaatattaaaacaaaataacgtgtgttaatttgtcaattatacctaaacataaaaaagcgacaaatgaacctcgatgtgaaaggactcctccttttaagagacatgtcttcaaataaaacacacaagtaaaaataaaattattagcataatttcttttttggtaaagaattatattaatattagtataattagttgtcaaataaagtgaaatattacgcattaatggtgcataacacaactcaataaatcatgttattattggtgtaattaagtatcaggtccatgtaatttaatttaataactattatatagagaaatatcaaggacatcttaaaatgtcaaatatcataaaatgtgtcatactgttattgatttattttaatatcagaagtgttaactaattatagagtgtcattttagtatggtgttagataccttacaatacttacaatgttcctattagagaatattaaataccactaatatctttaagtatttctcttacacaaatactctcaagtaaattagctttttagttaagtttaatttaatttataaatataaaacataattaaacaattcatgcatgcatttaccatactaaatttaacatattaattagctaaaacatgattgaaatgaataaattaatttgacaaccaaagtgatcgaaatggtctccctctctctaataatcttctttcactatatttattgttttatttgtttttatgtttttgaagactttacctttttttccatacgtgacaaatgagaataaacaaatctaataataataataataataataataataataataataataataataataataataataataatgtaggctatagctagtaagttcgtgggccataaaattaattaaattaaataattgagcatataattttatataattaattattattgtactttttattcatgggagccaaccattcatggatgtaatatcacttatattttcttatgttgacttggtcaatggagactttattcgagtgttgtctactatatatatacatacataaatttttttatatatataaataaattgtaacaaaaaaaaaggaggagaagatgaataataacccattaataattcattttatttttatttaactacatttttaataaaagtcaacaacattttttttttaaaattaagtcaacaacaattttcatatcttactttcgagtaaaatatataaaacaatagaataaggataatgagaaattaataattaaatatactaatggttttatttgttttccactacataacaaatgaatatatataatcaatgtgtttaaaaataatagtaaataaaatatatgaaaatcatatcttagaaatagaaacccaccacatgtatggaggtttgtacataaattaaaaccaattaggaatagaaaatacccaataatatatctaattgatgaactaattaaaaatgagctcaaagaagagatagattgagaaagaatatattttattattattattattctttagttattcaaaacaatggtttctaatgatctcatggctagtcacctaattttgggaatcctctgtttggattttccacaagtttttcaagttttttcttcttcttctttctctttttttttttttttttaattattatgtcggtcatttaatattgggttggttctatctattagatgtatttcatttgaaggaaatttcatttatacctagtggtttaatttaggtttatctaatattttaga

SEQ ID NO: 218247 - DNA, 9014 bp, Cannabis indica
gaaaatatgaaaaaattggatgtgactaagaatggtaaacatcattctggattccctaatagtgcattcataaggaaaggcgaagtaggagattgggtgaactatttaacacccgaaatggctgagcgtgggaaaaagcttatcaaagaaaagtttgcacaatcaggtttatcgtttgatttctaaatgttttgttttcattgtctaaggaaataatatttatgacttgtttaagtcatttccttttgtccaataagttacttgttgttggtgtatatcttcttatgaaaatatgtcagttgttttcattgtctcaagattgttataatctttgtttgtttccattgtcttaagattgttgtaatttcgtttgctttttcttaagattgtcataatcatcgtttgtttcccttgtcttaataagattgttataatctctatttgtgaagtgagctagctgatgttatgtgtttctattcggacccaacaatttaaaatttaagcgttacaatgtacctttaagagcttgtattaacaaaacttagtagaaattttacattgggcacaatattttagtaaatgaatcacccttaagaactcgaccaatttacggcaatcaaaaataacaatgaaataactaaatcaatttgatcacaaatgacaatcaatattcaaagaactaaaacataatgaatttaactataagaattgataaaatgagaccttttattgatgttgaaaatcagtacatgagagacttgaaacaatagacaattgatgagcagaaattacaatgaagctcacacttgggaaaccaagatcagatacacttggaccccatttacaaccctccttatttcactctctctaattaagttctctgatctcacaacataactagaaatgaatggtacaatgtctatttatagtagggattagttaaagggtgctaattaacaaacccgagtactttctgttaaaatagttagtgacacatcaccataggtaaatataaaatagttgaactaaacaccacaaatccaccttagtttagtcattttaggtttagaaaagatatgatgtgtagcaaaaataaattgagtgagaggcatcaacacttgcagatgttgagtagattcaaacaatgtttgagcttggtcaagttggcactctttctcaacatgttagttgggttttcatatgtgttgattttcttggcttgaacttctcctttagctacaatttatctagtaaagtggatctttatgtctatatgtttagacttttcatgtagcataggattcttaatcaaatggagtgcactttgattatcacagtatatggtaatgttgtttgagtttaaaccaagttctgttgtcagaccttttagccaaagagcttctttaaatgtttcaacagctgccatgtattcttcaattgtggaaagagcaactactttttgtaggtttaattttcagctgactgctccaccaaaaattgtaaacactagaccagttagtgatcttatggtatctatgtttacagcataatcactgtctacatagcctacaacttcttcaactgcttttgattttttattgttgtggattagtctcaggtttagaatacctttaagatatctgagtatccatttgacagttgtccagtgagcatttcctagattagccatgaatccgcttactacacttagagcatgagccaggtctggtctagtgcagaccatggcatacatcaaactccccataattctagtgtaacagacttgctccatgagcttcttttctgcattactgtggggattctgagattcaaaaagcttgaaatgaagagctaggggtgtggatacaacttttgagatatccatgccaaacttttcaagtactttctttaagtagctagcttgtgacattttgatcactccttttggtgttttgatcaatttctatccccaagatcttcttcgcattgctaagatctttcatctcgaattcctcacttagcgtatccttaatcttcttgatctcactccttttctttccaataatatgtcatcaacatatagaaatacaaatgttgattcatgtacacacataaatcatactgacttttagtgaacccaatactagtaataaagttatcaaatctaatatttcattgcctgggtgcctgcttcaatccatacagaaaccttttgagcaagcatacttggtttggattgccattttcatatccttgaggttatttcatgtagatttcttcatccaattctccatgaagaaatgttgtttttacatcaatttggtctacctcaagattgtctttggctactttggttaacatgactctaatagaggtctctttgaaaacaggggaaaagatttcattgaagtcaaccctttccttttgagtaaatccttttgcaacaagcctgtccttgaatcttgctggttcaactcctacgatcccttcttttactttcataggtgataatgttgatctgattggagtcaaattggtaaagacctttgtcaagcttcccaacaagtaaagtcttcaatgtaacctgatccatgacaagacaataaaaatggtgaagctcaaagaaaataccattatcttgggcaaacttagacacactaagaagattttttgttatatttggaacatgcaataaattgttgagtacaagagtttaagaatgacaaggggaaataaagatagaatggccaatgttttgaataagtaaacatgtaccattacccatgtgaacatgctgatcaccattgtagttgttgatcaccattgtaagtgctgctagaggcaagattcagttcagtctgagtaagatgctttgtagcacttgaatcagggtaccaattaagatcattaaccacttctggggtggcatagtaggcctgcatcttaacattggcactggcatttcttggaagattctaaaaaaattcaggccctgaaaatgacctgtcaaaccagtagaaatattggtgcacaatatggccaagcttgtgacacatctggcatggtggtttttggccctaaattatagaaattcatcgacctcatgaggtacctcctctgaaatttccaaattggcctcttgttggtgaaacacctctagaaactagagcaaagtaacatggttgaggtgactactgcataggaaagtttgttgcatttcctcttgacatactgccagagccataggaagatggtgaaaaaaagggaggctattgacttcgacttgtttgattcttggtgtgagcaagattggcttcaacttttgcaatgtcaatttcctttgtaactttgtccaacttcacttcttgtggcattaagaggacctcaatctcagcaacattgtacgcatctattctggtattgacaaaggtaatgaatacattgtattcagctggtaatccatttgagatgtagttgggtgacctatagatgcaagagtactgatgatacttttaatcttgagaagaaaatcactcaacaaagattacatcatagtattgcaaagtagagttttgtattttccgatcttggctcgattgagagaagtgtagtattccgaaagattgatccagatctgagctacagattcaaatccaattattcttgtgagaaccttcttaggcattgatgaaagaagccttgacacaatgatgttatcctgttgctcccaatcctcaatttctagagtcactttattggcacaccgatcttcttctgttagaaattgaggtggagtgagaatgggatcgaaaaatttctacagtcaacttcccttgatggctgcaagtacttgatgcttccatgtcaagtagttgaactcgtcaaatcaaacagagagcgagtgagaaatagaaacaagatttgttttgggaagattagtagtattgcgaggtaagccagtttgttgagaaacatggaggaatcgacgaacctctattgttgatcgctaaagaatgctcctttaaagtgacgatacactctgataccatgttagtatttgtaaactaaagaacaatttgaaagaaatgctctatttttcattgaattaagaaaagggaacacaaggctttatatatagtcaattgagctaaaaaaaactttgcaacaactaaccaaaagttagttaataagaaaggaaaaactaatgatcaataacaacttgtaacagactaacaatgctaaactggagctaaactaggtatccttaacacattatacataatttatgtcaaaatattggaactatcattgtcatatgactaagtatataggtgcataggtgcattgtacatatgagaattgtggtataattcctccaaatgaaacatctccaagagtttcttatcattcctgaaaaattgtggactcgcggaagctggtcttggaaggctttttctttcctctgggaagggtcttcaggaaagctagtcctcctccagaaaggagttttgggtggctagtaattcctcttgaaatgtagttcaggaaagctagtcctccttcagcgagtgccttgatttgtgactctgagagccttcatactcgctcccagatgcactcctacatatgctaacgtggagatcttactcaaggagagttggttaagttaatttttgcctaactaacttaacaacctcgattcatgcagctaccgacattaggatcttgatcataagcctataaataccaccaacacttatcattttgagagatcgatcaggttgagattaagaaatagtgaaagaagagattgagaggtagttgagagaggtgcagagaaaagaaagagattggattgggttttgcaagaagaatcttttgtagatgaagatgattcttgggtaagagtgtgagagttgaaacactttgagaaaactcattagagatgatctcgactgtattgtacttatttttgctcaatcaataaagaggatttggtggtgttttagaacgggagtagagaaatagattacattgatctattggacttgaaccagtatatatcttggtgttgatttctttattttttgccttaattatttttggttttcctttactctgtttatccttatttttttcgattgttgttcgttatttgttaatcttgttattattaattgtttaactatttaaagtttagttaatttaattatgtacctttagttgtatttctcccagaaaaacaaagtagattatcactgtcaaaatattggaattgatacatagtgaaaccattgacaagatatataaaatttatactaccaacacatctcttcataagaaaaaaaaccatatgtttattacttaatattacatcatatataagataatggaaacaaaactaaggagtataagatatattgctagctagctaaaaatcaaacattaaatcatattgtccaaacttttcttgaatgagtgtctttccaggctcagccatttgaggtactatcaaatagttcatccaatctccaaccttaccttttctaaaaattgaactatgacacaattcatacatggcagcatattgtttcactgtcttattcacatccaaaattttaaattatcaaagctacataattgttgtatttcatgtggaactccttgattgtcttcctcactagaaaatgagaatcccaaaaactctgcaatctttttaataaaaaaacacaatgtcttttttaaggtcttcaaaataatatttgattgggcatttctaagctttgttttatcctaaaatatggtcccaaaatggtccaaacacatgaattccactacagaacatatcaaaagtactcttctaaatgacttagctcaacatatattattatctcccaaaattttgtgataaaagtgccaataagagataaatacatccaatggatttatatatatatataaatatatatatatatatatatataattttacaactcgagttcttgatagagtgtggaaaggataagaaatatgtgtactcataattattggctttatgttttggattagagataatgaagactcaaactcaagcaaggggacaagatcatgtggattggaagtaaacaacacaataatgataatttataattagccacaattttttttatctttagtcacaaattttgtaaacaaaggatggttgttgttattttttgtgaattgtttggaataatggaagagtaatggtaagtttgacaatagcaaaaataagagattttaactaagtagtacctgattttgggcaagaggctaacaaaatatcatcatctcttgctacaaattgagtttgaaatgatatcatacctttcaagacgaatatcatgaacccaaaatccttggtaacaataataagggttttgatcacttatttcaccaaattgacaaatagtgttaagagtgctaggcactatgagtgtactttaatatttttcataataaaatgaacacatatccatgtataaattctaaattacttaatattgagacaatagaaaagcatgtataatatttatgagaattgctaaacgataatactggtgcttagcaccttcctcgatgtcatatagttattggtataattaaatattgtgttacatataatttaaaaaaatagcttttaaagaatatcgctagtcaatcgtggagcgcaacttatagaaggtattggacaccactagtactcaataacaatgttcaatatttattcataattaccttaaacaaacatttgaccaataattaagacaataaaacaacaaaacaaagaaagctagatgataggtataatacgtgattttcgagacaggataaatctctaaatacactttttgagagattgtgaatcaaagttctactttctcaatacatatccattaattaaagactattcaattacatatttataatttactactaaaccctagacatcaaaggttaaattatattgtccaaatttgtgttggatgagtttcttcccacgctctgccatttgaggtgtcaaacaatttgcccaatctccaatctcaccttttctaaagaatgaactattagatgctccactaggacgtttcccaattttattaacctccaaatttctcaaatgctcaaaactacaccacttttcaatttcctgtggaactctttgattttcttcttccactgaaaaaggaaatcccaaaaaatctgcaatctttctaatgaagaatatattatcttttttaagatcttcatatttcaaaaataatattttgtgaggtatttctaaacttgctttccaatatcccaaaatatggtcccaaaatggtccaaatacatgaattcctttacagaacatatcgaaatactcttctaaatgacttggttcatgaccaagatcgtcaccaaataatactttatgattaaagtaccaatcagaaacaaataaatccaatggatttctacaaatgtatacaattttagaattagagtagttgatgatagagattggtaatgagggatatggaatgtgggtagccatgagtcttggcttcatgttttcaataattgacatgaatttctcattcatatcgaaaggtataagatcatgtggattggaactagtaaataaatgactatcatttttaatactattacgtttgacaatagcaaaaacaagagattttaaccaagtggtacctgattttggacatgaagctaatacaatatcatcttctcttgctacaaattgagtttggaaagattttatacctttcaagtgaaattcattgacccaaaacccttgataacaatagtaataaatattatcacgtactggatgtttaaccttttcaagctttgccacaatatcatcaactgtctcttctctttccattataaaaatattaggcacacaataatagtatctcaaatattatatctccaccccacgaaaattgtaaaggtgctagaatactagagactagagactaatatatagccactaagcaccttcaattagtgttataagttcgtgccttctgtgttgacccgactcgtattaatttatttgtactttttagaaaacggaccatgtcatgatgtgtcatagaaaaatatgggtcatcctaatatttttaaggaataattacataagatattattttttgtaaaaaaaattacatttttacatttaaataattttttttatatttttacggttttacattagaaacaacaacgaaaataaaacaaaaaaactacaattaaactaacaataatatactaaataacatcaaaacaacaataacaaattaacaagagtacaataataaaaatgtgaaataatccctatttttaaagagtaagcccgacacggcccgtaaatgcagtatttttatgtcgtgttcgaattcgtgtcatactttgcttgtatctacccgtatttcttaaacaagtcagcccgttttcatatccagatttaaattcatgctttattttttcatatttcttatatgtgaatgcattctaatacctttaaatacaaaatttctatttattattatttttgtaacctttcctctttaacgatacatacaataaataaaaatctcaatactgtagaagatttaaattcaaaaaaggagtggtattattgtgttgattttgattttcattatttagctggttaattcatttgtgtggtgtcagattgttctttaattaattatagttattttatgtttgtcgggggatctttttgattttgtttttgtaaaggtctaatgatcacaaataatgcttacgaatttggaatcaattaatattgttattgaaaaatggataaattgacgagggagagctatctgccacagctaaaaattttacttttaattacaataaaatttgtaactgaaagtaaaaaaactgtgactaattataaattattattcctatgttgtgactaaaaagtctgt

SEQ ID NO: 218248 - DNA, 6129 bp, Cannabis indica
gcacaatttagtatatgtcaaaattcaagataaaaaattactaattagcctaattattatataatatttatttttattatcgatcccatggcatattccgaaactagtgccacgtagcataccttgggaaaatgtataaatagaaaaataacgaatattcttcaactatccgtatccgttattgaaaaactaaattgtcaggagaacgtatcaatcttaaacaagtcaatgcccaattcatatttcggccgatcttcatttgctatcatcaaaacgagctcgcttcttttgtttcaggaacattatcttatttcttatgtgtgaagttatgaaacttcatgcaacagtttattggtaagttttacatctgagttatgttactattaccagaaagatatattgccctctttgaggactgatttcttaaagaatttttagttctcttaagttttccaaaaaggtttctcccactgaagaaccatacttaacaaatacagcaggatagccaataggagcatctacactggcttcataaccttgttttgtaaatatttgtctattccatatatgctgccaagaacaggtttctccaattggaaaatatgctttgacactattcttgcctttgtctaaaacaggtaccactagaatctcagtgccaatcaagaattggtggtaagtcaagctatgcacatgttcatcatttgggtagtgaagaaataggtggcgtaccacagggagaccctttgaagatgcttcctgcaacaagagtgggacatgaaaacatttattagctcacactcaaaggtacttgattcttttagtgcccattgaatttgatgatattattacctttacaagttggattctgtagaacttccatgccttgtaaaccttagcaaatcgcgcaaaatgtgataaagtacgatcattcgagtagaattgggtgttgcatgatggtttgtttccctaattgcagaaaaatttagatcagaaacttgttagaatttgagtttcatgattgtcaaacatttaaatttcctatttatcaaaaggtataacatacttcatgtgttcggaaaacagttgtgaaagcatttagctccatccatcgaagtagcaactcttcacttctctgatatttgataaaaggaaagtttacagcacagtaccctccaatatcactgtggttgaaagcaaagccagaaatgccactgctgagaagaccaacaacagaactctttatcccatcattggtttgccagctcaccatctgatccccttcccaaaacagcatgctccattttggactatttctgaaaccagctctcatgaaaaagaccaaggcttcttccgggtcttctttctccttaccaacacgactacttttccattcttctacaaaatctctgtttatctgggcccagagttctggatatctgttatgagcagatattggatcttcccctgaaatgagtaacgattcttagtaccacgtttctctaggaattattgtacaaatcaaggaatataaatttgggttattggaatcaactttgtttaataagctcatagaaattgattccttagaggcttcaacagattagggaatgacctcacaggaagttatgggatcattttaatataacaatttaatagattaaaagttcaacctgaataaagggtgcaatcgaccggtaagccttcaccgaagtcggccatccatcctccaacaccatcatccaccatgtcttgtagaatatgcttgaaccaacttgccgtgtctggatgagtcaaatccaacattccaacatcaaaagctgtattagggaccatgtaaggttcaccatttttgtcttttacaagtatgtccaacttttttgcttcttcaaagaggtttctctttttgtttggcttgtcatgagtctgtgaattcaagtagaagctttgctcaacatcataaactgttgaaaaattccaataacatatagatattgcttaacccagccaacacttcttgaaaatgaaaaaggcccattattagtatcagctttctttctactataagtcatgagtttacccctcgtatatttacgcaacaaagtcttcaaagcaaccagttataaatttaaatttgtggacaagtaataaaataaaaaatcaggatagaagaatgataccggcgctagacaagggttgcagtatgtcatcacttttatgtgcttcgcactaagatcattgagtagttcttgccatccagagtaccttgttgcatccacttcccagttccaccatagttgggatccaatgattgtttccctttgtcccacccaatcctcgagtattagtagtatagggtaagatccattcacatagaaatattaatgttttcaatgtttcttctaaagcatttttaagaaagcaattaaacaaataatttaaaacatatatatgcatttgctggtaggcataaatatataagcagtacagcatatagaaaaatatattcataaacttgatttagtagtttgtattacttgcaaccagaatgctgaaatcggaacatcgtattgtctgagttgatcccaaactcggcgcaccatttctgtgccaccctgcattccgacaacagctccagatattatccactcaggaagctgaggaggtcttccaatggttccagtgaagctttcaatgagctctgaaggagtgttaccatgcaatatccgtccttgtactgaatttccatgtatctgcaaagttaaacattgcaaggttaagatcttggataagcattaagccatcatgtatgtactaatttctaaagaaaaaagccaacccttaccttcttcgaaacttactacatattacaaaatgagatcagtacaaaatacataatgagatcagtacaaagtaatgctattggtcataattcaaaagtgtgtgtgtgtttttaatacatccattggtatcttattactctcctacaaaagtgtaagtaaaaaagtcatctaaacttcttacctgtatctgaactttgtctggttttgtcagatcaaatatagaatattcatatccttcaaggtaaagggacctcatttttgaagtcatatagaatggagaaggagcataagtggttgaccagtctcctcccgccctgcaaatgtcaagaaaacgtattaaaatcaaaatctgatgttttatcagatgggtttatagcattggtttcccttggaacaaatccagccattaaatttgaaaaataaaaaacccacaattaaatgttgttaaaatttgtaataaaatcttaataagtcaagaacaactatgtaaatccgtgcttgtaagaatcaatctttaatgttttacctgtaactgatcaaattagctgcaaaagtaatgggctgatctcctctcccaataccttgttcttgaactaaaattgggacctttttccctttaaaattcatgtgagagaactgctctccgaacccataaaatctctcactgctttcacttgaataggtaaagaaaaccctgttcaactctttgctttctttggcctttatttcctccgtttcttcttgtgatgaagatcctaccatgacaatctttcttggcttgaaaaatgaccagtacaacccaatcttcaattttctaaaatgacccactcttctactaaaacccttgtattttcttttaatacttggagaagaagaagaaggtgttgaatgaaactcaaaatttgcttctccaagcttcacttgaaacccaatttgatcatcacttttctgatcaaacaaaacccaatactttgcacatatagtaggttctttaggatcaaaatccaaattctcacaaatactggtcttctttttcgtgttcatactaaaaagccatcccgaaaccatcaaaactggaaattgggtatctttctcgagctggaatcttgaatacccagatgaaaaattatgatcttgacccgataaacatagaaattcttcaaatcgattgatcacctggatattttgtacggtctggtgattacacaccaagtgaacatcagtatcttttataagaaaagatcccctgctttcttcaacctctgtatccaccattgctgcagagacaaaagctcgacctgggatggtcgaccaaatgggcttcgtgggctgaaaatgatggagaatcgagaaagacccgccattgttggagttccaacggagctgaaaatccttcccgattgagtaaacatgatcagaaggtagagatgaggatgtgaagaataaggtaccgtggatgaaagggagagaaggtaaggaagaagtgaagggattgttcaagtgtttgtggtgccttttggtgattttgaatgtactcggcatcgttggaattctcagagaacgatgatagtatttagtgcatgcaaatgaagaaaaaagagagcaagttattttttaaaaaagtaattattattttcttttaaagaaaatatttcaagaatttaagctttggtttttatagaacgtgattggtcagaagagcaagaaagttgaagattttgctttgacgtttcgtgtagacacatgtttatgttatttcaaccattttcacctttgaccaaaatataaaaaaaaaaagtaattaaaggttgtgtttaattttattttattttttttctaagaaaaattgttttattgtctatttttatacaaggagcaagtagtagattactagattcttatataaaaagaaataaagaaagaccatagcttttgtgtaaattgttcttcatgtcaattcatatatttaatcatcatagtgtttctattttggcacttgatgaaattattatcagtctttcaataataatatacagtctagctattcagtcttaccttgtagttagtgtttaataaatgagtaatttgtgacataaatgtttaagttttatgctgagtagcatataagtacttaagtcgtattttttgcggtaaaaatatattccgtcactagtgtggaacttccgtaagtacctaaccattatgtgataagtcaatgtcaaagtgtcactcgttcattggtccatgtcattaaattttttatttataatttaaatatttaaaaatataaaaaataacacgaatatttccagcgtgttttgtcctcactcactcacttcttgggaaaatttcctaaaggtcacccatcttgaaattacccaggtcaagcacgcttaattgtgtagttctttcatgatggtaccagaaaacaagatgtaccttgttgatataggtggtatcaattaatccatttaagccctcttcaattatatagtctcatacctacataatctcaaaatcaccacacttggccattcctaggcaatgtgggattgcacaacttttggtctttcccctttaaatcacgagactctgactgtaacgtcttcgcttcaagcctctattgggtccttacacccatagaatgatgactcttatacacgagtatgtcactctgactacttcttggaatgacgactgatcctacaaatcaacaagagtgtttctagcgtgctttgtcctcactcgcacacttcctgagaaaatttcccaagaggtcacccatcctaaaattaccctaggtcaagcacgcttaagtgtggagttgtttcgtcatgagctaccaaaaaataagatacaccttgttgatatagttggtaccaatcaatttatgtaagtcctcttcaattgtgtagtctcatacctacactgtaatgaccgcaaattagcactaattattgatatttttatagttatttgtgaatttatttaattgtgggtcccattattaaaagtgggcactagagttataatttttcaatttcggaaattttattaaactctagaggatattatttgagttatatatgaattatgttatttttgcaatttttgctcggcgacgatggaaaatgcaatggatgactatttcaaatcacaatggtaagtctagaatctttttcttaatgggattaagagtggtgaaaaataaaataccgaatttgagcgggattataaattttgaccattttacccctaggcttggattagcattagattaagctcc

SEQ ID NO: 218249 - DNA, 13812 bp, Cannabis indica
aaaactgagcctctctctctccctatctttggccgaacccactctctctttcttcttccttaaatttcgaaatacttagttaaaataatttccaacacaataggcctgtgcttggccgaaagttttttcttccttttgagcggagtcaccttctcttcctcaacctcgtcttcctactcaagatgcttttgaccatacttcttggctcccccacctcccttcaacttagcttcacaattgagttgaatgagttcattctcctgatgagctccctcagcctggttagcactggatttcctcttcttctccatcacaggctggggattgaaatccttcgggtagagcccgtactccacaaagttctctttcgaggttaaccaagtgatattctgagtagcacccgttaactaagcaatcctttgagctctaaccctgagagcaagtgtgaagggtggacggtgatatatagggatctgctggaactgagtgtaggtggtgcccatgccatccaccatgtaatactcgtcaacaaaattccaaattttgctaacggccttgtccctggtgcccgtcaaccacttgaagtctggctgagaaaaataaaagtatcccgacctaccctacttgggagtagacttcaagtcaaaaaactagcttacctcttgaggagaaggcataccccacttttggatggccaaaagaacaaacaaggcagatagaaacttgatgcccttgggagtgaattgggtcagacaaagacagaagaaggttgccaccttcctaaagtacgggtgcaaaggaaataatgccccttgtttggaatgagcacccgaccaggcacacatccccttctttgggttggaggctcggttgttcgaggcaggaacataacattctagctcgcccagatagccgccctggtcgagatccagtaagcgtgcctcagtgaccttggatggaggactcacccacctgacacccaaggtacttagtttcctttgaggaactacaacagtaagctcctcattgacgtagtccactccttcaacgaggacatcgccgtccgcgtcaactggctcccagaccttgttctaccccacaaaatttggaggtgcagcttcctcctcttcctccgcctcgcaacgtctgctagggcggacatcgccctgttcctctatctcctagacttgtggatcctgttcggcgctaggtagggtagcgtgctgggctacgtgagggtaagacgcgttgactttacgcattgtctgtttagtgcgagccatcatcctgtgggtagacgggaagattgagttaagacgtcggtcgcttgaagagggcggactagaataaagacgagggtaatcttcgtgcaatagttgaagcaaatccttgtcaattcggtgttcgcttcaccaaaactcaccagagttcatctacaaaagacaacacgcgagatgagtgtttggtcgggatatcgaaccgtaaatagccaaatatcccgactaggagtactcaaaagattaaagaatagaaatattcgacgaataagtcaaatcttagatgtttaaaatttttaagagttagggcaaaaatttcgcgaagctttgaataagcaaggtgaaagacagacattgtgcagtcaaaaagtaagcattgtgaattgtgcagttgtataaatcattgcaaagaaaaatcgcagagtttatgaacctagggttttctacctatcttccacaacatggttaagatcgcattcagaaattaagtgtacaaaatgaaagtagaagaaattgagaacttacttactgatcgacgtctagattcactctaagcgaagttgcttggatggttcttgtgaaaatttcacggcaaactcgagatgaaaatttctctttttttcctctgaacttgcttaatagagaagttggagaaaataagtttatgaacaatgctcagtcatatttataggtagaaaaacaaaaaaggagtaatcatttcaaaaaccttagatgccttggttccccttaaaagaaaatattggaaatcaaaagtaattaagtgtaaccgtcaaacgtggtgagagaaaatcagatttcgaaacattaattgcgtcagagcatttattagccaaaaaccgacgagacgcctagtcagcctcacatcaaatcgccaacagatgcacctgacacttgtcacccatccaaacgcaaagatagctcggatgaagtctacacgtaactttggaagtcccgtacagactttggggaaaatgttatctaaattttagcactctaacgtggcctcacacgtggattcaagtcttggtactcgctcgcaagacacgggccgaaaaggttaccacatacattttctcagacgaaatcatcttaaccgagcagtgagcaattcgtgcaacacaccaaagaaattgctataaatttgagatcagattacagagatatggcaagctatccaaatcccacgattagtgcattttgtatatactatgtaatctttctacttatatcaattgtaaccagaagggaaatacttccctccaaagcttatagccttataaatagtgattcatactcactgggcaaagggtcaaaacattttgtctaagaattcatattcaaagatataattgtaagagctctaagaaaacgaaccattctccttgttcttaagtcaagacaaataacgaggattaggctcttaccgaattgctcggggctgaacctctataaaattcttgtctctttattttgctttaattacactatactcgtattaaactacttgtcgcttacaaatcagactcattatcgttggctaaaagcgaggtcaacacctaggatctccccggtagttcgtctccttcatcaaagcacagggtatttgagggggtcaaaatcagaaactcaaacttccaacggcccaagcatgtcgcaagggctccctaatttatttataatgtctcgagttgcttccctctgatgtaactctagggttgcagctacactaggcgacaaggacaacctagagtgaacttttccaaaactcacctacttctaccaacagaccataactgagcctcactggtaacccagcagccaccgatggtaccgatggtctcctctcaccagccgccatcataggatctacttttgggaaacttcacacacctagaaaaggcaggggaagtagtcgtcatgagacagatctagccctctcgccagtgctgatactggagtttctagctggatagagtcgttgcatctgacgaccctttctgagttagtcttcatgatcgcatcgggtcatagctccttcgtatggccccagtacctcttgaactactctatttacgtatagtgatgtagtggtggatctgagcctgaggatattggtagttgatcttgcctctagagagttggatggcgtgatttgagcttttagggacggatatcagtgcgtcaagtgctttaagactgtgttcattcactttcgcaacctttcttgggcagactgtcgcatcgagtctttttttgggcaacacctcaaatatgcacatttttggcccttgttcgaaccttgacaagcgatcaggaggtcttccttctttccttacatggaccttcttgaaacaggcttgcatcggtggtagccgtgcatatctttttcttcaactatcaatgaaagttctaaattgttttccaagtttttcgaaaaccaaataatttcagatcttcagaaagtaatgaatgcgtggataatgcaataacaagcaaaatatttttatgtgcttcaggtgttacctatccttagtccacgagtccattatattaggctctttggcaagagattatttatacatatacataatgatggacttttctcgtattcccccatgttcttgtagaagaagaagcttagtgggaatattctgaagttattagtagggttaaagtgtgctgtgaaggtcttcgatctttaggtgagagtccagaggatgggtctggatcacttcacttgtgcatcagttagagtatttataggctgattccattgcccaaattgtcttgaacggatcttcgtagggatgaatccccaccgttgtattggtaggtggcacattttccgtgttgtctttatccatgtcagatcgtactggctaaattggcggggctttagacacgtgtcatctcagagccattcttatttgaatttctatcatccatagccgttagatcacctaacatggtatgcgagggcaagcatgctctgcatggtagcgtggcataggagacaaactttaacatcgtacatggaaaaaaggcatggtcaattggcctgttgccttgcatgcgcggattgaacctccgtctgttgaaggtgtatctcagactgacgcaccctggtggaagactcatacccttcatgggaacaaaaaggggtcttgtcttctagaataaagaatgtctctggttcgtggtcatctcttttgtggtctcctccgggaaggcatctctcgttgggacatgttctacgagttttatgctactatcttctcaaagctcatggtaaggaacttaagtggctcaatgactccttatccttcattaattagtatatacgtgtcgtatcagtgaaaatgcatataacacttattattacatatcattaattatattaattttgtcattactaatcattacttatcattacttacattaattttatcattactcatcgttacttataagtaatgataaatatgtttatttttaattaccatgaaccctaaactgtaaaccttaatgcttgaaccttaaaccctaaatcctaaaccctaaaccttaacccctaaactctaaattaaaccctaaccctaaacactaaacactaaacccttaaaccctaaaccctaattcctaaacactaaacccttaacctgaatccctaatctctataccctaaaccctaaacccaggccgaaaaaaagaattgggaccggaacttagacctaacacaaaaactgaataaggatcgggatagacacctgaacctgacctaggacccaaatagggaagggacctagacatggacccagactcggaccttgacccagacccgggacccaaactcacaccgagattcaaacccatacccagaccccgacctagactaagaccccaacctgaacccaagacccaaaattgaaaccaaaaccgaaaccgaaccaggacccaaacctgggaccagaaaaaacaaccaaatccaaacccaaactgggacctggacccaaaccaagacctctaacccgtgaattggacctaaattgggaccgggaccgaaatggagacctagacccagatcgagacccaaacctagacttagaccgggacttgagacccaagacatgggatcggacccggactcaaacctgaacccagacttggacctggacacttccgggacctgaaccagaacccagacctggaatcaaactaggacctaggacccaaatctagattaggaaccgatattgggacctagaactcgagcctagaatcagatcagttccaaggaccctactagaatcagatcggggcataagatttagaggcctgggccttggacccgacccatggttggtgtttggatctaggacctagaccaagaccttaacccagatccagacctagaccaagactaggacccaaacccagaccttaaactgtaccccgtgaccctaagccctaaaccataaaccctaaatccctaaaccccaaatcctttagacttactcctgaaaccctaagccctaaaccctaaaccctaaatccctaaacactaaacccaaaaccctaaaccataacacaaacatagacctagactcgaacccatatggagatcggaacttggcacatagacctggactcggacccacactcgaacctagacccaagtctgggactctaacccagaccgagacccggactcgaacaaggatcgggatgaggacccagacttgggacaacaacttgacccaaacccaaactcagaacagaacctaaatagagacttgaacccagaccgagacatgaaacccaggacctggacacacacaaggacccaaacccagacctggattgggactcaagaaccgggacccaaacccatacccgaattgggacctcgactgagatttggggctcaaacttaaacttggtcttggacccagactgcgacctaggaccttgacttggattgggcattaagattaggatttgggccccaaaattgggagtggtacccgggactcgacattcgacccaaaccctcagtccgagtcttgggtttgggtctgcgttctgggtcccaggctaggttaaggtatgggtctaggttcgggtccagatataggtcacgatcctaatgtaggtctaggtttgggcctgggttccaatctgagtttgggtctagagcagggtctaggttttggtctgagtccttgtcctaatcctattctagagtaccgattcgagttctcattttgatcccaggtcccggtctgggtcttggtctgggttcgggtcctggtccaattcccagatccaaaaactgactatggtttgggtccaagccctggctctcgtgtcctgggttgagatcccaatcctagtctcaagtcgcggtctggttctaattttggtcttgagtcttggtccaggtccgtgactgagactggggtcaggtcctgggccttggttctagttacgggtgttgggtctagttctgagttcgggtctcggacactaatgcaggttcgggtccaaggtgcgggtctgggtcccggaccaagtccaggtgtaggttctggtttgtgtcctgagtctcagcccaagtttggatttgggaccaggtctcagtctaggtcttggtttgggtccaggtccctagtccaattcctgggtcccagttccctacttgtttcggttcaaatttcatggacaggtctgggtttaggttctggtctcggtcctggtgtgggtacgggtccaggtccttgtttaggttcgggcccgggtcctagatccaaacaccgactatgggttaggtccaagccccgagtccaaatttggatcctagtctctgattccagtttggttctagtttgggtcccaagtctcggtttggatcctaattccgagtccggttcaggggtcaggtcctaggtccaaggtgcaaattttagggactgagtctctatcccactttggaggcccatatcctggtcctagttccaaggcccgacttttaggtcctggtcccctatccagctctgggtcacggtctgggtcaaggttctggttcgcaacctgagtcccgatttcagtctagatccttgtcagagtctaggtcccaatctgagtccaggtccctgtccgagtccaagtccctgtccgagtccaggtcctggtctcgagtcttaggtctaggtctgagtcccaatccagctccaagtattggtctgggtcctagtgagggtcttagtctaggttcaggtcctgggtcctcgttcgagttttgttccatgtttgggttctggttttgttttggtcctaggttcggatcttggtccccatcctagtcaggttatggttttgatataaattttgggtctagatttgggtctgagtttatctttgggtcagggtaagagtcctagtctgagtttgggtttgagtcctgggttcgggtccaggtcctagtctgtgtcaaggtctgggtcccatgttttgatctagctctaggtttgggttcaggtattggtttaggtcttggttcgggttttggtacggtctagatctaggtttgggtctttgtctgggtttgggtccgagttggggtcttgggttttggtgtgggtctaagtttggggccaggtttgggtttgggttctgttatgggcccaggtctgggtctaggtttggggccgagttcgggtcttgttctgggtcttggtcctagtcctagtcctgttccagggtcctgatctagtttcggtttaggttctgagtccatgtctggggccaggtatgggtcctcgtgcaggtccaagttcgggtccaggtctaggtctagttttcaggacctgctgtgagtcccaaatccagacactgactacaggttggattcaagctccgggtcctaggtcaagggttcagatcaaaatcctagtctagtgtcgcggtctgtttctggttcggtgattgggtccccaattttagtccgggttggggtcgaggacctagaccatggtcgggtcctgggtctcagtcctggttcttgatcttgcatcttgttttgggtctgggtttggggactttatccaagcttgggtcctaggtttgggttcgggtttgagttcaagtctaggtttgggtttaggtcccaagtccctatccgtgtttggatttggattcatgttccggtccaggtctgggtcagggtttgagttcaaattgtggggtacgggtttaggtcggggtttgattttgggtttgggtttgggtttgggtccttgtccaagtctaggtccaggtgtggctccatgtcctggtccttgatcaagacactgactacaggtcgtggtcatggtcctcttccatttcgagtctcaggtctcgattttggggcatgggtcccgagtccgagtcccccatccaggtctaggtcctagggcccagttcgggatgaggttcggttttgagtttgggtccaggtgctagtccgggtctgggtctttgtctgggtattgggtcctaggtctgggtcttaggtctcgagtcatagtcctgatctgggtctgggtccaggtctcggttttgttactgatcagggttcgggtcccggattctaggtctcggtctcggccatgtcccgatctgcgttttggtttgagtttgggttcgagtttgggtcttatttctgtctcatgtccaggtcttagtcccagtccgaaatcggttctagttttgattctaggtttggatctatgtccaagttagtgtctaagtctaggtctgtgtccagatttcagtttgggccgaggtatgggtttgagtcccaagtccaggactggatccagttaattgtttgggtccgggtttgggtctgggtccctgcatccgatctcggtctgggtctgggtttcggtttgggtccaagtcctggtctggattcccatctaagtttgggtttttgtatggctcccgatttcgagtttggatttgggtccaagtcagggtcctaagtctgtgtctgggttcgtgtcatgatgcacgtccgggtccgggtctcggtacctattcagatctggggccgagtctgggtttagttaaggttccaagtgtgggtccaaagttctgatcccaatcttggtttgggtctggagccaggtctgggtttggttcttgttttgggtatgagtccaattccgagtttaaggtttaggggtttataatttagggtttgggatctagggtctagggtttagggagtagggtttaggttttagggttaagggtttagcgtttagggtttagggattaaggtttacggtttaggatttaggatttagggtttagcgttcagcgtttagggtttagggtttagggattaaggtttacaatttagggtttagggctagggtttaggtaattaaaaataaatctaattatcattacttatcattactaattatttcttatcattacttaaattaactttattattacatattattattacttatcattactaatcattatttatcattacttatattaattttatcattagtaatgataaatatgtttaattttatttaccctgaaccctaaactctaaaccctaaaccctaaaccttaaaccctaaatataaatcctcacccgaaaccctaaaccataaactctaaaccctaaacccatatccctaatccctaaaccctaaaccctaaactctggcctaagactagaacggggaccacgacccgaaccgggcacaggacccaaatagggactgggacttgaacccgcccaaggactcaaacagggaatgggactggggcctagacccgcacccataatcggacgtagacccagacttgagacccgaacccgaacctggacgtagacccagaaagggatcttgacccagacccagacccaaaccttgactcggaccaagactcagaccccgacccaaacctagacacataattggaaacgaaagcagaaccaaacaaggaccggactaggaccttgacctgggactagaattgtacccaaacccagacaagaagtcggatcgagacctagacatggactgggacctagaacctgggattggacctggacccaaacccaaactaggacccgagacccgatacccatattcgagactcaggacctagatttggacccaaacccagaccgagtcctggactaagactaggacctgaactcgaacctgaacctagagttggaccgagatctaggacttggacctagattgggaatcaggactgtgatcggggactcgaccctggacctcggcctaaacctacgaccaagactgggactagagactcgggacccgaatttgaaccggattaagacacgagactgggatctgaataaggaccatgggattggacccgacaagtggtaggtgtctagatcttggatttggacacaaacctaaactcagactttgacctagactcgaacccaaacccggatctagaccaaaacccgaaccctaaaccttaaaccctttaggcgccgtttggaatgcaagttttatttcatgggaatatatttaacattgcttggcaagtgatgaagggaattataaacataggaaagcaacattattgtatttggttgggcgcagtaatattatgatgatgtctgggaatatgaagattagtttgtttggttgacttaggaatggaatgtgacaacttttctttataataatgatttttttttttgtaaaatactaataatttaatactttctttttccttttaagtgtatgaaataatttttatttattatttttcatataattttataaaaaaattgacaataataaataattataaaaagttaatatagatatatatagtaatgtcaattgggtcgggtcgggctcaacccactaatgacctagcccgacaggatatctctttggcacgatctggccccactacttctttcagcctagtgggtcaggccctactggagataaaccggtcgggcttgacccgacccctttcttcttctttttaatggtagaatttttaaatttatatgaccgaagacccagcccgtaaaaaaagcctaaattgccattcctatatatatttgtcagaacaattaattgcaaaattaatttttaagtaatttttccaagattaaattatttaaacaacaataaaagctctttaacacataatagtatatattaaaaatgttggttaaaatcactttaaaaaaacaaatattgattaaaattttaaattcccaaagtttgcatattatctaatttataatccaaaatatgacatattattatattgtcaaaagtttcttccaaaagatgatattaaccaaccaaaagttttttaaaagtaaaacacttacgttacataaagtcaccccaatagtatttttcgaaataccataaactattaaatcctatattacttaaacaaaccaagaaccaatgccaacttcatcatccaaagtgaataaaaggtccttataagcttgattttggacaacaagttttctagcttcaattcgtgttcaaatgacagtgcatcgatttttttttcagttcatcgatcacttttagtcttctacttgcaccttttgtctcgaattggaaacaatcaacaattcttctaatactatcaccagtagcagcttgtattttatcgaatttgttcactctgggtagtcagtacctcaactaatgaatctacattcctagacatctttctctttcttgattgggctgaagttgttccagtacttgtctgactataggttgcattaccaacaagatcatctattggggaaaatggatcaaactcacattgttgatcattttctgtttctctatcaatctcatccattgtttcagaaaaacccacaccaccttgtccatttccacgatccttcccaaatatagtaagaaagtaatcataatgaggaaacggtttattccttaagaccaagacatggacttggacatggaccagtacctggagctcaggaccaggacgtggactgggacccgcacctagactcgggctgcgacctgagacctgagacttggactcgacccgtagttggtgtttggattagggatctagactcggactcagacctgaacgcagacctagaccaagaaatagacccaaacccatacccgtgacctaaaatcagaattggaaccggaaacggacacttaaatcctaaacaataaaacctaaaccttttacacttacccctaaaccttaaaccttaaacgctaaaaaactaaacactaaacccaaaaccctaatccttagaccctaaatcctaaaccattaaaccctaatcctaacctgaacatggaccaagagacccatatagagctcgtaacacgggcccgaacccggacctagacttggacctagacatgtcccccaaactcgagacctgaacttggactggaatctggacccaaaccaagatgcagacacaaacacgaacccgaactcaaactcagacctagactcggaccccaaccaaaacccgaacccaaaactagaccgagattatatgtcaccctgaaccagaatagggactaagacccgaacctgggaccaaaactggacccaaatcgggacttagaccccgacgagaacctggaacccaggacctcgacccaaactgacactcaaaccctaacccaaacctggacctgagacttgggacacgggacccgtactaggacccgaacccaaacccggatcgagacttgtactcagaccgagacctgaacacgaacacgaacccgcaccttgacctagaccgggacctaggacccaaacctaggacacgaactggacccaaactcaaaaccaaacccaaaccagaactcagaattggaaccgggacccaagactctaagctagacatggacctggacctaggacccgaaccaggatcacagacctgaacaggaaccggactgggcccggagactggtaaccaggtctggactcggggcttggacccgacccctagttggcgtctcgatctgggacacggacctggacccgaactcagacgcaaacctggacccaaactcgaacccagacccagatccgaacccgtacctcatgacccaaaattagaaccggaactggaacaggaagcggacccctaatccctgaaccctatgccctaagccctaaaacctttacaataacccataaagcctaaaccataaaacctaaaccctaactccctaaacactaaaccctaaaccctaaaccctaaaaaacactaaaccctaaaccctaactctatcatagacccaaacctggacctagacccacaccgggatcggaacccaggacccgaatccaaaccaagactaagacttggatcctcactcggtacgcgaacccgtacccagacccagacacagactgggattcttacccagccccatac

SEQ ID NO: 218250 - DNA, 6617 bp, Cannabis indica
acataggagggtgctaggcaccattggtaccctttagcatttctcctaatttattacgaactgacaaaatacataacaaactaagaaattctagatagtagatataaataaattacacaaaaaagccacattccaagaaccaaacgaatcgaatgagaagggtagagggtgaggaaaaagactaaaataaccaacacctaacattcaaaaactaggccatcgagtaacccgccaatctcattaagaacggttagtagaagtgtactgactaatactattacaatatacatcaaccctccaattccaacaaatggtgatttactagtctaatcccatttcccaacttcaaaaattgtatgccttttctcttcgttttgtattactactagttttagagagtcagctactattccgataacccatcttctctctggagcctctcccaacaaccaatgcatcgaccggtttggacctttcctacccgttctcatcagccgtggcatgactcctggacttgcattctaactcctcttactctctggatttgtggcatgtaatttttcaccttctatgaaagtttcttttgttatctctctcatcctttcactctcaaacaggcatttctacttttttttttttgttcttctccagtttcggctactctacgatatgggtattatggagaatgccgtatggttcttggaccccaatcttcaaggctggttaaggcgaactctctttttgttcagcaagttgaagtaagaaatgagaataataaaggtgtttctctttatgctcttgatggaaaacctgaattgacctcccaaacaaattggactgtgtctaaatatttggctcttggatcctatggtataaaggtagctagcaacacttgctaaacaatatcatatctctgactttatttagattcaaatggttgattcatttgtattattgaattaaaaatttgagtttttaattttaattcatttgattcttaaaagcagggattttcgttctggttaaacaagggttcgaggataagattgaggttagaaggtcagagtagttcaataaatcaacttgaagcgattatgagtaaaggttatgtcaactttaagataactttaattttaccagctacaccgcctgaatcataacatcatgattttcttattaacctttgaggaaaactgtatttgtgtgtttcaataggtgaacaaatccataaaacattgcagcctcaattgtcaagtacatcttctatagaaggtaactctcattttttttttcctatgcatgttctcaagaaaattcatattcagaggctaaccatgctagtttgttcatctaaattataagcattttttgaatgagtgtagataaagagatggagtatgttattgaggaagatgagaggtactaccttgacatcataaactcaaattcaagaagtatagttgtagctcttagtgtgaatgttacatcaatgatgtatgatattactaaagccaagaacaagtgttcaacatcaaagggatcttgccggctcaaaactattctctcatatactcattatgtcatactaaccacaccaaacgacgtaaggcttttcccccaccaaacaatcttctctaacttgtttaactcgatcattgtcctgctctcttaatcacataatctaattatttacagggtcatctagaagggtggtacctagagctttctttcgtggctcgtgttataacctatatcgcaattttaggtaaaacaaagtaacatatttgacaaaataatatatacatattatttgtattccctcttttcaaaaacttatatttaacaattttacagggtttattacgatttttatacttctaatactgaaataccttggatcctgtgatggcgacgtaagtgaaagacctgcaatatacaacactgcagtagatgaagttgctgagactcgccctatgctgtcagagaaaccaattcgatgtacatacggaactgttgaacatgaagaagatgaatctgaggcgtcaagtagcacttcggaggagttgtatgatgcgaaattatgtgttatttgttacgatgatcagcgtaattgcttctttgttccttgtggtcattgtgctacttgctatgattgcgcgcagaggtacttaaatggattaacaaagaaaatgtatgtataatttttacagagagatattaaccattagggtggtttttttgtttcaaggataatggatggagagagcaaggtatgtcccatatgtagaaggctcgttcacaaggtgagaaggttgtttaacccatgagtgacgtgaaagagtataatgaagtgattgtcatactatgaataatgcttttgagcttgtgccaaagacaacatacaacttgattcagcaataaaagtgagtacggtctgccatttgttccaattgttagcagtggtttatgaaaatcttcttagttttttcaaggaaatgattatagactatttctgagcacacgtgcttagcgtatccactggcatagtggactgttcagataatgtttttgtgcccatgtaaatatttattccattttcttcgctggtaatgatattacaagttggaagcttttacctaatttccttttagaatggcctactagtacaacactaacttaaagaagtcatttttaatgttagaatattttcagctgactaatataattaagtgttgttcactcagtgtcagtattagtatataataataactatatataatttgtaatggatgatattactatcggggcataatgaaatagacataacatactaacaatactcgggacctatagacacgctcaaaaatatctttggctagaccattaagccaagacaactaattctctttaattggccatctaggtctaattggcccataatctctcataataagagtttatgacttttatttatagtggtgagagatgggtgtgtggctaagtgtgttgagagaatacaagagtagtgttcatcaaattcttgcacactttgtttttcaaaacttttgaagaaataagaagagcacaagaggtgtaagaattcatgaacattattacaaagtaagaatgccttttataatatgaaatttgatgctttaaataagaagatattgtattatttttagataagcataattgttattattttgatgctcaataatttttataattggtatcaagagcttaggtcatctaattttaaggctaaaaattatttatttttcttttcttcttatttcctattttttttcatactcacggattggtaaacccttaatcatttttcatgttttttgattgtttaggatggagtatgagttgtatctgtatttgagatactctaagaattttttttaagattgatttgaggatcataaggcacgaatatgggagaagatggttcttgaacacattttttgctacatatttgtttttgatttattacacgactaaggttgtttttgggaaaaatgcgtatgcgaaatggaaagaacatgacaaatgaaacccccaaaataacatcaaaaatggaccaccagaggtgtgttttttagtcgggtcacgatccgggtcatacgaacccgataaccagacctgcaagcaccagatgaaggtcagggatgtctttgaacaacgtgtcgtttttctttctcatgttaggaggaaaacgacacttcgtttacttcaaaatgaggcaaccataccaggagataacgacgggttattttagcgtaagagggggtaagtcgtttcttcccaaacgacatgtcgttttcttgacatggtactaaaaaaaactagggcgtgtgtggtgtcgtttttggaccaatttttttccattttactccattttgattttcctatttatttgtgtgattatattttgggtttgtcaatttaaattgttaattgacacataatcacaaaattaatttattttttctcacaattttatttttttcatttcattcgattcgattaattaaaacaaacataattatattcatgccataaaaattatttgatagaagattgacatttttgataatataatgatgttggtgaataattaattgagtgcttaagtattcatctatcgtgggtctaagcatctcaattttgtcaatcataaaattgtgagaattgtaatattttttttattatttagtttaatctcatacaagctcaactttaccaattcattatttcataattttgttagatacatgtctgatatttttgagaatttcattatatttataaattcattcagggcatatactatggataatgtgcgataaaatattggacaatatttgtgcatttatgatagaaattattgccaatatttagttaatattttacgataatgtaatttgttaaaaatttaaaaatcgcaattgaccttattagataattatgagattaaattattcattaatgtgttatacttacatgtaatagtaagttttcacatgtcaattaccaaaaattataattcgtgttaataattttctctcgtattaatcataattaatactaagattcatacatgtaacttagtcatcttgtctatgattttattgttaggtaggatacttagatggtgaaggaaacacattaaatgtcatgaaccaatcaatcttttctaccctatcggtagtggattaactaaaatttggttataaaatttagagtagttgtccttacttaagtaagagtcatatattttatttgaatgactctagcataacatgatcgtttccgttgatagatcattgataagaaaatgagcagattgcataactcttgttttcacatagtaacagagctctaagatattttcttttagctttaagcaatcctaaaacctctaccgattagttatcggatgggactatcatatgctttgtcatatcgatctctcataaaaaaattagactatgcttcaaaattgataaatcttcaaatcacatttgaatttaaagatgccatgttactgcatatgctcaatgggagcattatgatgggtgtcagccggttataatgaggtatatatatatatatgtccattgatccttatatgaaaaatattatgagggtggaattgcttaagaattttcttgagcatctaaagttatattcctatatttacttcacaatgatgactttcagagacttgtcggttgattttgtgcatagaaatagtttcgggagaacttgtgaatcttctatttctacatacttatgcttgaggctcaagataatacatagatcataagtggacatatttttggatgaatacgacaatacatatatgatcgtcattgtctattctgatgagataatcgtgttaattaagaatatttgtaaatacgatgaatttacgataacttgttaatgcatgtgtgactaaatatcacattagtgttgttattaatttttgagggtgactaagctatattctggcacttttaaatttatcaaattcttgatgttataaaatttctcatatggagatattaatgacttattaagtatgaacaattgatgataaaatgaaaggataaggaaagctaaggtttgccttagttaaagaaagtacacatgctgattaaattatttcgtttatccataaagtttttatgattcttgataccatgtataaaatttgagatatattgagtatttggtactctttcgttaagatctctttcatatgattgtcttaaacatagtctctcaaagttttgactcatcaaagattgaaagtttttgtgttttagaaagctttaaagcggaaaacacctaaaggaagtaatccatgcatgcataatgatatgcagtcacttcttacgtgtattatttctcaaagtgacaaggacacaacaagactgataggtagccttaagttcataatcaggacatcgttgaatctagacttagcatttccctagagggactcgtgaggctgctagtaattatatttggatgtatcccaagaaaaatgatgtcactacaagaaaattaacctttgtcggcgatttttctcgctggcgaaactaggcataagtcttcagtaatattttgccggcgagcttatgccttggcaaaggctattggggatgcttgatcgacataaggtgttttgctggcaaaacacctaaattcgacgctagaagaactaccagagctactttgatcgtacagaacaactaaaggaacggcaaccaggtagacaccttttaccatggcctatggctatgaggcaatgttgcccgttgagttagaaccttcatcccacagaaggttgacttacaatcacgagattaaccatgcccttctaacagaatcacttgatgatgttgaagaaaaaagagatccaacaaatctaaagctactagctcatcagcaaaaaaaggctcgatacttcaacaaacaagttaaggaaagatatttttgtgggacacatggtactcaaaagggtattcttgaacacaaaggacagtgtagcaggtgtactcaggtctaattgggaaggaccataccaagtaacc

SEQ ID NO: 218251 - DNA, 5926 bp, Cannabis indica
tattattaaaattatattttggtaaatgaaagtaaattgattgcctacaaataacagtacagaaaaagttctcaaagaaaagagcaagccgagcaattagctcagaaattgcctacaaatattctcaatccaaagagagtcaacaaaactttttttttattaggactcctatatataacaatacaatctaatttcatgcatgtttaatattatgtacagtaaaatgcaccattaattggaacgaattgttccaaaaagaatgattcggagccccccaaaaatgataaactacagaataccagaaatcagcaccaatcttgtggttctgcacaaccagtcgactatgtcagcaatcgaaagacaaatgatcatgtgtctcattctccaagttaaacatgttgaagccttcaatgatccagcttttatattcttaaaatgatattactgaaaacagaaatgttatacttcagattttcaacattcttctctgctgatcatacgtaccatattttgattaggtctttaatgattatttttttagtatataattatgtttctatacatattttatatattaagtgatttcgataatactatatgtagaggtggtaacaatagttttgaaaccagtatattgtcagctatgttattgcttagtagctcggtgtcttgagttagttaatatagttaggttgtgttagctccactcttccactttgttgggcctccatctcactataaattccacactagtatgatattgtctattttgtgttaaaatcctcacgattttgtacaaaacttacaatatttttacgtttaaagacatctttttatatatttacggtttttcatagaaacaacacgaaaacaataagaaaattacatgaaaataacatttgaataacatcaaaacaacaacaaaaaataacatacatataacaaaaaatcaacaacaaattaacaagagtacaacataaaaaaaaacgtattttctgtaaataaaatcaaaaatattttaaaaatattaaaaattctgtgaaactctattttgtaattttttttttgttatttttgtgtatttgtgaaataatctcttttatttttgggcaccttctcaaaagacttcatatatagaatagtatgtactgagattttcgaaaacgaattatttataatagagataagaaaatatgattaaaagaatcaaatatgaaaagaacactgagagtttttacgtggttggggtgttaaggagtcttagtccacgagtcaatattattatcagatagcctagaaaagcctaagggccattacaatgaatatgatctctctattctcttttttgaacttgtgaaccaagaaaatccaaccatttgcatgaaggatgcagtgtgtatttatagagtatagatgttatacttagttactatttccctctaatgggatatttacagataattcattactttgagcttatcaagtgaagctcagcctatgagacagtgactgtatgctgacttggcatgttaatcacggtcacatctattgttaccatgttcactgattaattgtggataattaatgcaatattaattacttgatcttaaattatgtagttttctattttatcttgatattattctctgtttgagatcttaggaaagtgatttctttattttgcatgaaatagtaaataggaaactacagctagcttctaggcacatactagagggttcttctagctacacaaagctatgatccttcgggataataactaaccttaacgaatacttgcttgagcaagaagtatgatttctttcccaaaaggccacgttgatgttgggcttggcctagttcatgttgtttgggcccattaatggaccttaacttctatttggaacccacatgtccctttccggaaacacaggtaacatttactcctcaagcttctggaatgctatggattgcgaaggcttgcttcagtctgtataggtggacaagttcaagctaaaggtgaaacctttataaattctaaatattttctgtgaatggaagacatctttccatttctcaaaccttaggttctacgtggaattattttattagttcatgaagcatatgttcgcctaacaaagcgcgtgtagagaggcaaaaaaattgacgactattcactttgacgcgagtctcgaggggaatttcatcatttaatctttcctagttccaaatatagtattaaatgcttgactgatgggtttccgagatgttagatctattttgcatttttagaagatgaaatttaatatttgatcttggctttacacagattatttcttatgggtataaatgtttcttaataccaacttttcgcctttttatccaagttttcaaaatttcttatttcaaacccaaacctttcgaaagtaagaaccagaatcaaaaacaaattgaatcactgtgaagcgtgatattgatttatccattcaactttttcttcgaatcaaagctttagaattcctaaccacccttagtgatcttgactacatcgccaggggaagttgcaaatctggatattagttttgaaatcgactcccttattgaccaggccaacgccattgttgagaggtttgatcgactcaaagctcctccaattaagagagtttccatagaactgccttttgatgtcagtgtgtgctctcccaggccgtatttctactcgagtccaaagttatcgcctaattcaccactaggtaaatttctttctttttaatttcttaaactatgtggcatgtctagatagaaggattatatgtgtattttgcttgttgtttatgaataatgactttaggccaatgactaggaaattgtttttgataggattaggatattctgaacagatttaagaattaacaggaattaaattcttttgttctactgttctagaaaaattctactttgctactgaagtactggcaaaattttttactcccttgtttggaacctttatggttctagatagtatatgagctttgtatgtttcttttattcttgtgttcccgattctactacctagaacaaatgctccctgagggttttatttcaagatagtgaatctagtgggggcctctccaagcaattatggggagaggattcccatgtaccctcactatcttagttggtctaagtaaataactatttggtgttcttttagcttccataatgtctaggagagcttagcgaagagtaatggaaacaaacaaagaagatgtggtggtggagcaagcccctactccaaaattaatgttctctatgggagattgatcaatacaaaaacaacttttagacttaatgataaccaccggaagtacgagacattgagaggacttgtgagtgttctaggactattctagaacaagttttctgtcttaggagagaaattgagccaatgtgttgaaggaggttttgatgcctggagctgggttttcgtggagatgggtgcccattgtttacctagttttttggccaaatatatagagcttaagaaagtaatgaagtcataaatattgaaataacaagcgagaaagttttacgtggttaaggcgttaaatattcttagtccacgagtctattttattaggtcatcggtcggtggctgtttatacaaatacaaatacaatggacttttcttgtaacatttcaatttcaagcctccattggaccctcttcaaccgtgtagtcccatacctacacaattagaatcatcacacttgaccttccctagaaaaagtgggcgtacacaacttacccggtatttccccttacggatcacgggactattgattgtgtcacaatcactcccccttacaaggttcgatgtcctcattaaccacactttcggctgggtcaaggctctgataccattttgtagcgtccccatttcaagcctccattgggcccttacacccacagaatgataactcttatacatgagtacgtcactatgactgcttcatggaatgacgactaaccctacagaccaacacgaatgttttcagcgtgctttgtcctcactcacacactccttgggaaaacttcccaagattgtaacgtccccgcttctagcccaatgaaggcttgaagcggggacattacatttctcctattccactgtgttcctctttaagaagaggaagcttagtaggaatattctggaattaataatagggttacagaaatgtgatttcttagaatggcgaagagtaagtctttaatccaaaggtaaagtccgaaaaaaaatccctcatttgtgcttcttctaaggtatttatatgccaacttcatcgcatgagctgtcttgggtggatcttcgtaaggatgaaatcccatcattggattggtaggtggcatactttccatgtggcttttatgggtgttagattgtactggttgtacaagctggtctttggaggcgtgtcacttcagggccattcctatttgaatttttcttatccctagccgttggattgtttatcttagtacacaaggacacacattctctacaggatagcgtggcgtggctgggaattttgactcaaattcttggtcttttgcttggagtagcctaacttgtatcctctactagtttctgaggagtagagttgagtgtggccttgtctaatttcaggaagcatactgctcttctaggaagttccttgaaagcatacgacaatttccatgctttcgtgagacgaggccttgggtacttttgtggaaaacacgattatatgataggtcccaaattgtccatttgtgacataaacctcataagggaaatcacagggcttcttgtggcgcaggaggctcttagtttcccggagggaaagctgggcctgtatccccgtgtgggcaattcctttttacgttgaggtctgaagatcatgttgagtcctttgatggccaatcttttggctttcactaggaaaggctaaaggagcacaaagaattcagacattgaccttgcttgctgatgacgaagggcaaaatactgttgggtgcgcgagagtcatgttgaatttttatgaagcaagcttcggcttctgggaaggaaggctgaagttgcataaaaattcaagtttagacttcgcttaaaaaaattgaatggaaagcatcacggggagtagaacagacatcaagcaatccttccattccgggaaggagggttgatgacgtatcgtacccccagtgatctttcttatacgcgagagtcatgttgaatttttatggccaaaatacaatttttgatctccccaaaaatactaaaaaaggcataccgttttattcagctctaaaaatggtctactattttttgcaggaacgaaaatctcaagcttcaactcctcaaaaccccaccgaaacctaatcaattgattccaaacttcatagaacaactaagcaacatccatacaacaatctctacgtaatagaaattaaaattaagctcttaaataaaaaatgccattaaagctcaagctttgagcgtttaaagctcaaacttgatttctaactcaaaatagtgtaaaatcatcacaaaagcatcaaaactaatctcatatcatccaaaaaaaaaaccataagctcacaaactccacaacagctccaaaatacaaatttaacttttaaaacattaatttttccataaaaatcataaactaacccttaccttaagcttccaatcttcttgattcacctctaaatgttattagcagattgaagggctagtttttggattgaaaaaaaaaagaattaattgtttggtagtgagggtttggttcgtacgagtgaaagctttatgagggtttgtttttaagtttttaagtttttaagtttaacatatatataatttgataaagaataataataataataa

SEQ ID NO: 218252 - DNA, 8083 bp, Cannabis indica
tttctttttctttttcttttttgctgtgtggtgtaaaatgacaaataaaaaatatatatacttagtcatctttcagtgctaaaaatttgcaagtctgccatgtaacaatacagatagcaagtacagaagttaaagaaaaaccaaaacattactatgtttattatggtgttagcttgtaaatcatccttacattcatgataaatgagtactttaacataatacataggaagcataagatgtttatttagattgatctaaacataatgaaccaatcataaggcccaactttgaattattttggtttgggatggtatgataagatgaaactgcataggtcaaaacttccactcatttacagtgatcgatgtagccccatccacgtttgctttaacattttgtacaagatgcaatggcatatttgttaaggtcaagtctttcaaggttgttaggtggtttagcccttctacttgcttcatatttgggcagcgtctgatctctagctctctaagatgggacattgctccttcctctatcttccattcttccaattcttcaagcatccaaagtttcagaacaagaagttctggaaaatcaccacaaatacattccatttttctacctgaatatgagctaccaaaaagcctgaggatgtttaattgaggaagttttcctagcaatgttatcgattcttcgtctagttgggatccagacaaagtaagaattttcaagtttggtgggaattgaaatatttcattagctgctaattttggcaaaactccaagcaaatacaagtcagtgagcttgtggtgcagagccatgttaaccaacttgagatctgaaggttgaccaaattcatcaattgatctcaacttcaaagattgaagatcagtaagttttgaaatccaatcagctatggcctgaattcttgttgaatggcatgtcaatcccaattttctgaggccaaccaatttgctcagccaattcacaacaaggcttgtactccctacagatagcccccataaggtctgcaagttggttagagagccacgaggccgtttctgaactgacacatcgaaatgaacctcattcatgtacagatgtctaagatttttggccttccaaattgaagtagacaaagtagttatattggtgtgcttgacatccaaagtctccaagtacactagaccaccaactgaatcagtaagtgaatctaggaaagtccatctcaagccaagatatcttagctgcaaaagttttccaagggactccggtagcctaggcttataaacaccttcaagatcgagcactctgagcaacccgaatccacgcttagcagtaaccttatcaagaaagatgcctacttcatgtgcaggagtatctcttctcctggtattgaaagatatgtatgaaagaagatgttggttgtgaaaatccgaagaaggatagttcttcatatcaacatactccacaagccgacgaacatgaaactttggtgaagtgactgaattatattcagagtacttatgaacaaaaaaaaggccaagagccatggctttggctgagaatacatcataaagaatacctggaattcgacaagtcttggggcgtccatcagattttctccttgttacctctatcatgtttttattgacaagttctttgaaatagtcttctgctagatcttcaggtgtttgagaagaccccgaatccggtatcaccaatccctctgcaatccatagccgaaacaatcttcttattgggatctcaaatgctcttggaaagagccccatataaagatagcacggtcttatccttggaagaaggttttgatagcttaaagtcaacctataagagaaactagattgatggttttgatcatcacctgaactaacatgatcatcaatcaatttcaacagttcatggtaatcagaactcttggctggtaacaaactacaaagcttggtaactgctagaggtgaaccatcacacttcctcaaaacattgttcctgtaaaatatgtcaactccaaatcattaaatctatcttcattccatctcatatttttcaagaacagtgcccaaacatcttcatcactaagccggttaagttgaataagctcacagccctgatcaaccctcgaactcccacgccatgctacttcattatcacacgttgtcaacaaaattctgctaccacttttggtgtctgggaagacatgttttacttcatcccataactgagttgaccagacattatccatgactatcagatatctgttttcctccagaattgtagcaagactccttctcaagttgttatagttttcctccgacacaacttttgcttcattcatactcatagcttgtttgcatatgtcaatcaacaaatctctaacactaaaacttgttggcacataaatccataccatgacatggaaatgctccttaatatctggtctattgtatacggtcttagccagagttgtcttcccagagcctacaataccgacaattgaaatgacacgaagttgacatccaagatcgtcagaccgaagcatctgagcaactagagcctcttcttctttgtcaagaccaataacacttgataccatgctagtgtcaagggaactgctatagcaagaagccgtgtcacttgaaagattttcttcaatgtcttggccagaggttgagagcgtgagctcctctaaggacttgttccagaagttgatgaaagaaagcctgacctttttcatcccatccatcaagaatttttggctccacactgagctgaggcggaggaaagggcgcattggacctttttgtctatgaataagcattgttcttgtggtgaggaaaatatcagtgatattgtccaccataaagcaatcttgtagaactctatactcgaatttgggaacctttttatccattttgtgtttgtgagctgagtctctgaaccttcttaaatattcatggaggtcattggttgcccatctaacttctcgtcttagccttgggtgaacaaacaggtgctgagctagtagatcactcagtttctctgtcactacagaaacttgtatgtctacgtctatggagtgttgatccatctgttttgttttgtttcctcccctaaatgaaattaacacaataagaggatttaaacttcaaattaatgacaacctagatattcaataatgtagaatacagcacagacctccattattctcttcttatagcattatttattatattaaattaaccagacaagattaatagtaaatttcaactctcatactgaactccttcgtaataatgcacatcaaagattgaagaagagactattgaaatcacaagacaacaaaatgaatagaagtaaagactttgcttaaatcttcttacatgtgttatatatatgcatttaaacatacaaatacaagataaaattatttcaaattatgatcaaaattcatatatttatattaaaaaaaaaattacctttctctgcgagtgtttgatcaagttcgcatctttgaacagtgaagggagattgaatttaaattaggggcttatatgcggagtgaagtaataagaaagtagaagaaacataatacataaaaaagatggggtgggtgggtggacctaaagactaaagagagttttaacgaatatgcttgctaagttggtattctaggaatcgaaagagactctggtcctagccctaggcttcttccacactctcttctcagtctcatggaggacgtgatgggttcaatctcaacactccaaaactcataattaatcagagattaacaattgatagaactcaacagccaaaaatgagtagtggagttgcaaacgtaagagtaaaatgtttaaccattacaataaattataaaacagatatggtgagcttttttctaatctcagtatcatattggtttaaaagaaaaaggcaaaatcttgttttcatttatcatcttactgaagatcgaaccgttacttaaataggttcgtatgatcggaaaagcaaaaggttcgtacggtcccgcttcaagtttttagtttttacccgagcttagttggctcctttctattccacatttataactgatttagttattttagtaatcctttcctttttgttaatgagtggtagttgttttgtgattgttttaatatttttttaaaaattattacattaaaatataggagagtaataattaattggaccagtaatagcgatagacatcaatgctttttaatatttttatttttaaaagaaatattttcccattttacttgtaaattgtgtaaaaaccaatgatagcaaaacatttggattgtgaaaaaaaaattgtgactttgtatgtacaatatatattgttttgaaaatttatgacaaaataatcttttagatatcttaagtgaaagtcatttggatcctttaattttttttagaaaagtcattttccaaaaaaattaaaggaaaattttttatgctaaataatactagtaaaaaaaaaagttctatcatcacactagataatatgtctcacataaatactagacaataatattttcttaacttattaaattcctgctgaatattgatatttgataagttctctctcccactagtgaagaaattaacgaaaaggctgtttttccacccaccaacttatcaaaattcccactaacattattgaatagatgatagctatactggattggttcttggaaaaaaaaacacctatcagtcatttccactaagataaatggcataaattgtctttgccatgccacagaggaatcagtgcattgggtggctataaaataaatttcaaccataccatgcatgtgaatgtgatgtgaagtcttttctgtcttttactgaaaataaagacattatttttggttaggtaaaagactatgacagcctctttaatttagatatacatagttagatggttacagtctgaatagagcctccatgttggtcaagtggctcctgcctggaaaagccaattgaaggacaatattacttttctaaattaaaacatattaaattagtacataaaaaacgacttgactaagttttctttagaggcaatagtactctaaactgcaaagttcaattaataattgattgtaatcaataatcacaagacaaagcacacaactaaggcaaaaaagtatagataaataattatgagataattgtgagcagataagtttattagaatatacaataagaaaagagtaacctaattatggaaacaagttcccaatggtgtaatgatttgggactaatcaatgaaggagcaagtactagtgatcctcctgaagttgttggttttgaatcttatgaagctgaattggaaggttggttattagacaatgaattcaagcacaaagtgattttcatagtaggcatgggaggacttggaaaaacaactctggccaagttagtttataacaagactcaaatcagtgaccacttcagctgcaaagcttgggttacagtctctcaaacattcagtaaccaaaaggtcatagcttcaatggtaagacagttccatcaggcaactacagattctgatccattaggacttggcaatgatttgaacaatcatcatgatcaacatcatcaaggtgagttgttacaacacttgttggaagaggaaaggtatatgtttgtgtttgatgatgtttggaatgttagtttctgtgagcatttgaaaaaagttttaccagaaaccaaacgaggctgtacaataataatcacaactcgggtttacaagaatttggatgtttggtggccacaatttttctttgttcgagtcatggagatgcagcctcttgagccaacaatggcctttgaactattcagcaaaaatgtgtcccaacaaatcacatttttcccaccagagatggagaaactgtctcatgaaatcctccaaagatgcgaaggcttaccagctgctctggtggctgttggtagatttttgtcaactaaaaacaaaaccttccttggctggaaacagtttcttgaaaaaaattcttcaatgttgaagttgaatcttcttctgaaggatatatcagagagtttactgcctaagtttggctatcttcctttgagtattgaagcttgctttctctactttggtgtttaccccaaggactatttggtcagttggaaaaggttagtaaggcaattggttgctgaaggatttgttgaaagtgaagatatgggaaatgaccacttgaatgagcttgtgagtttaagcttgattcaggtaccagatgccaatagtactattaatgggaaaccaagatggtgtcgagttcagaatctaatgcacgaagctatccaattggtatgtgatacaaagtctggttttgttcgcagtaagcagccagaagagtccaatgaagataacttcactgactcacacatacgccctcgctttccatacatggttggtgagtccattgatcctttcaatagtactaaatggtatgcaaatgacaggtacaagctcttgaaacttttggatcttgaaggctgcggtaatcgagtttttgttcctgaagaagttggaaatctgatatttctaacttatctaagtgtgagaaacacaacaattatgatgcttccaaagtcaataggtaagctgcaaaggcttcagactttggatttgaagtactctctagtatgtgagctgccaatcgaaataaacaatcttcgtgagctaaaatacattctagcatactactatggcaaaagaagagatacccttttgaatacagtacgaggagttaagataaacgaagggtttggccattgggatggactgagaaaactctatcatatagaggcaaataatgatgttggactaatgaaagagcttagaaagttcagtcagttaaagaagttgggcattacaaagttgacaaaggaaacctcaagagctttatgtacttcatttgataccatgtaccaactcgaaaacttgcagctgtttctttgagttcagatgagattcttgacttgggaacactctcatttccctcacttcttcggtcactacacttggaaggttgtcttgacaagttgccaggctgcattcctcgacttcaaacactagaaagattaactctacggttctcaaagttgacagatgatccactagaggacattcaatatctagtctcattgatcaagctcgagctgtacgaggcctatgatggcgagcagctgcggttcaagaatggcgggtttcaaaacttgaaggtactaagcataagagggttgtccagattgaattcaataagtatagatgagtgggcattgccttaccttgaagagtttacgattggagagagtacaaggctgaaggaaataccacttgggatcaaacacttgagaaccctcaaaagtcttaaattatatgacatgggagatgaatttggactgagtatggtaccaaatggaggccagcattattatgtagttcaacatatttaagatgttaatttctattacaaacgtcatggaggaaaacgttatgacgtttctcctcttcgttaattcaatcatgtagttaattttgattatttcacttaattattcaaagtgtctcctacctaaactatccaatggggtgtttggtatggagattaggaatgggaatgggaatgtaaaaccaaaactatggttggtatcgttttaggctatttcttttttttttttcatatctttttggggggttttagcattaatactcttaaattttacaatgtttgacaattttgtccttaagaaatattttcttacaatcaaattcttcagttgtaaaaatagtagcaatcaatttttcacaacttgtttagtttttgaattactttttattattactattcaataatcaatacaatgtaagtatttggagataaatattattcataaaatttagtaaaaagttgactaacattttcaaaacttaaaaagctttgattcttagaaactgaattcaaataataaataatttggggatattaatcctaaaaaaaacttcttattt

SEQ ID NO: 218253 - DNA, 2729 bp, Cannabis indica
acttaatctagttatgtggctttctttcctgatagcagtaaattattaaactccaggcaatttcttatactatattaaggtataggaagttgaaagcgactagtcttgaagaacaaaggaaagataaaaatgtttcaggcttcacagttccagctgcactctctgaggcatggaagccaatatcaatgggacacaagagaaggtattcaattgctagtgcttacttcccacgttattttgaaagtcaaactctaaaccctgacttttgcccatggtgttttgcttgtgtccattcttgagaatactgatgaatctgtattgaattgctattgttttggtacacttcagcaaagttagtttgtagaaattattcatctaagcatttattgttggactaacccctatttttcacttgactggttttaggtggtgggactgcattgcattgccagttgatgttgaatcttctggtgaaaatgcatttaggatgcaaatgagaaacctcgcctccacggtagattttataacctcatatcttttgatcattatttatctttgtcaattttctctcaatagccttcgttcttacaatattggaagctcattttgacacttgattgtagtgaaccaaaattgtaataatacattttctttgtggtattattgaactaacagtgagttttatttgtttcagtcgcttgagcttcttaaggcagccatctttgacaatgattgcgaaccttgtatccatccaaatgcagaacttatttttcttgatctaattagctatatgtgttttatttttctttctagttattaagttgaagcccttaattctgcaaagtattctctcttgaaatttatgggcacatagttggcatgtttgagttgaacaatctgtaagttacacttcctcaaaacttcctcaaaaccttggtttttcttgggttcataaacttagtaagaatgacataatcattgatcagagaaataggtggtgaattttgataaatgcattttactctttttaagttatggagaattgtcttatacttgtacatctcagtgatttggttgtagcatctccagttgaggattattttctgtacatcaatgatcttccatcttccaaaaaggtaagatacaatgtcattattcatcctgaaagtttaaccagtttttgttagattggaagtttactaatgcccttcccctcataccacttactggcagaaggaaaccgaagaaatgacacgacttatcttcaaagctcttggtgatgactattcagtttcttgcgagggtacattgctgttgctttatttcattatatgtctagtagtaatctttagttctttttgtccattttcttcttttgcggcacttgactattttatgcatagtgagttatcactcggcttaaatctttattcttgtgtaaaaatcatggatatttgatcatagtatttaacttttcataaatgcagtctgttatgagcagaatgtaatacctccaattttgttacaggcagtgcgttctttcccttgcagagttgtttgaatcactcatgttgtccaaacgcaaaagcttttaaaagagacgaggtatgtaaaccagaagtcacatgatatgatgcttagtatagaattttgcttctctctttcaacacatttctatcctcataggattattagagcatttacatgctaaaagcttggcaaaatagatatagccaagtccaactctgctatgagcagacttagcttacacgcacaaaagtacagaatgtacttgtgcttacttttaaatgatataacaaagaaataaaagaagtttgatttttttctattgtcctatgatcttttgaaatttactttgtccctaattctttggctacaaaggcttagcctaattggtcaattgatcgttgactctaagtcttattagcagcttttgaatcatgagggattgctcttttcaaaaagttgaaataaataaaagaactccttccggttataatatacaaaagtaattgttggggctgtctttgtgatacttttaggatgtttaatttgtctttaccttctgatcaagaaacataaaaaagaataaaggtgtagaaaatagtgaatgaaattatatattattcaatagaatagtaaacatttatatacaaacttagagagacttaataggaaactaggaaagaaataggaaactaagtaattacaattattcttaatttctacaattgatgtaaattcttacactctccctcaagtcagagcataaagtttgttacaaagataatcaacctgcaccccattcaaagccttttgtgaaaatatctcctaattgttcttcagtcttcacatattttgtggaaatcaggttttgttgaactttctcatgagcaaaatgacaatatttcaatgtgcttagttcgctcatagaacatgggatttgaggcaatatgaagggcaacttgattatcacactacaattttgctggaagtcttaagctcgacttcagtcaaaagttgataaatccacactatctcacacatagactgtgctatattctgattctgcactagatttagacacaacattttgcttcttactcttctaagagatcaaattgcccccaacgaagacacaacaacctgaagttgatattctatctacattggaaccatataagattgaaataaactagatttgtact

SEQ ID NO: 218254 - DNA, 4328 bp, Cannabis indica
tctcatttgtccaaaccctaacacagctgccacacacgttttttttttttttgaaaaaaaaaccctctcaactcactctcagccgtcccaccaccactgtacaggtctcccaaccgcgccaccatcttccagccacaccacgccacccaccgtctagttctcccagccgtgctgctgtattttcttcctttcggctccgagagtggtgagttcctttattgtaacttttaagaacttttttatattttttctctttgctggaagtaaaagtttataatgacaaaagagtctcattttttttgtttctttgaaatttcaggtcacctacaaaacatcgggagtcccttgcttaggtcgtgttgttgttgggagtccatttgctcagtgctctggagcaagtaaggtcgacatcttactttattttcctcttttaatctgattttattatctttgtgtgactatatcattgtgatgtttgtgataaaataatatttgttagttttattatagtgtgatttttttaaaaaaatctctgtgaatccattgttgtgatatttgttagggtgataatgtttgtgataaaaaagtagtgtagtgtaatataaatgtatattaatatagtagtctatttgtttgtgataaaataatagtgtaatgggacattagttattttttgctactggttagagtgattataatgtttgacatattttgataatatgtgttaatttttgctattactattaggatgtttttatttttattggagtagttgttactgctattgtgtagtgataatgttgtttattttttatgtaagaaatgaattatatatttttttttaatttttctagtgcttatgtgttattattttgctaatatgtttaattgcttgtttaatttttttttttggcagcaatgatggatatgtttattgtaccaatttctacccaaataggtgaactgaataatccaaatcctaccccaactaccaccccaacaaggtaattttattgataaaaagtgaatatggtttgacaaagactctttgttttgttatgtttgtatatttataaaaatttgactgattttatgttttattattgtagaaaataaatttaaagtcaaggctttatcaccaaaagtaaggagtactgaggatgacattgttggttgaggtcaatatgagaatttatggataattttaatattttgaatatggatgactgtaataatttatttttgatgtttgaattttttataattttgcctaaaatttatatttatttaattattcaactcaaatttttttaattggaaattttaattgcaaaaaattaaagtggtaacccaacccaacccgatcaataatgggttgggtaatgcgttagaatttaataggccgatcttggcccactaaaatagcctcaacccggccaacccaacccatgcacatccctaatagaaggagtagcctcactcaaaatgtagcaagctcaactgttcgtggctgccaaaatgaaatggaaacaactgaaaattaaaatactaaaaaaaatatataattttatgtattttttttttttgcaatttgtgttgttatttgcttgaaagaatgaattggccccaatttaaggaaaaaagaaaaagaaagtaacgataataatctcttttttcttgagcaacaagtaattcagtttctgcatatataattttaaaaagaaaaagaaattattctcaacaccttaactgaattcctaatttctcgctaacaagagctcgccccatatataaaacaatctcctcaattttcaagtctcaacattcccatttcttcagaaaaaggaaatatcgaaacagagagagagaagccatggaagtaagcatcaggcgtacttttccaaacgacatgttcaacttcgtcgttgacatgactactgctaacaataataataacaatggagataatggtgatggccgccgccgatcattcaccgttcacaccctctgggtcgacaccgaagactacgccagaaaatgggttttggacatgcaaaattaagaagatccgtaaacaacgtcctatcatcgtcgctctctgcgccgatcgcagttacaactacgccgacagcgccaccatgaactactataacaaaggtacaagaaagaaaaattttcatattaaatttcaagaactgacagtctttcaattaattaattataatttatctaattattattagagtacaaagatcgggagtacgatttactacagatttgcattgaagatcaatgccttgttgtgaaattggatcgaaggggtggttgttggtacactagatttaactgtaaaacgctgaaggaatttctcctcgatcatcgcgtgacggtggtcggagttggattagagaatttggtggagcggtttgaggaggattacggctgggaaatgcccaagattgtggacctaagagatttgtgggcccaagcccaacccaaatcccaggcccaggtgcagcaggtgaggaagaatttgaatcgatttgggatagcgaggttggcgaagggggtgctcggagaagaaatgaatctggtgaagcctgccaaaatcaaatggtggtctcatccgtacaattctaacaacccgccgagatttcattccgatgacgtgatcaagtatgccaccgtcgaagcttttcttgtttttcaaatgggtattatggttcgggacactaaaaactagtaatacgacgtcgtctcagctggatcatcgggatgattagaaatatagttagttagcttaaactctaaagctagctatagtaaagtagtaattttcttgttcatttacagtcaccattacttacaactttactattacttgactttgttatattttcattgttttgaacagactttttagacaatgatttgtgattttggtgattcatcaatcatcaataaaatagtttgctataatattttctcagctttaacattctaattaattagaacacaactaagttaaattggcttggagttcaacttcataagcaatgagaaataggtaacttgattgtgttcctccttttaggaatatcccttaataggacgaattacgaaacactctccactaattttctactcgaaaaacctaaacttctttttcatgtaaccatagcatgttacattattttttattttaatttttatgcactactctcagtctattctttgaagttgaaactatcttataaaaatttaattttatttattttaattcacacttttatatacattaattttttttatagtttttttataatgttaaaatattttatcttaaacattttttattaattaaaataaataaacaaaaataaaaaaaggaataaaaaattaaaaaaaaaaatgtttgaagaagctccaaaacctagaaaagtatctctatatgtaaaatatgaatagtatttgagctaaaatgaaaaaggatttaactcacttaaggagcactattttattaatttttaaccaaaagttttaaattgagctattagctatactaatgtaagtgctctaagtacttaaattatatcttttgattttctttttttgccaaatgagtttatagaaaaagcatcatcaatcatcaatgattctatagagttaaatagcttgtaaattgtgagacaataataacaatggtgtcaacttaataacaaatgtaagaaagttagtgagtggaagattttcttctatctattaatatttattgttcatcataagggattacaaagatactccatgagaactaatcaataaaacctagagttgtgtcttatgacccaacaataaaatgcctacaaaataaataaaaaaaaatatatataacaaatatttaataaaatgtgaaattttatataaatatagtcacataaattttttaatataatataatgacttatttgttctcatctctattgctaaaggtggctacactacatctgatatattatttattagaccaaaccttataaatcaaaactagccatatacagatttataaaactaaaattagtcatactagtctcacaaaaccaaaactagccttattaaccttacaaaactaaaactagccttattaaccttacaaaattaaaactaaccataatgttggccacgttgctcgtacaaaaaaactagtcacattgaccgtacaaaatacaactagctacattgatcttacaaaattaaaacaagacacaaaactagccctatcggttttacaaaactaaaatgccacattagctataaacaggcctgaccct

SEQ ID NO: 218255 - DNA, 4271 bp, Cannabis indica
tgtacggacgaaattagaaaaaaattgtaattttacaaacattgagtacttatgccgctacaaataaatattgagattatgccacttacgaacttaaaactttgggaaaatttttaccgctataatttcttataccgctatttaccatattttttgctagccaatcccaatagaagagggaaaatttcccaagaaatggactttgctctcctttagcactctcagttgaaaacgacgtcgttttgctgcttgggccaatctggacgaattggaatgaagggaagctgaccctggtagttgtcgtccgtacagtagtcgtagaagaagaaaagtagtaaggtaacagttgaagaagaagaactgaagaagaaacacaatcagaaaaacaataatggcgtacgttagcatgggcgaagcgcacagaagaatcacagagtacctgaatcgcttctacgatgccgtttcgtaccaggacggagcatctctcaagttcctcctctctctctcctctaactccccctccctcctatccctcgccgatgccctaaacgtctaccaggacgccaatagattgatcaagcaatccgacaagtactcccagcttggagaaatcctcgtccctctctttcgagctctccagacctatcgactcgccaatttgatcgatgcctaccaatcgtttgaaaaagcttccaagtaattttccttttttattttttttgcatttttccttcattaatttcgattattatacgtatgtgtatgtgtacacatgcctgtgtatgtgcgatttggtaatagagtggattacagtgctttcattcaggagtttcggaattgggattcggcttgggctttggaggcattgtatgttgttgcttatgaaattaggattcttgccgagaaggtaatgagttttgattttgtatttgaaatacagaatgttataatgtagggctctgataggtttgtattggtaaaggggcaattaatatactttgtttttctttttatattttaggctgatagagaattgggctcaaatggaaaacctccagagaaattgaaggcagctggttctttccttatgaaagtctttggcgttcttgctgtatgtttatctcgtcctaccttactccttaccatgcacaatctcgtgattctgttaactctaaaactaatcaaaatcaagaaatgagtaaataaatacaaaaagacctgaactttttattgtttatgataatgatcaagtgcattaatagttatatggaaattaacattgtatctaagttttccttaattttttcttgcaatgctacttttattgagatgattcaatatggtgttgtgttatagggaaaaggcacaaaacgtgttggagctctatacgtgacttgtcagctctttaaggtttacttcaaggtaaaacaattataatgccttaatccttttgcttgctgacattcgtttattattaataatctgcttcttttgattcttacaagtacataaggttttgcactgattttttatgttgtggtattatctcagaggaatcatgaaaataattttactgaatcattttattctctttcaagtacttaaaataatgctaccaacatgaaccacacttatgcaaattgggaacttttttttgttaatttgcagcttggtacagttaacctttgccgtagtgtgataagaagtattgaaactgctcgcatctttgattttgaggagtttcctaaaagagataaggtctgaatttgcttttccaaatcaatttgcatactgtgttgtttttctgtaagaaagttcactgtcatgacttgttattcaggtcacctacatgtactatacaggtcgtctggaggttttcaatgaaaatttccctgctgtaagtaatctacatccttcaatttaacagtttagtttattttcttgtcagttagtatgaagttatttttcttggatgggggaatatccattgtttacccttgtttcgaggactctgattcggctaacattctccttctctaccgaatccaactagaaaaaaaattatgttttgtatgataaaaatatcatctataatgatttcttagcatcttgaaagaaacttgttgcttgccaattatttattcaaatcatatcaaatcttcaactattcaactttgtcatatgcatgagaaaaatctgaaattcatagttttgcctattatgaagtctattattcacataatctatttccatgacctggcaggctgatcacaaattatcatatgccttaaagaattgcaacccttacaatgaagcgaatataaggttcaatacatgtgttcttgactcactgcaactctcatgaattttagttatatatgctctggtttattttggtgtattttttgattttgaattagaagtcttggatatataaaagttaaagtcgcaatattttctgtctcacaaattcattctttgaactgggataggatgatattgaaatacctcattccagtaaagctttcaataggcatcttaccgaaggattggcttcttgagaagtacaacttgattgaggtatgtcattcgtttatttctaaagaatggaaatttttctacgtggctttattgttgcacccctgattaaccctctgatataatcttggagaaaatagcataatcaaatattgcacgtgataattctcatttgtagctcttgacacctagatcaacaaatttctaactcgattgaggaacttgattgagttggttccatatctctgataattaatactcttttcacagtataggaatgtagtgcaatctctaaaaaggggcgatcttcgacttctccgacaagctctgacagagcatgaagatcggtatgtgtagggattcttttaacctctagaagtttaattctaaaaggttttcacggcattgagaacttacttatctgcattatcaggttcttgagatcaggtgtatatcttgttctcgagaagctagaactccaagtttaccaaagactgttaaagaaaatgtaaatttccaagtcactttttaaaactgtcatttgattgggaatttttggtagaatttttcctgatttccccttttcttatgaaacagttacatactccaaaggcaaaaagacccaattaaagcacaccaactgaagttggaaataattgtaaaagcattgaagtggcttgagatagagatggacctggatgaggtactacttctgtcttccgtatttagctaatgaaaactgtctaaaacctctctttgtcaatgtttatatatatatatataactgatggctgatctggcaggctatcttatcagatacattttctctttgtgtgtgtgtacaggttgagtgcattgtggctatactgatatacaagaatcttgtaaaagggtacttcgctcacaagagcaaagttgtggttttaagcaagcaagatcctttcccgaaactaaatgggaagcctgttaactcatagtgttagttaaacaaacacagaactataactatagaaatgctaccaactccggatggtctagattgagtagaataagtgccttatcgctccataagtttgtggcactttaaagcttctactctagttggtagatgtagaacaactcgcatcactccatttttgtgcgataatttcgaagagattgttaactttgtgctctgtttaaaatcagtgtctacgtcatttgaattttgaaatatataatttttactttctgtatttgagtgacaaaaatgacaaaaacaagtatctattggcttcgtaaatgttgtcacctaagatattttttgaatgtgtaactaggttgcctagtaattgcaatttattttaaaatataaaataacattgtgtaatatctaattacaaaatagatagcatttaccaattacatattgcacacccaatttcttcaatatgtaattactgtgtaattgattggttaaactaagtaattattaagcattacactcaattcgaagtagctttttctaaatactcttagaaagtgtttagattaagaatcgtactagaggaattaaaaactacaaacaaattaatgctaaaaatggaatctacttgggcatacaaactctcaagccatttacttttgatttactaaacatgggttaatctttacagtatcaaacgatccttctattttaatcgtgaatagtgataaatgtaatgtgtgcacatatcattactcaacaccctata

SEQ ID NO: 218256 - DNA, 2797 bp, Cannabis indica
aatattttcactttttcaattttaaaaacagaaaactgattaaaaaagtattaccaaacgatacagtaattaaattgaattaaattagtttggttcaattggattggattcaatcctatccacccctaatcctaattatgaaaatacaagccctccttttcattttgctaatcaacaacatatttccttaatttttaactactagtatacaactatacaagtctacaacaaatcttatatctgtattaacatttataattgtagagaacttaaaagtgcattaaacacaacactaaataaaatgatgtatgactacctagctgactggaggtggtccccattgacaaacacaataccaatttctctctcaagagacactaagttccctcaaatattttgtaaagaataataataaatctctttcaaaataaaataaaataaaataatcataattataataaatcggttggtagtataatcataatcataattataccctgaataggtagttttgaaacacttttaatctgttttggtatttaagaaaatttttaattttcttttttttgtattcattgtcgttatttatgagtaattttaaatttttaaaatcttttaaataatttactgtgcgaaataaagttcaaatattttgtcgcacagataattgcttttctttgtgacaacttgtagtctcatgatccataagagaaaatacagggtaaactatgcaattctacattacttaaggaagaccaagtgtgatgattctaagactgtgtacgtatgagactacacaattaaaaaaaacttaaatagattgatgggtattacctatatcaacaaagtgcatcttattttatggtagtccatcacttaagaagtccaaagttaagtatccttgacttagagtaattttaggatcagtgaacttttggaaagtgtgcaagtaaggacaaaatactctaaaatacttgtgttggtttgcaggatcagtcttcaattcaggtagcagccaaaatacgatgtattcgtgtataagaactataaatctgttgggggaagcctaaaagaggcttgaagccgtcacattcctatacatgtggtaaataactgtttaagctttatttatggtattatagactatttataagtttttttgaaatttacaagttgtcttaaataactagaacgtatataattaaaataaaaatacactaaaatttttcctaaataacgaaaagataaaaaattgtactaaatgactttttaagagatggtgtactaaatattttttggaattttatacatgaaaaaaagaaattatttgtgttggttcactacaatggaatgataatggtaatacgagtagttatgtatagtaataagaatagtaatagtaattaatatgaattgtaaggggaattgtgatataaaagtaataataatattatgatgtagtgttataattacgggtcggatattttgatactgacatgaaattgacatgagtcttgaaggcacgaacgattaggtacgaaaaaatatgggtttggacatgacaaaatacgggcttgggcacgatacgatacgaaactacaaattgacacgacacggaacaaaaaatatatctttaagcacgatacgacacgaaaagtataaaagatagaatacgtaagcacgaatagactagcccgaaaatcacgaatagactagctcgaaaagtacgataaacgaaaaactcgaaaatatgacacgacatatcaaaattcttataataataataataataataataagatatgagtttatcaattataaataaatttaaataataataaaacttaaatataatacttggtattataatttttattattaaaaattaaaattatataataattaatttagagtgtgatataaaaattttgatatttataaataaatatgtaaattttaataatattaatatttttttatatgattatttataaaatattgttcaaaaattttataaatataattaaagctttgaaatatataatttagtaattgtaaaaaataaaaaatatctaaaaagtaaaacataaatttaagattgaatatgaaaataagttggatctgtttagaaaataccggccgacacaaacaaagtactgcacgaatctgagcatgacacgaaaatattaggtctacgggccgtgttaggcctactctttaaaaatatttgtgagatggcacgatacgacttgttttctgaaaagtacaaataaataccgattaagttagcacgacatgcatgaacttgtagcactacaaagatggtggatagaacttatagcactacaaagatgttggataatgagtagtgtattaacaaaaatatatatatatcattactttaaattcttttagtaatggaagagtataagagtaattttattagtaaataattggtgtaatagtaatttccttttcattacgccaaatcaaacatagtataatattaagttaaatatataaaaaggaaaagaaaagaaaaaaagaatgtgcatttggcttatttttgacttaaagcttttattcttcgatatagctagctattcaagtattacctccatccagctattgcaatattgattcctgtcactttttttctttttttcataatttttaaaatttcaacaaaaataaaagcgtgtccattaaaccttttcaagtctattattcccatttaaaaaggtatggggaaaccaatacaaactcctctctctcagagctctctctctctctctct

SEQ ID NO: 218257 - DNA, 7770 bp, Cannabis indica
aatgaaattgatttattttgtgaacgtggggtgggattacaataaaaatagtataaagtccactgcaaattcaattaagtcaactcgatttaagtcatattataaggccaactgccacgccggccaatacttgtcattgtatttttttttttttggctcaaatgggggtagttttctaagaacaaaaaattaattgaaattaagtaatggcaaaaacaataaaccccgaaaaaacaaacaatttatatattttcaggaaaaaaaaaaattatatatatggaaaatcttgaaagcaaagcagctaccttccagaagttagcaccgacactgcagacgagtacattgacgacgtcgtattgcaattactattatcatctcctacactaaaagctgcaagctgtggtgccgcgggatcatcatcatcgatggacaataagtcaacaacgaccattttcgtatctggcggttcttcaaccaccactcggccctctaacatctccaacacttgggccatactgggcctcatcctggcccgttcttgtatgcaccacaagcccacataagccaatctcatcacctccctctcatccgcccctcgcccaccattctccgccataagtctccggtcaactacttccataatcttcccttccctcattttctcgctcaatatcttaggaaaatactcccattttttaatgccagctgccttgttgtttctcctatcagctacggtacggctcacggtgttcctgcgaccgccgatcatctctaacaaaaccattccgtagctgtaaacatccgatttttccgatattccacgttcgaggagccattctggagccaaataacctcttgttcctcgaattgtggttaagatttgactctcgtccttacccattagcctagagagcccgaaatcagcgacgattgcgtgaaagctttcgtctaggagaatattctccggctttacgtcgagatgcaaaaccctagatcggcagtcgtggtggaggtaggccagcgctttggccacatcttgggcaactctgtaccttaagtcccaacacaggcaaccttctcggcgattggtgcgacgggaaatatttctattcgggttgaaattgttttcttcccggggagggaagatccaagcgtccaaggatccattggggaggaaatcgtagactaggtaccggggacgaccggggactatgcagtagccgaggagacggactaaattaacgtgttgaacactagcgatggcggcgacttcggaccggaactccttgtcgccgcgatcgaccttatcggttccgttggtaccgatacatttaacggcgacggaagtaccgtctgtgaggatgcccttgaagactgtcgcggagccccctctgcctatcaatgcttgaaaattgtcagtggcttcttcgatctcattgtaccggaatttggttgggacaccggcgactttacgaaggaaactgtactcgatccggagctctcgaccttcggagacgtgtttcgattctagctgctttcgagatcggttgtaatggcgtctgattatgagccatataaagacagcgataattacggaaatagcagagccgcagatgagaaagaaggccttggataaatgaagagtgattcgagttacgatgatcaagaggagcaaagagagtactgttgaaacagctattatgttagctaaggcgtcctccattaaagctactcattcttgtttcatcgaggtatatagactagggagagaagagatcagaggtggaagaagctcaacctaaaacacactctttttgtattaaataaaaaaaaatagaaagagttataaatcaagttagattctttattttccttcctttttctcgaaaattaagtgtggcataacatgcattgaaatatttgacactagctgattgagattcagtatatccagatcggccaagagttgaaaaacaaggcagtttctgattttaataaatggaatcaaaaagaagaaacataaacctaatatatatatcttcggattcagtccatttctaaaaataaatctatattgtactttcatctaaatagttaattttatttttaaacgtatttagatctcttatttttggacttttatatggtcaactcaacgattttgtatcataattcattttgttgacaatatgagaaatcattttcaaatgactccaaagcttaatgtcaccctcattgttttaattttattaattattgattataatttgttttgaaggaagtttataataataataataataattaagttatatatattgcccacatgcacatgcatgatgcacatgtttgtcttattttttgctatataagctctatctatcgacctagtcttcaatcttcatggacgtactcatactgtgtatatgagtataaatgcatacatatactaccattgaattttgtttgtcttagtgaatcccaatatatatatgaattatattccgatgcttattacttgaaaattgcagatccattatttgtaagaaattaacaataattttaacacgaccctgcatgagcctcaatttaaatatatattagtagaaggtgctcatatagtcaacatcaaacattttttttgaaaaagaattaaagagtatcgaattaaggatcgcgaattgcagagtagaaaattggataaattaggtattaaaaaagatttaacctctattgcgcgttactccaacgcatatagaaattaaaacgctcctaaatcgacacgctttggcaggaccacttgtgaagaatatatatattgtgaaaattcaattcaatatacttgaagtataattaaaaatttagaacaactacttgttcaattgatcagaaaagtcttgaaaggctatatttatttgaaagtgttacgatagtgacaaagtggaaagaaaggagaaagagagaaattgaaattcattgattaaggaaaaaggaaaaatacaagaggtatttatacagaattgagacaaggaaaaacagagcaaactaattaactaacagcctaaataaacgggaagtaataactgaattaacagacaaacagtaacagaaataataggtaaatctaatatccccccctcaagatggactgtagatatcaaatacagccatcttgcgaatatgagatgataaagtagtagagggaagaggctttgtaaaagcatcggctaattgcaatgttgtgttgactggtatgaggcgaatagtcgaagctttaatcttttcccgaatgaagtggcaatctagatcaatatgcttggtacgttcatggaaggttgggttatttgcgatatgtatggctgattggttatcacaatatatgaaggcaggtgtaggttgattgatttggaaatcagctagaaggtattggatccaagttatttcactactggtgctggcaagagcgcgatattcagcctctgctgagctcttagaaacggtggtttgtttctttgttttccatgatattaggcaatcaccgatgaatatacaaaaaccagtaacagaccgtctcgtggtggggcaagcagcccagtccgaatcggagaagcctcttaggtgtagtgaagattttgagctgtaaagaagtccctgacctggactgcccttgagatatcgaagcaaatgatggatagcttgcatgtgtgtggtgcgaggagatgacatgaattgactcagcgtgttgacggcaaaagttatatcaggtcttgaaagcgtgaggtagagaagtctgcctataagttgtctgtatgaagaaggatcatcaagaaggtgtccctgttcattgtcgagtttcgttctgggatccattggagtcttggcaggtttactgctggtgtatccagtatcttcgagcaattgtagagtatattttcgttgagataagaacacaccgtcatctgatctggcgatttcaaaacccagaaagtatttaagtggacctaaggcctttagttggaattgatcattgagagagtcttgtagttggtggagaagagcaatgttcgggcctgtgatgataatatcatcgacataaacgagtagagcgatgaagtcgacattagtaccgcgtgtgaagagagtgtaatcggctgcagactgagagaaaccggctgttaaaagagcgtcagagagctttttataccattgtctcgaagattgtttgagaccatatatcgatttgtgaagtttgcaaacaagattagaattgtcctctgtgtgagaaggagagaaaccaggtggcaacgccatataaacttcttcttggagatctccgttaagaaaagcgttgttgatgtcaagttgcaaaatgggccattgcttgatggaggaaatggctagaagtaacttgaaggttaccatctttgctacaggtgaaaaagtatcgaaaaaatccaatccctcttgttggctataaccttgggcaaccaatcgtgccttgcacctttcaactgatccatcactgttgaatttaattttgtatacccaacgacagccaatgactcttctattgggaggaagtttcaccacagtccatgtcttgtttcgaaggagagcatatatttcattgttcatagcatcattccacactttgtgttgtcgagcttggttgtaatttcttggttcaaagagggcagtaactgcaagaatgaaagccttgtgagattttgacaatttatcataagaaagaaattttgttagggagtgaggagtggatgattgatcctgtattaaagaatgacactcataatccctgagatatgcagggggtcgtgttgttcttgttgttctccttggtagatcattggatgagttgttgttggatattgttctgttgggtgaatttgaatcaatatctggtgtagaaggagggtcctggaaatagttggtattcggagatgaaataatctccatgtttgaaggcacggcagtagcagtatcctggtgcaaaccagtatccttggccaaaccagcaacattagtactgtcagtatgattttctgtaggaaaatcacttacatttgtgttagatatagtagaagatggaaaaactaaatgggaaaagggatcaacatcaatatcagatttatttagagtctgaaatggaaaaatactttcatggaaaatcacatttcgtgatatgaatatttgtttgctattcaagtcatagagtttgtaacctttgatgccttgtggataccctataaaaacacatggttttgctcttggtgcaaactttgtacgatgagccgtaagagtacaagcaaaggcaagacaaccgaagttcttgaggttagaataatcaggtgctttgccaaaaatcaactcaaaaggagtcttatttttaagaagaggtgtgggagtttgatttattaaggaacttgctgtcataacacattcagaccagaattttattggcattttagcttgaaagaaaagagcacgagccacatttaataggtgctgattttttctttcagcaatcgcgttttgtttaggggttccaacacaagagaagtcatgcatgattccaagttgagcaaagagattcttaaacacaagttcatgagcattatcagaatgaaatttcttgactgtgcattgaaattgagtctgaacataggacaaaaattgaggtattatttcagtgacatcgaatttatgtcttagaagatagatccaagtgaatcgtgtgtgatcatcaaccaaagtgagaaaatacttgtagtttgaatgagaactaatatgataaggaccccaagtatcacaatggacaatatcaaacttattgacagcaaaagcatttttattaggaaatggaagctttctttgtttggctaaagggaaaatatggcaaggttcatttttatgtaaagagctaacattacaatctaatttgtcacttagaagggcaagtcttctttgagaaggatgtcccaatcttgagtgccaaagttctgcagtcacaacagagaaggcatatgaatcttgggtcaaggcatccatcacataaaggccaatgatgaccttacctctgccaatctccctctggttgtgcttgtcctggatataaaaactgttagattgaaactttacagaaatagaaccattatcagtaagactactgactgacagtatgttatatttaaaactagggacatataatacattggtcaaagtgaggtatttatttactgctatggaaccactttgatggacaaaaaaggagtcattgttagggagaatcaacctggttttacatatattagacacatattgaaacatttttatgttgttgcatatatgttgagtagcacctgaatccactatccaggaaccattattaggagtgatataatgatgagataaaatgatacctgttggccctgaaggaggaataggatctgagtttggcatacccgtttgttgactggcaagaagattcaataattgctggtattgtgaggcattcagctgaggtagaatggtgtgactttcatcattcgaactcttggaatctgagttggtttggacctgattagccgaggcatcctttgatttgttgttcttgaatcctggaggatatccatggattttatagcatttttcaatggtgtggccaagcatattacaatgggtgcagaagggtctttcttctttgaagaatgattcttggaagcttgaatatcagcctttgaattgttgttcttatctgatttgaaagcaaaagccatgttagtgttagaatcacttccagagttgagattacctttctggttttcttcttgggtaacaagatggaaaactcgattagcttctggcataggatccattaaaagaatgctgctgcgaatctgagaaaaatggtctgaaagtcccattaaaaatgacatgatgtactccatgtggtggtgttcttggagcctttttacaccaccacaagtgcatccattgcaggtacaattgggtctataattggacaattcttcccatatcgttttcagtcgagtatagtacatgcttatggtttgattttcttgacgaagattcatcaaattcttcctgagattgaatatgtgtggaccattttgttgatgaaacctgatcttcaaatctgtccatatagcagctgcagattcatcgtaaagcaaactagaagaaatttctttagaaacggaattaagaatccaagaaataacaatgttattgtttcttatccaagcattgtaaagattatattcagagatatgaggtttagggatagaaccatccaagaatcctattttgtttttgacagaaattgccaactgcattgcacgactccatgaggtgtaattatcttgccctgttagaggctgagagaccagaatgttgccggggttatcgccgtggtgaaggtaatagggatcggagggatcctcaagaggatttctggaattcagaactcgattgctttgagttgcagaaatggcagagccttgaattccagtttcagctccaatttcttgattgtcattagacattcttgattagagaagagtgctggaaagaatttccaggaagatgaacgaaagtcttcacagaaagagtgaaggagagaacaaatcagtacaccaccatcgccggagaagaagacacggtctggtgggaaaaggcggaagcgtagaagatcagtggagaagtcagtttctccgctctgataccatgtta

SEQ ID NO: 218258 - DNA, 3314 bp, Cannabis indica
tttttttttcttttttgctttatttctttttaattttatttctatttcagaggcccttcaagtcgtttttaagacaaagaatggtatcacatcacgttttttcagagagaatggtgtcacatcaagtttaaaagcatatcttatcgttaatgtctccaaattttttaatgggaagaagtatttgcttcacttttaaggctattcatttacttatttgattttgggccaattcaacttaacaaatgagtaattgtacttatgattttttgttgcacatatttaaatttttaaattatatttttaaaactactattaaatatcaaattataacattaagtaagttataatttaatgtgtaagttatatttttggttgtagataaatattttctttacgaattgtattttagttgtttaagctattcttagttcggtctctatattttttatttttggtttatttgttcaggagtatcaatttatttgatattctttaagtaatgtttctattagtaatgttaaacagcctgttaacaaagtcacgcactgtatggcacgtggtgcttgttatttttggtcatgtactctttttactgagagcgatgttccttttactctttagtccattgtattagcggatgtttctataaaaaaaaaaaaactactattaaatattaaattattatttacatattattttttttatttatatatttaaattaatttttaaataaaaataaaaatttaataacttaaactaataggaactgtcacatagtcattggcttaatacttaattgtcaagtgcctatataagtcaataaatgtaacttataaattgtatcatccaaattaaatttaaatatttatttactgttaaaatttaaatttaaatatttatgttataaattggtcttaataaaaaggattataaagttactttacccatttggattggcacatcaaatagcactacccaccggcaccaacaccactaacatattcatttggtcaaacaaagcatccaattatacttggcaagacttaatggagcaaatccttattgattgaagacatatgctatggaatttttattttatggaaatatgctatggaatattgttgtgcaccattttatgttgtttaacgtcacatcataaccatcagcatccgtctctaatggaaattgcaaatatttggcacaagtatgaaaatttttgtaaaaataaatcttctactaatgctcatcaaatattacataaaatataaaaaaagtgtaagaattgtggtttgtttagtccgtgacactagaggaggttcaagctcacaagactgtcaatcatggagaatattctaaaaaagtatccaaattctaatctttttcttcacataggatcagaaagttttcaaattctcgctttgcaggaacgctccaaagctcgcatctgtccgattcttcgagcccaaacccattttggagactaaaacccaagcttgggttctcatccagataaatattttatacatgtgggttcggtgtgttagactttttatttggacttacattaatttttattagttttattaaaaattgagttgattggatagttctttgctatgttaactcatattgttagtgattaatagttaattagcttaacatctgtatgtgtaaagcctaattggaacagaagtgtggggttttctagttaactgatcaagcctttgatgagcaaacccattccaactagggttatgtagctaagtcccatccctaactttataatacatattgtctcatcacaattgtatacttttaataattagatagataaataaaattgcttctgatttagagatttagagatgaagacttagttgatagtattatactatcaaattgttgcaattattatggattcatcaagtatgtatacctaattattatctattattattttttctgtattatatacaaattttgtattttggtttattaattcattctcctcttgatgcttctaattgggataattgtgttgattgtactcattgaaaattgactaaaacaagaaagaagtatgttaaccatagtcaacatttattagaaattatccacaatgacatcagtggaccatattccactatgttgtataagaaataaatattttatccccttcatagataatttttctagatatgacttcacttacttgattaaagaaaaatctgatgctcttgataaactcaaaatctttcaaattgagattgagaaacaattaaaaagagtcattaagattgttcttttggagcgtggaggaaaatattatagtcgttatttagaatctggacaacacatgaggccttttgctaaatatttacaagaaaatggtatagtcgcttaatacactatgccttattcacctgagcaaaatgatgttgctgaaaggagaactcgtactctaatggacatggttaaaagtatgacgagtagatcaaatatgttagtattcttatggggtaaagcactcatgactgctacttatatcttgaatcgtgctccaagtaaatctgttctcaaaactccttttgagttgtggactagaagaaaccctagtttgaatcatctttgtgtatgggattgtccagctgaattaaggatttatgatcctaattagaaaaagtttgatccaggaatagtttaatgttttttattggttatccaatgcgctcaaagggctatcacttttactgtcctactcatggtatgcaagttttagaatcaaagactgctaaaattcttgaatttgatgttgcttaaaacattccttcagcatctcttgaaacaagagtcatcttgtaacgccctaatctatagggatgccatgtgtgtgattttataaactagtttcgtattaatagattaattaataattaaaattcgtgataatattaaaaacttcactaaaataaaatactaaaaaatagacatcatatcgacactaaacctatgttccggggatccctgttataaaagttttacaaaagaactatatacaacaacaagtcaaaatacgaaatcaaaatacaaaggaaatacagcccaaaaaaactcctgacaactcaacacacaggccaataaggtcgatatgtacattgctagagaagactatcacctcatgtctgctctaacttttccttgcccttacctacactacagaacacacgtgagtcacaaggacatagctcgaaaaagtaacaaaggagaatacatgaaataactaattatccatctcactattataaaataattaa

SEQ ID NO: 218259 - DNA, 5649 bp, Cannabis indica
aattcatatgtaattaccacctcatatccaaacataccttgcattttaaaatatagtgtaattactacactatgtaattaccaccctagtaattaccctatctagtaattacacagttacttccaaacgcaccctaaaagacacaatatttttattttttttattttgagcattggtattgagtcttattgcttaacaatttctaaacatttggttacctgattgttggtaagttgctcctatattcttcagtctaaaggacataattaggtaacaatacactctcttgtctgttcggaagctagtacattatcggtcagctacatgcttcttaatctggttataaccagagtaaacatccatgaagcaaaacaatttatagggggatgtggcatcaaccgtttggtcaatttggagaagagggaggtaatctttaggataggctttgttcaagtctgtaaaatcaatgcacacttgtcatgtgctgttaggctttggtgctagtaccacattagctaaccactccgagtaatagacatcctggatgaagatatttgaaaacatcttgtctatttaaagcttttgatataattggatcaaggaacgtcttttctgctgcacatctggcatattcttgtcaacgtttagaacatgggtaattacgtttggactgatgtcagtcatgtccctgtgagtccacgcaaagacatttgtcgactctttgatggtttccactatttcacttatttcgttgggaccaatgcctttcccaacgtggatcactttttttagatcatgctcgcaaatttagatttcttacacttcctctgtaggttcaagtgtggtttcgactcttattcagggatccagctcatcctgtaacccgcactgggtttcttttttcagtttgttggaccattaagtcagcttgtttggtggccacactataacactttcttgcctctccttggtttcctcaaacagtccccactcttgtggagtgggtgggaaatttaaggcataagtgcctaattgaggttataactttgaaatccaccaaagtcagacgtcccattatagcgttataagttgttggacaatccgccacaacgaaggtacaatatttgaatgtgctctaaggagtgtcaggacacaaagtcattgggagccttatttttcccatgggaataagggaattcccattgaatctcatgagctgagaaccactcggagacgagtcttggtccgtgaggccggtggcaagaaaagcttctttgaacagaatattcactgaactcctcttgtctaccaagattcgagcaactatcttatttgcaatgggaggcttaatcaccaacgggtcatgatgtggaaaatgcaccgtctgggcatcttcttcagtgaacattataggttggtccatgaggcgaggtctttgtgtcggcaattggcctacttcccatacctcttcatcatgatccaggggttcggcatagcattttaactcattacgggtcgaactccctatatgagggcctacggagatcatagccactctcccggtggcctaggaaattgttcgagaagagctccttagttcagtgggagtgctcccgaaggaacctacacatatggagtctgcactactcctctgggtggtgcttgggcttcgacttgtcattctctcatgtgtggcaaatggtttcttatccactcgtacaaatggcctagatgtatcaatcaactctcgatttcgtcttgtaaattttttcgttcattggttgcatgtccaatatcattatgatactcgcatcttttgttgggatctttccaagaactgtctcaaaataaaggaggcgacctctgataatgaacattctatctagtagccaaatacacacgttcttgtgtgtctaccaaatcagtataatgagtatactgaggaatgtatctagagcctctctttagctttttgttctcactctgggtacttcctttagattaccttttgctttaggacactttaagagttgcagctgcacttgtcgagtgaagcaaattgaataggatgctgcatgcatgctctggaatgggaccaccacctggcaatccgtagtcagattgagctggtgccacaacaagattttacaagtactcaggcgtacactaggcatcccacttatttaaggagcgacaagaagcgtggttctatggaattgcactctgggagcatacctggggcctccaatagggtaatatcctcccaaagcttttatttgggcctctttaaagttgatgtacttttgagctgttttctgaaaatactgaaggctagccacaccttcttgttgtagttcattccagaaggtagttctcgtctagataccaacttgtaacgatgctaattgttgttcatcatctactttctttgtttaggaagcctcctctttgaacctcttgatgaaattcttcaaagtttccaaaggtagttgtttaatgttactcaaggcactgacttcgagatttatctttctggctgcaacgaactgtcttctaaaattaatctacaacttattccaacaatccttgtattcgggatctaacttcttgaactattcttctgtaaatcctctcaatgttagtggaaaacataagcatttagcgtcgttgctaaccatcataactctgttaaatctatacaagtaatcactttgatccatgtcacctgtatataaagtcattttagacatcttgaagttttttgagagtttagcctcaaggacatttctggcacaaggctcccagtcttcataatcaaactacgagtcatctcccttttgtctctgagagacccttgctatgtccttctagaggatagcaagttgtgccaaaatcccttcgtttaggatactcccagagactagaacaactttctttttttttggtcaagaggcactttgaggaatcgtgtttggcattgagcttttgtcgcaagtcgaccagggggtctttctaggtgaagcccttcttttcctctggttcttggtgcacggacacactcctctaagcttcacggtcctgggggccagttttccccttgggaaacctacccctgtagacatttcccttttgggagatcaaaatgaattttcagtgtatcccatgccgttttgttctttttcatgtatggtcgtagggttcccctttgggggaggtctttctcgatggtaactgatgggactaggttccatatccttatgcttttagcctatcgcaggctgagaagctctttcccctgtcttctcttgtacatacgagactgcaattggatttatatgaatgcttacatttttcattttctttttatggcaatcaatatttcttgcattctcttattttgttttgccaattcaacctcatggttagcagatttttgccttaactcaactaattttgtatggttgtcttcatcatactcttttgtactcctcttggtatgtacactctttatcactggtctctcctttccttcagcatccacccaagaagccgcttcttcttcttatggaccttttgggtcgttaggttattgtggatgtgaagtttttcttgttaacaccattatactacgaggcttttacgacttcctcttatggtaagcttcctacaactctcaatgaaagcttcaaaatattgaccgagattttcaacaattgctaattaaagttgtttgaagtaattaatgagtattaaagaagagaattttttacgtggttagggcattaatgagccttagtccacgagccactattattaatgagcgccttttcttagagagagttctgaaaaatcccctattctatacatcattggggtatttatatgcttataatggtggtaaaaggctaccattgtcgtgattgtatgagtcatgcttcgcacgatttctcaaatttgatcataggacattgttgtctagtttttatgatttgcttaggcttcttataggtgtttggtaagatctgacttatctcttgttgtgatttgatagctcattatgcagccatcaattaatgtatggggcattgtaaaatcagtgaattatgagtttacacacttgagcacgtctttagatacgtatatagtgacttaacctcgagcagtgtgctatactccgtctgtccttccatatcttctttaagtcgaattcactcacggagaggaaaagacaagaaccacccgtcatctaggtaaaccctctcggagatgatcaatcctttgtaattcttgcagaataacaaactccaaaagtgattaaagatgacatgtctcataatgtgggtcccattgccacatgacttgctcttgaactcacgtgtttttggaaaaaatttaggcaacacatctcacctttttaagacttgtttttcctgtttgaatgataatattccctcaagaaaaaaaggaattgagatgtattggtaattattttcttttttgttagttgatatattgataaatttgtgttatgtaaataaaatttttattttgtaaaaatttcatcaaccttaaataatttctacaaaccaaatacatataatttatttaacaaatttcatgaaactatagttaattttattttttttgaaaggtttcgtaaacaatatatactaattttgtttccataatatagtatttaatattctaaatttgagtcgtcatagcataacttagtagtttcacgcttaatttcctccataataataaaaaaaaaaatctaaatttgaagtctaaaaataattagccgtttcaagaataaaataaaatagagagataccgaagaaaatagtaagtctatatttttaatttttattaaaaaataaacaaatgagtagtttagtaggtcacacgttaattatgtatgaatctataaattttttaaatgaaaacgaggtattttcgaaaaatatttgtggaaaaatgatattgggctttataaaagcaaggcccattatgattgggcccattagatgatggggatgtttcccccctttccttagtgtttccctccttttcttctttttccatcatcatcatcatcgagttgtactatcactaccagatcagccgttgtaatttccccgataatatgcaccttttctagggtttcaattccgatttcaaaacttctcacctcttccatggccgattccaaaccttccaattccaatcccaatcccaatcccactgccaatgccaatgctagtgctgcccgttctcgcttcgatgattctgcaaggtcttttcttaattcgatttttctcgtactattgctacggctactttttttcttattttaattcttttcactttcgtactcgtttcaatttagggtttttatgtctcttttttgtgaacgcagaataatgggtttgctttggatgcgactgcttttaatgaagccatgaaactttttgaagaaactaaggatctagtacagacgaacgcttctgcaattggcggtggaacggtagaatttgtggatttttttgttttgatagtgtgatttattgtgattaatttgtgatgttgaaatatggcgggagatttctctctcattgttgactaaatgtagaaactttttttttt

SEQ ID NO: 218260 - DNA, 7045 bp, Cannabis indica
ttttttttttttttgaataagaaggttgaaataattgagtagatttgataaaacgagtcagtgcaacataggagggacgtagttttttctttctttctcttggcaaagtcgtggtgaattatacaatattcatatttttttttcttaatatatacctctaagagaaaaaaaaaccgagtctaggtggatgaaatgctgctgcactttatctatacatatgatgatgactttcaatgttagaatccaagttgaggtattgtcgcgtggggataacctctctatcgctccatcagagtgaactttatttggtggtgtgacaagaatcaacggtccctccctctgaatcatgcagcacgtacggtccacaagatgataaatgatgggcccatacatatatatatatatatatataatgcactaatatacaaactattattttgtaactcctgtttctcctatatggaatggagtaaagttaatttcttacttactaaattaccatatgagattcagaaagatatgtaacagagtgggcagcgttaggcgtttctttctgctcttaaatatttgtcctaccctcatatgtcgtcatcaatcatgtaattaaatatataataatatatatagtcattatatattatattatattttattatatatgtgtaaagttagatatcattgttatcatgatattaatattataaaaaggaggctactctgccatagtctctcttgaaagaaaactatatgtatgttttgagaagggagcatgatttagatctacctcactacttatcccctgctcatataaactaaagtgatagaaattatttacatattctatatatatatatatatatatatttatcttatatataagataagatgatgaagaagaggccaagttggtcctttctgttgtgtaaccagagttgtaaaagcaatccatctaaaacagctgatgactaccatcaagacgatgaagtgaaggaggataaaaagaatggaaaaattgtttacgatgattcagtcaaaagaagttccggtggatggaaggccgtatcttttattttaggtactacatgtactgaatatatattatttttaggccaggcttatctggataaatgtacaattgatattttggattttttttttttttcatttatgagtataggaaatgaaacttttgagagattggcaacgttcggattattggcaaactttatggtttacctaacaacaaagcttcacatggatcaagtatcagcttctaacgttatgaacatttggggtggcatcaccaatttcgcacctttaattggggctttcatctctgatgcctatgctggtcgcttctggaccattgccgttgcatcttttgcttcgcttttggtatgttcttttaacatctattaataatatatacactaaaaaaagacaaaaaaaaaaatatgaaaattatataaatacttcatacgtatacatatcttttatataaatatttgtatactttagttacgaacgcttctccataaaattttttttttttggcaaaaatagctaaattccgttttactctatacccctttattcaaaaatcacatttaagtgccacagtagactgtatacgtggcaaatttttaatggtccacgtaatattaattttaaaaaataattataaatatttaaaaagttaaagaatcaaaaaaacaaaaaaaaattataaatattttatttttaggatattggcggctaaaccacccgcacgttaaattttttaacacttaattaaaaaattaaatttttggaggcaaaactacctaaattctcattccgttttaatacttttcttttcttttcttcttcttaactgaaaaaaccttaacacccagtcgcctaccccacgacccaaccttccccgactcccctctcacacactctctctcacggtgcacaacatcggccttcttcgaccaccccatgttagacggcccatagaattgaaccccacgacccaaaaaatcccaaccccaatctgccctcttctctctctccttcgatctttctccaacccccctctgttattttcttgttcaatttgaccccccttcggtgaccccacttgattttttaatttcttgaaaatttataactatttttaaaattaatattacgtggactactaaaaatttgtcatgtgtacaccatgtgagtagtctactgtggcacttaactgtgatttttagacggatgagtaagtacaaagcaaaacagaataggagtttataggtagttttgtcccaaaaaatcgattttcgtagttaagcgttaaaaaaatttaaaattcaagtaatttagccacagatatccctttaattaattattttttttttcaccttttatttcaagattgctcacataaaatttaaagacagtaatatgtatatatatatgtatatatatatataattctagtactctatatgtatatatatatgtaattctagtactatacatatataattcttttttagaaaagtatatattatatgtaacttcgtaaatgtgtacatttatttcagtatcaaactataattaatgcaacaattgaaaagtatgacttatataaaaggaaaatttacataaaatattttttttgttattttttttacatttttacatttaaatatatatttttttaattttttataaaaattatctgaaaacaacaaaacaaaatacacaaaagttacaaaaaattaatgttaaaataaaataaaaataacatataaagaaaaaaaaaaaactaacagtaaaataataagatagaatataaaatttattaaaaaaaatcctatatcctataaataaaattttaaaaacaattcagtatttcttttatttttttttattgtgtttatttttaaaataatccatatataataatattaaattttgttatgccctttctgaaggctaattatttgatggttagtctgtcgcgattgctcatggcttgctacaatggacaaattttggtcaaacgaacctttttctatcaattaatttgcattaatattagcttctgtgctctgggtgttctttttcatttcagcattgctattacttaccagtgatgctaaccactttcttgatatgtcacgctgtgatttactagcgatattttttaaaagttattatattaaactatgtgggacccgatacttaattaaaccaatagcgatattaacacatatgatggtgctaggcacgactgatatcctctaactttctcttttcatttcttccaaggaaataaaaactcataaaatttccacaagttaataaaggttagtttcagtcactcgagtctcgactattttttttttcccgaaataataaaacttcaaatttactcacatttttctattctagaagtgacgcaaggtatgaatatactttgacatccatatagtgacatatataaaagtatgcacagtactctccggctagtggttcaagttgccttcgtgttcgtaatcgttggtcccacaacattaagagcgagcaagtaaccatttttaatttctccaacataaggtttggctggaaaaaaatcacctgttccatatttctgtctcatctatgtcccaacaaattatattttgccaactaatttaaaatgccaattgtacatttaactaatcaaatattattgactctgtttatttttctcctacttattttctttcttatttaaaataacaaaagtaatcatctccctctttattctagttattagtctacagtgtatattttctaatttgctataagtggtttgatgaagtatgtagagtatgcttacaattttctttttcttaccaggttgaataatctttgttagaaaaataagagttttgatttttatctttaagcttctaaatctgataaaaaataccaagattgaagaataaaaatatgataattcatagcagaaataattaatattgattaatgagatttcaattttagttaaatatagaatatcaatggtcaatccacatgcaaagggataaattatattttggaggggttgatttgtttaatatatatatatatatatatttatataaattagaggaaaacaaaccgactaagggagacttaggctcttaaatgtacagttggcatcttaaatgagttggcaaaatataattggttgggacagagatggaacaagaatatgagaacaggtgattttttttccaggttgattaaatcgcattaaagtgcatacaggtcatgcttatatgaagtagtgcaataaaactcatatcaaagcaaactctaattattagtaatattatacattaaatattttagggaaatctaacatattaataaattaattaatataatacccacatatattaagagaataggtaattaaggaaggaaggcgtgacttattcttttggtcattggtggatggaccacatgaatcatgaagtgttaaaagctatacgttttattatttaatttttaagtctatagttgacataaattttaaatttgtaagtggtataaattcatttagcagaataagtaattataaaagtgtaatttgttttttttttttttaattttgttaatacagattttattttaaatttattaaaagaatatttaaaaataactgacactacatgtttctttctacacctaataatttaaaatttgaatatatattgataaaattagagaaaaattacagtttataaacatttgtatttataccactaaaaaatcattcagcagtttatacaatttaaaattttaaaactttgaatttttataccgctatttattttattttattttaaatttatatttgagagggaaatatacgttttaatattcaaaacccataattaatattatactttggtctttcgaaaaattaatagagtgggacaaaataagcagtatctgtaacatcttgatttattgccataattatgagagtggaaaacaatattattatattattgaaaacttgaacatattttgtactaagtaataaaatactaaagataatgcgccataattaatatataatgggtccatgctgatagtatatgataatacatacgtacacatgcttatacataattagtaaatttataatagtactttttttttacttcaaaaaaaaaaaaacaacagggaatggtgacggtgactatgacagcgtggttacggcagctacatcctggggcatgcacaaaggaacaattagagttggggcagtgccaaggcccaactcaattacaactaggttgcttgttgctaggcctcggcttcttatccgtaggcaccggaggtatcaggccatgcagtattcctttcggcgtcgaccagttcgatcccaccaccaaccaaggacgaagtggaatcaacagctttttcaactggtatttctatatatatatatatattaatatattgtcttagggagagtttctttctagtcacaccaaaatacgtaccttaccggtctcctaattattaattatctaaactattcgtcttatctccgacaaagtacgttgccaccaatcagagattatatatatataatatatatttttgcaggtaataaattattttaattatgatttaaaatacagtaaattatacgtcattcctcaattaaggtgtcttataaaagactggtcttatatatatatcatatattcatattcattataattagagtaaaatttatatgttgaattgacgtgataccatactaaaaatatatatataagatagttcacatgttatacatgcatatgttattattttatatgttacattaatatatgaccaatgtgttgactatttataattaaagagtcacatgtacgtgtttattaatatatatatatataaataaaatttgatggtggctaacgacactgacaggtactatacgacgttcacggtggttttactgatcactcagactgtggtcgtttacatccaagacaaccttagttgggtaataggttttgggattccgacagttttcatggccggctccatagtatttttcttcgttggggctcctctttacaatcacgtgaaaccagaaggcagcatattttccggtattgctcaggttttcgttgctgctttcaagaagcgtcgcctaatgattccggcacccactgataatgttgacggagatggctccctcttattttatgatcctccactcaatggaaatgttttgtcaaaactccctcgtaccaatcagtttaggtaagtacatatatatatatatataaattaataaaagttatatagcttagcctaaccacaattttacgatattatatcaaataagtttgaataataagttcagttataaaagcaacattttttcaactcatcctaatcagtatatgtaagtatgggtatggaatgaggacaaattaatgggcatagctttcttggtttgaaaggcaagaccccaagttaccgggcattatagttattgtttgacgtgatattgttcgaatatcatattataaaatttggtataagatttttatagctctttagaaataattatttatattttataataattattaaattatattgtgcagtgcagtgaaacccatatttataatattgaccaatgctaaaagttttaatttaaaaactattaaaatatatgatcaaacttcaaatgattatacttgacaatgtttacttggaataagatttggtcaaacttggaataagattaacataatattagatattttacatataatagatttggtcaaacttggaatgattacttcataatgctatctcctattcaattgatagtggtgtcgcctgagtttttttatttaatgcgtgtctaagaggaataatctgtaggctaatatgatattgcaaatttcccattttcctacaactttgtgtgatatttaagtaagtatataaaatttatatatttata

SEQ ID NO: 218261 - DNA, 3320 bp, Cannabis indica
  modified_base (4)..(4): a, c, t, g, unknown or other
cganaagtcaagtggtccattattgttcattctgtgagttgaaggacttttcactctattcaaagatttgaacaaagacaatggatttatggttgtagatcgcccgtggtgcgccatcagtctcacatatgcttttttgccgacgatagctatctatattgtcaagcctcggaggaagaagcttctcgtgtgatgtctctgctgcataaatttgaggttgcctcggggcaaaaggtgaacttggcaaaatcattgattttttttcaacaacaatattgatgcctctgtgcggcaacgaattatggctgttacgggaatggtccaagctgatgaacatagcaagtacttaggccttccaagtactatcgatcgaaataagaatgatgttttaggttttcttaaagaaaaggtgaggaaaagagtggaaggttgggatggtaaattgctttctagagcgggaaaagaaatttttattaaaaccgtggcccaagcactcccaagttacgctatgagtgtgttacctttattacctatcaagctttgtcgtgaaatggaaagaattcttgttaaatattggtggaattcctcttcgggacaaggaaggggtattattagggaaagttgggatcatatggtggctcacgaacatgttgggggcatgggttctaggaaaacaagcatggagactcttgactaatgaaaactccttggttggtaggatcttcaaggcaaaatattatcccaatggctcgtatgttactgcttctgttggacagaacccgagctttgtgtggcacaatctctttaaagctcagactttgatcaaaactgggtgtcgttggtgcattgcagatggcaggtctgatactgttcttgatcaagcttggctcccccattcgaaaaatccttttattacttcagaccatcctgaatttgagggaatcaatgttcaacagctgatggttactggaaggtaagcttgggacaatgatatcctggaagaatcgctaaatactcgagataaagatctggttcaagctattatcttaagtgattctatggacaatgattctaggtattggtcctttgaagcgtcaggccattacactgttaaaagtgcttacaaagatatacaaaataccaatggccatcttgctggagtgataattcaggtttgtggaggaatttatggaatctaaaaataccagcaaaagtatggaatatagtatggcgtgcttgtcgtggcagtcttccaacacatgcaaagttactagagaaaagagttgaggttcctatatattgtcccttttttcaacttgctcctgaaacaattactcacttgatggtgaattgtgcttttgcaaagcagtgttggtctattgctgcccaggaaattaaagatgttgctggtttgcattttgccgactggtttacttcgatgttgcaagcttttccttcggctgcaatgtgtaaccttacaatgatttgttcaggtatttggagggcaaataatgatctggtttggaacaataaggagcatgttgctgctgttgtggtgtcttcgacttatgcttattttaatcaatagaaattagctaacgttcgttaacaaggtaataactctgatgtcaatggagtaattgaagagcggtgaagcatactagatgaagatacgattaaaatcaatgtcaatgcattcgttttcactttagcaagcttctttggtattggttggattgcaagagatcactcaggctctctcttatatgttgctgctattcgtaagcaggggcaggttgaacttatgtgtgccgaggctgtggggttgaaggaagttttgaattggatcaaaactcaaaattttcaaaagctggttgtggagtccgattgcaaactgttattaattctctccatagcacctcaaatatgccttcccctttggttttattatggcagattgcaagcttctttgtcaagacttgctttcaatttcttgtgtttttgttaaacaatctgcaaacaaggcggtcaattatttagctagttctgcttgtttctcctcaagtcgtagttatagtaaggggattgtccctactgatttgttagctattcttttaactgttttgcatgaataaaagttacaaactttaattaaaaaaaaaaaaagaataatttaacggacaacatcctagatgtatcataatttcggggtaaaaattctacttattcaatccaaaacaaaagtaatatccaagtgaccttctcgaaacgaggatcatggtgtgttcaagaaagctggtaagctttgcaactatactactagtactacttataatactaataacaaaatttgaatactaataatgttactattggtcgccatgataaacaacagttcaaggaccacctttcatgacttctcacccaatcggaagaggagaaaaagaaggaaagagaccttgatgaggaaatcagaaaatattgttataataatgaagaccatgacgattatgattttgatgtggtggtggtggtaggaatccgtagttgatgatgaaagcgttggcgaggttcggcagttgaaagcttcaatggaaatcttcaagtcaaggataatgtggctctagctagagaagcacacaattatgctattagaaatgatgatatttttctagaagatctaaatcgcatttttataaatttgtccattttttgtgttcctttgtcttaaattggttgtgtgctgattaactggataagttttgggctttttagttggaatatgtgggctttctagaaactcattatactggcccattatgagcatagtcaggttgtgatgaaaaaataaataataattgagtttgttggcatattttgagtgcgttgatttatttattaatttatattatgatttgtttgcttctacatgaagatctgtaccactggcacagactgaaattgctgtcacgaaaaatgtgatcatgaattgaagtcctcaaattgcctattcaacgaaattattctatgtagttccactgttccagcaaaaaataaataaataaataaacactaaattattttatctatacaaaatttctagcttttcactcattatttatattataagcattatttttgttataagtaactaattgtacttcattcactcttttcttataatagcaacgatatttcatgactttattctaaaccaaaaaaaaaaataaaagtacaacttatcacatttgttcattattaattatataataatgtttatttctttaattatgtcaccaacaaagcaaatcgtatgatcc

SEQ ID NO: 218262 - DNA, 8957 bp, Cannabis indica
acatataaagtttagggaaccttacattgggtgcagcggaatataacgactccttccgttcagatctctagcccttgattcttttccgtagcagagcattataaagatttgaacctggatctctttctctccttcttgagtctgattctccttcttgttgattggattcttcacagtcttctacactatgattgagataccacttgatgtgtgtgggcactcactctatcactcaaggctgaataattgaagaagaaaagagaggatgtggttgctcgggacacgggacccaaactgggattaggataaacacttaggattcgagattgtaggcttatacccgacccgtagtcggtgtgtagatttgggactcggaccaggacttgaacccaaaactgaactcaaactaggactcagacctatacctagacccaaacccacacttgggaatcaaaaacagaacctaaatcgaaactagactgggatctcaaaacgggactagggctaggacccagacccggcctcggaccaaaacaaggaccgaaacccatacctggaccccgctctggaccaaaatcaagatcaaaacttgtacccaaacccgaacccgtaacaagacctgaacacaaaaccgaacccataagaacacctgaactcagacccagacccgaaccaaaacccagatccagactgggatcgtatcttgggctcgagctcgaaactaaaccgtaacctagattaggatccaaaccctaaagtcagacccggacccaaacccagaccaagagccaaacaaagagtcggacacagacccggacctagaccatgatctggacctagacccaaactcagagtagtactcaaaccccaacctagaacaacacccgaacgcttacccaaaatggcaactggtaccgcaattggacccggcccaagactaagaccaggacccagactcgaacccgatccaagaccagaaactagacagagacccaaacccagaatagaaccgagaccaaaatctggaactgggacaggaacctaggccccagaactgggacaaggacccaagacccatgactcgtactccataacttggacatgaacctaagaccgagctcgggacctgacacccaaattagaacaagactgacatctaaattaggacccgaggcgtagaccaattccatagttggtgtttggatctgggacctagacctgaaccaagactcggatccaaacctagacctaaaccagtacccggtgacgcgaaactggaagcaaattggaacacgggaaaagggaccaggaccaagaccttgacccagacccagaaccaaattggaataggacctagactcggacacagacccagacctgaacctgaatccaaacaaagaccaggactcggtactcgaaccaaaacccaaactcagaatcaaacacagaacaggacccaggaccaagatttggggctgagaccaaaaattggaccccagtctcggtgcttaacctaatcccaaacctgaacctgaatgaagacccgaactcaaactcgaacatggaacaggacccgagacccaaatctaggactgagacccaaaactggaccatagtctcggtcctagatcctgacctagacctacactaggacctcgaacctaaaccgaaacgagaccaggacccgtgactaggatccacatcttgacccggtatccgggaacaagggcttggacaccgacccagaatcgcaatcggtaccgcaactggaccaggaccaggaccaagacaaggaccttgacccgaacctaatcctagacctaaaaccagactgggaccctaaccctgacaagaatagggacaagaacatgaaactacgacagggacctgtgcccaaaaattgggaccgagacccaagacagataactcaattctaaactttgacacgaacctatgacccaactcaagacccggcacacaaattagaaacagactgtgattcgaatttcgaccaagggcttagacccgacccgtagtcggtgtctaaatctgggaccaaaacccagagtcgcacctagactcagacctagacaaggacctagactcgaacgcaaacctggatccaaacccaaacaaaaacccgtacgccgtgacccaaaacctgaaccgaaacaagaagcggatcgagacacgacaaagggacaagaccgagacctagacccagactcggaaacgtaaccggaccaggacctagactcagacacagacccagacccggacccaaatccaaactcgaatcaaacttgagtcccgaactcgtacccaaacttagatttgaacacggaacaggacccaacctagacttgaacctagacccaaacttagaatcaaacatggaacaggacccgagacctagatctaggactgagacccagtactggacctcagtctcgatccctgacctagaccaagactctgacccgggacctaaactaaaactagaccaggacccgtgattgggttccaagtcttgacttgggatcagggaactagtgcttggaaagactcatagtctgtgttttgatctaagactcaaactaggactcgaacctagagcaggacccaaaattggaacctgaattagaacctactaggaccctggaactggacctgaactgtgaccaaaacctagacctggacccgaacccaacccagacccaaatcaagaacggaatcagggcttggaaccaggcccagactaaggctgggaccaagactcggaccttgacgcgaacccaaacccgagactcgacccggacccaaactaagactcgtacccagaccgagatttgaagccagacttcgacacgaacccaaacccagacccaaaaaaatacccgtaccgagacttggatcgaaactcgagacctaaaccataccctaaaccctaaaacctaaaacctaaaccctaaaccctaaactctattctttaatccctaaaacctaaagcctataccctataaccaactaaaccctaatccctaaaccctcaacccgcaaccctacatcctaaacactaaatgctaaatgcgaaagcctaaatcccaccctaaaccataaacactaaacccaaaacgctaaaccctaaactctaaacattaaaccctaaaaaaacactaaacactaaccctaaatcctaaaccccttaaactctaaccttaaaccataatccctaaaccctaaaccagacccaaactcagacctagacccagaactggaactaaacccagactcggccccaaaccaggttctcgacccgaacatatacctaaactgggatcgaaaccagagacccggacgcatatatcagaatcggaatacgaatcagaccacaacaaagagaaggacttggacataggatcaaaatcgaaccaaaattcgaacacaaatccagactaaaacccgcacctggactaggacctcggacttgggacctgaactaataccgagacacgaacccaaacgtaaacaaggaccccatacctagactcgggacccaagacctgaaccgggaccaagagtaggacctagaccgagaccaaacctggactgggtccgagacccacaccctgacccaaacccaaacccagacccgaattgggacctagacgcagaccaggttccgaacccacacccgaaccttgacctgaacctggacataggacccacaattggatggtggacccaaacctaagaaccgggccctagaatcaggaccaagactttggccccgaaattgggatcgggactcaggacccatgactcgagccagacatagacctaggacccaactcgaaacccaggacataaagtccgattagggtctggactgaggatcctggctccgaggcttcgacacgaccaatattaagtgtttggatctaggactcagaccaagacctgaactcggaccaagacccgtaccaagactcggacccaaacaaagaccggaccctaaccaagatccagggcccaaaaaaggaacttgaactagaacaagactaggaccaaggaacgggactaggactagaagttggacccaaacttggtcccagaccgggaccaaacctggacctaaacccgaaaccagacccgaactcgagaccattacccggaacaggtttcgaaactatacccaaacccgaacccaaacccacacaagaacttggaccgggaactgagatttgggacccaaacctaaatcaagacccagacccagaaccggacatagacgtagacttagaccaaggcttggaccctaactcaaacctaaacccaaactaggacctagactcgtacccaaactcgggattttaacctaaacgtggacctagaccgagatctaggatccggacctcgatggaggacctaaggtaaaaacctaaacctggacccaaacctggaccaaggatccagacctagatgggggacttagaccaaggaactgggccctagaactatgaccgagacccaaaactcgagacacgggacccgaccccaaactcagaacccaagactcggacccaaacccaaacctaggacgtcgactcggactcgaactggaaatagacaaggacctaagaccgagatccgaatctagacctaaggctttgacctaacctgtagtaattgtttggatcaaagaactgaacccagatctgtaccctgacccagacccacaccgagatgcggacccgaactttgagacgaaatcgtgctaggactgggactaagatctagacgttggagcgtaactggacctaaaaacaaacccaaactcggaccaaaacctggagccggacttggactcggaccgggacttctgacctgctactaaacccagaccgggtctgcacccacgaactagacccggaccttggacacaaaactcggacccagatagggaccgagacccaaacatggacccgatcgcaaaccgggacctggacgcggactgagacacaggacctaaacatgaatcgaaatacgaacttggacccagaccggcacttaggactcgaacatagatgggggacccgaacacgagaattgggcccgtgaatcgggaccaaaacctaggcctcgaaacttggatcgggatttgggacacgaccctagacccgaacctggacctaggacccacttcggtacttgggatctaaaactcaatgcttggattggacctgtagtctgtgtctgaattttggactaggaccagaaccttgaacccaaactcaaactcaaaccaggacccagacccatacccagtcccaaacccacactcgggacctaaaattggaacttgaactgtaactggaccgggttcttggaacgagactaaaacctggaccaggacctgaacctagaaccagacccaacctcgaagcctaacctagaccaaaacccagacccgaacacaaatcaggatctagggtttagggcttaggggttagggtttagggtttagggttttgggtttagtgtttagggtttatggcttagggtttagggtgggatttagggtttagcgtttagcatttaggggttagggtttaggattgagggtttagggtttagggtaaagggttttgggtttaaagattagggtttagggtttgggttataggatcaaggaccaggtcgagtctcaaattcgggttcgggtccaggctcgagtctctgtcccagtctaggtctggtaccgggtctgagcccgcgttctgttctcggtttgggtatgggttgggtccgggtccaagtctaggtccaggtcttcgtcacgttcacgatcttattccagggtcctggtattattctagttcatgttctagctttaggtctagggttcgggtctaggtccggatgctggtccaggttcacatcctagtctgtgtcccaaatcaagaaaccgctatgattcttgtcgaaacccttattcccggatctcaggtcaagatcggatccctgtcgtgggtccttgtttgatttgggtttaggttttgggtcccagtttaggtctagtttagggaccaagactgtggtccagtttaaggtctcgatcctagatttgggtcttgggtcatattccatgtttgagtttgagttcgagttcaagttcgggtcgcgttttgggtctatgtcaacgaccgagactagggtccaattcttggtctcgttcctaaatttgggtctcggatcctttttcgtgttcgagtccaagtttgggtatgggttcgagtcccgagtcccggtctcagtttggtattggattcgagtttgggtatgtgtccgagtttgggtcctggtcaggttacagttctaggtccaagtctcgatcactttccaaggtctaggtctggttctgatttaggtttcgattttgggtcccgggtctgggtcttggtccggatgtatgtcttggtcctagtttgggtcctagtttgggttcggatccaagtttgagtcccagttctagacaccgactacgggtcttgtccaaggctcaatttccaaatcccaggtcaacattctactcctagtttgggtcttgggtctcgagctgggtcttaggtcaaggtccgagttgggggtcgggtgcttgtacttgatcctagtattgaagcccaagtttcagacccagttcgagggcccaggtcctaagtccgggtctcccatctatgtttttgtcctaggtctcagtttaggtcttagttcagttttgtgtcccgggtcctagtctgagtctaggtccctgtttgggttcaggtccgggtctcagtcctagtctaagtttgggtcccaggtttcaagttcgatctcaggtttcaagtcccaatctaggtcccgttacggctctaggtcccagtctgggtttaaatcctaggtcccaagtcctggtcttgtttcttgtcacagttcaggttctggtccaagtttgggttcgggtttgggttcttttccagtcccaagactgagtcctagtcccggtcgtggcccaataaaggtttcaatttcaattctgggtttgcgttcgggtttgagtttatgatcaagtcttggtcgaagtccaagtcctagtttgagtcggggtctaggtctaaatctcggtcttggtttgggttcaagtacgggtctagatttgggtccgagtacggggttgggtcgtagatccaaaacaccaactacgggtcgtgtgcaagcctcgagtctagatctggatcttggtcacgttcctgatctagttccaggttcctggtacggttctagttcatgttctaattttaggtccctggttcgggtctgggtctaggtgctggtccaggttcacgtcctagttcgtgtcacaaatcaagacacctaatatgagtcttgtcgaagcccttgttcccagatctcagatcaagatcagatccctatcgtgggtcctagtttgatttaggtttaggtttcttgtccaagtatgggtctaggtcagcgaacgagactgtggtcaagttcttggtcttgatctgagatttgggtctccagtcctgttccatgttcgagtttgagttcgggtccgagttcgggtcccagtttgtgtctatgtcacgcaccgagacttgtgtccaattctgggtctcagtcccagatctgggtctcggatcctttttcattttcgagtttgagtttgggtcagggtttgagtctcgagtcccggtctcaattttggatttgggttcgggtttgggtaagtttccgattctgggtcctggtcgtattacggttctgggtccgggtctaggtcttggccccggtccctttcctgtgtcccaatccccttcgagtttcgggtcaagcggtatagatttaggttcggtttggatccgggtctgggttcaagtccatgtccttgtcctggtctaagtctaggtgcgagtgtgggttttggtccgagatccaaaaactgattacgggtcgggtctacgccctgggtccaaattcggatcccatattattttaatttgggtgccaggtcctgagctgggtcttaggttcgtgtccaagtttggagtcgagtcatgtgtgttggctaatgactgagtagccatgtagacactttctatatctttcgtcaggacggtaaatgcagtatacttggtaggattctccctgggagcttgttcagtcatgccagtgaactttccctttttccaattcccttgcctattgttgttgttggaccatttaccacccgagcttgaatttcttgggtaatatgggagctggacggatgtcccagtagaaggaacttttgactggctaggtttttgttcaccctctgctcgctgaatggcttcttcaagcttaatgaaaccttctacacggttaagaaagtcaatcatcgaatctattggtctgttcttccttatgtccttccaaagttcaccaaggacatcaatgccccccatgtatcgcggacaactttccatcttcggttacctgtgaaaccttagttgcctccgtcatgaatctgctgatgtaagctcagacaggctcccctggtctttgcttcactttgaccagatctcctaagtgcaacagaagttggcgagaggaggagaattgtgcatggaactctaaggagaaagccttccatgagctgaactttctgggcgccaacatgaaataccactgctaggtagcctccgagagtgtggcaggaaaaactctgcaacatacatctcttcgtactccttgcaaatccatttgcatctcgaaatacttgaggtggggtcagggatcttccttcccatggtatacatcttcaaggttggcatcttagatttgtggggcaattccagaatattaatcttgggggagaaaggggttccacgtgttcggtccaactcgagatc

SEQ ID NO: 218263 - DNA, 5216 bp, Cannabis indica
ttctccattcttgatcaggatcaaatctgttttctagatgattctgataatttcctttcaatccatgttattttatactacttaatctttaacatgccatttttttgttcttattattataaagaaaaacacttggacaatgaatataagtaaaacaaaaaactagtaaaaccgtcactaaatataatatctggcaaaatttctatgtaactgacatttaaatgaacattttccaaggcaaaaatattaatggtatactaataaatttggaatagcacatgcatatgcgttcttgtgcgatacatccaatatataaagacttgctattgggcaatgattgatgtacaatactactttatatttatgttttcatttaaaataaagtttctcatgaggtttgagattaaattgcaccaaccttaatattggaaatcatggtttactaaaacaatgtaaatgttcattacttgtttatggtcatatatattctttttgacaaaaatatgattaataaaagttctttgttaaaaggacggttatagataataacgttaaataaaacacacaaactttttattattttgactaataattaaaaggcacaaaggagagcgattcaagagtggtgattgattcccttatgtttttaggttaggagattgagaattaattttttttttacctgagactctttaaatattttgatggttgtattgtcattgtcacttgtatttctaaattatataattatgtcgctcataatgtggctaagtaaatttttacccagagataatatggtagcttgtatgtttcttctattctaataaattgattttgaaatgacgataagatctaaatttgggtatcaatgaacgcttatttttttttctttttcttaagtaatgctaagattactttagttttggtaacggtagaatgactcatttcaataaaataaaataagctatagcttttatatatatcgagtaatagttaaaaagatacactattacagaaacagagtacaatctcctcttttcatgagatattaatattaatatatatatatatatatgatatatatcataagcattaactagaagtaatcagcacacttcatcaaaatatatttcacaataacattaattaatttatttatttatttttcttcaccaattgaaactaatagactcaaagtgtagattatctgccaaaccagaggcacaaattttagcaacctcatgtctcatctttcttggtccacaaacaagaactccaacatcagaagcttttgactcgaacaaaatttctgcatgcattaaaatattaataattaataaccaattcattaacttttatataattaatatacattaatgtattaattaattagcttactcttgagatcaggcctgacaccaaaatggacatttatagcttgtaccaaggattgaacgggaagactttctacctctctataatcatctccaacataacaccatgctggaggagacaaagttgatgtttccatatctacatgctgaattttcttactaatattcccattgaaactcttagacaaaacaaaagccacacttgaagccaaatagacacaggcacacaccaaaaacatgacccaaagacatttgtaagagtagtgataataccctccagagttatctatagggtaaatatagtaacgagttaccaaacccaacaataacaggaacaaaacaaaagaagaggagattattgcacccaaccaaagccagctgtttgggcctagagttgcagaaatgggcttgtccgttgggttgggcttaaagaatgaagttcgtataatgttttggttttctgtggtttgcctgctctcttgggtcacataggcttctattttgagttgtatttcggtaatttgttgggcgtgtgagcctgcgatggaaagcaagaggtctaacatggccaaatcagctgaagttttgaaggcacaaacaagaacaactcgaggaacatgagagttgggtattgtgctttgatacataatctctcggattatagatatgaaaggagtgatcccacttccaccactcaccataatcagagcctcgtgactgcatcaacaatccagccaagttagcattatataaacatatctatgtatagacagggcgataaagtgatcatatggtacccccatactctctaatttgtacaattttctattctacaaaatctcacataaaaagaataaataatgtaacataataataatgtgaaaatcaataacctcagaaaggaaaaggaggatggcccatatggtccttcaacggaaacatctaagtgcttattatgcacaggagaacaaacttttttgtggagcttcttagtccaacttccttctactctgaccataacactaagcttatctgaatccatgttactgttggaagatattgtaaaaggatgccattgcagtttcgagatcgatggcacgtttacaaacaaaatactcgtcggattatattgcaatcctaaaataattaataagatgatattaaattgcttaagtacttaagaaaaacaaaaacttaattagtcattatgtattaaagattgtattaacctggggttttggcaaaagtcatttcaaagttaccacctggcaaaatacgagaggagagtaatctaactttgtctctggactgtaagaatctcaagtatcgatcaattaggaaaaggaatatcccaggaagaatcatgcaaaagtaagctgctccaacgtgaagtacgtagaaaatgatataaactgtgtagagttggtgagtgtagaaaaacacttcaaacatctttcttcttactctactcacactggccatccacatcactaaagccactactattgcgatctctcctgctacatttgatacatgaactttgctccattctagtgcctacaacgtacatcaacatgtatatatttagtatctataatttagtatatgtagtactctataatgtggtatattattttattaccttgaacatttgattggttgtgatccaggaagttaagactcctaatgtatggccagcaaataaaaccgtggatagatgaccaagccagatgtgatacttaatactagactctgatgtaagtccaacaagaggcagaagtgaagagcttcttgttactggaaagaaaagaaatgcccagcatatatttcccatatatgcaagtctcaatgatacactcctcagttttgcatgccatctgtagtaataattaattagacaacaattagctataaagttttaataagtatagcatgcatgcatgtatttaaatatttaatataatatataaaatacatttcttctcctggacgtatgttgaggtggccattgaagctgacatataaataagtggtaaaaagtccatactaggagaacaacaaacatgaatgcgaaagatagctctactgagctaacaatacccagaggtgctttaacactcactggacttctccacgaggccaaacgacgaccaatctgatccctgatcattcaaacataataacaattaagtacaaaaaaaatatacagaaaaattatttttattattgttctagtttaagtttagtaataatctctactgtacattggtgatttcttgtggagatggagataaacacagctcaatgctgctacgaacattattgggaatgaaaaaagcagaatatttgtccctgcaaattaattaattatgttcattaattagcattaaaaaattaatttagactaaaataatgtgtgatatatgtgtcaaatgaaatgatataaaaaaaaaaataaaaataaaattatgattctatataattaattatattaatttgacacatatttgtatatatttgatgataactatataggactcgtttggtacattatattatattgagtcgtattgtattatattaaattagattatatattgatataatactatgctaaattttaatttaaactaaaatattatagagttaggagcccgttaaattcaatactatatataattttacataaaaatattatataaaatacaatttaatataatattatataaggcgtaccaaacaaaaccacataatttatatatgtataccttgttctctgaagtatgttgttgagttaagttggcttttcagtttaggtgcccacttgagttggtaggattttgtaggtaacaaaatccaaaccattaaccacccactaaacatcataagaaaaatcatatttaagaccgtgaattttcccatctttgatcaaatctacttttcagattaaattggtagatgtctttgaaatctctctggttatacttatatatatactactttatctactctgaataaataaaacaaaaatcctaccatatataatatatcatagtataacagctacaattttttggctaactttttatgtaaccgtacatataaatatgaacattttccaagcaaaattaaaaataagtaaattagcgccgtatgtctttgggtttatgaaattaatattttgacttgtattttgacaagtgaatagtgatcacacaaaataatgttactaaatttaaggaaataccacatgcatgcgttaaataaatatgtttatatatgcttctaaaaatatttaatgtatattgcatatgtatacatgtaaatattttgtttttattgacccaatttttttccaagagacaaaattataactaataatcttctgtacagattctctgtcttttcccactcattttgttatacatcaaaattattttcaagcataaagttacgtttaatgcacggattgtgcaagatccattttggggaataataaaaaaatagctgcatgagcaagtctttctatacgtctgcatcttttgaaacacaccaaatcatcattgaatatacaaacaataataattccttatcataatatatttttaaattagattaataattatttatgtactttgatatagtcaaatatttgcttgaagaatattttattgcccggaggaaagaagttgattaatagtgatatacactggcggagctaatgaaggaccagtgtgagcttaagcccatgctgaaaatatttcttttactttttaactaaaaaaaatcttttaattattttaattgcccacaacaaatacg

SEQ ID NO: 218264 - DNA, 3510 bp, Cannabis indica
tttcctcaaatacttttttagcaagacttacgcgtgccgacttgtaattaagtcatatcacatgccttctacgcgtcacgattgtggccaaggttatcaattcacaataaccaatcataaacttgatgggcttttcagctatattattatcgttgaaagcgaaacaatgtcatggcatccatgtccttttcttcaacaaagactacaattaatattactaatattattactaaaagtcaagttactcactaattgtgaatctaatttatagccgagcggaagagggtctttattttacttgtcaaataaattgacattacatctaccaaattaccaattattataaaacaaaaagatacattttaagtatttacctttctcactacattacttctctcacaatatagctacacatagatataaataattcttctttttctttactttattaattttgtgggggcttaaaagaggaactatcatgaattaaaacacggttgttcaaaaagtgggtatgtcttagtacatacgaaaagaaatatgtacattattattcaaaaaaagaaactccatgaatacacgtaaggcacaacaataaagatacaaaatgtgaaatttccatcacagtaatgaaagtactgtcacatttttaattcttttattgagtgtgactcagaaatgaatatattttatgtcattatgtgaaaacgtttcatcatatattcctaataaattatgggacaactagaaacattatacaaattcgattctcttattttatattttgggtaaggtataaggtttctatcaatattagaaaaaaaagatacaaaattaaatggggtcatcaaatcctgccttcacttgcaattttcatttcagttaaatgacactttccaaactgtctccatttccttttcatttttcaatccacttgtccatttgagctgattcaaattcaatggggttaagtttttgctaccttttctaatgcttaatcacagttcagccctggaattatcaaattgactgagcataatggcaaaatccataccctgtaccatagtaggcactgctgtctcgtaagggcagtcccgagaaaatccaacctttccagacttgtgtactttcttaatgcagatcttgaacttttcatgacatttaatatttgtgaaaccttaacaaaccaaaaaaaaaaaaaaaaagaaccaattgagccaccgaggaaaaagagcaagttacttaatataacaaaaagaaaattgagaaaacccacgtaaaaaagtacaaagtataatattcagtacaggagtttctaaaattttatactgttgcaggaaaaaatagagaaaatgatagaaaaatcggataaaataaatcaaatcacagggcttattcatgctttcatgacagtgggaaccataaatgaaatacaaaacaaaataaaccaataaatagcaattaaagcaaatgagttgactaataagaattaattgaaataagagaagtccatgcaaatagagaaattgccaaagggtactagtgtttactgtttagtgttgcaaattgctattagtaaagtaatttgacaccagttccacatattttaattttgtagagaatagcacattttatagtgattttgaacaagactgatagtgatacctaataataaaaatgctcaaaatcaaatcaccaaacctactgaggccatatttggtttaagttaggcgaaacgcttaactataattattagcccactatgcagtctatgatcacaattcacaagtcacaacttttataaactattgtatttgtcgttttcctcaagccaaatccacaaaattagaaattaacaaaaaaaaattatattaaaaaagaaaactaaccttttttggtgacacattcatcgtgaatcttacaacaagcatcaagatcatcgcatggcttctcaccagggcagccagtccaccctactccgcagaacttcccgtatcgaatcccaacagctaattgaaataaaattatgagataattagtagttaccaaaacacatttatgtataatttaaatatttttctaattaaaaacgaaatctaagaaaatcgacataattactcacaattacaattctctgcaacgcagattttgctgcatctaacctgtccatccaataaacaggcaaacaatttcattttcattacgctacaatgacaatgaggaagcgtctctaagtctaatgtgtgcttttattttacgaaaaattaaattagatccaataaaatttgagtggttgctaggcttccaaacaaacaggagccagggaagggaagtttttgcttgttacctcggaatcattgttggaacaccgagctcctacggtaaggaagatgaaaatgaagacgatagtgaatccagaaacgatactgagacgaacgccatgcatttttcgctcgctttttggttctctttactcgactcgaagaagacgaagctcagaagggagttttctgtaaattacacccacggcttcgtcacttgtagtttttatgtcgttcattttagttccttggatttctagctccctttcctattggtcgagattcgtaattactcaattgaaattacaatagtaccctttagggtctggtgttttccagttccgtgcagtaacgtggatccaattctggcctgtaattgtgaaagggccttttctgctcactgtatttagtgggcttgcaacaagagtttcggcccaaacgacaatataaactaaaacccaacatagcattagtagctattaaattaaacgacaatattgtttttatgaaccattaaacgacagtattagcttaacttttttttttgggctgaatttccatttctaattgagtgctataaaattcattttttggctatatattagcatttttcttaaaaagaatacagtattacagtactattacaaaaagtgtgccaaaatatgacacaaacaaaaaatatgacaaatttggtacaaactatactatagattaaatttatagataattatataaatattaattttgtaaaattacattttatttttaaaagattttatatatatatatatatatttttacgatattttataaaaacacaaaaaaaaataatacgaaagttaaaaaaaaaacatcaaaacaacatacaaaataatatctaaataacaaaaattaataacaaaataataaaaatataatataaaaatacactaaaaaattatattttatataaataaaatataaaaaccgtaaaaatgttaaaactccagtatttttctgttttttttttttgaattatccctcaaaatttatccttcatatttggtccaaaataaataggaaaacttacaaaaaatgctggaatttaagttaatttttaaaaaaatactgtcacacggaaattttttcaaaaatattatgtttttataaaacatcagtagaatacaaaacatattaactcaaaacaaca

SEQ ID NO: 218265 - DNA, 9269 bp, Cannabis indica
aaaattaaacttaaaataatttttaaaaaccacttttaagattattttaaaaaaaattctcatattattttgtgttaaattttgatacttaatttaatctaattatttttaaatcatgtataatttttttaatagaatttcatataattttttattttaaattttttataatatttataatataatttatttttatttgataagtatattttttaagaatataaattaaggaaaaaaactaatataattaaaaatatatattttatgcaaaataaaaattattaaaatatgtacatttataaattttgggtcataaaactccccttttaaaagataaaggttccaacttcaatgaatcaagatcttctgctaaaagattgtgtttcatagtgtattaaaccaatctcattatgacacatcaattaatttgaacattttaaggaaaaaaacgcataaataattaattttttaataaataaaaaattaattgaggtgtcaaacttagattaatttaacacagtatgagacactattttttaacaagaaatcttgattcaacttcaatagttctatcagttatttatctttctataaaaaaaaaattacaccatatttgaagggaagatgtttttttctttctattatttctttacaaattcaaaattttaaaaacaaatattggagaactccattggttagtagtatttttttttttttttgaaaattggatgtgttcaattataaaaagtctcataatttgactgtacttctaaaattagaagaaatttatggaactaaaactaggtagacttcaacgacagtaactaattttcaaataatccaattaaggatgcatctaacagtttccaaaaaatccaaacataacataagaaaacagtacttctgataaatttgatccgttattttttcctccaattaaatattcaaaatcattggatattgttttgttcaaaaattttttttaaaaaaaaatctattttcacaaaattaattttgttgttgtttttataaaagacaaaaatgttggtttggtgatgactaatatgaatagttataggagcgtgggcggaacacaaaatagtgggtcgcgcgtgggtttcactttcaccttttaaggcagcaacgcggcatgtacgggcgaaaaaaacacataaaaaggcgtaagaaaacttggaggataaggaattctccaaataattatacaatacgtacgaatccacactaactacaaatttttaaccaatcagaatccgagcatacaattactatttactaaagtcaaccatttgtttctaaaacgcaaaaatatcccaaaaaaaaaaacaaacacacaacacacagttgggttttctccaacgatcacacaaacaagtaaagctgaagtaaaaagaaatcgtctgaaagctctgagaacaaaaaatatttaatttaattaaattaaaaaaagttgaagaagaagaagaaggggaggaagaggaggaagaagaggattattgtcgtttgagatgggagaggtgtcgtttgagaagttgccgttggggttccggttccggccaactgacgaagagcttatcaatcattatttgagacttaagattaatggtcgtcactctgaggttgaggtcatccctgaaatcgatgtctgtaaatgggagccttcggatttgcctggtacgtgtaatttatatgtgtgtggtgtgtgtttgtgggtataaggtttggatttcctttattcccaccacctaaaatgaattgggaattattcgttactggagatcactcataagattccattctttcttaaattaaaaatatggaaacatgaataaataaatatttttgttttttttttaaaaaatgggttatgtagtggaagccatttttggaactgggtctaagtttttgagctttttacagggttgtcagtgataaagacggatgatccagagtggtttttcttttgtccacgtgatcggaagtacccaaatggtcagaggtcgaaccgggctactagtgctggttattggaaagccaccggaaaggaccggacgatcaggtcccggagctataggtcggcgactaataccaccggggcgatcggtatgaagaagactcttgtcttctatagaggcagagctcctaaaggggtgcgaactcactggatcatgcacgagtatcgtcccacgctgaaggaccttgatggtactggtcctggtcaggtaatataatccaaattagaaactccattcaagatttcttcttttttcatttccatacattttgtggtctttttatgaaatggtacttgaaattttagctctgtttctgagattttatgtttttggtagtagagattttgtcttaatgattctagcttagatttttctttgctagtagtggatttatactaaatttctttttctataactgtagtaaaatttatacttgattgtaaatgtaatgttgttttgatgaaatgcttgaggatgacttctccctatttatggcgcctttatgagcacggtgtagatattcgtgtgattaaaaatggttctattatgttgatatgaatcatggaaagattttgtaaatgttaacaatggttatcagttttgtaaatgctataactttataattaattgaccgtgcataatatgagcttctgtttgattcttatgttgcaggatgcctatgttctctgtcgcttattccgaaagactgaagagaagcctgatgctccaaagtatgatgaggtggatcagactggattatcacccactgcaaccaagtcttctccggatgatacctcatcggatttgcttcaagaatcagctacatcaaatatggcagctggagaggagtcagaagttataaacaggtggttaactgatcagtcagacaagatgacccaaagtgctcaggcacctgttgaaagtggttccactagttatatgacatctgatgtggaagaccatgtaatagatgaaactcctctggaggtgaggcgctgtgatttttgtatgtgttgtaattattgtaataaatcagttgcagccccagaaaatttaatgttctcattgtttctttgcactaggtgcccatgatggaagaaaactcaaagttcagtgaggttaatgctctcactgattatgcagcaatctcctcttttaactcacaaattgagcaaccactctatgctgattcaccttttgcctgtgactttggcaatgatgataatgtaattccttttatggatggtactgctgagcaagatatatctctcaccgatttgctggatgaggtcttccagagccatgatgagaagttggactctcagaagaactcaactgttggaaaggagacccatttatatgctcaagcacagtcattgcagaacataccaccaaggagcttatacaatggtccatacaacaatatgggagctaatatgaaccaggtaagggtagtggattaatgattatatgtatctgattacttgtaataatcgtgcctgttaatctttggagttcccatatgtagcttgtacttaacaaaatgtttatacttgtatgagaagaacagtatgttcatttgcaagttctgtatagtaatctagtgcttttaattgtttgctagcacgacgttgatacaagagcttctacttggtataatgggcaaatggatgctaaagacatgttgctgatgccaacccaattcggaccttctcgagttgatgagccacttaataaccaggagtttgtaacgggaaatctgggtgcccctgggggtaattttgtgggtcaagtgtctgttgctggtgattattctatgtacaataatttagaagaatcgatcagtaggaatcttcctgattatcaatacagtcatatcggtcgacctgaaatcaaatttaagcctcgtcagcctcaacgaccaagttatggttttaataacactcagggcattgctggaagaagactccgcttgaatgtaaattcatcacatgaatcaactgcaaatgacattgggtgtgacagaagtaagagccatgaagaagaggaagtacagtcaactgctactgaggtcggatcataaaagatgtagctattcatgaaattctgatgatacaactttttgccaaatttgactttgtttattcttttgttaaggtcttcaaagctgaggagagtgatgttaatcccaatggtgatcttggttctgggactggaatcaagatcaggacccgtgaatctcaaccagaaccaagttcagataattttatatctcaaggagattctttaagaagattgcgtctacagataaataccatgcctcagtcagttgccaatgacaacctcaaaggtgtgggccaaaacaaagaaagtgaagaagtgcaatcaaacattactgaggtaagcaatattggtgagactaagacctctcactactaatcaagcttctaattttaacttggctcaaataattttgattatcaggacactgtggaaggtgcaaaggaaagagaaagagaaagaaaaaatggtgtaaagtcaacttctactgaggttagtattatctctcaattgactaagtaaagattaatgtataagagaggctcattttttttaaaaaaagaaaactttagtgggggccaatataaatttatacacattaatattaatttttcaaaatatattatcctaaaatgtagaaaaaaggatgttaggggactgtgaccaccccaatccccctagctcctgccaatgacctatgcaagtcattcatatatcaatcttcatatttttcactgacgaatactttttgcatctcaggactctctggatgtgaattacagcgaaaaagaagatgaattactttcaatatcttctcaggttagagtcatcagttaatgtttacctgcttcagatattcacatattcacatgtcaatctgataattttatattttaaatttttttgcatctcaggactctgtggatgcggaaaacagtgagacagaagatgaactagagtcgatttcttctgaggttagaatcaccggctaaaagctacacatagttatataatcacataccaactttctaaattttaattttaaaatttatgaatttcaggacttcttggaagatgtaaacaacagtgagggggaagatgaactacagtcagtttctgctgaggttagaaccttcactaaatgatgcccctaatttagacatctacataccaatcttcaaattcattctgatttttctaataatttcatgtatcaggactctatggatgatgctaacgacagcgaaaaagaattatggtcgatttctactgaggtttgtatttcagttaatgttatgccagatattcacattcgcagtcttcaaaatgttgactaagatggttcgaataattttgtatctcaggacaatgtggatgatgtaaacaacagtgaaattgaagatgaagtagagccaacttcgactgaggtaagaatcatccatttatgcacacatagtttatacattcacataatttgtatttaacaaattatctgttatgctctgtgtacaaagcagagtccatgcctcgatgaggcaaataaggagagtcatcatcctttgatgtttgacactgccacggaaatcgctagagagtcctttacagaaggggaagataaaagcgaggaaaccattgaagtatcctcaataaaagaactaaacaaggaaattctcgatagatcatccttggcgaaaccaagtttcagggaagaaatgaaggataaatttccgggtaacagccctacagaggcatcggaatcattagagaaactatctagacaccctgtgtcagcttattcctttgtcatctcttttggggtttctgctgctatagttttgcttttagtttcatttggctggagagctctagatgttggtgttgcgtggaagtaggctgtaggttgtaggttctaggttctaccttctagatttcctttgcctagcctgagagctctttaagttcttacctttttgtggggttaaaggaggttgaaagcttgtaaattgcagtcataaattgttattgccagcttagattattttgtctttgctttatagttaattttttttttgcctttactactttaatgttggacatcgaattcaaaaggaaaaaaaatgttggcatcaatattagtgtaagaagaaaaggtaaaagataaatattcttaactaggaattcacatggacaacgttactctctcaactaaactttattatctatttcaacttaaagacaaaaaagtacaggtcacagagcacctaaaaagagaatgtagcattcagcaactgtagacatgtgctctatattatcccatcttgcaatttcacaagtttatagcaggagtccaatttacattagtcctattttggtgagtaggaaacacctatttctctggacctcttcatatattggcttcctttggagttaatatattggattcctaaatcgttacatagtattttccaccgaaagaagaaaatggattagacaagatctttccgtattggatgttggtcaacaaatggtgagaggttgttcatatgaagtttttgatttttttgtggtagcactttagaatgccaaagaaaagactagcacttcctaatagaactatagaaggttgagtatttgaataggaaaattaacaagacagatagaagctagatgatagagcagattttactgagaattgtccataatttgttagggtccagattaattggtcttgctgatccaatctaattacacgaggaatagatttaatttgttgagaattgattgatattgggattaaaatatgattattattgttatataatgaaaagatttcctgattaaataatgacaatgtgatgatacataaatgtgatattcaaactcaccttattaggtgatgcgatataccaggcagtgtacctattaggtacaggcggtagtgacatgtggtaccaggttatggtgcgggctcatcttattagacaatgcaatatattggtgccaagttttagtacgggctcaccttattaggtgatgtgatatacttggcggcgtaccttattaggtacgtgcggtagtgatatgtgctactaggctatggtacgagctcgtcttattaaaccatgtgatatattagtgtcaaattttggaataggatcaccttattaggtgatgcaattacgtgatatatgggtgacaggctatggcacgggcttgcttgattaggcaatgcaatacaagattattagattaaagtatcgacttgcctgattaggcaatgtgatgtaatgaagatggttactttatgaggtaacatatatataatttatattattaaatgaatataatggtttgtattaccaaatatttttatactgatgtttattcgtgacagatgtcaatagtgatttagatttcatcttatgagtaatgcgtgattgtttgattttgattgtttgagtataaatgataatatttgaataataaactatatgattattgttattacttttcttgctgagtcattgtaactcacgggtgctatgtggtgcaggtaaaggcaaagaaaatttagatcaaccatgatgtgacaatcttctccagtaatgtacatattgacccccaccagcctgtgttccgagttactaggagttgttttgggctatatctgctgtgtattctgattatgtcttttgaattatttttcgtttatagtcttttgtaaactttttacaatagggatccccgaaacacagttttagtgccgttatgatgtccgtttttagtgttttattatagtgaagttttaatattatcacagattttagtaattaattaacttattattactaaagtagtttataaaatcacacacgtggcgttcctatgggatagggcattatagcgatcaagaataaattattaattacctcttacttaagaaattgaaatatgcgcctattcaactatcaggcaactaacatgcttcctatcatgcttttcttattacatactaatcaaacaagctactaaagcaataaagacttactaaaccgtgagttgagcttgttttttatgatgattatacatatcgtgacgattttcggaggacaacttggcggctctgatactaaattataaaaccccataagtttaggcgagctatcgtgattttatactaactgtgcactctgttgctaatcaacgggttgattgaaaaacatgactaattaaaactttacttaattaacatttaaatgaaaataaataacttttgcataattgggatcacgtatttaaaatatttacaattgtattataatatattagttacaaaagttgctgcctagtgactattaaaaatacaacctgctgtcccaaagatcgtacgcttcaagtctaactgtcccgacatgtacaatcatttgctcacactcactgttgctcagccttagctttgcccttacctacacatgtaaagactcagtaagaaaaatataatcataacataaacataaaccagattacaactaggtgcccatacacccaatcataaccctatcatgcgtcccacgcgtattgagtctagaatgtttgtacaacggtactattgaccataatatcagtctatactcagtactctagtcgtactaatgtgatagcatcaatcagtacttaagccaaacatacaatcatcagtatccaatataactccatgtatactgataccactatctcagtatgttatctatcaggcattgataaatagcacactaagaacgtaataacatatgcatattattatactaatcttacctcaatctcaaatttaggtgtgccgatcaatctgagtggaactactgctcgacggtttataggcccttaagtcacaatatatgcaaaattaataagtgatacgctaaattactttttggggacttaaaatcataactaaaagttttcctatcgatggataacatggaaataccataagtatcactaaaatatgaaaaactaggttttcacaactgctagaactggtaaaccgaatttccaaatcgaaaaatcagttcttagggttctgccaggggaaccgattgactggttctacaaggcatgtaaagcccgcttagttaatttggaaattagcagctgtttatgtttaattatgaaatt

SEQ ID NO: 218266 - DNA, 3850 bp, Cannabis indica
gaataatgtttaggcattaattatatatatatatatatacatactagcaatggctgcattgggagtgaatctttccatcttttaatttaattatatttcaatctattttttttttatagataagcaatggctgcatttggagtgaatctttcatcttctttggcagaaatgagagtgaagattgagagcctttcagctactatgaatgaattggaaatcattaaagatcttatggaagctttttatgcagaaaaccctaattacaaccatgcagataataataataataatatcactaatttgcaaggtcaacttgggagggagttgactgagttatatggccatccaattagtagtactaattatgctacaatttttagagcaatctccatcatagctgcaaatcatgattttttgagggttttcttagctatgcctaaagattggaagaaaaagtgcattagtgatattggtcatgacaatggaaaaataatataacaagttattgttatatgtatttagttgtgcatgtgacacatctatagtactatgctatcatttagtattgagactctattttatttcctatcaatttgaaaaacaaaaagtttaaaattgatatttaattagtaattagttaggggttctttgtaattttatttcaattgctatcaatttgctttgacttctttcttgctttgactctgttttattttttagcatagttatggaacaccactatgagatgatgataatgattctatataatttttattaaaataaaataaataagactcgatatacaattgaactaataatgataataaaaattaagatggttgttatattaaattagaattctataattcccaatgtgtttaatactagtacttataataataataacatataatatataattttgtatttctaaaaaagaatgctaaagtatttagtatcttcttatgtattattattgctattagttcaaattaagtatcaagtctcataatttaatataatattttctaaggagtatcgctagccaattgtaagacggcatgtctaaaagtattagatactactgcccaatagcaatattctatataaaattaatcactaaagtacattttattcaattatcaaaactttatgaagttgcaattaataaaaagagaatgaattgattttttctttcaaaaaaattaatactttaaagttcaatttgccaatttgggaagcaatatacaagcttatatatttaggatttttttaaaaaaaaatgaaaaataataaacaacttagcaaaaatataattcaagattacaatacaaaaaaatatataaaattctatatctaaaggcactaatggtgtttagcaccattaataaaagagtattgttattaggtatcagtggtgctcaatatcttttataagtggcgtcttacaattagttagaatacttaattataccaataactgacactgaaaaaaaatactaattactaataatgtcttttagcacttatcttaacaaacatagtgtacatcttgtaaattaattatctagcactcaatacttaattaattacaccctttttagcaacctttcaaattctacagccaaaattacttatctatttgaggtaaaaatataatcacattttacatttatttataattttaatttagaccttgcctcttcattccctttatttatttatttatctatttgtttattattattattattatgaaagatttcccttcaactcttgaatctatatattgtctttttaattttctttttcttgtattaaatgagggcatttgtaacataacaatgtgacaaaattaagttaatcctcatgattactaaatgtaacacttctttactaataatttttgaattattataaatgtgaccggtctttaattaaatttaattgcctcttcatatattgatcaatctcttgagttttagtgtaattatttccaaagaaaagaaagtaaagttgatttattactctactctgtctctacacactacaagtaagtgactctatattcaaattattttgttaagtttttcgatcgaattttacttattttactttaataaagattatcgaaattcactaactattctatttgattgagccttttttttctttgttttttaattcactcaaacaaacaaggtgttagaagggtctaaatatatttgaaaattatatttatttatatttttttttagcacaaattcattgtttggcttggggttaaagaaaaatagtactaattaattaagaacttatttgtatttgtagttgttcatgatgggaatcttcttctttgtgagtttagtaataagcgtcttgagaggtcaacatggttctatctggaaaattttgagtattttgagatggatctcgagaattaaggctattaaatttcgaagaattgtgtttgcgacgattgtgcccgttgctgtagcggccatgctcatgtatttcataagaaaggtaagaaacttaaagcatgttcggtaatcattttgattttgatttttttttttctaattttacttaacaaaaagttttatagtttctccgaagttttaattaattaaacatttttttaaaaaaaaattattaacaaatcatttgtatattatttttgttggcaataaaattcaacttaactaccgaaaaaaatgtaataaaatagaaatattttatttttcattttcttttgtttttattcatattctcatgcatgtttttattataataatgtactttatatttctattttatactattgttttctttagatgaaaaaaaaaacatgagaaatgtcctatatatctacaatagtttattcttgtctaatttaaattgcataattatattattagtgcacgttgaatttagggttagttgagtaaaatgtaaatcaaatttttttttttgttcgtatgtttatatatatattttaataaattctcaatttcattccgtttttgtatattattatatttttattagttccaaccaaacgtacccttaatgacggaagtgaagattgagagtatagacaccgaaattacggagagcagaattgagagcctttcatcttctatggcggtcatagaagagaagattgatgatcttatcgaagcttcaaaaaaccctaaccatggagataataataatgtcatatatttgcaagctcaacttgggagggatttggctgacattatgggtcctgcaagtgattatcctaataaagttatatacttacgtggtgtcactatcttagctactaatcatgatttattaatggttttctcaactatgcctatagattggaaacaaagctatatttatcatatcggttctgatagtgttggtcactactgatacccttaattaatatttcagtatattgttttaggctattatgttttgctatcctcaatttacttttgtctaaagtttgtgtttggtttcttgttgaatgaacatttgatttcaaaattgagaatccaaagtaaagtgtttgaattttgtcaaccgatttgatcttattctatcgaattgatcactcaaccaatctgatctgatacaatgaatacattggattggatcggttctaaccattaaatacattaaatggtcatttattgaattagatcgaatccatccaatcttttttagctattatttaggttaaattcattaaataatagataaaataagcacaatttaaaacttgtttctcattgtgataaaacacaaatcaaacatacactacaagaaatgtcacttttgccagcacattttt

SEQ ID NO: 218267 - DNA, 7072 bp, Cannabis indica
tttcaaaaatttacaaagataatactataaaaaaatattccaacatgtaaatttcaagcataaaagttaattaaaaaattagtaataaagtttgtatattgcatttctataattaaattactaaggtataataattgattgtaataaaaagattttcataatagaaatataaataatggtctttgtattattgtgttttacattcctatagttttagttatcattagtttgatagtatttgtaattggtaacttattatccttgcgtttttaataattaatgtaataattaatataatacaatagtcttttgtactttaatatagttgcagaataattttctttttgtaatgttctaaaactttgttcacaactcttttataagtttgtttattgccataataattaagatctatttatagagtttacaaatctctctacaaaaaactaacaagaagatgaaaacaaaggtattaagtcttcaaaacttgattttctttggattaccattcccacatatactttttccacttggactaatattgtttaataataattattaattaatgaacacatgtttaacaacttcatatcactatatggatagatacacacacatatatatatatatatagagagagagagagagagatgaataagactcactcaaattcaatctcatccattttaggcctctctctgagccattttccttcaaacacttctcagctatttcagcaaccaatgaagggtcaatgattttctctaatactccattccccatttagccaagcttacattttccttcttgggttgagagaatagccaaagctacctttcaaaaccatgctttctttgtttggatcatgagcacctgatttagaaagaccgaaacgaaatcagcaactttagcattgaagtttttatcacaatatccaattaaggaaacaagatggcaatgtcagatttgagacaacaccagtatctttgtatggaactctgttaccccttgtccatgctcgggttggcttcggttcacagcaacttcagttgaatgaacgagacccaatgattatagtagagaaactccttgtgtggagagctggagcaggccttgaattatggctgaaccaggataaatatgtgttttcttccaatttacttctatctttatacttgttttaattttctaattggtattagcttgattgtttaacattgtttgatcctttaagattgtgatgatgatgatgaattttcaataagatcatcatcatctcagtttgcaattgtcacttcttttaatttctacttgtaaaccactcttaagaatccctttttaaatccattagttgcatacactaattcaacataatctatccttaaatagattctttagatcacagctcagcatgtataaatatatttatgtatatgtatcaaataataaggagcagggcaggtttgatcaaggaaaaacaaattaacttaaactaattagtacattaatattaaacaataaaagaagagacaactcactcaaatgaaagcatcatcatcatcttcaacagttggaaaagccaattcaagtgaactgttaagtaacactagtattgtcttcaaaaccatctcttcttctcagggcacattctacctcatcaattttagaccaatttgaactcattcctctgtaaaggaactcaaaagagactatcttggtatttactaatatccctataatgaccacaaaagcaaaacataatcccaaaccaaacaccaaaccattttgtctctcttcactttccaaaacaacaaggctagaaatcctcacaatctcaaaaatctcaactccattcaagtaagcattaggcacactagaccagttattttcagcccctaaaacaatacttatattgataaatccacaaccatttgtgtcaacaacataatcaagatgaaatggagattgcaaatttccaatctcatcataagcatcaatagtcttaataaacttgttgtaaataaagagattgaaatcaaacatactaagacttttaccaacaatatcacataagtgaactctaactagatatttcatagcagtcttactcacaggaaaagcccaagttgcattaaagaaattagcttcaatattcaattctcttcctgttctgtaaacatattctggtgcactatacttagttgaccctccactcaaaaagttgactttaccatcataatactcactcttctttgtagcttttgggtttatgagaaaaccatcatcttctaaccatgtcctccatagcaaatcactctctgatgtgatattgtcacccccaacattgattctatggattgtacggtacaccaaagaaaccaaattactttgattacccctttcaccatctgaagtgattagttgagcagagtttgggagaagatcttcttcagggacaagaaagacttctatggcgtttacaaaagctaaaggtgagttctttaatgggtgaaagtaaagtttgaatctttcctttttaattggaagaataaactcttcaattggtcgattactactttttcttacactaaaattggataataaagaatacccagatgccacaacatcgaaaactgcttgggagagattgaattcagagggaaatgagtagaaatgaaggcgtaccatgtaagtacctttcttgtcaacttcgagctcatacgacgatggggttttgaaaactcttgccgttttgtagagaaacgacatgtcgtttgagttttcatcagtgttagtaatgggtttgctttgtcctgttgacagaaaaaatggtggcttttttgttctgtctccaatgaaggttcggctatctttggtggtgatgttggttttggatccgcaagctatgaagtacttttctggtcgtttgtagtttgattctgataatgaaaggatttgtagtgatgaaagattgaggtaaaggctgacgaggaagaaaatcagggagcttgagtttaacatttttcgggaacttttttccgagaaaggaaaggaaagttccaagcttgagtttttaaaattttcccgggaaagaaagtttgcagtttttttccgggaaaggaagaaatggaagaaagacgtgggaaaataaggttatcatagacatgcaaagggaaaaaaaaaaggagtaatttaccaaaataaaccttcttttgagatgagataagatttaaagtttttcttttttgaaatttaaaggttaatactttataataattgacaagcaatattattacacacactactttttgaattaaataatatttattattgacttgacttcatttaaaataattgaaatatcaacaaataaataaagtaaaaaatgtttttagtgtttacttttaatgttgggagcatttatatgtattcttattgatagtatataatgtagttatttataaattttcataaattccattaaaattttagataatttatgattatgaaaatagatcttaaaataactcgatcgtttttatgtatacaacataagcttcaaaattattagctgttttcagatttttgtcacatagattattgattataaatttttttttatgatgataagcaatatagtttttataaaattttaataaatttttgaataatttattatgtcaaaaatataaaataatttgttcttaaatttgttttgtgtgtacgtgaaaaaaattattttaaaatttatttttagcattataaattagtaattttaaaaaaattagtaaaaattttaaattactacaatatacactattatataaaaattagagacactcttcttactagtgaggacaaaaaaaaaaatagctcgaagcacccctaacataacatatttgttattaacatagagaaaaattacattacaagattttttatctgaattaattttcattatcaaaaccatttatttataaaaggttaaattttcaattcaaagtattattattcatgaccaattaattttaagaagaatcacttacaatttaccacataattccacccttcacccaaacaaaaaagtaggctaacaaaagatactctaccaatcaaaacacggtcgttttctttcttttatttacaagtgtatgattgattgctttttttccctcgtctttttggatttctacaacatacaaagtcattaactttactttactcagtgagtcactgaagataaaaagaaaaagcaatcaactttctttcccggaaaatgttaagctctaaccaccaagttttcccggaaaaaagctgcaaactttctttcccgggaaaattttgaatctccagcttggtcacttctcctcttcctccatatatttttcttgacaatttcttttacttcccttttcccggaaaaaaagctaccaactttctttcccggaaaatgctaagctcctccagctctgttttcttccaactctgtcttcttctcttcctccatttttcttcactgcaaatcttttcattatcagaatccgattacactccaccagacaagtacttcatcgcttgtggttccaaaaccaacatcaccacaaaagatagccgaaccttcatcggagacagaacaaaaaagccaccattttttctctcaacaggacaaagcaaacccattattaacactgatgaaacctcaaacgacatgtcgtttctctataaaacggcaagagttttcaaaaccccatcgtcgtatgagctcgaagttgacaagaaaggtacttacatggtacgccttcatttctactcatttccctctgaattcaatctctcccaagcagttttcgatgttgtggcatctgggtattctttattatccaatttcagtgtaagaaaaagtagtaatcgaccaattgaagagtttattcttccagttaaaaaggaaagattcaaactttactttcacccattaaagaactcacctttagcttttgtaaacgccatagaagtctttcttgtccctgaagaagatcttctcccaaactctgctcaactaatcacttcagatggtgaaaagggtaatcaaagtaatttggtttctttggtgtaccgtacaatccatagaatcaatgttgggggtgacaatatcacatcagagagtgatttgctatggaggacatggttagaagatgatggttttctcataaacccaaaagctacaaagaagagtgagtattatgatggtaaactcaactttttgagtggagggtcaactaagtatagtgcaccagaatatgtttacaaaacaggaagagagttgaatgttgaagctaatttctctaaggcaacttgggcttttcctgtgagtaagactgctatgaaatatctagttagagttcacttatgtgatattattggtaaaggtcttagtgtgtttgatttcagtctctttgtttacaacaagtttattaagaccattgatgcttttgatgagattggaaatttgcaatctccatttcatcttgattatgttgttgatacaaatggttctggttttatcaatataagcattggtttggggcctagtaataattggtctaatgttcctaatgcctacttgaatggagttgagatttttgagattgagaagatttctagcctagttattcctttggaaagtccacataagaagaatcaaaatggtttggtagttggttcaggatcatgtgttggttttctgatcattatagggattttgatcatagctttgatggttttgaggagtagaaaagcaaagtctaaaagaaattctagtgagttcctttatggaggaatgagtttggctgatcatgatataccgaatgcttcgaacttacaacttagactgaagaaatcttttgctgaaatcaaacgcgccactgacaactttgatgaaaagaagttagttggagaaggtgggttcgggaaagtttacaaaggaactcttaaagaaaagaagaacacattgaagttgctgtgaaacgaagccaacccgggcatggacaaggggtaacagagtttcatacagaggtattggtgttgtctgaactaagacatcgccatcttgtttccttaatcgggtattgtgatgaaaggaatgagatgattcttgtctatgagtacatggaaaatgggactttaagagatcatctttatgatatgaagggagaaaagaccaaattatcatgggagaaaagacttgaaatctgcttaggtgcagcccaaggtcttcactacttgcatactggttctgtcaaggaaatcactcatagagatgtgaagtcaacaaacatcttacttgataaaaacttcaatgctaaagtttctgattttggtctttctagatcaggagatccaaatcatgaagctgagggtttgaaaggtagctttggttatatggatcctgaatactttaggacttcacagtatacagtcaaatcagatgtttactcttttggagttgtacttcttgagatactttgtgctaaaccagccatattctctcaacccaaggaggaaaatgtaagcttggctaaatggggaatggagtattatagaaatgggcagctagagaaaatcattgatccttcattggcttctgaaatagacacagcttcattgagagttgttggggatatagctgagaagtgtttgaaggaaaatggttcagagaggcctacaatggatggtgtagtatgggccctgagatatgcattacagcttcatcaaattgcatcaagaagagagggttttgaagacacttttactaccaacagttcacttgaaactctattcccaagtgttcatcacatgcctactaatgcattccctgttgaaattgatgatgatgatgatgatgcttccatgtatggtgatatttattcaaacactttctccactcagttttctactactaatgagttgtaatcatttgcatatcagaatgtttttcttttctgtgtttaaagtcattagcttaaattttggtaatttgcctaatttgcagtaaaattctcttatgttttaattt

SEQ ID NO: 218268 - DNA, 6276 bp, Cannabis indica
accttgtcctcaaggtgaaaatgcggaaactgatctttgatgacagcaaagtcctcccaagttgcttcactggctggtaggtgcagccacttgatcaatgcttgtggtggtactttatgggtgcctggacgtatggctagcacagtttctggtgctagcagccattctaactcagctgtaaggctcggaggaagtggagttggctgctggtgcggaccgagagcagcacgaagtaaagacacatggaagaccggatgtatggtggcatcaggaggtagttgtaggcggtaggcagctgaaccaacacgggctaccactggataagggccaaaataccgtggagctaacttctcattgacgcgcttggccactgtacgctgtcggtaaggtcttagcttgacatagaccgaatctccaaccttaaactcaagtgtcctgcgtttcttgtctgcttgagtcttcattttctgctgagcgcgatgaaggttctctttgagcaacaccaaagtggcgtcacgagcttgcaactgttgttctaccccggagacttttgtgctagctggttcgaatcgtatcaggggcggtggatcacgattgtagagagccttaaagggtgtcattccagtcgacacatgatatgatgtattataccaatattctgcccaagcgagccatttaacccatttcttcgggttctcaccaacaaagcaacgtaggtaagtctctaagcatctgttgacaacttccgtttggccatcggattggggatggtaggctgtactgtgcttcaagttggtgccctgcaaacggaaaagttctttccaaaagagacttagaaagatcttgtcgcgatccgatacaatagaccgcgggaagccatgaagtttcaccacctcagaaacaaaaacttcagctaccgttgctgctgaatacgggtgtcgtagaggtataaagtggccatacttcgtcaaacggtccaccaccacaaagattgagtcaaacccgtgagacattggcaatccttcaatgaaatccatagaaatgtcctcccaaacttgctccggaataggcaaaggctgaagcatccccgcaggggattgagctagatacttgttctgttggcaaactgcacattcagctacgaattgttgaaccgcctttcgcattcccggccaataaagatcggttgccaaccgctgaaatgttttaaatacccccgaatggccaccaatcttaccggtgtggtattcttgtaacaacaatggaatgcatggtgaagtggatggcaacacaagtcggccccgaaaacgtaacaccccttgaatcaaggtgtatcctcccccgtcatgacccttttccaagtcagaaataaccttggacagcaagggatctttctttacttgtgcttgcaactccggaatggagataagacttggcacggatatggcagccaaggatttgtcctcttgaacccgtgaaagtgcatccgctgccttgttttctatccccgggcgatactgaatctcaaagtcataccccagcaacttggttaaccatttctgatgctcctccgccactaacctttgctcaagaaggtacttgagactccgctggtccgttcgcacaataaatcgacggcccaataaataagggcgccatttttgtacagctaacacaatggccatcaactcccgttcataaactgatttggcttgctttgttggagataaggcttggctaaaataggcaatcggtcgcttgttctgcatcaagacagcccccaaacctacacctgacgcatcggtttcaacaataaaaggactagagaaatcgggtaaggccaataccggcaccgagcacatggcctccttaagttgggcaaaggcttgttgggctaccggattccaaccaaaggcatctttcttaagttggtcagtcaacggacgggcaatggagccataattgcgcacaaacttcctgtaatacccagttaaccccagaaatcctctcaattctttgatcgtctttggaatcggccattgtgacatggcagccacctttgccggatcggcagaaactccctgagccgaaacaatatgccccaagtactccaccttgtcagttccaaatacacacttcttcctattcgcgtacaactggtgttgttgtaggcgactaagaacctcctccaagtcttctacatgagcctccatggacgggctgtacaccagaatatcatcaaaaaaaaaccagcactctacgacgtaggaggtcgcggaagatggtgttcattaatgcttgaaaagtggcaggggcgttagtgaggccgaaaggcatcaccaaaaattcataatgcccctcatgagtgcgaaatgcggttttctctacatcttcggcagccattcgtatctgatgataaccggacttgagatctagcttcgaaaacaccttcgctccatgtaactcatccaagagctcatcaatcacaggaatgggaaacttgtcagctaccgtctctctattcaacgcccggtaatccacacaaaaccgccaacttccgtctttctttcgaaccaacaggaccgggcttgaaaacgggctggtactcggcacgcatatgccagattggagcatgtcacgaaccattttctcaatttcatctttctgagtctgggcataccgatagggacggactgagatcggtccaaccccttctttcaaggtaattcggtgctcttgagttcgcttaggaggcaaccccgggggaatatgaaacactgtgtcgtatttttgcatcaattccgtcaattcttttggcaccagccgttcatcctcactgacttgcgagtgtaaggatcctagatgaacccagaacccatagccgacttgctccacagtatgtaccattgctttcaaggatatgggagatttacaaaggttggggtccccttgtaaagtcacccaagttccttcccgttcaaacttcatcaccatggttcgccaatttacttgcatattgcccaaggtctcaagccatttgacccccaaaatgacatcggctccacccaactccaggggtaaaaaatcagttaccactcgaagggtacctaactccaaagtcacattggcacacactccttcggcctttactttgtcacatgttcccaaaagaattccatagccattagtctgagtaattggaatacttgtagcactcaccacatcaagcgaaatgaagttatgtgtggccccgctatctattaacaccgccaccggttgctggccgatcttccctgccaacttcatggtgtgtgcagaagtaatcccaaccagcgagttcaaagagagtgtggccagcgtttcttcagtggtttcgacttcttcctccgcggctggagagggtggaggtgactccacagccggctggggctcatcttcatccgcaaacaacatcacttgtaagaatctttgctcacactcatgccctttatgatattttttgtcacatttaaaacacagccccttcaaccttttgtcttgatactcggcttccgacattcggcgcatggtgggattcttgcttgctgcagccaccattgatgttggctgcgtagcttgtacgggcgacaccgtaagagttcgagtgttgaactgagtagggggtggacggactggggtaatttggctcacatttggcttatttggccttcccaagtgacccaccgtgagcagttgttggccctcttcaatcctttgggctgtctccataatttgtgtcaagcctagtgggtttaacatatgcagggtccctttgatgttatccttcaatcctttgacgaagctcccctccagtatgtgttctggaattccatggactcgcgacgctgaagcctcccatcggagccggtaatctcggacagttgtcgtctgagttaccgatagaaattcctctgataacgaccctattggagcagttcggaaccggtgcagcagcatttgtttcaacatatcccacgacaaaatgggtcgcctctgactttcccattggaaccaagctagtgcatctccctccaacccgatgatggcggtttccagctgaagtggctcgggtaggcggcaaatcatgaagtatcgttcagctctgtaaatccaaccttcgggattgttgcccgagaacaatggcagctccattcgaggaggacggaaatcatgacccggaaactgaccttgaggataggggttcggatgcggtggtggtggtggtgggtaggtcgactgaggtggtggtgaagggggaaatctaacttcgggttcgagcggtgcggatgacgacgacccgtctcttgggacagccggcggtcgcacatcgttgctggctgtttccatcggagcttttcccgcggtgataaaccgagtcatctgagccattaacaactccggcaacttttgaatctccgcccttgtctccgttacctccttgccaagttgtgatttcacttctgcaatttcacgctgcatctccgatcgcagaaccaccatgaactcatccaactgttcttgagtcgtgtctttcttaggtcccataagtgagtctcaacctcgctctgataccaatttgataggatttccctgtcacttgggatccaattgcagaaaaaattaagaacagagaattacagagatgaagagaaagtatggcagtgccttgtattgaatctcccaggatttcgagagcctggttccctcccaattcggttacaatactccagaaaaatcacataattcccacatcattacccctgccctattattcaaacaaacagaaaaaaaggatatgaagatctaagcaataataccattctcatctcatatacattattaatcttatatctcagatcatagaagaacactaagaaatatgcatatcattaaccatactaagcataacaaaaaaaatcaaatgaaatgaaatgaactgaactgaaaaatccctaactagtaactattataggcctaaaaagttgagaaattaagaacattatgtatgaatgaacaatgaaccaaacccataatcatgatactcaatctctaactattcagcctaaagatttaaaaatatatatgaatgaaacacataatcaaaccattataaaaatcccaactttaatttaaaactcgagttcaaaatcccacactcagttttcaatctactgttgtttgctcatcttggtcagttcaagacaaaaaagaaaacactgtaagaacaaaatcaattccacgttaatatgattacttaagtaaaaacaatcatatattgtaaaaaataaattggcgtaaaaaggacagaaaagctgaggattctcacctaaggagaagaagaagaagaagaagaataaccggagatattggaacggtggggaagaaggagccgccgtgtggtactgtacgttgggaaccaaagaggttgaaagagagaagagagagattttgatattacacatatttctttatttcattttttaatgcttttttttttcgaaaatttacataaattattattatttttttcaagaatttgacaatttaaaattcaattttttttcattgtatatttttataatattcaattaaaaaaatataacataaacatacattaaaaatcttattttatgtatccaatgctgccagactatgatgatatagccgccatgttcatggctctcaagaaagagaggagctgccattgacctctgaattacaaacaaggatgcagcatttttttctctcattatcttttcttttgagggatatttaatactgataagctagtttatgttttgagtttataacattcattcattgtatctcataattgtgtacatacatatatataagggcaatttacactaatgtatacattatatgatctcattccgatggtcttgtcttttgacatggtgagaatgtttgtttagaatctcttagaaagtttgtctttgattatctttttcgattatggcgtcaagcagttattcggtgaatgagttggaagatctctatgctaatattgagattgaaggggaagatgacgttgccaatgtctttgagtttgaggaatccgaaactgaaagtcaccaatacagagttatgcatagttggaagatttcttacagccagggcaatcgactatgacgttatgcgccatactgatggcagtctcttttggcgaaccgggaaacggggtaatgtacgtgtaagcaactagaatccaatcga

SEQ ID NO: 218269 - DNA, 3697 bp, Cannabis indica
atccaactcaaagcttctttcacaccaatgacttctacctcatgaggctgaaacactcctaacttgttcacagtcttagcttgtaagcttgtgagaccataccagctgctgaatgtgtcacaaaaccaacaccaaaacgtctctcattagaaaaaaaaaatgctccatcaacattaactttgatgataggaaattcgggggggggggtgaaagggagcaatgctcaacccaaaccatattaggttcagtatgagtaattgattcctgtttttgagcattataccaatcaacgtagttgagttttgctaatgtaagcacctcctctattgtaggcagttttgaattcaacaccaggtcatttctgacctttcaaattgaccataaaaccatgataacttccaagctatcagtcatgttccaagtctccaagcactcctcaaatcagttggtgaaagacattgcaacagcagctacagtaggcacacgagatcgtctctaacagtcttgagcgaaatcgcaacgaaccagcacatgaagagcagtttctagagcagctaaacagatcgggcaagaggaattaattgcactactacaaatatgggttttctcgatgtttaaaactgtcggctatactttaaaccatcgggtatacctatttttttttaattttcgtgttttattaataatcgtcacctattgttgtagctactgttcaaaaccgtcgggaatactcatttttcccgacgattttaaatagttgcttaatttttttttagtgacggtccccgaaaaaaactgttttcaagatcgtcgcgaattcaaatatttgtagtagtgttggtacatgtttggttgacagttgaaacttggttggaagactgtttatgcatactgtccctaatttttttttaaacctttggaggaagcttaagttgccacagtttcctccaaaaaccagaattacctggttgattatcactgtcattcatccaataccaagtatctccctcacaacaattagaaagaggaattttccaaattaactcctgatttctttcccttaatacatctgagaaaatcatctccatcctattccaatttatcccctttcatcgaggtattcaccattttgccaactagaactgggtgagaagattcaaagtaagggttcacatcatcaacaagccaagtctctgtaaggatacctatttgagaaccatttccaaccaatcttcttgcaccagcccaaactaacccctaagattcaaaaacacttcgccagatgtagcttgggttgcttcccagtgatgcagaaagaaaatttcctaagtcaaaatatcttgctttgaaaatttttccccacaagtaagaagcctccacccttgcttagccaataagctaaattaaaatctctaaagtcatgaaaccccattcctcctctattcttatgcaaagagagcttttctcaactcaaccaatgaatacctttgttgttattcgatctccactaaaacttgcttatagatcgttcaacctcttgataaatactaacagggataagaaacacattcacagtgtaggtagggagtgcttgaatcactgacttaataagaacttccttagaaacttattctcccaactctatatccaattttgaattttgttagtcaaatagctaaaaaccacatttttatttcttccaatagcactcaggaggcctagatacttactcttctcatctacctcttgaatacccatcctaagacagatggtctgtctcatttgtctagaagtattagtattaaaaaatacagatgacttgtaaaaattgacttgttgtccagaagctttggcaaaaacatccaacatctttattatgtttgaaacctcattctccatagctctataataaaaaaaagatatcgtccgcaaagaacacatgagacaaaataggagcactattttctactttacacccatgaatcaatttcctcccaagtaacggggtggcaaaacttgctcgtataccgtgtagcccatagtttgattttttggccttggattggacggtccattaacttgggtttactgggtgtgttcaacaagacattgttctggcccgtgttgtggcccaaaaggaatgtaagtatctgctattggttgttggtcggtggcttggtaggctttcctgatcaatacaacgacttgtctagaatgattgtcaattaattcttgttgggctctcatgatttccatctctcgatccctccattcttcgaactgacatcttttctctaaaaatgaaaaatttatagctgctctagtatcttgttgatcgtaatgaagagtgttattgtggccttatattttccctagtacagctcgcaagttctgtggttcggtgtcattaccgattagcctttgagaatttgtagtagatgggattctagtactggggggcagttttctcagtccgaatgctagtagttctagtttcttggatgcatgaagtgaacccagccagaggggtagttactccttgccctactgtttgtggacttgttactggctgaggattagtcagagcagggtccgtcttggctggatctctggggtttgtaggtgtctacatgtttggatatgtagccattggatccgttgtttcagtttgatttcttctccgtgtttgcacaaccatcttgtctcctgaaaaagactcaaaacaaagacttgtgtttcttttctctcaataaaaatatcaaaatgttaacctcgcatttagccaacgacagtgagtcaaattaaagtgattaaaaataattaaaataacaagtatgaataatatagagtaaagaaaataccaaaattatagaggttcgatcccttgatgatggtaatagcgtactaccctttagttgtattgacttgtgagtagatgaataagaaaaccttgatctctctctaaagctcttacaatgatctctgagtaatttactcttaaatctagatttctctcgtatgttttcttagaatgaaatttatgtctctgaatagtgagatgagtccagtattgatagagattaattatttcaaattagttttccaaaatcaataaggaataaaatggaaaatctctttgctttctataattacaataagcagaatgaaaaactaggtatgttttctttttcttaattaccacgaaactatcccatgaatttagaaatatttctgtgacttgcaagcttgaggatatattagatgtatctcttaaattgtctaactcacatttactggtcggtacatgcgaactgctcacatgctggaagctagtcgggtgttcgtgtatgctttgttcagatgccccaatttctgctaactttgagtgcttaatctccctgcaatgttcatcaagggtagaatcttccgtccaggtgatgaaatttgtcacgtgtcacccaaatgaatgcacgtcaccttgtgtaaaaatttggataatggaaataatcttaatgtgattgttgatgtagggtataaaggtgtatatcagatatatccaacatgatgaaggatatgtaagttttatttgtagtttaaaaatttataaaaccacttcgtcgtaataatttttattttatataaaatataatatttatataatttttttctctttttttaatatttttatattttaaaa

SEQ ID NO: 218270 - DNA, 4251 bp, Cannabis indica
ttaggatgttaataaaacatacatggtagtaaatctagatcatggtaaaatattttcaacagtatcaaaatcaaatgagaaggaaagtgaattggctttaccagaatcgaggaggaatattaaatgacattaaaaaacttgacatgtgtgttgctcacgaaggcatgacgtcaacacttcgggagcaataatccatttacaagtcccatttcacaaaattttaaattggggactttggggggtaaatactgcctaggatttttcaaaatacgtggcacttcaggaaggagccatgtgaaaacggaaccctcattacaagacgtgttatgattagccacatccggagcttgataatcagtagaagcttcaagagattagtcatctccgaaaggaccctccaggaggatagttggtttttctcttcctctccataaagaaacgcgacctgaagaaaaagtagccaggccctaaaacatggcgtacaactcgaggctaagttattgtgcgtgaatttaatacatcatggggaaggacagcctattccttactatggaaacgtgcttaagagtttaaacccataattctcttacttcacaataccacatgcatcatttgacggctacattacaaactgtcaagtcgacaataagagaaaggtcttgtctcaccaaacacttatattaaatatagacacatccttaccatataggggatgatgccctattcctgaaattttaggaatttgtgcaaaggaaaattcaaacagagcacaacaatggtggcttttccccatcaatatgagcctataaatatgccgagaatgtattaagatggggatggaacaattattctcggtaagataaatctagaactaaaagtgactcgtggactaaggttcataaatgccccaaccacgtaaaaattcttttctttaattcacattaattattcaacacatcttcaattaattgttgcccaaaatctcgatcagcaccctagattatgtacctaagtagcaaaagtgttttagatggacacttatcaatttactgttaatgtgacttagggccaccgatcgctgaacgacattccactcaagttggtcgatacacctaaatttagattttaggtaacaaaagtatctagatgcacatatgcacatgttcagtatacgcatattatattgctttatagctaccatattagagataacagtttgtgtgtacatagagtggtaccaagatattgatatctagtatattaggaaatattgaatagtatggataccaacatcaatgcaactagagtgctggaattaggttggtattatggttaatcatgatataggtatgaatatttagattagtttacgcgtaagatggggttagtgatttatggtaactgagtgtatgggcgctcagttatgggtcagatgttatgttgtataatgcatgtttttcttagtaagccagtcgactcacaatcgcttcacaatgtgtgggttatgagaaagcaaaactgattagcggtgatttgagggctctgataaagattgtataaatttggtcgtctagaccttgagggttgagatttatgggagatcaactggcgtgacttgtattttgttgttagacgattctttcagaataatatagtatatatgtattttgtaattaaaattttaattattacgatacttaattatacttttatcgtaaagtcctttgattagcaaagattagtacaatttaattggctttggcacatttaaaaatattattattatgtttttttaagaaaaaaaaagataacttattgcatccctttataaatagaggagtgctaccatcaacattctattacaatctcttagtcaacctctgtacttgaaaatacatgttggaatatttttttttcatggtggtattcgttatgctaagaacatcattcctgtaaatttttaaaaaacttttgaatagcttacattaccaaaaatacatttgaagttttttgaacacgcatggtaaattgaaatatcataaactctgtaaactattcagaattttttaaaattttacagaaatgatattataactataatgaataccgttatgaaacaaaattaaaaaatatatatattctaacattaattataagcgtgaaagttgattaagaggttgtagtaaaaagttataattagcactcctcttataaataaggtaattgggttttatcaattgtgtcaaatataaagggatgcaatgcaaatcatacaaatttagcattgttttataaccgacacaattgattaatatttcatttgagttaattttgggtgaggattagtgtgttgaattacgccaaaagatttttttaggtggtgatggtatataatgttttggtgtttttttttattaatacgtgcccaaaagcacccaaacgaaacaaacagagttcgaaacaaacagagttcgaaaagataacacctaagaacagggtcaaactaaaagacagtaagaaaacgaaaggaaacaaataaatatcagccatccgccgtgtcactcggcagggaactgtcaaaattgggtagtctaattctgtcgaagatgttagaacaaactacccattgcgccacatcatgggccacaccgttgagattctgaggaatccaattgacttcccaaaggtccatctgcaccatgaaagttttgaattttgcaactaggtcctggatattatggtgtagattagaattgctaagacttgaagacttcacagcttccaccgccccagcagagtcactttggaagatcactaacttaagaccaagttgaatcgcagcttctgccccaagacacaaggaggcaatctctccagccagcggatcactataatgaagtttcttagtgaacacatttgttatagggctttggtcatttcggaaaatagcagcactggttgagaccctcttgccaatagctacgtttgtactacacattctccaattgttaggaaggggaagccattcagtttggagagggtggtgggagtgctgctttccatccagctcaattaacctgtaattgatgttgtttacaacaacattaagcggagtcaaattgtttttatgaattacaaaattcctcagctgccatattttctccataactatagccgctccttcgagtagagtatcaaaagtgagatgtgggggtcttttatcctttcctctaaaccatttatccaatgacttcaatctctgacctggttctcagttgtcttgatatgccagttgcatccaaaccatacagccctggcaacatgacaatcccaaaagagatggagagaatcctctattgccattgaacagagggggcagagtggatcctgcaagttacagattttgaggagtctgcttctagtgagcaggccatcagataaaattctccaccacatcatctttgatctggaatggattttagcgccccacaccaaacgccatttcacattttcattggagtttggctcaagattcttggtaattctataagcggatttgatgctgaattgaccatttgcttccgggagccaaagccacgagtccttgacaggattggatggtaaggttatattcagtatgcgtttggcatcatcctgatggaaccaatgccgaatcagaacatctttccactcattattttcaataaagttactaaccaagctaatcccctctgtggcatctctcaaacgctggtgctgaagttctccgctggaacccaagggtggaaccaaatagatgtaccattcccatttcctatctttcttcaaattccattatgaataaattgtctagcattaagaatggctttccacatgattgaatccgaaggttgcgcttcaatgtcaaggaagtcgtgattcctcatgtacttcgcatgcaaaatctgagcccataaaatattgtcctcgacaagaagtttccaagcccatttcattaagaaagccgtgtttatgtcttttgttgtcttgaaacccaaacctccatgaatcttaggtttgcaaagtctttcccatgcgactgtatgcataactctcttctcctccgtatcgccccaccagaaatcccttaatgttttgtctattttattagcagtagaggccgggattgtgtcagatgaggctaagtagtttgctgttggaaattattttaccaggatctacatttactaacaagtatgttggattaacaac

SEQ ID NO: 218271 - DNA, 3121 bp, Cannabis indica
cctccataaacgacgtcgttcaatacaaacgacgtcgttttcgtaagattttacatagaaaacattgaactcggatataacagggtgtaaatttacttaaaaaaggaaaattacatgccgacaatcacatcacgaggtcggtcacgtgtaataatccaataattaataaacccgacccggaaatcaacaatcccacttccattttcataatatccttccacgtgtcctccataaacgacgtcgttcaacacagtagaggactttattgcgtgatccgataatatctatctaagattttttacaatccattaaataataaacccgacccggaatcccacaaacccacttttttcatccataaacgacgtcgttttcataagattttccagtatataactacagttccctttcgtgatccgatattatatctttctaagaagattttcttccaaacatttctcatcaccggaatcggagcaatgccttactacagagacgaagacgccgtcaatgacttcgacgagtacgattcgaccccctacagtggcggatacgacattcacctcacctatggtcgtcccctccctccctgcgaagagacatgttaccctccattgactgatgatttcgattacgatcgtccacagtactcttcccacagtgaaccctctgcttacgccgatgaagctcttgatgttgagtacagtagctatgtccgccacaagccacgtcctggaccagcttatgggtttaatccaggtggtggtcatccacagggagagagacctgaacctgcgccttatgggtttcagcctgaagctcagtatggctctgagagacctggatctgaatatggatctggctacggtcgtaagcctgagcctgaacctgaatcggaatatggatctggctatggaaagaagagtgagtttgaacagtcggaatatggatctggctacggtcgtaagcctaaacctgaacctgaatcggaatatggatctggctatggtagacagccagaacctgtgtcggagtatgggtctgggtatgggagacagccggaacctgtgtcggagtatgggtctgggtatgggagacagccggagccagtatcggaatacggatctggatatggtaggagacatgaatcagaggaaccgagttctgaatatggatctggttacggtcgaaagacagagtatgagagttctgggtatgtagcgtctgagtatgttaagccctcttatggtggtgatgatgagtcaccgaagaaaccaagctatgggaatccaagttacgggagtcaagaagtagaatacgggagatcaagttatgggaggtccgaggaagagggttatcgtaagcctagttatgagaggcgtgatgatgatgatgaggatcgtcccaagtacggttacagcgaggaacgccatggccgcaagaaatatgtgagattaatcttctaacttctatatgcttatattatatatcatattcattctcagatcataacttttatgacaaatatttgacctttaaggattagaaacttgttttttcttacatgtgctgcattagtacttacaaatcaaatatagatattgtcgacgtgtttatacacaaatttattgttggtgtggtctcttaaaggttcataaacatgaggaggttgtattataaatactattgcagataagcccgcaaaattatatttaaattctaacaatttgtgtcagctagaatagtgttttaaattcatatcagttcacttattactgatatggatatataaagatgcaatttttctacgtgtaaaactacaaattttcttatactaacattttctaagccgaatcgttaggttgggctattagaaatagccttagattgttaatgtgtggtaaatagaactaattgccaattaattttgagatagaattatgcacattcatactaattctaacaatttgtgtcacactgtttatagctagaattgtgttttagattgttctcctttttatcccgacaatcctttgctgttgtcacttattactgatatggatagatacacatagattttcaatgaatgaaatgtatcatttttacatatgactgatgatcatgtatgaacttttgcagggtggtgatggctctgatgatgatgaagagaagaagcaatctcgctataagcagggttccgataatgaagatgatgaagagaagaggcgatctcgctacaacaagcaaggctctgatgatgatgaagagaataagcatcctcgctataagcaccaccaccaccaccaccgcaagagctacgacgacgaatgatcttgttgctcatcgattgtttgcttgaattggaggagtaaccccatataaatatagctactaaataaagggttgtgttgggtctttcctgtttttgagtatcttaaaagctcttgaaaactatgttctaaaatgttacgagtgtttgtgttcttgcttttaataatataccagtgtttgacttgtcttgctacctgcattttcaaatatttttaagggccattatcaagaactctggcatcgttttgggttaccatatcaatcttttagagtggaagccttatatctaatttccttaaacttcacaagatccaagtcatgatttcttggcactgcctcatccaataggccttagttgtggaaatttacaaaactaacaaagtgaaataataaaatttgcaaaatgatcatataactcaatttacgactttaatagtgttttatgctcgatgagggctacacttgcatggtcctttttcatgctctcaaatagtttatatgtgtccaaaccaaataaatgaaatgcatcatctgcattggtgttattggcagaggctgagatcattgtgttagcaagtaaccaatccttttaatcttcatgacattgtgtcgtttcaaacatcagttttttgggcctagataacaggcccaccataaaataaccgatccaatccaatccgcacaatccaatctaatctaatccacaaagtgcggatatccgcacttgtacggattgaattggattggaaaattcaaaaatccgcacttgtgcggattggatgttgattga

SEQ ID NO: 218272 - DNA, 4379 bp, Cannabis indica
aggtgaattagacttgtgtttagggcccatctagttcaaacccccaaaaaatctctcttttaaaaatacgtattttttttactgattttgaaaatataatttctttctaaataagtgtttaattttgtttttttacgacccactaaagtttaagaccaaccttgcatagctaacagatagtttatatgtggcatttttcagtactgatgtgggaatcaacaccataagacacagttcaaaaaggtaatatggggtggttgaagatatcaataagcaatgagaaaaacctctattcttcaatctgaattctaatcacaattcatcagagatgtcttactcttagccatgtgattttgtcaaacattgaaaagtagtaagtgttgaaaattctacattatcacaaacaattagtaaaagtaaataggcacttaattagaaactcatatacttccttctcacaaatctgcatgaagaaaagaaatgacttcaattaatcagaaccaacattataataataataataataataattatagtcatcaatcactctgagctaaactaaatgattttctttaattaaaaacataaaataaccaaagaatagaatagtttgcatataagaatatacttgtcatactattaaaactcatttgttctaagagcatgatatatgatcattaattcatgatcataccaatccaagtattggctctaatttagttttcatgacttgtgggcaaataagaggaagaacatatttgacttttgacttatgcttgacaaactcaagtgtcaaagctggttttgtactaaatttgatcaatttatcagtttcaagtggaccaaaagtatgttaagattcttggtctagttcaaaatcatgcacatgtttgttatcttataatgaagaataatgaaagttaatggtgggtgttatcttcctttagaaaataatgaaagttttcattcacttctacaacactataattgttttttcttttctctacaattgaatcttgaaatcattttgcatgagagaagaaaccattttcgaccgagtgactaaaggacgaaagaaaagttgtgtgattgggttttaaggtttattgccatcttgagggagaacattaaaggtcgaccctaaaattgagtggatcgtaagaaaaagaaaaattattggaccttttataattttgaacactactaaaaaaaaatatatatagtttgtgcgaaagcatatagccagagttgattgctaataatcattgcatttcaaaatatcaaagtccttaaattttgtcttatcaaatagagcatgagcataagaaagagatccacacttatgactcaattcccttcaatttacccatgtatggatttacccaatttcaagaaaccaaatatagacactacccaattcaattctatgcatttttaccaacatttcaagagctgtgaattcatttgagcataaccagaaatcaaagcaccctataagtcatcttttaaataaccaatcaagcaagaaatcaaactttccaaacttaacatacatatatcaaccccaacataacaaccccttcagcttccacaccctccttttgcataaatatcaactgcttttaatggctgcccacttcacacaaacccgatcataaaatccctttttgacattttattgaacaagctcactacatcatttattctcccacacttggcatgtgtgtaactattgttgaaaattatattaaagtaatcagatcacgacctcgattctaaatttgggagtcgaacttatattggtgttgtggtactaaatcagatacgtagcggaataattttttttttgattatcatcataccacatcctcaagatcaccatatatatatatacattaaatctaaaataaatagataaaaaaaaatttacctcttgaaacctaccagggtatcgttgtttcttttcatatattgtatctttgaatgatgacaaagaactcacaccgtagtcttccaaatcttttaccacacacaagaactaatatgtgctagtaaatataatgtatatggagttcttggtttaattcttatcacatgagtaagaactctttttagagtgatgatagaaaaaaaattaaatgtggttaattgtttttagacttctcaaaaataatacttcatacactatatataaattaaaactaataaagcttttatttaatttaaatatttaaacacaaataaattaataaataatatttaattatttgaattaatatttataactaattctatttatctcttatagttaatttgaggaaatctctcaactacttgaaataatatttcaatcacttggaaaaaatctctcaactactatgagggaatatctcaacgaacttaaatatataactatacaaatagcgccacttatatcttaataagatattggtagtgtcaagacaacttttatctccccaatttatttaattaataaatttagaaataaaatacttactgcaaataactaattactattttgacaaatcataatagatttttctgaacttctatccctatccttgacagtgttttaaggtggcaatccgagggctatggacctataattccaagctccaataaattctattatttattgaatctcatcaaccaaataatattatttattaattctataattactctattataaatatggaattgagctcttagtaattatagattatatttattgagttttattacagtgtccattgatataatcaattccactgattatccctccatatgtcggtttgtaattagttttggcgaaattactgttttactcttctaattacttctatatcttttagtactgttaattcactagtaaaatataattaagatctaatttaaatttgtgtacaacttttcagttctagaattaacacttaaatgggaaccaacattcgatccgttaggaaagtcaggattctataattgtagattaagttcctagacatccatattattagattcctaaaatagaatttgtaagaatcatcttctttgagaaactttaatgagtgaataagagaaactaataacataaacagaagttcataattactcaggattaaggccgatctactattgatcatctttatgatatgaattaggtctttaaggtagacgatatgtttgttaaagataattacatatcggtccttatcatatataatcttgaatatatacacactttcacttagatgtcatactacatcagtaatcttaatcgagattacttgtaccgaataacgagcaccagtgaaccacgctatcaaccgttgattaaagatttcataactttaatttgttgttgactattttattcattgctaagtgatcttaattctccataactttaagcccctcttaaaactcgaaattaggatttaacaaccctaatttttgcattctgaccatagcgggccgcgacattgaccctccatgttgcggccattgaaggccatttttaggtagcaaacttcctaatgcaatgactgataatattttagacataactctatattattgatcgaaaaatgatgattcaatatgttttagaaagctaaaagagagatctagaagttttattcacaatatttttttttaaaagtgagtgcatcatagtcaaaaattagattgaaactttagacttgatttttcgatcacaaactgagcatgttgagcattcaaaacttaaactatttcacccattataccttagaattccaaaatccatgataaattcatcatattcatcttatttaacatgtttcttctcattttaaattcattatatgaattttaccatttaaacctgaaataagtaaaaaaacaagtgtaattctgcacaaaatgaatataatcaattgaggcacatatctaaaacacttcataaaatgcaccttaaactagcttatcacccttaagaatattataatacatgttaatacatactattttttaagtattcaataatacaattcatattaaaatttatgattgaaataactgatacaatacaaaattcaaccttgttaatacattaactgttaccatttttaagttaatacatgttctgtttttttgatacaatacaaccttgttatacgatatgccaaacgagtcttaagatataaaatatacacattatgacatgttatttaaatgtataattaaataataaatcacactaagaaatatagaaatttatgttgacgacatgcttgtgaaatttaagacatccgaagagcacagtatagacttcgaggaagccttcccagttctcaaccttaaagttttagtcgtga

SEQ ID NO: 218273 - DNA, 3354 bp, Cannabis indica
tataatatatatttatatagatgaatagataaacaccccatgacttggaattcaaaccacacacagaatcctggataagttaccaccatataatacaacactaaaatggaacctgatattcctaacaaatcatcaaatagcacagtctaaaagttatcaaaatagccctagtacatcaacaaaacccttaatcaaaatcataccagacttatatatcagtatttttaagaaggtgactgcaaatatattttgggggaaagagaaagagggactattttataataagactcatcaaggtaccaaggaaatataatggaacagcatgcttaaaagttcactattttcctaaagcatatgtatacaacataatattgtctctaaacttgtgatttgatacaaaactgacaaagagaatataagtatagctggtggaagaataagaataaaaagaagctaatcttgtagcaagtaacaggcaaatcaacacttcaaaaattatattccaacaaagtccatcttgtagaaagtaaaggaaaatgtcaaataatatccttacacatggtcacaaaccgtttcattcaggtgatccgtgattcccataattgttgggtcttgcacctcgcattcaactacaatttttttgctaaaggcacattcaactacttgagcatggaaaaatgcaatagccacattttgtggataattgaaagtataaactaagtttagctattcgactgttagacccttggtagcatccatttgtgatgcactaaagggtcgggccccagtcgatcccaacttcccatgccctaatcgatgatgacatctcactgaagtttgattggcttctataatttcagcaagcaccatagtttggacaagcccagtgggtttcataattggccttggatctccatttgaagccctttaaggaaagtccattccaacatagcctctccaatcgttctgactgaagcaaccaaactctcgaattgtctacgatattcttggacaattgaatcttgccggagacgaaggaaacgatcgtaaacagtccctcatgcgctggacaaaatcgtcgaaggagcaaggcttttaattcttcccaagtttgtataggttatcgcgagctctcccgtcgaaaccaatgcagagccactccttccaaacacaacacaccggcttcaagctattctgctaccgacaattgctgtaggccaaaataacgatcagccctacgtccagtcgtttgggtcagcccctaaattcacgggcagttcaattttttaagctcagaactcttgtcgtcttccaccagcttcgttctcgtgtataccaaattgcacctggggttgatgagttcttcccaacattacgccgaagaggggtttgggaagtcccagaagcttcacagatgctagcgagttcattggcgatacgagcttgaccattcatcaacgtctttggttgttctgtgatcacggccaagttctgatcatgggatttcagacttggggcggccaatagtgttgttgatgctttatctcgagttcccataatggcatgctcagttctcacctctaccacttggttaaactgggatattgtggaacaacgtctggtgacacctaacaatcagaagtggctggttaagttgcttggctattattttgtagcagcatcggtccaactaaagcgatccttcttgcatcaaaacagcttcgattccataaccgaagcatctgtttccaccacaaaagttttagaaaagtctgcgagaggaaggaccggtacctttgactaatgcgccagctaccttcaaggcactcatagatgaattttttaggccttttcttcatcgttttgtgttggtattctttgatgatatccttgtttatagtcctgatgaagctactcatgttgagcatctcaacattgtgttgcaaactctttccaagcatcagttatatgctaatatgaagatgtgttgctttgctcgacgacagttggaatacttggggcaaataatttaatctaaaggtatgacagatgactcgtctaaagtccaagccatgctagattggccgctacctcgaaccatcaaagaactccaaggcttttcgagcctcactggttattactggaagtttgtggctgggtatggcaccattgctcaaactctcactgatcaatccaagaaattcaacaagatgtctttctctctcgggttcgagctgatttagccaatggtactatggtccctggctttgccttggaacatgatcgcttggtgtatcaagggaggatggttttatctgttacatcgacgttaatcccttcctttttaaaaaagtatcattgtttaccaattggcgatcattttggggagtctcacacttaccaacaactttgtggtgacgtttcttgggttggtatgaagcggatggtgattgagtttgtaagggagtgtgaggtgtaccaagaccataaacaagtctcctgctagtttgttgcaaccattggtgctacccgagcggggttaggaggatctaactatggatttcattgaagggttacccaaatacaaaagtcttgacaccatctttgttgtggtggatcgtttgagtaagtacgctcatttgatattgctgaaacatccatttgctgctcaaacagtcgctgaagcttttctccataatgtggtcaaacttcatgggttgcctaagtatcatatctgacagggatcgcatttttcttagtcacttctggactgaactcttccgtctccacgatgctaaattgaaacatagtaccacttatcaccctcaaactgatgggaaaacagaggttgttaactgctgccttgagacttatttacaatgcttcgcttccaagaaaccaagagtttgggccaagtggctagcatggcctgagtattggtacaatacttcttttcactcctccttaggatgtaccccttccaaggtattgtatggaagggatcctccttcactggtttaatattcttctagtaccactgctgccattgcagtggataagcggttagaagagcgagattcctttctagatgacttaaaaatgcatttactcaaggctcaagaaaagatgaaatcttcagatgacgtgtctcgtcgattggtggaatttaaagagggcaatcctatgtttgttaagttgtgaccttatcgacaaaagtcattggctatttgcaaaaatgagaaacttgctactcgtttctatagtccctttaaggtgctgaagcgcattggtgttgtcgcctatcgtttggatttacctccatcttcagtagttcactcagtatttcatgtgtct

SEQ ID NO: 218274 - DNA, 3205 bp, Cannabis indica
gaatgtttacctattagtaatctgctattacaagtcaaagaaaaatgtaactggttacgataaaaatgtaatcattaaatagtcacccatattatattatatatatttagacaaaaataaaaataaaataaattgttttataatatattgttgtccaaataaataaataaataaattattaattaataataaataaagcaaaatattaatttcatagaaattaacgtgtagaaactagaaccggagagataacaatcaaactcaattaagaccgcgtttggttaaacacatattattacatcacactttctctctctatctctctattactttcttgtctctctcctcttccgcgaactctagcccactttctctcccattttctcatcatccaagcacacccaccgccattcaccttcctcaagaattttgctatatatacatacaactatacatatatatccgtagagagaaaaagggaagagaagaggtgttggattggagggaattaacgaacaaagacctatttgggtctctgaaaagagatggctttaaggcgcctgatcacagaggtaagttcaatattgataaagattcgttttttatttttaggatttcgatgcattgttagggattttgtttttggttgagaagtagtaagatttaatttcgttttatcgatttgtgggaaccctaatttcagttctttggtttgaattcttgggttcttttcttggaaatcgaactgtgtgatttggggctgggtagaaattttatgaaaggtttgggctttgaagatattaggaatggattttgaaattggtattaagaacttcatcttgttatgtttgttatggattttttaaattgaaagaagggttagttcagcttaactatagataattgattcattgttccatgttgctgtttagtgatacaccgtttggcaatgaaaagaaatgggaagtatatctcttgtgttcactttcatgttatgtgcaacaggtttcaaggcatcaaccgcatttggagagatgtaaacttttgttttcaagaagttctatttccactcagaagtttcaacttgggggaggtatgtgtactattattattttgcttttgattaaaggagaaaatttattaatcaaaccagagcaaatgctacaaagatcagcatccacaaaacaacacacaacatacttacatgttacaaacataatcaaaaatctgttggtttctcttagagagattccttctattaacaagtaataatctcgctctatgatcacttctaatcaaattattcacctaaggaatcataaaaaccttttgctcaaaacgcagcggctcaaacagccgcaactactattatcattcataactttttttggtcatttgtttgttttccatttccatgacaaatttattgctttaaagttcatgtgaaatagctttcttttcaagtctttattattgctatcatcagtttcagtttggttcttaacttttaagctgctttaaggttaaatgccaataaatgaagcaatttctttttttatcctttgtgcagtgaacaggcttttaaatcctcaaaagaggtatcaatctacctatgttggtagtttagctcgcagagctcgggatgcagatgaaacaagtgaagtttcccatttaaaagatctataccgtcgtggtgatcctgaagctgtgataaggttatttgaaagtcaaccgtcaatgtactctaatcctgaagcacttttagagtatgtaaaagcattagttaaagttgataggctggatggaagtgaattgctcaaagtgcttcagagaggtgggtagaaagtaaaaacttcccttattttatctgtttaatcttttgttcgtatcaactattgattctatttggtgctcgagtcactgtatggattggcacatgttttgccaacaagcaatatttcctttttcattttcgtgtgtaaagctttgctcgattgacaaaatcaaattatgggcgtcggatgtgagatcaggcttagcttgaccgagttctgtatttatggttattgattccttattcttttcttgagatgtaaattgtatctgcattttgcaggggtttctatgtctgctagggaggaagaaaatgtaggtggccttgctgcttttaagaatgttagaaaatctacaaaagatggtcttcttggaactgcaagtgctcctattcatatggtatctgcagaagggggtaatttcaaagagcagctgtggcgtaccattcgaactattgcacttgcttttcttctcatctctggtgtaggggcactgattgaggataaaggaattagcaaaggtaatttctttatatgcatgaagtaaaaaacttactttgcccatcttgaaattcaagaatattctcatacctggctttccatttgttagggctaggcctgaatgaagaggtacaacctagcatggaatcgaacacaaaatttaatgatgtaaagggagttgatgaggcaaaggcagagctagaagaaattgttcattatcttcgtgatcctaaggtatatatttggtgttgttcttgtcatttcctccatttctttttcttaagaattggcgttttgaaaattttctttattgcagcgctttactcgtttaggtggaaaactaccgaaaggtgttttgcttgttggtccacctggcactggaaaaacaatgttagcaagagctattgctggcgaagcaggggtccctttcttctcttgcagtggaagtgagtttgaagagatgtttgttggtgtcggggcccggagagtgagagatcttttctcagctgcaaagaaacgatcaccttgtataatcttcattgacgagatagatgccataggtggtagccgcaaccccaaggaccaacagtacatgaagatgacgttgaatcagctgcttgttgaactggatggtttcaaacaaaatgaaggaattatagtaattgctgcaactaatttccccgagtcactagacaaggcactagtgaggcctggacggtttgatagacatattgttgttcctaatcccgatgttgaaggacgaaggcagattatggaatcccacatggcaaaggtaatcttgtatttattttagatgaagcttttttggggctacacttgtgtttccacaaatgtttcttattcaagatgct

SEQ ID NO: 218275 - DNA, 7390 bp, Cannabis indica
aataataaataataataaatttatttattccttcttttttttgtatcgttcaacaggtatattttaaaacaattaaaaaaaaaaaaggttggatgaaaagaaaaactatgtactaatttggtgtagattaaaaattcatcactattaatggcataaaatttagtgcatacttatttagtgtataatttggtgtattcttaaagtgaaatactatgaagatttcataataatttggtagaatagtgtactattggagatacttgtgaagattctataacaatttgatagaatagtatactattggaaatgttctaatagtgtaaaatttggtgtaccattagtgtgaaattttcaaagtaaaataatgtaaaaacttcagaccaatttagcaaaataatataactttagagatgctacaacaaattttctccttttatatttaagatacaaagattggtcttccccgtctaccatagttgacactaaagagcctacaagacacattaaaaaagcaacacaaaaatgtatataaaataaaacccttgaaaatgaaatccccaaacatcatcaaaagttagcctacctaattgattagtataaacaaagatgttaatatataatataagcagctataatctatattggcatctgtttgactttgaccacaaacaaaaaacgtgcccttttttacttttaaatatcagtcaacgttgatgactggtggtttttgaaccaaactcctcaaattgaatcattatctaatattactctcttaatcaaaaccagatatgaatacaattctaaaacaacacaaagagtaatctttggcgatatcaacagcaatggacaagtccctcctattgctttctttactattctttcagctatttctctcagcttcttcttcttcctcctctaaatgccccatggatcttagctacgtcaatacatttccatgggacacttctttatgccgaggaaccgttcacaaagattgctgtcagactcttttgagtctcttcggtatgggaatggcacaacaccttagagacacttccaactttcaactttcagatgcaaacacttcatcttcttgcttatcagattttgagtctcgcctctctgatttatcagttagtccatctttagttaatcagtgctttaagaactcgacccagttcgtggtcaaccctttgggctgcgctggaatcaccacagctaaagattggatcgagaaggccggtgaaacgacgccgttggaccaatcttgcaaaagggacctaacgggtttaactagatgtagttcctgtgttgatgccggaatgaaggtgaattcaaagcttacagctttggacccaaatggaaccaagtgtttttacttgactgtgttatatgcagctggaattgtcagtgagttgggtcctaaggatcccagtacagctacttgtattctgggcttgcccttatcaagctcagctactagaaattcatctgaccaaataagcaagaaaagcttatcgaaaatcattggagggtgtttgggagttatcattggtgtcttacttgctggtgtgttaatcatcttgtacagaagatgggatgggaagagaaagaaaaatgcccatcatgaagaatttgtcagcagtttcagggaaactgttttgcctaactcgggagctaaatggtttcgattatcggaacttgaaaaggccacaaatgggttttctcaacggaacatgatcggccaaggttcgtacggtattgtatacaaaggaacagtatcagataccactccagttgctgtaaagcaaattttggatttggaatcgaaaggagacgaagagttttgtaacgaagtagagatcattagcaaaatacgacacagaaatcttctttcacttcgaggttgttgtgtcacaagcgatgatgtaaacggtagaagaaggtacttggtttacgacttcatgcctaatggtagtctaagtgaccatttatcgaacacttgggaatcaacaaacaaagagagcaaactaaattggcctcagcgaaagagtataatcctcgacgtggctaaagggcttgcttatttacattacggaatcaaaccagcaatttatcacagagacataaaggccacaaacattcttttagactcaaatatgaaagcaaaagttgcagatttcgggttagcgaggcagaacaaagaaggccaatctcacctcaccacaagggttgctggcacacatggctacttagccccagaatacgctctctacggtcaattgacagagaaaagcgacgtttacagcttcgggatagtgattcttgaagtcatgagcggaaagaaagctattgacacatcaaacccatcagtgattttgattacagactgggcttggtcgattttaaaatcagggaatgtggaggaagttttcgaggaatcgataaggacgaatggccctaaagggattatggagaggtttgttcgtgttggaattctctgttctcatgttatggtggcccttagacccaccattaatgaagctctgaggatgttggaaggtgatattgatattcctaaactaccagaaaggccattgccactcagtcacgagtcttatagatcttcttttgggtttacttcaataacgtcaactgcttcgagcaccagatcggctatataaaaaagttcggatctagttgacatagctctttaaaatttctgatatgttactaactatttttttgtaactgttcaaagagatagagaaatcgattacatatatataggtcaattctttagtctgctttctataaatcaataaaactagtaatcatcttctaatcttgttacatttttggcgaccatctgattcaatctccaaatagtaacttttcaagtgaacttagtctagatagaaaatgcacattcagtgcctttttgctttggattcaactttggaaagagccatcccagaaagcttgttaatttcgtacagtaatccaactgaaaacaagaagctgcattgaagaaaaaaaaacaaaggttacataattaaaaagtggtaaacatttaaaaatggattgttttacaatagctgtcatgagtcgcgagtggaaagtttgggtgctatatggaagtagggataagaaagaagtatcaaatgtgggagcaaattgtggtaaggtttgagctgttgagaggtctccaggtcccttgaagaatctgagttatcatttcgatttcagcaatagaatcgtaactttggcttattcttttcctgtttcggacctttcggttgtttctctagttttggttcctatcacaaacacttgggaacatatgcacatattaaagtatgaataccaagctataaacattaccatgttgttatacaaactcgatggacagtgccagcagcaataagagcaacaagttcagctataattactgcagaaggaaagaaaataatcatttgcatgagttccacattatacaatataaaatcataaagaatatatccacagaaaaactaattaagaaatgttttttgtccttaaaatctaaaaactgttttctgaacacaaatatattggtgcttgcccttggagttattttgagaaaataattttaaaaaggaagttacaaaaaacaaaaattgagaacaacaaaaggtgatgtattgaagttttattccttttttctttcaaattacattatttaattatttcttataaacttttaaaatatttttctttgttaattttttattgaaacattttttttttcaaacaaacaatctgaaaactgattttagaatcttatttttgaaaacacattttgaaaacaaaaaacaaaaaataacgtcaaaataaactttgtgtatatacatatcggattaaaattttatgtatattcatatacatatcagttacagcaagcaagataggatggacaatcttcacaagttttcatgtgattagtcaaagaaacgccaagtatcaaagattatcatgagcattaaaaaatatattactaatattttaataattaactttactgctcctgttatttctattaaatttaaatataattttgaaatggactgcaagaagaatccatgaagactgaaggcagcctattattcccagaaaaaaacaattacattcaacacacaagcaaaaataattcatgaatgttaaaacggatatccattcgatgtttaaaaatatcacacctggtctattgtttgataagagtatattattatttattaatactaaaagaaaacataaccacttgaggctagctcaagtggccatagggggtacgtgtgtgttggaggtcctgagttcgagtcccaggttatgctgatgtaatatataaacgcttaaatgacaaaaaaaatactaaaagaaaacagaaaaagaaacttatactcaccagcaccccagccggtctttgcaccacaagtttcctgaaaattaccaatgaactgcaaaaacaacaaccatgtaaatgttaaatacctcatcggtccataatactattgcaacaatcaattacattttccagtaaccttgtggcaataaggaaaaataatacccaatcaccataattttaaaaatcagttgaggcgtacacctcaagccacgccctcaaggcgaggtagtgaaaaaacttatctaaggctctgcctcagctgctgtcattgaggcttacgcctcaccagtgtgaggcggacttgcgacacacgcctttgaggcgatgcatactgaggcacatgaggcacacgcctcaacaatgggctttttttgtagggctattttttcgtgggttgatttgggctattttttaaagcttttctaatagctattttcatacttttagatgactctaatggactttagttgggtcttttttaacatatttttattataaaagataggaaaatatagccctacaaaccctaaccctctcatacgaaaactctcatctctctccttctaagctaagtccctcccctccctcctcagtccccatcaaccttgcaaatatatgtcttctatatatgtttagaactttcacgatttttcaattgaattttgaaccttttatgaatttagtttatgaaaataagacttaactaataattgttatgaattttatgactttgttatggtattatgtgttaatgtttttattaagtttttcttcttattgttgaggtgtatgcctcgatgcgcctcgtgggactaagggaaaccgtttttcaaaaccttgccaacaacagaggtcttgaaaagagattagggagacatttatgtccaatttcacatgtaatttcactctccccctagcctgctacctacccaatagtttctttcatcatgggaaatagcaaccatgtttaaatttaagaatgttgcttaactgaaatagcaacaaaaagggaaaaaaaaaactcaaagcaatatgacaccaaattttgtccggccttaaccctgaacatataaatcttagacagctacaaatcatcaaaagaaaaattggaagcaatttcgtttgtttatgatttgtgatcattgaatactacttcaagtataagagcaacaacatgaccactgataatacaattaaaaaaaaaacaatgtagaacataccgtcagcaaagacaggaacagcagagagctagtaaaccccccaagaatggtatataactctgttgatgctaattttcctctatacatttcttgaagcgagagaatgacaataaacagaagaaaagaatagagcattgaattcccaggtgtagccatggacttcttcaaaaatcttttctaaaacaataaaagattcattagaaatggtgccaagaactaccatgtagaaatataaattattgggatggagcttttaataacatgagctattaaaaagaaaaatattaggctaatcttttcattctccaatcaatagaaaacttcaatctccattcaaaagacagcaaaatattcaactatccaaagcgggtaaatattattttggactgttttgcaaaagttacaaagtggaccctctattttgttaaatgaaaaaatggatcttatattttctaaaataacaaaaataagaccttgagcttaattttcgacaactttttcttttaatataactaacttgaatacaatttcttaacacatttagatcggattattattaaattttattttgacaaaaaatcaattccaggtcatatttgtactattttgacaaaacagatagcagggtccaaaatagtattcactcaagcaaaaattatgtacaaataaatgactattcttttaagttaagttgattttggtgagaacttagaaacccataaataaatgaaaagaacataatctcaatacagttttactcacatgtgacatacattttaaactcgaagtaaaaacagcaaccataagaaaatcaacacaaaaatatcatacaatagttccacaaatctcaaagtccaagagtccaataataataataataagaagaagaagaagaataaatagaaaaatcattaaaaatgctccataagaatttcataagaagtttaaaagacaaacttgaatagagcttcaaattgattacaaaccaaaatggaagtaccaaaaatacatttattttcattaaccattatcatcgtcatgaaaaatctctcttctaggtctataatttcacctgtatcgtaaattaatttcactcaacaattatgtacattttgcaataagaaccgctgcaaaattctaagattaagagtctatcatatgatcatcaaaacacaaccaaaatgataacaatctatgaccaaaactaacaagatccagagcagaactcatgagttcaaaaacttcaatcaaagatttcagatttaatagcaatactgtgagatatcattaattaacagagaaagatgagaaaaaatcaaagcaaaaataccgttacccccacgaaatcgaaaatggaaatgtaagaaatctgagagtaagagatacttaaaataataccaaaaaaataagctcatcttaattaccgtggtccgtgtgtgtggtcgaggatcgggtgagggaaagtcagccgatgagaagcgccgtcgacttagagagaggaagagagagagaaggtggaggtgagataggagataggagagatcggaggtaattccactgatgtatgagctcctctcactcagtaaaaagcggcccctttcaccaaatggaagctgaaagagtgagacgtgagaatttattttattttattttatttttggtagaaccaacaaaatacctatgttttttaattttttattcacaaaatttttatttttgaaaaaaa

SEQ ID NO: 218276 - DNA, 4939 bp, Cannabis indica
caaaatatatatataaaatatttgtcacacctcacttaataataataggttaataatcacattatttataagtatagtactcacacatatatagagtgataataatatatattttttttattggcgaaaaattgataataatattactacaatatcacaatttgatttcaaagtcttacaaaaagagtttgactttataaattgatgtttatacataaaaataattaatacaataatttgaagtatttttttaataaatcttgaaattttagttatggcaagtaaaatactagtatgcaattcaatgcgacatttcccctgttagggacattattagaattaacattagaaaaacaagccaaataatcgttggacaaaaaaattaaaataaaatcagatgaaaaaaaatgtaacatcatcacaattaattttaagaatacctatattttgttccatccatcgttcagaagatataacggaaacttttgtagcaggttcattcaatttcgcagcttgagcactctactattgtgtaaaatatgtaactgcactataaataacccctttagtcgctgaacacctgttattaccaaccactaataatgatttgatggcgagtcatcgaagaacaaagaagaaccaacaacgaaacaaaataaaataaaaccatgtcatacagacaagactaaaacacttaaaactatgtcacagagataagactaaaatactcaaaactatgtcacatggacaatactaattgtagcagcaaaaatcgaattatagtagcaaacacaaccctaattaaactgcacctaagcttaaggaagtcggcataactagcctaaaagaaaatacatgctatatagatttaggaacgagaaaatacatttattataaattatgataaatgtatttttttttaatataattaaatccaacttgttaatgatcatattttatttgtacctcctatatgtgtttttcattattataaaaatattgattttttttagctaggaaggcaaaaagagctttatttttcattcatgaaaaattaaatcattacaattttatgatctgtaaattcatgatttccttatatatgatatgaacaaacttccaatctgtattaccaaaaaaactatcaatctattttttttttttatgcagagtaccaacgactagattgtaattgtatagtgtccatcttaaaaggaagatttttcaaaattattttaccttttaaaacttttttttacaatcaaatgtctagaaaagttaattttgattcatgaaccatgtttggtaactaactagtgggcaaaaaaccatgtttggctatcgagaaaaaaaaggaataaaaaaaaagctgtttgttgtttggtaacttttactattggccacgtaaaaaactgctggctgctgctaatcccaaatcatataccattggccgcgtattaggcaatttttatttttaaaattttagtaatattaaattaaatgaattatctaaatatgttaatatatttatttggacaaaaatgctaatataatttttgctacttcattcataggatcatataagtcaaccttccacctaacaccttttactatgactttgacgaaaatgtccttatatcttttgatactaattattctttgttgtaattttcagaaagaaaaaaaaaagattgatttatcatttttcgttatttttttcaccatctatgagattttagtcaatcattcatttcgaatttcgtgatattacatttcccaaagacttatttggaagtatttagttaaacgaaccaattgtgattactaattagtttaagaagaaataaaaatatttttatttactgaaaccaaaaggacaaaatggtcatatatctctttattggacaaaaaaagttatattttttcctaaaataaataattatatcatattttattatttacattctcaaatattataaatatattctctattaattcatacttatattttcttttggtatttttttaaatacatttcaagtgaaaatatatatgtgaaaattaagacaataatacataattttttagaataaaaataaaaaatatattatacaaaatattataatataaaataaaaaaaattttatagagactaatataagaatgtataaaaaaagaataaatttaaaaattaatttaaataaatgtagattttttttttatagcataacaagatttttcttaaataggtttaaggatactccaataattaaaatggtaataaatatgattttattttataaaataggtattttttttgaaatggttcaaagtaggtaataaaaaatatttttttaaattgttcaaaataggaattaaaaaaaataataatatcatagtaaaaaaaagtgtaaaaatcaaatattagaattagagtgcggaggctcggagccgaacctagttggataagaaaatttgaaacttttttttttttttttatttttttttgaaaaatttcactattattaaaactgataatcatttacagcaatagagaaaataggatttgggacttcgcccatccaacagacatcttcatccaactcaagagcatacttggctaagccatgagcagcatggttagcatttctcctaacatgagaaacagtaacccctgagaaaaaggataaaagacaattaacatctacaattaaatcattaaaactagaaagattcgtagatggagagttaatggccatggaaacacgcaatgcatcggtatcaatatgtgtaagcttcaattgtaattgcaatgcccaattgagactatggaaaagtgctttagcctccatttcatccgatctaaatgaaccttgaactggtttggacatggcagcaattacataacccaaatggtcacgaacaatagcaccaacccccatgattttccttgcttgatcgacagcagcatccacattcatcttgaggccattaaagatcggaggtgaccaaggaaaatgttgaacaccttgctgagatgcctctgctgcaggaacaggactggtttgtgaggtgcaattttgatattgctgttgcttccgttctgtagcacgatgatacttgtcaaggtgtgagctagcaaaagatacagtgaccgagcttggctgtgacaaacctccatggaagacgcgatttctatcatgccatattgcccacatagtgcaaataattaattcaaaatcttgtttagagtgcagtgtggacaaatggattaagtaatcaccattgaacatattatgagtgtgagtgtgatcaatggtgaacttagtgtctctccaaactttccttgcttgtgtacaattgaataatgcatgtccaatcgattcccacgcattattgcacaatgagcacttggcagaatctattaccttccgtcgatgcaaaccagtagcagttggcaaagcattctgcatcactctccaagcgaaaattttgaccttagaaggtagatttaaactccaaaaagttttccaccaattagtgtgagaagtggatgcgtgtgagtctcggtttgctgccagattttccgcaagatgaaagcccgaattaactgtgaagcagccggtggttgtggagtgccaaatgagtctgtcgtgagaggggaaaaagctgagagggattgtaacaattttgtctacatcgattgcattaaaaaactggttgagcagagggatattccattcccgttggtctgttataaaattggatactgtcaaagtatcagctccatgataactaactggtttgaaatcagtatatcctggaatccatttgtctcgaccagccaagactgtataaccattaccaattttataacgcaacccttcctcaagtaattctcgtccccaatgtattccttgccaagtgagtgaaggtgagtgaccaagtcgagcttccaaaaaattattattggaaaaatatctatgtttaagaagccgactaagtagggaattaggcatttcaaaaattctccatgcttgctttgctaataaagctttattgaaatgaacaaaagatcggaaacccataccaccttcaaactttgatttacatagcagtttccaacttctccaatgaatctttgacccatctctatttgaaccccaccaaaagttagccatcatggattctaactgattgcaaaacgtagtaggcaaacggaagcaactcatagcatatgttgggattgattgaactaccgccttaagaagaacttctttccctccaactgaaaaaagcttttcattccaagcatgaagtttttgccaaattcgctctttaacatcgctgaacatttcctttttatcacgctctgaaaatgctggaagaccgaggtaacgttcatgacaatcactaataggcatgcccagcatcaagtggaaatagtccatggaagcttgagtagtgttgggtgagaaagacattacggatttcgtcgtgtttaacaattggcctgatgccttatggtagatgtccaataccctttgaatagcctgagctgagctattggtagcctcacaaaagagaagactgtcatctgcaaagaggagatgagaaactgatggagcatgacgtgtcaaacgtagtcctttgagattttgaaccgattcttcatgttgtaatagccgtgataaaccttccgaacaaattaggaaaagatatggtgacaatgggtcaccttgtcgaagacctctagttggcttgacattcccaacttcttccccattaagcatgaaagagaaactagtggaactgagacagttcattatcaaagaaaattgaaacttaaatctgcgtctacggcggccaaaaaaaaaactaaacccttcctctccaaaggcggtgttcatttcataattatctaatttttttttttttt

SEQ ID NO: 218277 - DNA, 3285 bp, Cannabis indica
aaaggcccccagtagcctcaccccactctcctcaaacatccctgctagagaatattctactgtctttccaatttgccaatgctacgccactaccctaaaaacctcactttcccacttctacacatacctctaaacaaatttctttcttgtaacataaggtaaaccttacaggacgcttatcatttctttcattgaggatgcatgtggcaatttctagagaagaaccttggaatgggtagacaattgagatttgcatgtgagaggagatggattgattcagcagcctcagacatgatgaaaaagacaaggcagctacccaagagaaaatataagtaacaagaaaagacaataaagtggccaaacacagcaaagaatcccaaccgacgaaggtgatgagcagaaaacaaggtaacaaaagatccattgatccaaattcgctaaaaaatttagatacatatccatgacatgatgcttatcaaatcttcaactaatgatgctacaaggacagcaagaaaatcccaaaacatacatagggaatcaggaattaaaaagattaatattttacttgattaattgagagatgtaagctacataattagagagattttatgaccatcgcatagctaaatatttctcaatacacgtgcacaatgtgtgtacattagagatagtcacatttatacgatgggaatgtatgcaatagtaaaacattttctatgccatggaactaatgtagtaaagaaaaatttgtataaaaatgtttcaagatgatgaagccttacttggtgattgacagaggaaattccaatctgattgctttcaaatcataaaatatgaggaataacaaagaggaatcatgttctgttcattcagctttcaggttatcgtacagagtatcctgtataattcataaactaaagagtgaatctacgttcttgtaatctaaccagtaagacagcacagaagattagcatgtgatatattgaattttgacagtcagtgtatctagtcaaaaacagaaaagcaaaaaaaacaaaaaaatgcaggagtgccattagatgtggcatgagacaataaaaatatgcataaatatgcttctagcatatattcaatgacaagttaagcaataccagtttctgtttcaaatctgagattgcccgctttctttggtatgcaaaaaacttgagtgactgaaacaggaagagaaacaaggtcattacagaaatcctatatgaggtataattatggtcaagtggtaagaaactgatcttactccaattctctgcatctcgagagatctacggagtgcttttctttttgtcagaagattcccagatatcagtgttaaagggcgttgatagttttttccacggtaaataataatagcatagccttctttaagcttctccaccgaaatcagaatcccaccactttctgcttcaagaaactttgctgtgtacataacctgatgaaacaatctctgcatcgtaattactttagcaacttccctgtgtttccaatgctgatgcagaccttccattacaccatcgaagatcccacgcctacctgaagggaattacaagcaagaagtgatgaactggataaaagaattgctggacattgaagcggaagcatcaccaagagcaataactatgtttctcaacaaaaatgctacttgatgactttgttttgttgggtcaatagggggttgggtaagagtatattgggtggccaggcttgaaccttatacaaaatacaaacacgtggctctgagataattaactacctagtaagagaacttgttcaaaatggataccaggtttatttcatttatcatatagcatcctcaaaaaatctatatacaaaatgtagatcatggaatgcaattaaacaactcatctcaaggagaaacttgatgataccatgaaaacaaacaggtcatatttattgctccatgtaattaagatcacagcaagtgattgggaattgggaggaatgataacactaaatggtagattaatctctagaatgaaaattaactactagtttcttttctgaaggcaaggaaaatctaattgaacccaacaacctttaccttagaactttgacacttgacagtataatcttaacctttaccttaaattgagtatcgtccagagtagtataaaatccagtaaattcagatagtttggctgatataacaaggacactttgacaaagaaaacatcaggatcaattataaacaacaacttctaccttgagagttcagggagttctttccaaacaattcagaaatttatgaaatcaactttagggttgtatagatacagtatgaatggaaaaatagttccagacagtaatttaaaactgccaccaagacagtattcataatgtatatgacccattaacacattactgtcactgaaattaaacatgattcaagctatgaaatcagtaatataaggcagcttttccttaccaagcacaaggacactgtgcatcttcattcctatcatccgaaaacattccctctcctcatcagtaagcatttcctggtcagcatccttctcagaaggtttccatgcagcattcaacttcaataggtccttcgttgatttctctatcttgctactaagctgcaaattgtgttcataattaattcaatctaaaacaattgatttgccattttaaggtgttaggtctggactacttaaaaattgaataacgctgattcagagtggtagggtgaaataaaaccaaactctcatttagattttttatctgaagccattaaaatacatagttttgacaaatcatgcatgatgtagttgaatcaaattcatctgaaagtctattcaaacaaaaacccaattccaaccacttaaaatgagcacaagaagaggcaaatagaaaagattgcaaccataaatcagtaattgaaccgaagaattgaatcagttttgattcaaatttctatttcattcaatagtcgattttaaattcctatttggacaaaatttattgttcacacaagaggtgaaccaacccaaacaatgaatagcatctgtttctattctgataaagaaacatgttatttgttgaccaattgaagcaaaaatgtaatacacatccagagcattgaaacttacaatgaaaagcttgcgttcttgctttctaatttccctctcgattctttctttttcagcttccaatggaagtttgaccattctgttttcctcaaccgagtctctatactctaattgaatatcatggaactctgataga

SEQ ID NO: 218278 - DNA, 5111 bp, Cannabis indica
actcaagaatttcagttgaagtgaaacatgagttaaatatggtattatgatgaaaatcctgtaaaaaagaaaaatacaaaacaattagccttatgagagagtggaaaaagatgttggaagcttctgcgatgcaccctgaaaaaaaggtacaccaatgcaccccttattgtttcggcatctaggaaaattttttagtcaatttttttttttcatggtcgtgtaatttgtagttatttaaggcattttgtaaaattttgagaaattcagaataattttttttacatggtcttgtatgttgtataaaataaatgaggcatgcatgcaatagacggttcgaaccttgtttctagcacattaatttttttttttttttttaatttctcaaaattttgcagaatgttttaaataactataacctacacaaccatgaaaaaaattagactaaaaaattctcctgaatcccagaatagatagggtatgtatcggtgcacttcgtttttgggatacaccatagaattttccaaagatgtttacttaaaattcttaaaattgaagtgttcttactactactaatagctcaacatcagttctttgattccattgagcaatgctgttgaaatcaggggatttcttcatcttctcatctctcatatgtagaagtatgggatccaaatcatcaaagaaggagctcacacacttgactatttcttgtttaaactctttcacctcatgttgataaagaaggcgcattccacacctctgaaccgccaagccatggcaatcgaagctatgcattttagcctcgacataccttacttcattcaaagatttcgtaaatgcagtatgggggatgtacactaaccaaatgaaaccgcgaagaactaaccacttgaaaatatctttcttgtagcgaacaggtttaacccttagacatgtgttctcttcccccaagttgaaatcgcacacaaggtgaaaatccttaaagggaacagaatgaattgtgtcgaagacagtagtaccgggatgttcaataacagaaaatgcagcacataccataacccctctccaattttcatcatcatatagattttgtggtatttgcattctcagcttggactcatgagtctgatgtttaaaccagtctaatatgttctttctagcgaaacaaaagttaaatccgaaataaggatgaaagcaaggtatgtatgaaatttcaccatctgcaatactaagccttattatcacagaaagattcaagtacttatgaagaaaaatctccaactttactatccattcttccattgaattagattccttgattggagtttgagcttctatgtttagaagaatataactaggttctgattctttcgagtttgttgagttgtcgaaaacagattcatcgaaatctacaagtgtttcttcttccattagaccacaattcatcaaggaatagagtatgatttgctcaaattcttgttgatcataaaccaaatggattgcacatttcttgaccaacaagtaagagctttcacttacaaatgaagcttcaatgaatgtgataagctgttctgagaatgatccaattggtatgtaagataaccaaatgaatccacccacatgagataaccacttggtttcttcatttgtggtttggtaagagtgaagagactctagaaaaccttcattagtttccaaatgacaatgaaggaatggagaattgttttgataagactcttcttcttcttcaactgaaaaataagcacacaatgctaatccaatccattgtttctctgtgcttgtggatacttggatttcgattgaaggattattgttttgatgctcaaacaagtttggaatttcaattgttggaaagcatgaattgtacttcaacatttggtcaaagctctgcaaaatatatatacatattttgtaatgaaatattactcataaacacaaaatagagatagagagtgtatgaaaagacctgataatattttgtaatgaaatattgactgctgctcatagttgaaatattatccatttcttctacttgttgatgctccctacaaaactccacatcaaaattcactttagaataagatttatttatgagggttcgtttattatgctgtattagatcatattgttgaattgtattgggttatatattataattttatattactatgttaaattttaatttctactaaaatattatatatttaggtgtctataaaagttaataccatatataattttacataaatatgttgcataaaatacaatatcactatacaatatacaatacagtataatacgacgaatccataataagttttttaagttggggcattgttatttttgcctctattagtagacgtgtattgatcatttgcggtacacagacaaactctattcaagatgtaagcgttccatttattttttaaaaatttaatttcaatatcgtaaatttttcatgatttctcgaaaattataactttttgagttataatttctcttcgtatacaaaaacaaagtctgttcttactaatagtgacaaaagtaaaacatctacttaacaatatatttatatgaattagtcgagaaagtagttaaaagttattaggtttgtagtactgaagttctcaagttattttttagcgacgaaagtacttaaatattaagtttgtagcacttaagtacttaagttgtttttttttctcttttctctacaacgaaacttcatgccatataagtagacctaaggattaaaaatataacttaagtatttaagtgctacaaatatattaattttatcgctaaataataacttaggtacttacaaacttaataacttgggtattttagcagtaaatatttctattttctaatatatttatatgaattagtgaagaaagaaaagacaatattgactaaaactaaccttggtaaaactgaataatagtaacccaaatcaaaagccttttcttcttcatgaaaaaccttcttctccatgtcttcaaatatttgacaataaatctcatgatgtacacgtggactctgcatggtgcagtcaataattgtttggacaaaattttccacatcattctcgtacactttacgaatcccacaaatttcaatctcaaattgattatctgagatggcaaacaaagcactaacatacccaccacaaccaccaccattcttactcaacatttctatgaaatggacacgtggcacattgagtacaacaagaccatgttgttgttgttgttgtactaaataatcttgtttgatgagaaattgagtcttgtgttgcatcccacttggctccatacgtaaatgaacaacaagtgaagaagaagatgatgattttgtgaccaaattattatcaatgtttttagtacgaaacataacatagagaccgaatcctaaccatttcttgttctccaataagtttggagaaagacaacaaaagatttggcgtccaacacattgatacgcgaaccaaggcaaaatagcttctagagggaaaatgcatccgaaatcgaacttagctgcattgtttttctgtattaatgttgcatcatcacaaaaagaaaaagaagtaagttttcaattaaaattacattatctattatgtataatgtatcatgctattataaagtaatcgattactataagttttcgggattcaatttaatgtgacttttgtttggcaaacttctggccttccttttattgctaaaatgaaaatagaatttcttttcgaagtgttaaagaataataaaaattagtctaatttagagctagaaatccaaaaataaaatagggttgatcctgaattttagtggtatgccccagtattttcaaaatcagtaaaaacaatatgtgtatatttcaaaggtgaattttttggacccttgactaggtgggccttaagtacagacttagcctacctattacctaaacactctccatagtaatttttcattctataatgtacaattagcttagctaaacaagaggttattccctcattgagagaatacttgttcaatatccaactatggatttaaattagtgtttttgctcttaacattatgatctttcttatttgatttgacaaaaatctatggaaacatatcttaagttttctcattcatgtactcatataacaagatttggctatggatttatgtattaaaataccattgtttatgcatgttgcttgtattaaaaatcaaaaatacaaagacaaaaaaattatgcatatagtactaatttatttacctgaaaaagtctcgaaagcaatgaatgaagtttcattctcagctctgcattgtgaggcatacttttgcattcttgttcactacataaccctactgaatcatgtactcgaagcaggaattgattcgatgaagtagccagttgttgttccgcttcacgatgacttgatgactcattcaaattagttctttcttcacccgaaacttgcttaacaacagattcaatcttgtcaatcatagttcgttccctcgtcatagattcaatctcaccaacagacggatttttagtaacatcatcaaccaattcttgacaatgagtaacataactttgtacatcattaggcataggatacaagtctctcacaaactctttcacatttttctcataaattaattgtgccccacacattttcacactcacacaattagtagtactattaatcaattttatagaagctacaacatgacttgctttatccaaaagcccttcaaaagattctcttggtatatatttacaaacacaactattgttgtgttctttcacattgaaaataccaagaggaatttcaatgaaatcttcctctgttgtaaaatgacaactataccttgttgaattgttagtattattttcttgtttttcttgttcttggaaaacaatacatagggcaagtcccatccatgtactcatgatatgattattcaaatctggtggtagttgaattgtaacaaaagattcactacttgagtaactgcaccaataaggaattgtagcttggaaagaacatttccaaatgcttctcctctataaatatcatccta

SEQ ID NO: 218279 - DNA, 1755 bp, Cannabis indica
ttgagggggggatatcaagtttactggtttactgttattttgttatttacctgatactatgatctgttattccagttagcatattagttagtatctaccgtgtatttaggtgattagttcaattagttatgttggtttcttttagtgattttactctgttctcttcttatctccttgtatatatatacctcttgtaattaccatttctttaatcaatgaatttagttttctctctttctctttcaatctctctttcactttgtttctatcgcaacattacgtacaagggattttgaatttagaataaactattcaacatagaaaaattggagtatatattataagaaaaatttaaactatatagtttggtagttcaattggggttgaagttagtttagaattataggtagttagggttggtaaataaaagtagattttagtagtatgtaagcttagttacatagagttgaattatacgtggatacataataggcttgtctggagtctcttattttcaggacactattgagttttgagctacaactatattggatacatcctctttataatctggtttttaatcatttttttccatctctatctggaacatttctattttcattgctgaattgtgaagagtttgttaggagagataatgctaaattattaaatgatgttgtggctttattagtaatgatctaaattaaggctattgaaatatatatatttactaaaattataattatgttgcttattagtggttactacttaacacagtcgaactgcatatagtactaatggttttgcaattcattattgcaatgacttgaatgtaagatttcacttctttagttaaagctatttgtttcatgtttttctcttaatgttttttatccttttgattttgcaccacttcagttaaagtcaataaaaatgtgggtaaattttgttttattattacattttcttttctttcattgtgtttttgcttcacttgtgaatttttgtgtgtcattgcatatggaaatttgttctttgattttgctagtttaatctcaattacttatgcttgttgttggagtttttgttttttctgatcgacttattattttcttagtaaacctgacaacgagtgagaattatgacataagagatacatatatagttaatgagtgagaatgctagcatgaggggctaagttaaacagtatgatcaaaccttttattttgagctactaggccatgcaccgtgccactgataattgttattttttgcattgaaacaaattgcaggcaaaggatacacaaaatccattatcttataggtgacttctatgagtagtagtaattcccttcgatcttactgacaagcttaatggtcgaaaaaagaattagaacaggcagtggacatggagttctatctccaaattaattggcaatggaaggagtagtccattcattttatatatcacaatttatttctacacattagcaatgtgggacttactcttaatactaagtgtactgctgcattaattgaaaaagagaatttccttattaatttctctacaccaaataattagaaattctgagaaaataacttatttatttattttagttttatttcctctttgttaggtattctccacttttaaacttgaatatttttttttttttgctatatgtaattgggatggagttactattgttctggtttctaacagggtgcttttgtcataaaaatttagctatatta

SEQ ID NO: 218280 - DNA, 3220 bp, Cannabis indica
taataattgacttattaaagttactattttgtctaacatgcatgcaaataggtccgcccaagaaacgggacagacaaaggctcatacacttggttaattacaagtgaccaagagaccataagtctgcttaatcacttgggggcacctacacccgcacaacatatgacaagcatagaaaaaaaatacttaatcaaaataaaagttcaaagcaaagttaatgcaagaaattgaaagctaagtatgtgcaaataaggctttgttaaacataaaaggtaatcaatccaggattaaaggatgtcggccatctatatgtcttgacaaaaataaagtcaggattaaaagccacctggctagctatatgtctcaaatattgtgatctttttggtcgtttaaaaaataaagggatagaaaaaaaataataataagagctttaaagctctgacacatcaaaaagagtttgcatgttcatgttgtcactgacctagtcctaggcgacaggatcaaaaggtacctcgatagggggtccactagagtaatgggctgattagccgcattgataacttggccaatagcattagtaggctggctggtggtatcttaggtggaggtattctccccaagtggtttggatgcctccatttcctgaccttgggctatcatcccttcaagcaagccaggcttcatatagtagtaatcacccacagggttctgtttccagaactcatagaaagttttgatggctaagttgtcatactcttcctttttcgcagtccgggtcctctctaattttgccagctttgcctcagactcctctttgagtctggtgatctcctcatatcgagcacctaacattcgacccgaggcctccccctcgcctgtcaagtttctcactcgcctctcaccatcctccaagtcctcctccaacattgtagtagagagcatgtcttcaattttccttttaagctcttttatctcattgttggtagtgaacgactatttgttcaccttgccaagctgggcttccagctcgtcaattttcttcttggtgacaataccagtcctcttgaggccaacataagtatgcctaaacttcaaagtcacctgaaacggtgaagaagtgaaagttagatagtgtactgcaatatacaaaaatgctcctggcagaaaaatatcaattaccaaggaaagctcctttagaatactagaggccaggattttaacggactcattgtttgactcttacagttgtttgttcgcctggaccaggcacctgtccaaatagttatggataacatcctttgccttttcagcttgggccggagtagcttcccaattgatttttttgatgctctttgctagacctcctgggagcaggaggatgtccatccaagctgaccaccatgggttggttggccggaggagcatagggaggtggaggaggaagacctgaggtagtagaactcgacccctcctttcaggcaactttggaaggggacttccacaggggcacctgtatgttttctttgatggactgccccaacttggaagcccacatgacagtcagcacctgtacaggtattaaaagtccccatttgtatggatacctttatagggacttggaggcaaatattatcccaaagtttgtacagctaacatggtccttccacgtggcatgatctagccatcttgttgacctggcagaaaactctcttggtagaaatatgcatggcagttctatataaggagtgagagccataagatgcagatgtcccatgaaacatatgattggatcatctacttgcggccagataagatgggggcaacaccctacaaggtgattctacaagccaatctcataaaggagacaagtgtcgagagatttgaccggatggccaacatgccgaccagatctagcactgtcagggataccggacaaagatacgcgatcctttatttcatcctcaacaagcttcctcgaatatcaacaactgaatcctacaaactcaaaatccaacaaatctatccgagaataaagggcatttaatagattataactacaatcctaaaaaatagggatattttatcatatgtttaccccttttacggagccataagtaacaactctcccctataaatagtgacgacattcacaaggggaggggcctaaaagataagagctatactcgtacttatgcatctaagagcactttgttgaaagatatttgtaaatactttgagagttgaaactagaaatcattttgtcttctttagtaatctacccggtattaacgcgcaagtaatacaactaaaggggagatcattatccatatacaaggggaccaaacctctataaattatgtgtgttctttgtttatttatttattattttaacctctttattagtgattaaccatcatttattagacttcgagtcagttggctattttttcagtcaataatgaattttactgaggaatgacatatttgagagaaaaaaaaaaagaagagaatttagggattatttgttaattaagagaccttaaagggtctaattaataaatatatttaaatgataattttgtttaaaaaataattattattattaaatatataaagttagcatttaaataattagagtagataaataaaaaatttaagatagaaaagattgtttcgtttaagaaaataaaataatgacaaaaatcaaattcatgggcccttaaagagatctcggtcatgggctttattttagtgtcattatatcttttttaatcagcccatttattttaaaacctaaccctagtatctccttacaaataaaatataatggccttcgattctacaacttatgactctctcttgtctgacaaacttaatcaaaagaaagacaattcttattctatttatttttcgaaaattctcttggttttctgcataaaaatttgtgttccttagtgttgagagattgtccatacaatttaaggcaatactcagaatagtaaggaagactacatagtctatttgtggtcagaaggagaatgaaagtttagatattgattatactgcactacagacataaatcaaggcatagagatctgaagaaaaaaagtcttaatattctgctagaactaatgtaaagatctttatatccctttatgtgttcacattattgctttagaaattttgtattttggatattagattagggataattaacata

SEQ ID NO: 218281 - DNA, 3547 bp, Cannabis indica
gtaacgaaaaaatagtagttttaaaattagtaagaactactaaaaaaacaaataaaatagtatattttaaaaaggtacatatgatttgtcattttcatttaaaaataatacacaaaataataaataaataaaaaaaaaaaaaaaaagaaaatagaataatccaaaaaaaattacttacaatactttctaaaaaaaaaaaaataaaataaataaatcttctccattattggtcttaaaaaatggaaagcattacttctttctttcttcttttagcatatgaatatcaaattatcaatcaatatgaacaaaacaataatgtataaatgataaatacatatatgtaagtacgtggctatatatttttatgtcaatacataattgaataagagatgagaaagactgaacatttatttatatctatacatcattaattctcttaaataagagcattgacaattgtattttaagaatctgaaaaagaacttgtaaaaagagtaaacttaagctcatctttaaaagtctatttgcacccttattttaattttattttggaattattaattatattataattttcttttctcaacctctcttcgtgtttttattatatttacaacatcatttcaataaatttttaatttttttttttaaattaattcactgtgttcaaaataagtttcaagttttttgaatacgtatggtaaattagaatattagaaattctgttgatactataaattattcagaattttttgaaaatttataaatttaatattataattaaaatgagatcgcagtgaacaaaaataaaaaaaaaatattctaacatgtttcttaaatacaaaaattaaagaagagtttgatggtagtatttttcttttatttttgtgatacgttgtaatcatgataaggagaaatataaatcaaagtttgtagtctttgcacttgatttattttatttggaaaataattttcctcactaaagaatctattggaaatgtgtcattctctattttatttttttggttggtgtaaatccaaaatgtggacattttatttggtccaacaaattaattctttttaaaatgatatattataaaatattttcaaaatttaattcaattaaagtcataattatctaagtaaaaagaaaatgtagaaatttgaaaaaggtgaatgcacttgttgcatacttatttttacgtgaaaagtctcaatcacaaaataccataagtaataataagtactctaaaaaagatgaaagcgaaaatttatttaaaattagcattcgctattaaaagattatgggtacaactaaaattattgaccatcaaatcacattactactcgccgataaggcaaatttggccaacaaatgaacaacaacattataagatctcacataatagataaaactatcaatttgaaacctactacaattactaataatgtcatccaacagaagcccccaaataagtaataatagatagattatattgtttttaatttttcaaataattagattcaacgataatgttgtcatatctaaaaaagaaggcattaaaccaaagcattgtgaatagccaaacttccgccacttcaagttcaaaacgactctccaccctataacttgtcgaggcacgagcaacactcaactcgaatcactatactcaagccactacaattgcctaccaagttaatagcagtattaatctttagacaacctagcaaagaaaatatccatttatgcaccaacagaattgagtgaggctcaacgaaggcctagaagaaagacaagccaccgtcagccttgaagagatggaacttccgttattgtttcttgttgtgaaaagctctaaggtaatcacaggtccaatgaacactaagaactgggcacaaatcaaaattttatcatagtttatgtttgatgcatgaatagaaaataacaccataccaagatgagtggagtagcccgctaactctttgataggtgtggattgaaagcccgctagggatatgactctcatgccatgttgagaattatgggattttatttcaaaaccaattggtgatgagtgcaatagcacatgttcttatatatggctcaatacttttacatctaattcatgtgggacaatattgtccaatacccatttaggataatagtgtttccattaattgatttatatatatggtatggacatggtcatatacatacttgatgcttcatacccgcaataagtttgaaattagtcttatacacctttagcatctttcttgccaaatatatcaaccaccttgttgagacagagttgaaattcttttcacatgtttttttgaatatccactccaagaattcttttacaattcgtaaaattttcatgtcaaatttagatttttattgggtacttctttatcttcttcaaacccttaaaacctatgagcatgtaatccacgcaagtgagtagataaatagtattttaggttagcaaactatgatgggatctttcttcatatatcatttaaattatggcatatgtagttatgtactactataataacaatattacattaatatatttacattatgtatcacaaaaataatgtaagataaaaaaattatttaggaaaaaaaattatttaagattttttcaaaagtataaataaaaaagtgatatttgttgttgtgtaaaatttgtcttattctatatttgtcctaagctatattttgtattaaatttgatacaatttttggtatgtgttaaatttagaccatgtaacacaataacaaacactagcaactaagtgaacgctcgcccttctcacgctcactaaccctagactagtgttctaaatacaagttggatttcttgacatgatacgaaactgacacaagcccgaaaggtatgagcacgactaagcacgaaaaaaattacaggtttggacacaacacgatacgaacaatatattcttaagcacgacacgacacgagaagcacgaaatgcacgacacgtaagcatgaatagactagcccaaaaaataacgacacacgacaagcctgaaaaaacgacacgacatattataaaactttataatttattatcattaataataagatattaatttattaaattataaataagttaaaataataaaacttaaatataatactaaatattataactttataattaaaattaaaaaatataaaaaattaaaattataaattaatttatttatagggtgtgatataaaaatttgagtatttataatcaaatatttaaattcaattttttttttatacatgattataaaatttataatcatatttgagtatttataaatatttataatatttaaatttaaattttaataattttttgatatgattatttgtaaattattactaaaaaattatataaatataattaaaattttaaaatatacaaataatttactaattgtaatatatatatgaaaaaataaaaatatgaatttaagtaagatatgataataaatttacatgtttaagaaatacggaccgaca

SEQ ID NO: 218282 - DNA, 4018 bp, Cannabis indica
tcggggacatccgataaaattgggatgttacaaacaatggaggcttgaagcggggacgttacaatatgacacgtctcataattaacaattaaaagtgttaggctatttttagctaaagtttcaggtcactttttatagttgtttttcttttttgatattatttttggaatagaattacacttgtcttctttagttccaaaattttgacgcttggaatagataaattggtcaaatttcagaaaacaatgatctataaaatagagaaaattttgtaagaaaataaagctggaacttcaagcttaaattcgaccatgttctgatcagattttagaaaaaagtcaaaacataaaagttttagatctctttttcaaatttctaacgcatcttgaattaactcatttggagtttgtatgtgaaagttatatatattcctgagagaggtcgaagcaagaacattttggccgcgactaatatttgtggctgcgaggagcacaacttatggtgatgcacgagatggccacaaaaatgccttgaattcaactttctatagcccttgcagcaaggctattggtggtcgtggcgctgactctgtacgggtcaaggagaacttcatcttttctcgtttttgggctgaaaactcttttttaaggaaagagggtcgtggattatagggagatagacattatagaaccctaaaaatagaaaaataagaagcttggagcgaacttggacaatctgtgacaatcctccatctagtttccttctcttctcttgattttttatgttttatatgtgtctagtttaattatagatttaattatgaactaaactccctatttagggatgcgatgggtattgtttggaattattttatgagttaatattagttcattgttatttcttccttgattgcttgatttattcatctttgtgtttattgcatctttaaacttaatcaccttatacatgatttatgatcctaatgtgaaatctgaaaagtgaatgttaagaatactctaaatgaataaacataggttttgatgtgaaaggaatatatttgcatagcttatgtgacttttagattattgcttaacgtgaattgtatgttgatctatctcagagattcagtagtgggcatgcaatttaggaccatgatctgaaaagaaattaggttaatttatctgtcatcataaaggaggaaggttaattagtgttaataatgggtaatcaaagcaattgaaatcatatgtctaatttcacatctattgttaaaccttttatttgtttattttatttaatttgcttagtttatttagttttaaattttatttattcaattgccgaatagaaacaaaaattcaactgattggcacttcactacagtccacgtgaaaacaatctcacttacctgaatattattgttaatgatatgtatacttgtgtctaagatccacaaaaatcttatctctcttttattctcaatcaaatataatcttagtgtaaattcttaaaacttggcatagtcaatttatgaattttaattgatttttttccaaatgaaatacttgagttcctcaagatgatgttatcgtaagcattgtggggaccatgggcctatataatcaagttctgaaaaatttgatcttaaatttaccaccataaattttttaacttattaattcctcatgactccactatagactaggaatttaccactagtctgggttcgggtccgagttcgggttcaggtccaagtctaggtccgggtcgaggtctggggtctagggtctagggatgggtccgattttggggatggggtcagggtccggcgctcggggcccgagttccgagactaaaatccaagtccaggtatgtgagcaaaaaagtaaaaaataatgttaaacaaaaaaaatagaaaataaaaaacaacgttttgatgttttctactttctagttttttaaaactcaattttcaaaaaactatttttaaacaatttagccaaacacctcctattagtttttgaaagttgtcttctgtttttaaaaaactgaagtgttaagttatgaagccaacaacctcttagaacatgtttggcattgttttccagttttttgttttcaaaataaaaacaaaaaattatttttcaagttttcgaaacacaagtcgtctttggttaatattttttaaaatataatttttttattttattttattttttgaaaaataattcaatactttgagatccgttatgaacaagaccagacctagattcagaccctacccccggacctagccttagactcggaccccgaccctggtctagactcgcacctcggccctagactcaatcccggtccaagccccaaacctcgaccctggattcgaccccgatcccgaccctagacttgaaccccaacttgaaccccggccccgatcttgacccctaagcctgacccaaatctcggaccccagacccgaggccgagactaaggctaagctgaaaccgaagccaggtcgggcctggggccgggaccaggtccgagatctaggtctggggtcgagactaagtttaggtccaagtctgagtccaggatcccggtcggggtccagggctcgggtccagagttgggatttgagttcaagatctgagaccaccagggtcctcgggtagcgattcaagttcggggtggggttcggggtcgggttcggggttcggggtctagggccaagttcgggattcggggtccgggtttaggtctagggtcggggacggaggcggggccaggtttggggttagggtccgatctgggtccaggtttgagtctggggtccaagtccgactccgggattgaaaccggtatggggtccgggtctagggatgggaccaagtctgactctggggtctggggctaaggctggggtccaagtctgggttccgggcctaaggtttggggtcggggttggggcccgggtctgaggtcagggtttgggtctgggattgggaccagtatgaaaaaattatgagtatgatgatgtgagataaagtagaaaaaatattgactaaaaatagattattttttgtaactttattttctgaaaattgttttcaaaacaatactaaatgcacgcctaattgttttcaaaaaatagttttttttaattataatatcaaatatgtacttaatttcttgttgttttcttgtaataaaaaatcattctaaatgtgtttggataaaagataaataaataaaatctgttaaatctaaaagtcttttgggagaatcagctaagattttgagcttctcacgattggaatttagagaacctagtttctcaaccacatttcacattattaataataatgtttgaaaatattactataattgaccattaacaagtaataatcttgtttgaaaatattactatgattgattagaataatagaagagtttttatatgcatgttaatttggatcacgtaattatctttctaacggtatatagttcattaaaattgaacttatagatcgaaagttagaactaaaatagtgtgacaaaattattcaaaaataatttaattaaaaattatctaaaatattttgttaaatgcttacaagaatttgttgaagttaaaaagaaacaatttgttaaataaatattttttaaaaaaataaataaacataattaaaaatatactctactttttctttaataaaaagttgcacacttcattaatttataagtcgtccatcatatcaaacatcactaataatagaattaacattgaagcaaaagttacttgtcaaatagtgatgagcaatcttatttgaagaacacataataaaaattaaataaaatattgctagaatacaaagacttataattctgaataactaaaccaaatgatgaaatcaaagaagttgaagtaagaacgcaaacacaactaagagaaaattcaacctcgtcgcttgatccaactaagtacctcatttactcttattgtctctgctcgccacct

SEQ ID NO: 218283 - DNA, 7102 bp, Cannabis indica
aggaaagtagcttgatcttttaaaatgataaaaaactagtatgaaaacttcaggatttgcaaacagattatcgcaggattgggaatattagtgttttgaaattcacgagcttatagaatgggaaaactcttacatgttatatgaaaattgatttatgcacgcataatatggtaaaggaaccgaagcttgttagtcattccttattgttgttgttgttgtcattatcagttagtgtactgtgatttatattggacatgagattctgctggatgctaagacaacatgccatttcatgcagtattggcacgcttagtggatttatctcaattgaagagttgggtggatgctatatgagtatcgagtaaccaatttctgagcatggataaagtttcttctgactgtccatacccgggatgcttcttttgtgtcatgaaggaagggaatccgagcaaacgtagagcaagcatcttgaaattttttagggacctcccggcgcaggatgatgatggtcaggttctccctatcagtggcctttggaatactgccatggcacatccaaatgatcccgagttcattgagttggggatatttgaatgcatggctgcacttatatggaaaggtctaaagaatcgtcgctggctttcacatgaccagaatatatacattccttactatgcagcacatatcattggatcctataccatgaacatggaagaattcgctgaaaactccgtgcacgcaggggttattcctcccttggttgaacttttgaggggaaggttaacttgggttgagcagagagtagctgttcgagctttaggacacttggcaacttatggcagcaccttttctgctgtagctagtcatggtgaaattcttgaactttctattcaactagcaacgagttcactggaaatagtatactcacatttctaccaatatgttgatagaaggttaagctatcactgtgatttgctcacacgcggcatgggtggggtcgaaatggaatccaggaaggcagaggagtgggcaagccagttgcagtgctggtccctgcagctcatcaactgttttgctttcaaaccagagtttcttcctaccatttgcaagcctgaattcttgataaagctacctggcatgtggggtggacttgttaatgagaattcaccagctggtataggtttactaagaacaatttgtcatcataagctggggagaggacctgttgccagctgtccgggtatgattgaagcgttatgtaacattgctcggtcgtcagatgattggcaatacatggctattgattgtcttctttggttgcttcaagatccaaatacatgtcataaggtgagtgtcatgtgctaaatgagccgtttacatcatctcttagctgtatagcccttcatttttgttatgtttttatattgttttcttagttttagtagtaagttaacatattttttatgcctgtagaagtttgctgttattcacaatgtatcttactgtcactgtaattgtgccctcttttgatgttgaaaagacataacatttttgtttgttctgttcccgaaacaacagggaaggaacatagtagtaaaataattatttaggaaacccatataatattgccagtgcaagattaaaggttgtgaggcaaattatttatgtgtattgtgcctcactaaacatgacatgagtaatgctttcttaagcttatttttttgttgaagcaggtgactgttttcttagatatatttatttacataattagataatgctttaatttctctcctatgtgtttaacgaggagcggaaggaaagttttgagcttgctagtttcattcagatccatctattgtgtgagatagtgtagtctataaaccttctcatgatgctttaaaatgggaaagctctattctcattgtatgaaaacatgtcactaaagaattttttcaatgttattgtttgaaatgggagtgtcatcttatttaggctaatttttagcaaatatttggcatgcggcatactgtggccaagtacttgtaatatgctcttaccaaattttcacatcatacttagctaataacagatctgactgctggattgtttttactacaaactctgctataccatcctgatgctagtacatttattgtataggtgattgataaggcagtaccgacacttgtagaccttgctgaaatcacaacactaggtgatcacaagaaacttggagactccattgttaatgttcttcaggaatgtattcagtcatcagggacaggtcgtaactctctaagcagtcgcactaaagaaattattgaagaactattaagttccagacagagattgaagtgggaaaagactatgcccaaagaggatctccatattaaacaagcggctgcactagtagtcaagcttgaaggaaattctatgttctcctcgggaaacatagctggagctgcatcaaagtattcggaagcactgtcattgtgtcctgtgagatccaaaaaggagagagttgttctttacagtaaccgtgctcagtgttatctactgttacaacaaccggttgctgccataagtgatgctacacgtgcactatgtcttcacaaccctcttaaccgtcatgccaaaagcctttggagaagagctcaggcgtatgacatgcttggtttagcaaaagagagcttgttagacgccattctgtttataaatgagtgttctcaatcaaatgatcctgatctgtcactgaggcaaaataaggttcctgactatgctgaaagattagtcaaaaagcaaatgcgtgctgcatggctgtttagagaggcagccatcaaacatggcggtgtgcactgtgagggtgatgctggtgagatttatgggcaagaaactgatgattctgaatgggagacagccagtgaaagtgatataggcaatgatggaagggatgaaatgggtgacgacgatgatgacgatgatagtgaatggaagaatgagggtgagaggaaagataaatatgacaaaccatctgtgaaaggtactgtttaataattcagctcattatatctctatattttatgggacacctgaataaattcttaaatagtgaaattatctaattgggtactgctcatcttattcttatcaaccatatatcggctgatcaaaatctatttccataatagcattgactacagccatgttaatattgtcgtcgaagataatagtacttgtctcttttttaaatcaaacgaaaaagtctaaatacctgttgtattgtgtttaattttatagtcatagatgtctaaagactatgctaaaatactttatttgtacagacctaaagcatggatacaatgtgcagctcgttgaagatgaacagtagaactcaaagcttatattgaagcatgttggcaacaacagaaagggaaagatgagcaaggaaagcgttcatcaacaagtaccctttctgaggttcaattgtcaaatatcctcccctttgtcatatattgaagaaaatgaaagatatttgtgtcaaattcaaacttaacttttattgtgaattccttttgaaacattattccaattttttttcatgtttagaaagcccaagtgtagaaaaagtagaaaaacaaaaaattaaaaattttgagtgcaggtagtacttttttttttttttttttttttacttagtttttgagtgtggtacgaagcttgattgtgtatatggaaaacgtctagggaattatttggatttaaatctataattttgtcaatagttgaatgagatattttgagtttcttatacactgccgcaatttatgcaattaaacattcagctaggaatttttctggggtaggttgccgaattaaataaatagaaaaatattgaataagccaacttgcttactcacatgtgttttttttttagatgaagcttacatgtgttttctcctcattggaatcaaccctatttaaatgttgttgtgctgtgttaatgtactatattcatcataattcttaatttattagtttaggaatgcacaagaccatctcttataaattgagtataatattgttgactattttttgtagtagtattaggtgtaaaccagtacctacagattgtggtctaataaattgagcagtgtggcctaacaagtatggtaaatttaacacattttgcattactattaaaagtattattttgttaaaagtagcttaagaaaataataatataccatttttatatataggattctattaatggtgatactctatcgtagacgtagttggagtggcttatttatagatttatatacaaattcatctattactttatctttttccaacccatcatttcattttatatctacatttgtctttttaagtgactacacacgaattgaagtgttatctatacatactagtactacataaaatcactgcttgaatagtcgctctctttcaagttccctacatacactactccttgtcggtggtcaacatgaattaccaattcttgacttgcacttttctcttttcatttttctaagaatcctcttgtataaaatgacctgtttatttctatatatacatacaaaatcatacactagttgcgtttgcatttgatattttttaattcctactacaccacacgtgtttgaagtggagtcttatactagaccacattggtttttttattccataacatcaataatgagtggacctcgcagtttcctaccactatctttgttttattattattattattatttaaaaaaaaataccattatcttggttttacacctatttaaggttttttcttttattttctgagcactgtttttatttagtctttcttttactaagaaataataataataataattaaattaacgagagtttccatttaattatctatttaaatttggcaatttacaccgcgcgcgcctctgtttatttatgaccaatattcatttggataatttttttctttgcaatgttcatttggataaatgttaattatttgtttctttaatcttttttctttccttctgctgtcggtggtttataagtggaagccatgaaaatcattgtaattggctagacaggaacaaaaatattcactaacacaaaataacagaaatcaaagtgaactaaaaaacacgttagttaattatttacactaaaatggaaaatgaaataaaagaattgaagttgagtgtcggcaatcaccggaatgcatttattatacaaaacaacctaaagcaatattcgaaattctctttttgtactgtaactcatgaatttatttaaaactgggaaaaaaaattaataatatattaaaacctaattaattaagctaatttgaactgtacgtggttggcaagcgccgccaaagccacgtcgacggcgtcttcaaacccggttccagtggcgttcgggtgtgtatacgtcaacctcgggatcaaccctataactttctctctcatccgctccactctctctccaggaatcttggcaagctcttcctcgattctccggctgtcctcgctcttctcatcgaagaagacagagtactcacttgtatcctctggaaaaaaccaccggtattggctatatgccgtgtgctgtgagaagaacacgggaatacaaccggcgaggaccgagtcaaacgttgaccgccgcgtgaatgagtccccgggcgcctggagacagaaaacggaccggctcatgaggccaattacatgggccgggtcgtgacacttagacccgcatttcaagagctcgcaccgggtcgacccagcgcattgagtgatcaactcgtctcttatggccgccttctccagacccttcctgggcccaccgatgaacgagaaaaggtggggccgcttcgaattcctaaccttttcctgccacgtaagcacctcttgccacgtggacgggtggaagtatgaagggtaaggaataccgtgctggtttgacccttgccagggctgcctctccactgtcagcaccgtcatgtttttaacggcggggaggttgaggagacagttggcaccgaagtcgtttccctttgtattcctcatgaaatcccatgcggtgcggcctagagcaaggaagtggtccttaccgtggttccgtttccaccacggcttctcttggagaaagtcaaccaattggacggacagcgcgtcccgctccgtcagattggtttcgcggaatttgctcgacgcgtcgagaccgccgtagaaaggaacgtagaagattgttgcccgctccggatcccacgtccggcacgcgtgattctccacgcgcgcgtggaagatcatctcggcgatgaactggtgggtggcgtaccagctgggcctagttgaggaggacggcgccgaagacgagcccagtggtgtgatgggccggcccagaccgcgattcgcgacgtgggggcacatgtcggtgtagacattgagttttcggcagcgttggagaagggcgatgttgaattctggtggcaaatcgtacacgtagatggacagattgccgttttggcatgtctggacccatggtagttcagcttgttttcgtaagaatctgttgtcgtttttggttagtatttcaactgggtgtaagattttgttgtcgtttttggtgagtgggaatcgaaaggagaggagaagaaaccatgccaagagaaagaggataacgaaaacagtgtatttgaggcggggattgttgttgagagtattagtaatgaagaaagttactgatggtgattgatctttgctgattttgctgttgtcgtaacagttcttcttcttctccgccgtccatgaagctggagggctttgctttctgaaaaacattaaaacgaagggtcgtatgacgtgtaggaggagcaatcaaaacaagaaaagtggtctttaatggcggtattagtgatagacagacaagggtgtgaacttttgtgatattgaagaagagctattaaagcagtcagcagtttttggtgagaaattcaggaaaatttaataaaaacaattcaaataaataaaactcccaaattatgtagggacggatgatgaagacgaaactacta

SEQ ID NO: 218284 - DNA, 1643 bp, Cannabis indica
ttttttatttttcttgtttttttgtgattcttttttctctttctatatttattgatctgggccatggtttataaattcaaaactatatcatgaatgtttttcatctagcacgaattaggagggagatatataaacttataggtgaatatcattaatgagagaatttaaattccatttctatgtataattccaatatgtattaattaattaatggtttcttaattataatgttttaatctgtgtagatatatgaattaattgcattgcatgtaagaataagaataataaaaaaaaaaattgtaccggcatggcgaactgcctggtgaagctcaagactctcaatcttaggaaaaacctctccacattgagaacaagcagaaatagtactccttggaataatcggatacctagatataaatatatataattatgtcaatgatttaattccacattaattgtaaattaatatataaagtaccagatatggaaaagattatattcctctaacagtaataatattgttattattattaatgatatatatgattattagtacctgcttgggtcaacgatcatatgacactcataacaaccagagagcttcctgaattgcattcctctagaggatgacgtgtacccagcgccaccgttggatctcgccgacccagaagtagtggaccgagttgaggaaccgttcgctccctttcgactcagtaaaccggcttcctgtcctgccgtgctattttcgggcgagttgtcggctctgtgaacaaccctagtgttgccatgaacaacgtctctaaagctacaaatagagctacatgaagagccgagcttggagtagccaactgtggtggtgttgtttttggaagggtcgtgaactcgagaaccttcgatctgtttgcaagtgagaaggttcttgatttggtcccatgaagacggcggtttctgctgctgctgttgctgttgctgctttggtctcttctttcgttttgattgagtaggtttcttggagtcggtgggctctggtgtaaaagttaggagtgccatgaaaaaaaaaaaaaaaaaacaaaagagagaaattaaagataaatatttagagacagagagagcagaatagagcagagcaaaagcaggtgtagttcttctcttctttagtactagagaagaaagagagaaataataaaggaggagaaataaggctttttttgttattattattattattatttttggtatataaataagtgaagggagagggatccaagatgagaaataaggaagcaaattatcgaaagaagagggtgggtgtggtgtggtatggtggggcttacctgacttaattattccatttattattttatttatttattctttaatttggatttactattatgttttgttgtgtacacagaaaaagggtacatgccttgcttttagaattttgaccaatacagtttatcttatatacatcatcattgattaataaataatttttaagtaaatatatatagacatattcagtatatattgtaattattattaatatgttatgttatcacagaaaattttcggattagttaaattttgtatgttttactcttaagagatatatgttgacttctaatatgtttgtagttgag

SEQ ID NO: 218285 - DNA, 4697 bp, Cannabis indica
ggctgttgctatcttgaatgatcttggcgcctttcatttggtcaatcaaccgctcaatctcatcctttgtgatctgaggatatcgatacggccgaacactaactggtgcagcatccggtcgtaaggtgatggcatggtcatgttgtcgtggtggtggtagagaccgtggctcctcaaagacggcagtatagcgctgtagcaaggcggagatggcttccgatggttcgtcctctgctgccatgactgccgaatggcccaattccacccaaacaagtaatctcttgggtgcacctacaaaccttgttagtcaacttaaattttgagtaaaatacgccaaaaattattgactgattaccaactacaagcccatgttattgtccttgattttgctctttcttcaattgtataagccttttttttcaacagcttcccctgcttataagttacattagtatttttataactgtccactaatcctaattagtaattaaactgacaagtatacatatcaaccttctcaattgctgattggaaaattgagatcagaggaataaaaatgagagttttgttggtataatgataaaattttgcatgactaagtcctaagccaaataaattaatcaataactaataggtaaaacagtacgctgcacatacccaagtgtcaatttcgattatggtatgccctgaggctgactgtttgagtccaactagaacattattagtccaacactagagcaaataacatcctcgctcacaagaataatatacgatagtaactgtcaaatataaatcttgcaatttcttatttgtgctagtgactaaatcagatagctcttaacaaccctccaaattggtttgtcttggaaaatcggtaccatattgagggagtgaaataacaatatgcctggctgactccaatctaagaggcactagctccattgagttgtatcttctgagtaaagcaagtgttgccaaaggttatatcagacagagaactgtaaaatctttacagccttgccgtattactttcttagtcaaaatgttcattattggcaaggtgatcatgaggaccaatggctttaaggctcacatttcttcatctgagctaacaaaatctaattcaatcatcttttctgttccctgcttggttttgtctgctgaagtttgctccttttcagttttatttctttttgcattgagttgttgatttctcatagcttcagaagaatgtgtgatcaaactagatgcttttctgagaaatgcttacatcaaaatcatcagtgaaaaggtttaaaagttggcatgcatatacgaatgtgatacagacagcagaaaaaagaaccttgaattacctcttctgaaagctattgcattcttggttttgcatagctgattccttctttatgttattgcttcctgctttccctgcaataaaaagacgccacataatccttaattatctcggggaaaaaagaaaaagctcacaaaaggtactccagcaagagctaaaagtttaggattctgacctgtgatctctgtaagaaatcttattccttgcgagtacgaatttgttgtcactttacctgcattactgtttactgcaacaaatgagcaaacaaattgccaaaacataaacatttcactaaagtaattttcttttcaatggattaccaccaatgacaaacctcaatgcctttttgagtccttcaacagacaatagtttcataggttgcttgggttttcttgaatttgttttatcagccagtggatcaaccatgtatatcccttccgatctgggtggatccctaaacgctgttctgatgttcctgtgtacaagatatgaaaggcttcatcaaactaagattgcaaaaaatgtatcaagtatacgaagagtggattatgcaatcaactatgctctgtacattcatcacttaccctcccttgagctcacttcgcatggtggtatacttttgtgattctttctgttaaattgtagcatgaagagtatcagtttagcaacattgttcgaaaagaaaattgtggcattgcagagtcatgcttaccgatttatgaaatttacaatatttcccacgacgtctgcagaaaaagaaattcgatatttaagccacaaacaaaatcaatatgttgcacacaattatttttttctcgaatatgtcactgcacatgataattttcataccgatcctcataagtatttcttcaaacatgttcattatcaaaaagagaataagaatattgcttgtaatagtcacaagagttcagaacttattgtaatgagcatattttatatacaacatatttccttttgcctaaaataaatatggcctacttgtttatgactgatgtacaagcaactccatcattcctcttcccattacaaactccataatcaactgaagtaccaatcttcaagacttgtttaggtgaatacagactcaaagagaaaccctgaccctgaaagcataataaacaaacacagaatgtgctgacatttcgaaacatttataagagaaacaaaaacaaataaacatcagcatacaatctaataccatagaatctttgcggacagtacaattaaatagagcaaacacagttccagcttgctctttgctgagttttatgtaagcatcaccaaacaagaataatgaaacagtagtttcatccaaacacccgattttccatatacaatagctcttccctgttgagctagtccttggatttcccttctcagtcaatactccaacagttgcccaacacccagaaagagtatcccctatcaacagattcctataaataataataattgcttagtcaaaacatacaaactttcttcccttttctatatactttttattagggaaaggaatccccaacacagattatgcttcttcaagtagctaaagagcactaatgacagaaataaaaatgcaaacatgtctgtctattaagagacattacatactttatagttgataaccgaacgaaacgaatgtctgagaaatggttcttaagctcggcaggggtcactgcctcattcctgaacaattacaaaggcatgattgaaaagggttttagtttacctagatttgtactaatcaagaaggaacaaagaaaaagaaatgtacctaattcgtagacccgaaaacctctcgaccccgggttcattacagagctttgtctggcttgattttgaagccttttgtatatgatctggctcgtagtcaagacagtctagaacagcttccctaaacacggacatgtccgcctgtccttttcggctcggaggtccctcatctgagcaatactctattgaaacaaatatatatatatatatagagagagagagagagagaatctcattagtatccatgaatagagagcgaaaatgagcaattgttcaagtaagttggaaagaaaagaaaaaaaaaatagaaaactttaccgggggaatgggggcgagaaggagaagcagggggagtttccaaaacgcggtcttgaagagaaagaagaaggtcgagatcatcttggcgatttgacatggcgatggtgcaacaatggagtcggagctccgagtttatattttttaagtatgaaatctctgtgtcgtctttttttctttttaggttggggacttgaccactttggagttgaaatttggagggagactaattttttttagagggaaacaaagctttgtatagtatttcacattgcaattacacgacgtcgtctaacctgcgtttatattttgatattttttttaataatatgactaactatttgactaattttttcattcagaaatgtaaaaataaaataaaaattatcatataattttttatttaataaataaataaaataaagatatatcttcaaacattaaaataaaaaaaaattgaagaatccttacataaaattgaggcctaaaaaatgtaaaataaaataaaaattatcatacaatttttatttaataaataaatgaaataaaaatatatcttcaaacattataataaaaagaaactttaaagaatccttacacaaggcttaaaaaaaataatcaataaatcaataaaaaaatgactatgtaatttcagaagtgttgtatcattatcttatagtcgggactacgttaattcaaaatcgttgttatcaccgtatcttatttatagttgtcattatattcaaactcattattgtcatcatcgtatctcactccaccatttataaacgggttacatgaatcgtatttgaattttattttttgacacaatattaaatgggttgtgtttagcatatacttgtaatacatttgttgacacaacacgaacatgacccatgaacacaaattgccatccattttgatgagaccagactatctttcaactatttgtatcattatttatgttggtaaaaaaaaaatactttataacaataaaagaaacatatttttaaaaaggttgagtttaggggaatgaaaaaaaattacaaataaatatgaaatagtatgaaattattatgggtagaccttttttagagagatttttaaaatttaaattataatatattatttattacttaattaattagagatgtttttctaatgtttctaaataccttttttactatacacgtatattattttgaagggtaattttgcggcataacctccttaa

SEQ ID NO: 218286 - DNA, 7073 bp, Cannabis indica
agagagaaagagagggcaaatggctttggtaagggcttgggtgcttcggcttcagcgaggtcttgggtggtgagagagagagagagagagagggcctgggagggagggctaagagattaggatttcagaaagtttaagaaagaaagaagaaaaaagaagaaaaaaaaaatatatttttaaaattattttcgaatttttgtggtcaattgtttaaaaatttaaagttcgggtggtttagccgccaatatcccaaaaagaaaatatttttaaaataaattttttttttaattttctaaatatttgtatttatgttttaaaattaatattacgtggatcactaaatatttgtcacgtgtacaaatgtgtacacgtggtcagtccactttggtacttaacagtaatttttgaacggaggagtacagggcaaaacagaatgtgatgagtttaggtagttttactcaaaaaaaaaaatcaatttttgtgattaagtgttaaaaaatttaaaattcaagtggtttaacactaatatcccatttgtaaaaatgtaaaggaaacgtaaaagaaataaatttttatgtaagaagctcgtaaatatgtacatgtataatatatttatatgtattagctcacttaccataaggagagtctgtgcatgtggtgaatacataatagaatttttgaaattggctgcatggaatatattaagccaaaacagctacagggcaactcctcttggcaaggcatccatatatacatagatacatgaaataatgacagctaatattggaaagtatacccatatattagaatcaaaacattaatattgatgcttgccaaagaaggcatgccctatggctggatttgcttactcaaagtctgaaacaaggtttttcttatttcttgtgcacttgcttggttggttctccaatgacttattaccaacccttatatagggcgtttaattcataattcaaaaacataggtaggcaggatatgctgacaatttatacgaatatccaatattcaaagctggcgttttgggagcaattatgggattgattattcatcatgtctctatgccctggtcttgaaaatgatctctcagaaatcagattctccacaatttatactttttcattcaacaaaatcagttgaaaagttgagaatcatagatgcctaatattatccctgccttttaggtggcttatacctttctttctatctctcgctttccttcttttttctttctcatagtcacagtaaccaatataacgccattgtgtcatcacttgttctaatgcatttttttcttttctctcttgtaacacttggtgtttcatgttaaatttatagtgatgagttcaaactgtaaagtatgaacaatcaggcatggttgttagggtttttgattggtaagctcaatgtcattgtttgagtgatctaggccacattgtatatctctaaatatatatatatattttatcttttttgattgtggtattcaatttgtgtattattagtttgtggcattagtactatattagtactaattaagttgtacaagtataaaaaaatataataataaaaataaaagttcaaattatattttcaattgatcaataaagagacaagacttcagcctttagatagaatgataaatgattctcaactataaaagaagagtatttaaagaaatgaagaaacagatataaatgaagctataaataaagttggtcaaagagagagaataagaaccaaagaaattatcttttcaccacaatgaatctatactatctttaaaagattgagtttgagttttttttttaaaaaaaaaaatagtaaaagagtcagccatacaatattattacgtaattcaggagttaattcataattttaaaaaacacaacctgaaacaaaataagagcaattaatttgaatttgagtttgagtttgagtgagtttttaatttactcaaattattatgtcaattagtgcagttaattattttgtctttttgtgaattctattatatattctaaatattttataagttagtatagactatctttaaatgagtgagtatgagtttttaatttagtcaagttatttttatctataagtgcaattaattatttttccttttcgtgaatatttttatttaatagctatactattaactaaagaaaattaataagcaatacttttaaaagtgttgtctctagggtgttgctaaaagtgcatatataagacaacacttgtaaaagcgttgctatatgttgtaacattatgaagatcatataacaacactaattataaaagtgttgctatatatatttaacttttataattattttaaataatattaaaattatgttttaaaataaaatatttattgattcattattttttaatttaattaatattgtatataatctgtatgctttatttcttctctattttttaaaaaataattagagaaaattaagaaaatatacattataacatttaaatttaagttattaacaccattataaaatttattcttatacgttccaaatacattatgtatgtctgcaacaaaatttgatttaaaattctacaacaaaagttacaaatatatatatatacaaaggtataaaaaattctatttttctaggtgacttttattttttcttaaggctcaaaaatattccagcaattcgttcatcttgtgctctgacgattgattaattagcttgatctccatccatgtgtctagattgaaacactagagggaagaaaagaatatgaaaaaaagtgcattataatatttacataaaagatctttcgttcccctattttctctctcccatggcgaagaggaaaaaagtcggacgaaagccagtcatccaaaccccagtcgacgagtcggtcggagacgcagcggaggaaggcggagtcacaggttcgcaggaagggctaaacctaattgctgaaatggttgattcgcaaggtctgttcgagaatcgatctgcgcacagtggggataaaacctgggcaatggaggttgaagaggatctggaacagagctctgcaagggacactaattcgaacacaacaaagtcaagatgggagacatttacgaaagagaagagagtgaacagagatcatagattgttattcactgaaccacgggttagggatggaatcaaaattgctcaacttgatgtagatgaagtcagagaagaagtaagttgcttgaattctgctgttatttgcaaagttttgggtgctaatcctcctatcaaagtttttgaaagttttattaaaagaatttggagtcatttaggggttattcaggtagccaaaatgactatggggttagtaatggttcgatttaatgacgaagctactcgagaccttgttgtagaagcaggtgtgatacattttgatcacaaatcggtgatagtgaggccatggtcgacagatttgaatgccctaaatttgattcataccgtgccactttggataagacttcatgagctaggtctccaatattggggaaataaaagtttgagtgccttagtgagcacacttgggaagccgataatggtggaccaattcaccaaggataggactcgtatttaatatgcaaaagtcttggtggaaatggcgattacagatgcgcctcctagatttatcccttttgtggatgagtatggtcagttacaagagcacaaagttgaatatgaatggttgccaacaaagtgttcaaacggttcgaagtatggacacacaagtgccacttgccatcatgaagagattcaacaagaaagaaaggtgttaagagagcagcaggaaaaaagaagggcggcaagaaaaaagaaactcaaggcaatcaaggggataaagaggagaatgaagacaaaggtgttcaacaacctaattcttaggtgatacccaaaaataaggctgcactaagaccaattagacaacaagaggaaggggaggctgctattaataaaatcagcaacaccttcaatgttctcaaggaacaagaggctgaactgatagaagagaaggaggcttgtgagaagactgaacatggtaattttctttataatcatggatagctctaatattgcttgttggaatgttaggggtatcaataaagtagagaaacaagatgctgtgtttgaatttcttaatatgaataaaataggtttgtgtagtttgcttgagacaaagttgaaggaagatagaataaaatatatggttagaagaaaattctctaattgggattattttactagtcctactattgagaatcgtattctaatcatatggaggaaacattatactcgggccattgtagtgaaggaaactccgcaatttgttcattgctatgttgagatggctggtcaggttgatgctttgagtgttacttttgtctatgggctgaatacaggaaaagagaggaaagagatgtgggatgggctttcgggtttacaaccccttgctaaaccatggctcataacaggggattttattgctaaaccatggctcataacaagggattttaatgcgtcgtttgagttggaggacagagaagggagaaagaaagttaccttcacagatatagaagattcaaccaaatggttggcccaaaagacatatggaagctcttctaaagactggttctaggtttacttggactaataaccaagagtggaataagagaatttactccaagattgatcactcgtttgtgaatgaagagtggtatgatgtcttcaagtcggctaaggctcattatagttgggaaagtgtttgtgatcattgtgcttgtgtgatttctatgaagatgactgagaagattgggttcaaacaattcaggtattacaattgttgggctgatcatcatgatttcaagaatgtagtgcttaatgactgggcgaaatcagttagagttaaggggatgaaagctttatttctgaagttaatgagattaaaacacaaactaaagaaattcaacaaggagtcaataggagacataaggaaaggctaccaggcagctaaaactcaatacttggaagacagaatggaagcccaaatgcataggcttgatctcaatcttcaattaagggagaaagaggcggcagcttattttcatgatcaagaacacatgtatcatagcttcttgaaacaacgaagcaaagtgaactggctttgtaaaggagatgagaataatgcttttttccatgcctttttgaaaaaaagaaggatggagaacaatatagtttcttataccaatgatcatggagacatcattgagaagtttcctgaagtggtgaatcattttatgaaccactttcagggattcatggggactagcagctttacttcacagaggctaaggaaagattgtattgagaaaggaaatcggctgaatgtcgaacaacagctaaacataattaaacctttcagtgcaaaggagatcaggaaagctttctttagtatacctgattcaaaagccccgggactttatgggtatggagctggttttttcaagaagatgtcggtggatttgggaactgattttatcaaagctattcaaaactttttcaacaatggggtcatgccaaaggagcttcatgcaacaatgattaccctcattcctaagatcgagaacccaacaaaagcagtggattataggccgattgcttgttgctttacggtctacaaatgcctttctaaattgttatgttccaggcttgctcaggtgcttcccattcttgttaatcagaatgaaggagcttttgttcaggggagatcgatcgctcacaatatcatgattctccaagatatattaaagaattacaacaggaagaacgtgtctcctagatgtgccatcaaagttgacatcaggaaagcgtatgatacggtaaattgggatttttttttggaggatcttcttaatgcctataaactgccagctagattcatcaaatggataatgacttgtgtgagagccacatcttactcaattcttatgaatggaagagttcaaggcaatttcaaagggaagaaaggtttgagacaaggggatcccctttctccccttctgtttgttctgataatggagtttttaacaaggaagttgcaaatggcagccaagaagtcagattatagattccaccccatgcgtaagagtctcaacatcataaacttatgttttgctgatgatctcatattattttttaaggggaatatgcaataagtccatgttataaagaagtgtctgatggagttcaaagatatctcggggcttgctataaatacaggtaagtctcagatgtactttggaggggttcgaaaagaggctaagcaagatagaatgagagaattaaatctgtctgagggtacttttccctaaagtacctgggagttcctttgaggccgacaaaatggaaagatgaagattgtaatgtgataatcaagaagatcaaacaaatacttctttcttggaaaactagacacctttcttttgcaggaagagcgcaactaattcattcaattcttcttgggcttcggaattactagatgagtatttttatcctgcctcaaagcatcaccaaagagatagaaaagctgtgtagagggttctttcggggttggaatgggaatagaagtaaaatacatgtgattagctgggagaaagtttgtctgcctaaacattatggaggtttgggattcaaagagggggctaaatggaatgaagctatcatagctaaatacctttgggccatttcatccaagagtgacttgatatgggtgaaatggatcaatgatatttatctcaaaaagaattccatttggtcctatgatctcaagacggatacgagttagtactggaagaaaatttgtcatgttcgggataaattttctagatcagatattgttaatgtaggtgctaatgggaagttcagaactaatctgctttataatagcaaattgccgcaggtagtttgggattatagcaggattgttaagggctctttctgttgggttttatgccctaaataaaactcttt

SEQ ID NO: 218287 - DNA, 8618 bp, Cannabis indica
tagtagacgaaaacgtgatgttattttttattaaatactagattagatcataatttaaaataaaaaataattggttgaaaaaattcacttataattagttaaaatggtaagagacacaataaagtgtcaaatactataaaaatataacataatattattggtataatttaatatagagtctttcaattttaatttaataaataatataaaaattcgataatcacttctgatatactaataacgagtatcttaaagcgtttaataacaatactcattaattaattaattataaaaaaaatgttagatgacagaggtgattgggttggattttacattatagccaactcaactctctcataatccatctatcattgtcactctccataattacttcctcttttaaaaaaacaaataaaaaaggagttagaaaaaaataaaaaagaagtgcttcttaaaattataaaagattatcacaaaaaattgttatcctacatatttttattttatagttaatataataaattattaatttaaaaatattttttttaaaagtaatttaagcataaatatttaaatttaattctcagttataaataaatacataagtttaatttttggcggtaataatacttaaattatatttttacaactctataagtacatgaccattaaatattaaatcattatccacgtgttattttttattactacatttaaactatttttataaactatttttaaaaaaataaaaatttaataacttggatcaatcaaagattatcatatgacaatttacttaataatttaacagtcaaatataccgaagtctaagaattataacttatgtattattactgctcaaaaataaacttaagtattataattaagaattaaacttaagtatgtatattgcaaattactcatttttttttttttatactttttaatatttctctataacaatggccatacacataaatatagtgtgttttagtatgtgggggacctctttctctcttctttattatggatacatgttcatgcagatacaattactatatgcatgtgatgtccttatatataaatatattacgaatctttaaaaaaaaaattgaaatttcaattaaaattattaaaaaaaaaattgattgatatattggttggaaaaagaattgttatttttatatgcaaaatcaaaagtgaacttcgacattaattaatcattgaatccatacccttttgttttcaaatttaattaagattattttgtagattagatagctagctaaattgctccccttggttcttattaaaaaaacatatataattacaattatatatttacatattatgtgaaggacaatttccaaccatattaaaaataagattatggaaagcaaactaaacccacttcttttttcttttgtttgaaaatgaggtaattgggaagttatctataatcaagtacaataaaatagtttagttttaaaaacgtgattttataacattatcataaaattaattgaataatgcacaatatgccaagtgtcatgaaaatacattatttcaagtatactagtcaacacccactaaatcaaattctaaatcataatttcatctttggttaaataattgattagggttgttatcaaccaaagtaaactaataattcccacttattgtaattatattaaaattaccacatacaatccacattatattaaaatttgattgatatatacatatagttagtgggatgtccatttcatacaaattaatgcccactttaatttttaaccattcattcaccaattgaatatgcaaaataaaaataactcaatgcaaatttatatcaattaatattaagaattttttctaccacatattgaaatttttaatttgttttcttttttattgtaagacggagttttttttcaaaatactgtgtattttttatattgtgtattgtgttaagttttactgttattcacggttattttttagttgttttaattgttctgttttcttattttatgattgttttattaaaaaataatatttttgtaaaaaaaaattctgtgtagcagtaaaatggtaaactttgacctaaaattcagttgttttttttttttttttgttaaaaaccccttaatattaagcatacatcaaaattatttaaataaaaaaaaaaaaaaaaaaataacagaatggcatgttctttgccctatttgtaggagtgtttttatttgtgtatgacgtgttttgttgacctatttgtacgagtggttttttcagtatggcttgctttttgccctatttgtaggagtgtttttgtttttgacacgtagagaaattataattgtttacattgtagtaacagaataatttattttctagaatagtttctaatatgacttcttagagaagggcctgagaaattagcaataaaaagttttttctaaaaataatgcaaaagattaagtaaaaattattaagtgtaaatccttaaaatagacttatacaaccgatatagtaagatcaatacaaaatacaaatattccatttccatgtaactaaaactctctttttattatcgtatacttaatcaagtgacagaaatgggcaaaaaataaatcttagaataagtttgtagagaagaaaatcgattcaacaatgcaaacatcaaacattttacaggttcaaagttttgtacccattaattgtgcattactattacttataagtttaaatttatatctattatagaaaagataatgaatatttagaatagaagcaatacacaattatttggaatgaatcctaaaacgataaatggtattggtttgtgttgtagaataattgtgtcatttcacacaaaaattattaatttgaaaagtcataataacatgcaaaagaaaacaattagaacaaaatattgatcaagatccaatcacagaaatccagagagagtagagtttttaaccacaaaattaaatttaacaaattaaaaaaaaaacaatttaaccaaaaatataaggaactttgtagcaatacactaaaaagtcactaatttatcataacactatagacccctactaccaacctaagtttagttaaaaattacagcaatagagtggacagaccaaacgatcaaaacaaccaaaaacacataaacatccaaattctcaccgatgcactaactctgaggagacgttttcgcaacaccgctctgttgggaactctgtgaagctgccggtgcaccacttccgtcagaagcgtaagccggcggttgtgaatagccactgccatatgaggcattattatatggtggaacctgtccataacctgcttgaggcgctgcaccgtaaggtggaccataccctcctggctgagaagctgctgctgcagcagcaccgtagctagatggggggccacgctgggagcttgaatctggttgagcgtaaccgcttggtggctgggaatgaggatagctgggctgctgagatgcttgactgtaccctgcagcacctggtgcggtgggtgactgagttgcttgaccgtaaactggggcatttgaaggtggctttgcttgaggtgctccataaccagagccatagccaggctgaggagcaccaggttgagccccgtaaccagcttgtgaagttggtgggactccataacctggctgagtagctccttggggtggatagcttcctgggcttgggctaggctgctgttgactagcattgtatccttgttgaccagctgaagattggccaggagcttgggttgaatccccttgggatccgtacgaggcagcatgtgcttctgtcgaattgctcgcaccatagccagcagcagaatagccttgctgatcgtatgaaggctgctgaccatatccagattgaggtgcatgatatccaccgtaaccatcttgagaataaccttgtccttgctgatagccagaagctggaggctggccataattgtagccagaattatcggctggagcagcagagccaccttgtgttgcttgttgttggccatagtaatcataactacctccttgagcagcttgctgagattgcggtgcacctgattggtcccaattggattggtagccaccagatgcttgctgagggtagccaggataagaagtctgtggcatattatattgtgactgaccagaataggcaccaggttgcccgtagccataaccgggttgttgcattggaggagcaccccctggtggggcccagcttgaaggtggtcgagcttgataaccttgctgggaatatcctccagacattgaagaatttctagcacgattctgcaagaaaattgtttcacaataacgaaggcgaacattacatgatgccagaacatggaggcatatataataatataaacagagcccaaaacactatagcatataaaacatatacaaaacaagggggaaataatacacatgaagaggcaaatatatatccatacagtgatcaatcgataccatttactgtattagaagggtataaacgcctacataccgtactggttcttgaattaaaggagttactccgcagaagcccaccctctccttacttgaagtgaatgggtagaaaaaaagacgaggctatagaaagcttttacattgataaagaaataatgttgccatgaagcaacgagttcatattcaagtgcatagcattgattatcttaagatgatatcttatgagttaaaattaatatttacgagaggagaataaggtgtatgcatcctagattttcattatgtctaggattagaagaaatatgtcatacgattaattaatacttcactcagtagaggctaagaaattagtgttatagtcataactacattttaggaagcatccaagaaacacatttagagcataaaaatagttggtggcatatacacaaggaataacatgacatacatacatacaagatattcgtatatatgcacatattaagagagcatcacaaagattaagcaagaccaaactgattaagttaaatttgcattctctgacacaaccaaacagaataagcctatccaacaatgccactacaaaaatttcagctgaagggaaaaaaaaaactgtttcaaaagaaaagaaacaatacaccagcatgaaaattacaacaaaaccaagtagtaaaggtataaaaacaaaacataaacatttgtactgtatttgtagatgaaaaatcatcaagaaccataaacaagagtaaagaaatactgataaaaatgcaatggatagcttcatagctaactataatgaagtagagtaaaaagaatgaatggatagcttcatagctaactatattgaagttaaagtaaaaataatgaatggatagcttcatcgctaactatgatgcaatagatggcaagtcaatataagatataaaaataactaagagggcaaaacatcctatagaaaacagtaagaaaagaaaaataaatgtattgagaataaataaattaaaatactggtaagaatgcatgtatagcttcatagatgacagacaatgtgatagactaacaatagatataacataccatgactaagagtgagtgaaaatcctagttaaaatactaagattagaaacaaatgtatgtgcttcaatagacaaagcacagggcaaaaggctcaaactgtaataacagaataaagagtaaaaacttctcagaatatttgatagaactataataactaatcagtagtcaccattgttaaccttgaattcccaaagaaccttgaagcttccctcgacaatatcattactaaataccagaaatggatttagaaccataccagagtgatgctgagggaacaccaacagaaagaattccatgttggtgtcaccaatggtccaataaaaactaaccctacaatagttcccaaaaagaatatcagtcacatgatatgatacaaacatataaatattggatggttgaacaagctataatcccaacgatcaattgcttataccaagaatattgtaatatggactcatatatacaggtgaaatttaggaatgttctgaaccgccttagctatgaaatctaaaagagaaagacaaacctgactagcaaactcaacctaacatatggcttagagaaaactcaattataatagcaatcactctgcaatatatctttacacagtataaactatattgaagtcaacctcaaatttctcatagccacactccctatctgcatgagccatctaccaggagaactgacagatgtagagttcaatatagatggcacgtcaaaggaccctgcagcttgatagtctgtatatatagtgttatagcataatctaaaaaataccaattatacccaattggacaccaatggatacaagttaccatgctaacaagttcctaactagccatcctttgtctgctaaataggatcagcagtaaaagaaaattccaaatcaccagactaattaaaggaagaaaaatcattataatggatctatccaatcctcataaaataggtaaaattcatctgtcgatattagtgccaataacaaaagtaaatttaaagaatgctcgaccatcggtgtctaatgagcttagtaccatctaaagatagttaagctgaattaagaagaatatgaaaaaaatggcagataagccttcttcaaacgaagaaatatgtttcattaaaaataaatacaaataaatagttatttaaaattcaagaataaaaataaagactaaatttaaaagaaaaccttgatgaaaaaatgcagaataatgtgagaagaatatgatatagttaaaaaaaattgacaggggcccacatatagaggatatatatatataatacataataataagtaagccatatacacaactaaaacaaatactttacttaaaagaaaaccctcaagtcctgcaacaacaaaagaacaagcaatagcagtgcaaaatcttgataacatgaaaatccatacaacagcgcataatgtagaaacatgtaaaagcttttgaagcacacatcatatgacttgagactatggagataataaatataattgtttacttaaactgacaagtattatacagacaataatagcgaacaatccatttcaatacatagtaaaaaaacacaggtggttagataattgtaattattagagccaaaatataaaatgagccttaagacaagcttaatcattgataaggcaaagcaatatataaatattaaaagcagtaaaacatgcaaatccagtagctttattaccatagaaaaaactaaacaagtaatgcactacatatagcaagaagttacttggcacatggtccacaacagacatatatatcaaacatacctcactgataacttcattaaccaacactttagcactttcaatttgttcactggtcccatctatctgcaatgtcctttcatttgatgtatcaccagggggaagatgcaaaggaatcacctaaacagacacaatcatacaagttttattacagatctatactagcagaaaaacaaatatacagacttcatgtaaaattaaaaagcagtgagtttctggttgtcaacgtcattagccataactgaaagcagaaaagaaaaatgatgcattatgaaaaataaggatacctgaatacgagctccagtccgagcttgcatattttttattgtttctcctcctttaccaataataagaccaacctgaaaattgctctcatgtcaacaggccatttcaaagaataaaaatgtagcaggccaaaattggtaaagaagtttgacataataccttattattaggaattttcattgtaaattgatcagatccggattgactacctgccctccgagtaaccatgccctgacctcctgaacctgattcagcctgataaaaatacagtagaacaaaagttacagcagaacaaaagttgcaacatagaagtgataacaggttaaccgatttcaatattctgtagtaaacaacacaaaaaatagagactttgtgtatgcatagtaagtaaaagtaatgttaagcaagtcatgatgcatgttcaagctttataatgataatccaacttgttgagcctactacgattttgccacaacaataagaactttacgaatagctaacaaaattcagatacccatcaatgaaaaaaatgataagcatttcaaaatagagcttttgtatgaacagtaagtaatggtattgttttttttatgaaggtaagtaatggtattgttaagtatgtcatgatgcatcttcaagctttataataataatccaacttgttgagcctaactggggttttgttataaaacatgaactaaaaaattcagacaaccccatcaaaaaaatgcaaaactaagatttcatcaataacagaagacaataccccagcaagaacatctgttatcaactgttcagcctttgaaatttgttccggagtacccataagctccaccatcctagtcgaagaattcaggtccgcatccatatccctagtaacttgaatcttggctccagactgaagctgaagatactttatagtctcaccacctttacctataattacaccaaccctac

SEQ ID NO: 218288 - DNA, 5633 bp, Cannabis indica
aaatgaacacccagaattcaagatccattctgaatctaagttctcagaggtaacaagcaaaacgccagccgagtcataaccgtcactcatcactgatgtgtctccttcgaatctcgaattaccccaacttcagcctctttggacacatccttgtgatatgccccattttcttgcaatgataacatttaacattattccgaccttcagactgtgatttagatcttaattttccttttgttcccttatggttttctctcttttcacttctacctctcgtatacaatccatcaccattttcagagttcattaattcactcctttaatttaactcttttgaattcaaggctaacaatatcgagtgtaattggctatcttccatataactttgtatctttagaatgcccaaatgactacggtaaagaactaagtaacaataatgcatgttcttcatcttcaatggtaaccacaatgttttcaagatcaaggatcaacttgttaaatttgtccaatctattctcctacaaatttgtcctccatcaacttaaacgagtacatggcttgtttcagatataatttattcaccaacaatttagtcatatacaaactttgaccaatttagtctcactccataaaaatccatacaatcaccaatttttttctttttgaaaggtcataccataacaattccttttctaaagagtaaataagtggaagattattctttgtaatgataatgtgttacttttatttcagcagcaattagagtctttagttggaattattagtgaataaaattgttttgtggttaattcctcatccattagtacttgtttatggctctataattattattatacctgaaaaagaaaaagaaaatgattgcattcatcctcacctttgtccttgtcgcaatttaccaaagctgtctccattatcgtgcaagaaaaaaactactcataaattaaagattgttagttgacattatatggtattatggttgttgctgtcaaattgggccctattacttccttatccgatctgcattaatactgaaagcagtcttaaatttaatatgaataaacaacacataaataaaaactcataatagaaagctttgaaagaaaggtgttcaatgacttggcctatctaataatggaatctcatctcaccagcaaactctcttctcttcttatagagaaggtcttctgttcaatcaatcccctcacaccccacaacccctatttatatattatatctatacataatgatgatgatgatgtaaagccttaaatgtttgtgaattttctctttcactttttttctatggaaccaacaccaattacaattgaatatgatatcatatcataacttttttagaactataaagtaagaattacaagacacaagtcacaaactaaagagtaaaatgataaaagaaaacctttagagttatataactcataatactatactttcccttcattaccagccaatatgatatacttatcttttcttgtcaagttagtgcactcaaatcctaaagcctcagcaatctttgactgcacataatttgctacttcaaacttggttttaccaccaaccccacaagaacactcttttggtaactttttttgagcttttacaatacatgatgttgttggattcaatagtaggaatacagggtccaagaatttgtaaccaccagctgttgttccatagaacatactcacttgataatctaaggcaaccggtacaatttcgtcggttaactcagcaaacaaaggactaaacctcagtaagtatggttctctacaagtagttccttcaggacaaacaacaaggtcactttggcttaacaacttctccatcatctctgaatctttctccctatttcttgttaaccgaacagtctttattggcgcgagcagctcggtgattctacttaagctgtaagtgactgctatgacaggttttcttatagccattgatacatagattggatcaagcagagttctgtgattgcatacataaagggtacctttaagtttttttctggtgttggtttttgatgtgagattagagttttcgattggggtactatgggttgtgccagtcattccagtgaaagacaaaatgggtacttgtaaattattaggaaggaaaagggcaacacttaatctgattatgaaaagaaaaattccaaaaggaagccatgtaaacatctctaaggtggctataaaagtaggcttgaaagctaatcttccatcatggaaaatcaatggttttaggtactttttccttggaagaacattccagcttctcttctcagtttcacttatcaagtaaaccacctagtagaatataaaaaacatgattagttttatcattaaacacaatgaaaatgaaaaagaaaacagagaatatgagatgaaccttgcaatgagaaaggagttgttgatcaattgatttttttaagctagttatacctataactgaagaatcaagtttttcttcaccaaatatcttattcaaaacaatttcaccactttttttctcttccattagaccaacaaaatacccaaaaacaactttcaattctcttcccaaaactgcatcaacacctaagtattctacaaggaagtcttctaccataacacttggcaaattggtaacacctattttccttctaaacttcatcaccatatcaaaaccttcattcccaacatcttctaacaaaaacttaggcaacacagctcttccaactctgaagtttttccttttcattgcgaaaaagcatacgaataccataagtttcatgccaaattcctcactaaccaaacaaacaaaagggtatagaagaaacaagattagagctcttaagagccctccagcttcaaaagcaacaagcatgaaataaggaaaaattgcagatgactttaacaatgctccctccacatcaaacactgcagcctggtttgaaacatctgatatttggccaagagaagagcaactttggtactttcctcgaggcgggttcgcgccgttgagcttccatgggggattgaattggcttcctcttcttgccagtagtgttttggacctgaaaacaaaatgctttaagttcaaaagctctgcagccatatttgttggttgttacttatgttttggtgtattaacaaggctttttatacagaatggtatgttgtcatggaaaaaaaaatgaaagagatattaatattaaaaaaaaaggccctgtatagttggagaaaaacaattactcaactcaatacattcccagataagaatatactcaattcattaaattagtccaatcaaaagaaaagaccaaaagagataaacttattgttacatactaggataaagaaaaacaataaccatattgataaatagtaaactcaatcataacaaaggaagaatctacttaatgtgaaacatgttcttaaaaaccattgaaagaagtttcttaaaaaatatgtgtttggtaaaatttgaaaaatttagaataatttttaatataaattaattgtaaaatttaaatattttattttacatgcatataaaataataataaaaaaaatacactcataacaagttatttgaatttattttaaatttcttaaaattacaaaaaaaattaaataactataatatacaatgttatataaaaaatttacgattagaaatatttaaagatggaaaatagaaatcagtgcatcaatatacataattttaagtttgtaccataatttttggattagtatatgcttgaccaatattctcagctgtttttagaattttttcacagtaaagtgaatttgaggctgaaaatctcaatcataacaaaggaagaatctactttatgcgaaacatcttcttaaaattaagctactaaggctagcttagtggtgaggggatggaaaaaagggaaaggtcagttcgaacccagaacctttaaggtattgagctaatatataattgtaaaatactacactaaaaaaaaaagaaacatcttcttaaaaccaccacgtgtcaattaaggggagggtttatctatttttgtatcttcatgtttccataaatacatacataaaagtgattatcatcatgtgttacttctacccaatatgttactgtttttgtacaatgaattttcctttctttatattcaagacaagtatggattgaattgcatgcaaaaatacatatgaataagaatttgaatctaataaattcaagtcattattaagaaaagtcattaatttatcactttaaacagttcaacttatctacggaaaattggagatataaacaactcaaccaaagttattaatagcttcttttaatcatattatgaaatatcatctaacactttcttaattattatcattgtatatgtgtaaccatccaaattttttcaagaaataaaaccatatattatatgataattaatttagcaaaaaatttggcctagaacgttctattggtggagccaacccaactaagtctaattctaaagttttcacaagtcaaaattgtatagtcaaatcaatcagtttctaaattaagagccattgattttatttccaattctaatgagcaattaattacttcaacaacaagtttttttaatcaaaccccatgaagatgaccctgtaactatagctatattatacataatattatatatatatatgcatgtagatatatgtacaatagagaggggaaagtacttttttttttcttcttctttgctagttatatatacctttcattatttagcattgactttttcttttggtttaatttgatttgatttcaaagttgttcaaatgtgtgtgtttcttttactccaagcattaagaaaatattaatgttgatataattgagcaaaaaaaataataataatattaatttataaaatagcataaaaacactaaatccaagtgacgtgtttgatccaatgtatgagtcttgtttatgtaattagctgaaaagtactgtgtcactgagttgtttttatacatatttatttatgtgcacatatgtaccaaattatttatcattaatagtattagattttgaatttatactcatttttacattctaaccattattttattttattttaaaatataattttatatttaattcttaaattaaaatttatcacaaaaataataattaattttaaacactaacatatttaaaaatataaaataacaataaaaaaaatactaacactaataaaataaaaacaacataacactaagtcataaaactaaaaaaaacaacgtaaagtaaaataataatttaatagtcaaattaattacttgtgcatcttaaccttaaacaatatcaaaatattaactatatggactttaagtatattgagaatcttaatacttgagatgcttgatactattagtgagctctttttggcataattttttttgtttattttgaaaatgatcccgtatattaggatcttcaataatatttttttaaaaaaagtgtagtgtttaattgatttaataaatattttagggtgattctacaatgcacctcctaaaaagggaagtactgatgcaccatctacttatatcggcatccag

SEQ ID NO: 218289 - DNA, 8067 bp, Cannabis indica
tagaaaatcaaatttcccaaacagtataaggtattagttactctaagagggggggtggtaaccatgtaacatgtttttttctgatgtttttttttattttaataaaaccataattttgcataaattgtataaaaatctataaattttataattttctcatataccgaacaatctaaaagaaattataaattttatagctttaatacatgtgcaaaaatatggttttttttttttcaagaaaaagtaacgtaactagttactttagagtaaccagttatcttatacttatatataaaattgaactttaataacttttctggaaaagaaaaggtataattttgcaaacttgtactcaaaaaccataaaaatgaaaaatctgcaacaatctatgtgggtcactcaggcccaatattgggttactgacacgaagagatccaaagtccaaaccctaaccgaaaagcggagggaggagggagttagggcttatgaagaagggtgatgaggagtacgagacagtgtagtaaatcagagtgaaccgaaccagcgttaccggaagaattctctcaaagcttccacagagtagtgggagagctggaacccaatacccatggcgttggctttcgatgagtacggaaggccattcataatcatcaaagagcaggagcagaagaccaggttgagaggtatcgatgctcagaaggccaacatttctgctggtaaagcagtcgctcaaatcctcaagacctctcttggtcccaagggcatggacaagatgctccagagtcccgatggcgatgttaccatctgtaagttttgctctttcgatctttctctaatgttctcttctgcgctgagcttattcagtggaaaatatgcatatttctcatttctggtaaaaagtgggttttaagtgtttgatttcttttgtgatttactttgtggattcaatttggtaaagaatcaaatgtgaaatgagatgggtactttctgtaatttggagtttgtatttctaaatatctggtcccttggcatatagaaggtagaagtttcaagcttttttgaccccttgattaaaaatgggtttctgtacttgtatttagaagttcttaggttgttatatatgtaggaggttcttgaactttatgatccgttgtataaaccctaaaccctcagtctagcaatatgttagtggtaagctaactattttaatattctttgtttggctcttatttatgcagcaaatgatggtgcaacaattttggagatgatggatgttgacaaccaaatagcgaaattgatggttgagctatctcgtagtcaggattacgaaattggtgatggaacaactggggttgttgtcttggctggttcacttctggagcaggctgagaggctactagaacgtggtattcatccaattcgagttgctgagggctatgaaatggcctcaagaatagctgttgagcatctggagcgaatagctactaaatacgaatttgatgcttcaaatatagagcctctagttcaaacttgtatgacgacattatcatcaaagatgtaagtaatgctatttatgctggtctattgatgtttctctttttattggacaccaggatgtgattgacaaaaccttttcagttccatgttagaatgttgcttctgttggtcggattgggcacggtattgcttaataagtagaatttatttgttgcacaatgcacagtcattcgtgtgattagcttatcaccagtcttgtgggagttttctgtcaaatttctatcttaagccatgaaactcaacaactctttaatatacttacttgcgttatgtactttttcattatgaataatactatctgtttaatattgcagtgtgaaccgatgtaagcgggctttggctgagattgctgttaaagcagttcttgccgtagcagatttggaaaggaaggatgtgaatttggaattaataaaggttgaaggtaaagtagggggtaaactggaagatactgagctgatatatggaattatccttgacaaggatatgagtcatcctcagatgcctaagcaaattgaagatgcgaaaatcgctatcttgacatgcccctttgagccaccgaagccaaaaactaaacataaggttgatattgatactgtggagaagttccaaactttgcgtgggcaagaacaaaagtactttgacgacatggttcaacaatgcaaggtgacattgccttttcttttttccctgtggtcatatcaacttttaatcattgaagaagaacaatgtcttgacatttattcttgtagttattcaacttttaattgaagaagaacaatgtcttgacagttattcttgtagttgcactttgattacggtttctagattttatgggttttaggctttgtttcatctgctgatgcagttggttgtaatttttattgtgtagactgtaaagctgattgttttttattgttttatttcatttttatatatttattttcaggatgtaggtgctaccttggtaatctgtcaatggggttttgatgatgaagcaaatcatcttctgatgcaccgaaacttacctgcagtacgatgggttggtggtgtagagttggaactaattgcaatagctactggtgggtctcatataaattttatgtaacttgaatttattatgcttttttcaaatgttttctcacttgataggtatcattgtcctcttttctggctatttgttcaaattattaattgtaatgcactttcttaggtggaagaattgtgccaagattccaggagttgactcctgagaaattgggaaaggtacatttggattattttctttcttggattatttaataataatttggttaacaataatcaacaataaactgttgattttctttaattaggctggaattgttcgagagaaagcatttggtacaacaaaagatcgaatgctgtacattgagcactgtgcaaattcaagggctgtaactgtatttattcgtggaggtagcttttttatcatgtttcaatgccactgaatttagttttatataataatttggagttgggaactaatggttggtgagtaaaagagaacatattgaagggtttgcattttgtaatcttacttgagattttgtggttgacacattaggtaacaaaatgatgatagaggagaccaagcgtagtatccatgatgcattgtgtgttgctaggaatcttattcgtaacaattctattgtctacggtggtggctcagctgagatatcttgctcagttgctgtagaggctgctgcagataaataccctggagttgagcaggttagaagaaaatttcttatatcttatttcaactgtacgatccattttatgtattcactatttttttttctttcattacagtatgctatcagaggatttgctgatgcccttgatgctgtacctatggctcttgcggagaatagtggtctccaacccattgaaacgctatctgctgttaaatctcagcaaatcaaggtaattcaggaaatcttacctgatttttacttttgcacgtttcttctcaattatgtatcaccttgtgatctcaacctggtacttgtgtgaaaaatttatatctttattctggtttttggttttcaggagaacaatccctactgcggaatcgattgcaatgatgttggcactaatgacatgcgtgagcagaatgtttttgagacgctcatcggaaagcagcagcagatcttgctggcaacacaagttgtgaagatgattttgaaaatagatgatgttatctcccctaatgagttctaagttttggggttttatgattaagctaaaaagaaaaagaaaaagaaaaaaagagtgccttgtattgtgattttcttgacagagtgactttttgataatttttaaattccatggatagttgttgcttgtattagctttttgaggtggcttttattgaaattttatggcatttgttactcctttcatggaattagactcatctcaattttattattatatgttaactcaactcatcactcttttccatacaagtgttcaaacatctttgtctgtcggttgatcatttacatttaccatgacaggagtaaaatatatggagggccccattgatcttaataaagattaccctttagatctgatctgattggctgtcttggattgtcataatattaattacaagttttgttgtctttcacatattttttcaaagggattcccagatcttttcattattatttatgatgctgctgcgacagtttttagattgcctcacccaattcaaatatcacttaactaattgagatcctgtctttttctacattgctattattattatattttctatctctctgaaagatgtgtttttttttgtttgtttcaataaaaaatagacctctcacttcctttgttctctttattcttcaaaaaagttcaagaaagggattgcatattttatactaatcgaaacaaagtagaacttaaattttttttcaggatccaaggattaaaacatatcttagtttgattttttaagattgatgatataatgaattatatattgccccatatgttggttatgttgacatacaattttcttattgatgggtgtggcgatataatttagggtgattttacaatgcaccccttaaaaggggatgtactgatacactcttaatttgtttcgtcatctagaaaaattttttaatctaattttttttttcatatcatgtacgttatatctatttaagatatcttacaaaattttgtgaaattcgaaataatttacaatatagtaaacaatattcaaacaatctattttacacgcgtataaaataaaatacgcgtgcaccacactgtttgaacgtagttttcaccgtttctgaatttcttaaaattttgccgaatgtcttaaataactataacgtacatgatcacgaggaaaaatttgactaaaaaattatttcgaatgttaaaacagatatgagtgcatcaatatattcattttaagggggtgtattgtagaattttcctataatttataaagtttgtataaattattaaattcaacaccaaaattaatctcttgtttgtatgagctagtgatatacagaaaaacacaactattttcatcttatttctggtgtttcaactctatcgactgtatatttctatttatggcatttgtattgtaatgctaatattattgagacatagtgaaaaatcttgttggggtcatttatagcaactgaaattgaaactgtcgtgtatcgagtacagaaaactttaatggtgtgagcctttgagtagttagttataataaatacaaaggagagagaaacaatatctcatataccacaatcaagggagttttgctcttacaataagtttttctcaataacaataatcaacacaatcccatataagtattaagtgaacgaacttggtagcattaatatttcaaaggaaaatatatatatagaaaaaaaaaagacatatataatcaacactttggctaatgtttcttaacaaccaaatcccactattaaatggtggtttatctagaaagaaacaagctaaggttgtaaaaagcttggaagtcaaatttgatatacaattgagtagatttgtcatcacttttttttttctttaccttccatcaaaactttaccatattattattaattactatagacaaaaagttggagctatataatatatataaatataaatgtattataacaaagtaattaataataatgatcaacattcaacaacgagagcccttcctgcacctaagtgagcctgcaccagctgtgattgagcttacaagagaagatggtctagcagccaagcttgaggctttggcatagtttgaagaagctcctgccccagatcttgtgaagaaagcaccatttaagtacaagtctccttctgatctccaattccaattcttccactgtttatgagctgcatcttcatgttttgtaatctgataaagaaaaagaagagaccatttttatattactactactactactacttttcatagcttcatagaaattaagtgaaaagaactaatacctctttgctgaatctatcattgggagcaagaaatctattgccttggctattgattgtaggtgaagcacttccaccaatagcatacattttccaatgagtataatcattattcactacatggaaatagccatgtctacatctgcaattaaattaacaaaaaattcagcataatcccataatttgttagtaaagtcttgaaaaatattgataatatttttataccttggcattctctggacaagtccttcaccaaaatggttaaaggcaatagtaacttgcatattcttgtcttgtttataactatcactatgacccaaaagcatgaccttattatgatgtgtcatgtaattactagagatagtaatggctgtggatccatgaatggcatcaataagaccatcacgacaattagagagagaattatggtcaacccaaatatgacttccaccaaaaattgaaaccccatcaccatcagacagagtcctccaaccaaaatgtgtaggagagtctctaacataggcattaccaccttgtttacaatcatgaatgttgagaccatggatgataacatttgttacatactgaatagtgatgcagggtccaccagctatatgaacactggctcctctaccatcaatggtcttgaatgaattaaccattaactcttgtttaagcttgatcaccatgtcacgtttgaaaattatccacaatggctcatcttgaatggcaccatatctaagtgtacctggctttggtttaacagggtggtcacttgggtcagtcaccacataaatcttcccatctctgccaccaatggcgtgtttgccaaatccaatggcacaatcagctaatctcttcctgtttttctcccaattggggtcacatctccaacaatcatcaatggggttacctgttccacatgataaaaagcctaaattccttcttgactcattaaggctcctgcaacaaattaaaaaatatcacatattaatttcatttctttttttgggtacaacaaacaacaatgtgacataatataaattaaaaccattatatctctatactatacatacttgtgtacttcttgtactatgagttcagggtcttcaactggggaagaagaaatgagtgttggagaaaatgagagtagtgaaaataagagcattgccattgttattgttgccatgacaacttatgaggatttttctgacagagagaaatagatagagataaagataggggagcagagattctttagtgatgaaaattgagaaaagggtgtttgtttatatagggaataatcaagaaaataagttgattattatatatttatatacatatatattattgttggggtccactagttccatgatttctccactaaatcggttccctttgatagtttgggccttaagcaatctatctatgttaacaataagctatgttagtgttataataagaacttgtggtttataaaggtcatattaattaaccatagtaactaataaataaccaacaattaaatcataaatacatagtgatgagattcatttgggaaaaaattggcactcattttttcaaatctaatatacattgagacaaagtataactatacacaccgacacttttcaatttaatttttttactttgttttttgtccttgtcggtgtgtatatatagttcactatataatgctgaaaattaatatttttatttatttaaattatataacattgtatttttcactaataataataggagagatcactcaataatctcaattatagtactacctagctagctttcattaatggaatgtgtcacttctcaatatggggctattatccttaaaatcattaattcttaattaatcgatatatgctttattacatctttattttttcgagcgttataccatattaatggtttgtatttttttcttttcttttt

SEQ ID NO: 218290 - DNA, 10177 bp, Cannabis indica
aaaaaaattatgtggagatattgacaatttaaataaataaataaataacttggctattaccctcttgattaaaaatttgttgttgatttttttcttaatttaagatcaagcttaccaaccaccatttggttggtctattagatatttaattatgtgaagaaattacagattttattcaattatatttgtaaattgataattatggattataatacttggagaaaaaaaaaatagggaaaatctattttgtttaatgtcaaaatgaacattgaaattattactgaattatatagtaaagtggtggtggattttatctttgtaaattaaagcttagctataagtttatacacacttattttttagttttgagaacaatatacacacaacatacttgttgtaatatgtaataaaatttaaaataaaaaataaaagtgaagttgaaatttttagcatttggggttagttttcatctgggtaaggcttattttagggtagttttcatctagtgtagccttatttgaggttagctcttaaacatttgatttatgtgtaattttttccttttttgggtatacattagtctatgacaaatggagttgaagaaaagctataataatgtgctctccaaatctcttttatgtatggcaataagtgttatttatgtattccacatggtatgtctatgttcaaataattggttggaaaatattccttaaaaattatgacttaaaatatggactttgggtccaaaaagtttccatttttatataaacaagattagatgaatagatacatcaaacccaaacccaatcataattctacaataacatgagaaagagtagtataagtaattttttttagtagagttttttctaggtacaaaaattgggtctaattaattttcactaaattcattttttaataaaatcccttatttccctaatgcaaaatatttggttaccaataatccaaacatgagcaatgtccatctttaaagtgatgaaacctaagtttgtccctaacaataatctctcttttggtcaaaattgaaatgtactttatacctaaatggcaatcctcacacattctaaggttcttcacaaccctaataattgaagaaccttggcctcggccggttctcaacaagccgaacgcaatcgcaagcttctcgctatggtacctaagagcaaactccctctcttcttcttctaactcatgtaaaaccgagtcgggtgcggggacataaccgagttccctacaccgcgacattaggtcatccaaataccgataaatttcggttgtttcataatgggacttatctcccatactaaacacataggttttatgatcaacttctatggtactaaatcccacttgcttcttcaaccttcttcgattcatcatcttcctaactatctcaactcgatccattcgacctgccaaggcgtatatgttagacaacattacataatgcccgggattatctggctcaacagctaaaagatgctcagcaacttctactccaagaacaaaattcttatgcatcttgcaagctccaagcattgcagtccaaatcgcgggggctggctctacataatcgagctctttaataaaccgataagcttcggttaaaagtccagctcgccccaacatatcaaccaagcaaacatggtgctcaattcccggaaccaagccatactctttccccatacttgcatacacctttcgcccttcttcaacaagccccgagtgagcacaggccgataaaactgcaacaaatgtgacactattcgggtttggacactcagttttcatctcaagaaagagtttcatagcttgattaccataaccatgaactccatgagctgagattatagctgtccaagcaatgacattcctttcattcatcgaatcgaaaacctcttgagctttactcacattaccacacttagcatacatattaatcaatgaagtaccaagaacaacattcacataaaaatcattctcaataacataatcatgaacccaacaacctaaaccaagagctcccaattgagaacaagcagaaagaacactcacaaatgttgttgaatcgggtcttgcaacagcaaaacccctttctctcatcaaatcaaaaacttcaatagcttctcttgaaaacccattttgctcataactcgaaatcatagcattccaagccacaacagttctttcagacatttcatcgaacactttccgtgcaatacccaaatcaccagatttcccataaaatgtgatgagagcagtccgtacaaagggatcaaatccatacccacaaaccaaaacatgtgaatgaacacgttgaccaagtcccaaactcgaaagatcagcacaagacttaatcacagaagtaaaagtgtaactagaaggaaagattccacattgaatcatccgatcgtagaaaaagattgcgtcttgagaaaaacccgaaaaggaggaagctttgattagggaattgaagaggaatgaatcggggtttgggattgagttgaagagacggtgggtgtaagcgattgagccggcggtacaagctaaagtgagtaactttgtgagaagagggagattgtggtggcagccggagacgatgaagtgggcgtggagttgttggagtggtcgaatgcgtggaccggcgaggagaagagcttggtgttgtggagagcgcggaggagaggagaggaggagttgaggttcgttccgtttcattatcgttaagactgaaatttgagaagaaaatctccattaaggtacagatgtcgaattcatcttagccgtccacatagaagacatagaatgctttggttgatctgaatcgttggatttatttaattaatatatatttatgcctaacggtccataatattaagggagtgaagttgtgattttccttattgtattttttatgtatgataatttgaatataatttgatttgcaattatattggagtaataatatctctacatataaatcactacaaatttatggttagtttgcaaaagttttcttttagatgaaaacctataattggtttagaatcactttagtctttagctatatcttaccactactacttctgtgttaattgcataatttgtatctcttggtttttttatgctctaattaaactagatcaagttaaatttactcactttaaaccatccaactttcattatcaaaatcccaacattaaaaataaatcttaatgtcattttctattataatatattagttcaagaattgaagtttacaaatgggaaaacaactaagcaacactcacatgtcctaaacataaattagagtgattaaacttaaaactaaacaaaaccactaaaggttaaaggtctaaatgatttacatattcatatttacataaacacttacaaaaaatcaaccactctaatctaacttaaattacttaataacaatggtttggaccaggaaatggctgcccttgctgtacagaccatggaggcctctcattgtgtgcctacaaacatagtacaaacaaacaaaaaagttagccaattaagatttttgtccactgaactttcacatgtaccaaatcacgctccttgaacttttttagtcattaaaagtttttcctgaactattgaaattgttaaatttaagaacatatgtccaatttcattcaattttactaattctatgattatccatgtactaaacatgctctttagactttgatatctaccaaatcatactcctcgaactttgggatgtaccaaatcaagcttcctgaactttcatccatgtcagacttttgagaagatttttaacagccttaaaagttcaggagacatgatttggtacattttaaagttcgggagacaaaaatcttaattagcctaataaaaacacaatcttttgcttcaatatcaataataagcccataattgctattagcatcaaacaaaagccatacaattccttctagttctcatactgtttttctattcatactaaaagaaaaatatcatcttgaatcatcaactcaactctttagtatttcttagattatttgctatgactaattttattaataatattttgaatgaatgaatttcacttactccaatctctgtcagatgatgacatgagcaacactttactttaggtgctccataagggtacatcagcagcactgtacaccctccacatttcacttgtccaacctgatgagctggattgggtaaacacaagagattcagggtcaaggtctcccttatatataatttttgtataagtgtatatagtatataatcatcaacaacaaaagaataaagacactgcaactaagctataaaaagtaaggttacacatgtagtagactacagatcataattcataacaccacattccattgcttcttcacaattagtattggttgactccatgactgggcttagcttaagctcctctattggtacatgacaactgtaataaatggtgtaggaagaagaagaagaggtaataaggtatcgagaggaagaggtaaagtctttctatttttttaaaactagtatccccgcctaatcctaaaatattcggggaccagaaaactatagcaatttttacataggtatccagaagggactcgaacctcataccttttgggagcaaaccacatacctgaccatttgagctaccccctcttggatggtaagtctttctattattgtgtttaggacaaactattgatataaaactcatagtctaatactgtgatttgcttccacaaaatctgaaattcgagttctttcaaagcctagtttcgatagaaaaacaaataacaaattcagaatctgatctgatctgatctaatccttttcctaaaaatctttccaaccaaacaacttaaccccactctaagttcatctcaaagtcgaaatcattgtaataggtgttaacagattgatacaattttccataagaacacattcacaaacagcacataatcaacaaaagcactaaatagagaagagaagtaaaccttctaaaacaaagttgacagtctgacaacatgaacagagaacctgtttagcccctggaggatacttaagcaaagttcggcaatgaccacaaaccatttgagctatttctgcattattagtatcattataaagttcagtactttgtaacagaaacacatacatacatattatgtacaaacacataatctaattacaatgtatcttcataggtttgtcagattttccccatgagatttgtcagatttcaacaagaaaattccttagcaaacaagtcactcaaacacaacaaaatctcaattcaaaagaatctcttttttctttccttacaagcacaaacaatttgagctattatcccatcaaaatgttaccgtcaacctcctatttcaacctctttctcgacctcagcctccaaaaacacatacattttatagttaaaaaatcattccagtaaatcttcaaaagaaaattacaaataatttacaatatcgaaatcaaacagtgagtgttcaaaacaatttaaacctgttttcaggactgtaaactatacataaccccaccttatcacaattacaaagctcagtatataaagtcacagaaactccatacacatatacatacaataacatataattttccaccatgagttttctccagttcaagaaattacttaacaaacaaacaaaaatcacacacaacataaaaatcaattcaaaagaactcatttttctttctttaactccccaaaatcgaaaacccacaaagaaaaaatatcaataaacaacaattaatattccaaaatcggaaaaagtcgtaaaactgacctaaagatgtcatttttatcggcattggtggtggtggtgtttctggaggtaaacatggtggtggaggacctggaggtggaggtggaggtggtggtggttgttctggagctggttgcaatggcagcggcggcggcggcggcggcggcggtggtagagttagttgtaatggggaagatggtggctttggatagggaggtggaagaatggattggtagcctggaggtggaccttcatcttcgtcaagttgactggtttccatggcggcgacaatctcctcaggcgagtctccggcgattaactatggtgtcttgtctctctccacgaggacgaggttgtgtgttgtgttggcctacaatttcaattaataaagatactttttttatttttaagatttataccattttttttggaaaatgttatttatatcttttttcgatgagaaatgctaaaagatactagtggtatctagtactttctgtgttaatattgttattagtttaacaaagtatcgagtcttatacagtttaatgtaataagttttaggagttaatcgtaagacgacatgtctagaggtcctagacactactggtgcctaatagcaatgcatttttttcgataaaataatattatttgtaagatttaatttttaattaatttaaggggtaatttcaaaagaattataaaaatatggttgtgtgaaactttaaatatttatacaatttttatgattttatttacagaaaatatgatcttttgatatatttttatattatactcttgttaatttttaattatttaaatattgtttgtgtattatttttctgttacttttatatagttttttgttatttttgtgttatttttatagaacattataaaaatataaaaaaaaaaatctttcaacgtaaaaatataaattttttacaaaaaaaaaaataatattttatataattattccttaatttaacgatttcctttacttttataatagtgataaataatcaaaagtagagtagtatattttagacaaaattataaattttatgggtttttatacttgctcaagagtatgacatttttttttaaaatattattttacagaaaagttaaagaaaaagttaaaactaatatgggaaaattaggtaaggctaattagatacccttaatcaaagcaaaatatgatattttttttgaaaattttattttatgggaaaattgaaataaaaataaaagagaaaattaggtaagggtaactagttaccataatcggtaactaagtaccttatgctgtttttttgaattttttctaaaattttcctttaaaataatttttctgagaaaaaaattatatttttgtaaatttatactttaaaaccataaaataaaaattctcctatattctaaagtaaaatattattataattttttttcattttaagtaaaattttatataaaaaataataattaaatagcatggaccagtatgagactattaagtggatactttcttgatgctttgttaagtatttaccaatgttttaaaatcctaatataaggtattagagatgtaaaaaaaaaactttattagtatttaagttttgctgaaaaataaacttaagcattatcaccgaaaattactatagtatctatatataaaacttaaacacaaatacctaatgaaatggacagaaaagaggagaaaaaaaatagagtactatagtataacaattgagtaaatttgtgtatttttgctattaatatccatttgtgtaagtgtaaaactattgtattgtatgcttcaatatcatagtaaatagtacatcttttttaataatacaaagataccaaaagatgaggactattaaagatacaaaagtaattaaaagacatatagttgtaacatgaaatcaagatcatctatgttcaaagcttttatgcatcaatttctagtcaataccacaaattttttatctttgaaaccttgatgatgagtggtttgaacataaaattgacacaaatagatatactaatcttgataatctttcatataataacaagtaataataatatcgtagaaagatgatcaacttgttcacatcaagataggatccaaaacggtgtacaaagagtaaagaagaatagtaaaatataagatggccgaggctacacccgcaatcagggctccagtgacatgatcgcaaaacttgggcacttgtccacagatgggcaaccaaccggcgtcatcattccctttcttccccacatcgcctatagccaacgcagccgaaatgctcgaggccaaaagcactgtcataacctattcacaacacataatattttttcattaacaataattaaaatattcaaattattattaagaagtgtttggctaaatatatgtttttagtttttttctggtaatttaattatattttaaccaataataatcataacaaaataagataataaaaagtaattagttaagtttaattaccacatccaaaataataactatgcgcctaaaccaattctttgtggaaagaatgagagttattagactgtatagccctgcaattgcttccactatcatgaagtacctatccacatacatataaattgcattatatataaatgaataaataaataaaattaatatatcatatggtcacctatgtacttaaaaaaaataaaaaataacatggtcatttcgttaagacagactaaacttacacttaagacccataaattcataagtaaatcaaaaaattatttaataatttttaaaaatattatttttgtctaataataaggctcacaaaatctcaagaccgacgtaactcgagatgtgaatttataaaaaacattttatatgacttacacgaaagcgggcgtgttgttgtatttggcagtgaaagttaagttcaagacatgagcagtgtcatgggtagtgacaatgactacaacagcagccacacttgcagccatggctacaaacctcatcacaaggctcaagattttactatactttgccataatatttgatgatgattaattgattgagatgatcaagggatcttgtagttgtggagatataaatatatacgaaaattttggacaagttttatattaggttagatgcatttgtgaaaattagacatgtgtagtgttgatgaggtttggtttggtaacctatattacatattatattagtatttggtttttagataagacaaaacaacacttgtaataactagtgtcatttttcattagtctcaccttattattatcttattaattatcaatacagcattgctattattgatattgtatattattggtactcaatatttttttataggtaatattttacgattagttagcgatattttttaaaaattattttcttaagatatatgagattcaatactaaccttaaaatttagttggacatggaaaaaaaatatatatttttaggcccttattaagaataaatgtggtattttttaaaattaataaaaaaatatgtaattttaaaatgaaaataaagtttttttaggtcctgagctaggtgagtcctaagtacaggcttagtctgcttatgctaagactaagctttatatcaatagcaatatgatatgaaaatagtattagacaccaataatactatttaacaattctcttatcaatataataaaatatttgttttacttggaaagtgtgccatatatgaatatgatcatcataggtaaactacttaacatgaagatctatctatattagactatgaggggatgtactagtttttcatgaagtaagcctcttctaacgttggtcatctctcatatctcttttgtattattatgtatgtattaacaataatcaacattaattaattgtgttcttttggaggctttcgggcttggcccaagggttaaggcccatccacaatggtccaaaggtaactaacttatttcttcaaaaaatcatagattcttatcattgtttacttttttccttaaaaaataagcttaattattcttttcaaaaataccatagttcaaacaatatatttcgaaataaaacagatatgcttataatatataatttttttttttatttttcacaatcactttacaatatcatagttcaaataatatatttttatagattgtaagaggaatcttttatctaagaaaactattagtatattcatgaatcacaatgtttttcttttaatggaaaatgttaactttattaaccaacaaattcagttaccaaacaaggtaacaaatcagtaggaacagact

SEQ ID NO: 218291 - DNA, 8012 bp, Cannabis indica
acgcatttttgtttttcaaaagtaaaatttttaaaaacaaaagttttactttcattttgtgattaaaaaattagaaaataaaactgttaccaaactgcacctaaatagacttaaattttttttaataacaattaagcccccacataataaaaattatgggtcaatcactaaacctaagtggtctaataaaaaacattagtgagtatatcttagagaaccttttactcaaaattttggaagtggggtattgttgtcttttcatagtttatttagcgacttactttaagattgagtttagggaacgaaactcaaatctcagtctgaaacgaattacaccctttccaatggcaacagtgttcgtcgaatccaagcagccagaggcgatgatgccggaggagacttgctcctccatcgcagcaaagcaaggggaaggtcttaaacagtactacctccaacatatccatgatctacagctccaggtccgcctgaaaacccacaatcttaatcgtcttgaagctcagcgtaacgagctcaactctagaggttcgttatttacctaacactaatcaaggttataaattgttgagtttcttaagggcaggttgaatttttgtttagttacacttttggatttctgggttgttttttttttttttgatcgatttgggattgttgttgttgtttttgttttaaatatatagattatagaatgtgggactatcgaatcggttattacttggaagaatttgtattttgatggaatcttttaacaaagaatgagatgcttaaaaaaagaagagtttgaattttgattagaatgatgataaaattaactcattatagaaatggaaagtattgtgctaggaattcggtgcttattttcgttcttgggggttgagaaagcaccattattttacaaagattacgtattggaacaagattgttttatagtacattgatggcagaagcaaatccatccaaatattgaaccccgttgttctcccgtctatttaccggattcaatatttggaaataatataaaaagatgaaaagtaaaacgcactttcagaaagactcctttcggtgatttacatgcaactgattattgtttctgcttgaattcgttcattttcataggtagattttgttatattgggagtcaagtattgaactttttgaacatgttgttgggttattattttgtaatctggagttgttgcatcaattagtgattttgtttatttatgtaattcaacagtgaggatgcttagggaagagctacagctacttcaggagcctggatcatatgttggagaagtagtcaaagtaatggggaaaaacaaggttttagttaaggtaagcattaagtggtctctgctaattttcttgttgtttggaacttcaattataagaggctttcattctgagctgcttatacctgaaaaccttagtttatttcctgctctttttcaggttcatccagaaggaaaatacgttgttgatattgataaaagcattgatatcacaaaaattacaccatcgactagagttgctctccgaaatgatagctatgttcttcatttggtcttgccaagtaaagtagatcctttagttaaccttatgaaagttgaaaaggttccagattctacttatgatatgatcggtggacttgatcagcagatcaaagaaatcaaggaggtattttatatggattcttagtttctacattcctttctttccctctctatggtttctcttggttaatttgtttatttaatggatattttttttgacgtattatttgatggattgttaatgcacgaattgtaattttcttgtcaggtcattgaacttccaatcaaacatcctgaattgtttgagagtctcggaatagctcaaccaaaggtactgctggatttcatttatatcatctgataaatggtaaacattagagacattgacggttacttatgttcttctattatagggtgtccttctctatgggccccctggtacagggaaaacacttttggctagggctgtggctcatcatactgattgtaccttcatcagggtttctggttctgaattagttcagaagtacattggagaaggctctagaatggttagagaacttttcgtcatggcgaggtttgttttaatgttgttctttgactcttaagttgtatcttgttatctgttgtttaatgaactattttagccattttatttttgccatattgttatgccgctgttagaaggctgttgtattatcaaggttcttttggaaatattttattgtgactagaaaattattgacagaataattctaagcaatggtatcaaataagtcttgcaagcaaatcaatgtttactccaatattatgaggtttttctggaacatagttgaaatcctgatgttgcacttttgctggctgattagttgcatgctttactatcatgcttctattaccattaaatacatgttttgttttgtttcagggaacatgctccatctattatttttatggatgaaattgatagtattgggtctgctcgaatggaatctggaagtggcaatggagatagcgaggtgcagcggactatgttggagcttcttaaccagctggatgggtttgaagcatcaaacaagatcaaggtatgaaatggaaaactaatattcaactcaaaagatgtgtggttaacacaattagcggagagcagtattctcgtattgtgactttacaaaaacatttatctaaaatgccgctttgacaggttttgatggcaacaaatcgcattgatatacttgatcaagcactccttaggcccgggagaatcgacagaaagattgagtttcccaatcctaatggggaggtgagtcctgtacttctataggggtataggtgattattacttgttataggaattcactttatcaatcaatatagattgcctatattgcatggtaaaaagtaattctcttgtttgtttcccttgagcttaattgttttgcaatgttatttattcacatcttaggtttacaaattctgttcagctttatcctttgaaatcagtaattagtgaccttgatttggacactggcttatattatggttgtctgtttgaaatgaaaccaaatgcaatactcattatgattaaaaaaaaattgcagtctcgatttgacatcttgaaaattcattcgaggagaatgaatttaatgcgtggtattgatttgaagaagattgcagagaagatgaacggtgcatctggtgcagagctgaaggtaggttctctctttctggacatagtgtcccaaattctctttcgatggaactggtagattgaaaagttagttgagttttatttataataaacacattggtttatctgttctgtgttgcaggctgtgtgcacagaggcaggaatgtttgcattgagggagagaagggttcatgtaacacaggaggactttgagatggcagtggccaaggtaatgaagaaggacactgacaaaaacatgtcgttgcgcaagctatggaagtagttcttttcggatgtgctatgcaagttctagcttacattatacacagttggatgttttgaaatttacctagattcacgctgtatttttaattattgcataccccaaaaaaatcacttttacactaagctgaaaaggaatttggtataaaaaaaaatggaaaaattgagattttattatgtttcagaacacgagtatataatttcaaataaaaactaaatcaattggtatgtgtgaaaaatctcaagcatcagcttataacaaaatgttcttttaagctttggatgaaatatttatgaaatctcaagttgctgcaattttttaaaaacaaagttgagagggaatgactgcaataatgattttgtttttgaataatggactgcaataatgaattgaatcaccgagttaaagtaagaatgagggaaacaataatattctcagaacagtctcctcaacaaaatgcatattaaaaaatatggataaatttatcctaatttttttctcttttatatataaaagcgtttctgacattcctcactcacaatattagatttttttcaatgccataaactttgctactatctttgcataatatttttttaatatatacttataatgtgtaagctgctatcaaaatggggatgtagctcaaatggtagagcgctcgctttgcatgcgagaggcacggggttcgatcccccgcatctccaatttcaacttatttttctccaatatttggatgaatactttttttttttttttgctgaaactcgacaatgatgaacaatcaaacagttttcattccctattttgattggagatgtgggggatacttcactctcttttgacgagaaaacacttatcagttccctttcattctctacgtcagccactgaattaaattaagcaagcctttcattcattctctacttcgccagttattccattgccagcggccagccctcatgtttaatgcaaccacaattttattcccttttttgatcacattttgtaatttctgttctgtctatactatctgcttgtgtatttgtgtatagttacatatgtacagtagtaagttggtacaataattggagatacaacatttgaagagtttattgaaaaattaatgctattatgtgaagatggcattggtatcactggggctcttgacaattgtacgaaccctgcttatttatccatgtacatacaatacaaacttacgaaaaccagtgtaaaaactacttggtaagtgaggctagcacacggcgaggtggggtgaaagatcttcgggagtgaaggacggctaagttatctaacaacagaacatcacctttctgccaaggaatggcaacagattcctcttcaagtagtttgagacagtcatagataacatcacctggcaatggcttcccatcaccaaaagtgacagccttcaaaggatcatttcttgcatcctcccaccctgtatatgcagcaaccatactattgaaccaaatcttgcgctgccttgtcttgtcaaattttacagctgggattggacccattactgttttcacaccatcttctaaccattccaatttcatgcccaattttgcagccctgcaaagaaaattttcaggttataaatccagattaaattcatagttctgtggtattatatctgtcagtggtgtaagaatagaaaaaaaaaaagaaacctttgctgagcaacagacttgtctttggtcaaaaaggtagactgccatccacggccaatgggagaagaagggtcatcaccttcccctaaaatccttgtatatattagaccatgttcttctaatctctcaacaaattctgggtacttcgctctcattctttcatacacaatgtgacttagaacaataggggtctctcctccatttgctggctctatttcacagaagaaaaacacctttgctggaaactcaggcacctaaattgatacacatatgggatgaaaatacactcagttcagaatcagggctcaattagtgtctactagtttaatgatacacatacctgagccatttcgtggtgaaacgggatcttctggtctggtggagactcgttggccgtgaagaccctacccacgacgttgctccgaggcgccgcgccaccaacatacggaaactcctcgaagccgaaagcctcgacgacgtcgttgaaatcggacgccgtacttacagggaaacccctcaagagtaaagcccccgatttgtgaagcagagactggagatatggtttctgagtttggattgttttggtaaggacggagagagaggagggcggggctgtagagctcggagacaacactgatggaaactgaattccgttgtagagcttctgctgcgggatttgggcttcaacccagtactccgccatagtttttctttaaaacctaactttagattcactcactgctcactgggtttgtttgtgttgcttccggggagacggtggcgcgtggtcacgctccggctaaagacttattctgtgcagtttgtagaggataagtatgaacttagtaaagagaattgggatagttttgttttcctcctttggtccggaaatgcgtcaaggttcaagaaattgtaataatgggctactcataaaaactaacgaagcccaggaaaattacgggcttattgggcttgtgggccctttgtttttgggccggtttacagcccgtggctccatttcttgaaattttcagactagtttatccgccattgattactaacggtaagacaaattcaaaaaaccagagagagggagaaatgccgattcagagaagcgaagcaaagacgaagactgttaggaaggcattgagagacgtttcaaacaactacggcggtggaagaagatgctcgaaaattatgaccaccactgtcacgaagaagaaagtggagaaagaacagttgcctgcaagggttcaagaagtagaaaaggatggcaacgacgacgcacttgatcgtctacttctcgttcaaacggacctaaccgctcttgtcaaccaggtaattagttaatttgctttgttgtaggaataattcttaaacttgatctgaacttctttgcttcttttggtttgttctgattttgcatttgttaagaaaaacacttatgagaactggtttttatatttccatttactaaaagttccagacgatgatgggttttggaatttaaattaagaaattccagacgcgtctgctgtgatgagttttcctaaatttttgtactaagtcaaggtaataatagcttttggaaatttgtgagttaagttcttgatgtgctatttgctactctaaccccagtttttggggaaatgacattggtgtatgtatgtgttttattgaatttgttagtaagcatcctgtgtacagattgtgctttttatatcattctctagttgttgctaactcaaaagaatgaaataattggttgttttgaagattgatgaacttgttgtgcaagcgtttaagttcaaatcaaatggggaagaagggagaaaggaagttgaatcctttacacgtgtcttatctgaaattgtttcctctttgaaggttaattcttcgtacataatactttttaagtgttttttgaatacattttatccgagaactgataattaatatcatttatgtgatgtaagttcagccatgggtgcccagatttcagaaggtgatctccactggttcattggagactgtgaatcaatcaagaaattctttagcaagccaggctgtttctgctgttaatgaaattgaaaatgaagtcgacaagagtccagataacacaaacgagaacctgttgatttctccttcacctcttgtgtcttggcgtgctgattgtaccatagatagaggaagacaaatgtttttggttaccccacttcctttttcaaagtccatgtcgtccatgtatccagaccctcctaaatcgagtttaaaaaaggttactttggacactcctgtgaagatactgcccttaaattctgaatgcaaagctaaaactcacgatttgcatgaagaggtagatcttaaaccaactccaggtaagattactgatttagtagaaactaagacaagtagcacattgaaggggagctctgactctccacaaatgttattgaaaggcaactgtggagcagtagtaatgactccatgtataaaaagatcgcctcctaaatcttgtgtattgctgaaagcaattgctgagtcctctcatgcaggccgttttgaggctcgtaagtcaaccccttttcctgttggacttatgaattatagtgattccgagtcttcttctggcagtgaagcttctgaagttctggcgtacaagtatccagaactcttgggtatacaacacagttataaatcagcagtcaaaaagaaatttttaaaagactcaccggattggtttggatcacctccgaaaacatgtgtct

SEQ ID NO: 218292 - DNA, 1661 bp, Cannabis indica
gatcacaaggtccgactaggtgaattccttaaaaaaatttgagaaagcttacaattatttcagtagcataataactcttagaaagttcaaaaaaggatccccttcacagtggaatgactccactatttatagagaaaatacaagattaatgtctcgaaaaataggagaaaaatttaggaaactgaataaaaaagccccacgattccctcaatcaaatagatctcataaaaatagggattttaactaagttatagttgtggagatatttatggaaaatatctttagagatcttctaatactgcatccctctatacagagtatgagagtcggcttggcatgcttaagttgcttggagaagtgcaaggcatgaatcttgctcaacttggctttgaactatcctggacgaaaccctgagtgaatataccccgtccagctatgaacatacaaaacacgtgttacactgctaagttccatgccacactatgcaaaaattgagataacatttatcccccaagtctatatgggagttgttggccgcatagggacttctgaagtctgcatattgctcaaatgggtaacacgtgttttagtgcacatgatgtactagaagtgtcattttccctacccgaggcgcatatttatcttttagtttcttcaaatctcaacatttaatgcttattcaaaaactgataaatgggaaaatgtgttttgactgttacatacccccattcctttaatgattacacctttggcattttttgggggaaaagcccaattttaattgtataccgagactaccccttagtgggcctataagaagaactttgtaattcatttagaactatcactagttcttcaatctttgaatcttagaaaaggagaaattgttcttcaggccacgagagcttcctttttagcccagacttttcctgcaaagaaaaacaattctcgacatcacagtgagtaagttatttcctattgaactttttcttgattttcttttccctgctttcgcatgcctggtattagtggaatatatatatatgcatttttctgttgcttgattctagattttcttcaagattatcattgaaaagaaaaataaataaacacacgattcgtatgacttgacttgaaaatatttggcgagggacttttcgtgagaaaaattgcctctttttctttatttttgctcttcggagcttctaggtttcaaaaaccctaaaattatttctctaggtccttcgtgttggaaattattttaccaggatctagatttactaacatgtatgttgattatattctataatctaacaccctaaacatgagtacctaaaacaatgaaaataaacacatataaagttaagcaaaacctgacattggtggctacagaataatatgtctccttgcatttagatctctaacccttgttcctttttgtcacagagcaataacaagatctgagtctggatttccttcaggtgttggattcttcacagtcttccgcactatgattgagtacttgacctgatatgagtgggcatgtactctatcactaagggcttcgaaatttatgaagactaagagaggacaattcaaaatctatagaaggaggctctcaatttctagttgtctgacagagttagaaaactaggttatga

SEQ ID NO: 218293 - DNA, 4772 bp, Cannabis indica
ctagatcctggtaaaaaatatttaacagttagccatgacaacgacttttactactttagtaaatgggccaactgagaggccaatgaactataaggcacaatttctaatatgggagattggaaatcaaagtggttttacgtgtttttattacttagagttagaatagagtttaattattatcctcgtacattgtagatttttattcatcgtatttttcttcctttaatcttatgaatgttgacctttatttgtactcgtaggtagaccagctcgatgtgaactagcttaggatcgtgtgaaaattgtagaagtcttgagaaatcttcaaatcagagatcgagattggcaccttctatgcacttcttctaaactggtagaacaaggattaatttgagtggcaccagaatttagcgagaaccggtatacaaggagccctctgagaagcagaaattgaagattaaaaaaacactaagacaacccccaagtagtgtgcccctattagacttagttgaaagtaaattttctactgaaaattttaacacttgatatattttttacagatgcgacattcttgcaaagtgccctagctcttaactgcaagtcgaagaccaacaaggagcttgcgactccttcttctgtgaaccctctctatctgaaaaatattgatgtggtctttccattggctatcgagttgtctaaaaagatgtagaaggtcccttaggagaaagagaaaaaacctatggtggagccagagactaaggctcgcgacttgatggtcctgtaggaccaatatgtcagcgatgatgtttttgtctacatcgaggtgacgcctgtcgaagacctttgggctcgctgctctgagcatatgatctaagggatggacgaatacttgtttgctgttactacaaatcaataggttttcaaggactgtgagcttataaagaagtaaaattttgctcttcgagaaggttggaagaagactaagctcgatatggccaacaaggataaggaaatcaatgatctttgaaaggagaaggacaaagcaaataataagatcaaaaaactagaggaccaagtcgttaatcttactcgcgacttgaacaacgagaaagaggaaaagaagaaaacctatgaccaggtgggtggaaactacatatatactactctgacaaagttgcctcacttcaattttgtcgtgtttcgtataatagcagttgagatggcaaatgcttttcgcaccatgtctccaactgagacccaaggtatgaccaacacacttttccctgaagatgttgctcttgataccaaggttgcggatgtcaccaagaaggtcaatgaaaatatcaatgcccctgctacttaaaaaaatatttctttttttgtatatttacctttttaatagtgggggtactcgcgccttgtacttgatttttaagataattgggcttcatgccttttatatttttgcagtctctgaacaatatatctttcatggatatttatttatgaaaaatatttttgaagtatttttatacgcagtttgtatttttttaatgtgattacaaatgcaatttggtacatttattatcttaccacattatgcgatcatgattgcagtttggtgtaaatttttaataatttgatctcttataatgcgatttatgaacatcttgatgttcttgaaaataataaaatcattaagcaaataaataagcaaaaaataataaaaaattttaaaagttgtgcaacaattaaatgtatcagtaacaagtagtctatttcattaccaataataaggatacatatatcctccctatacttagagaattaaggattgaatttgaataattatatacatgcgagtaccactgattataaaacttcaaatgctcgacattcgaagctctgtcaaaaattgaatcgtaaagatcaaaaagacggtaggttgtagtgcaaattttttcaacaatgaggtatggaccctcccagctatcgtcgaaaactccatgtatttaattacgactattaggcatgactttgcagagtaccaagtctcctactcgaaggtttctttcattaaccatcgaaataaaataatgcatcgtgcattgttgatatataggcttacgtttttttattttagcttgattacgtttttttccaacaaattcaattggagaagctatcccagttcattttctttgacattgaaagcatcgcgatggagtgaacctgcccctacttcaaccagaacaatggctttgcacccacaagaaagtaagaagggagttttgccaattgttgacagcggtgtggtattgtacgaccacaatacttgtggtaattcttcttgccatatgcctgtcctttctttgagctttcctttgatggtatgcttgattaacttgttgaatgcctcagttttcccattactctagggatatgcggatgcagaaaaagccttctgtatccctaagttcttgcacagttactatatttctgtataatcaaattgtttaccattgtcagaaattagtttttagggtatgctgaacttgcacattatagctcaaaatccaaactcgtaaagttttacaacagtaacggtggcaagtgcttctacttcagcccacttggtaaaataatcaactgcgatgatgacatacttaactcctctctttccttttagcaactcgccaattagatatatgccccatcctacaaatggccatgggcttgtgatggagttcaattttcttgggggctatagacatatgtagtaatgcgctgacacttgtcgcatctcttaggaaaattgattgtgtcaaccgggtcttctaagtgagtggggagctgtcttggagatgtgaattgcgcgtagaactctgaggcaaagacatcccacgaattaaattttcatggtgctaacttgaagtaccattccagggcggcctctgccaaggtaccaaagaaaattttacatcgtacatcatccttcactatctgcaggtcaatttgtatctcaaagtatttaatatgcaaaaatggatattcttttctcgtatacatcttccaagaaggcattttcaattttgtcagaagatttagggaattgatctgtatagaaaatggtgatcctcttgtttgatcaagctccaagtcaatgagttttgggctcgccagggcttgaatgaggcttttaagttgatccaattgggcttgtgcccctggattaacttgacttgcttgttgatcggcccctgtcacctgttgaccgagcatcaaaaggtacaaaggtgtgtctttgttttgtggaatgtatttctccacattactcagttgattgttaggcagagggaaaaaatgttcgtctcgattttctcacttacgattcaaatcgtctcgaagataagctctgggccctatcttttggaagacagagtcacccagagctcttctacttagttggctcgtggaccgaggtggcctatggagattatcatcgtttggaggatttttctaattttttttgtgggtacgatgattatcacgacgacaattattgtgctgtccactattagctccaacattagttttgctcgagtacggttgcccataatgagaatttgtacgaccttaaggaggttgttggcctgtatgttgaggtagcctatagatttggacttgcccatcttggttgtacactgccacacgtcctcaagatctcttagctagtttgggaggtccatcatccatcctcccttcaggttagggtcaaaagttgtgtcggtcttctcttccaaggtgatgaccgagaaaaacttggtcatccactaggtttttaacagtttgatctcgagacctagagttttcaattttttaatattttgaatataaactagtaacatcaaagcctcagttatttttatctcttttgtgcaagttggatgttatgttgtgtcggggtgtttgcacataatttgttgggcgctcctctaagccatattgttgtcctctagaggggatgtgaggctcttttccctagttaggatctcttctgagcggtgggttttctagtactcatccccagtttgttggtggaatcttctaattaggtcggtatcttcccttgatatgtgattgatttcttcctactgggcgtgcatggactcagctcgtttatccatccacacttggaatttacgcctctattttttgaacaaatggttcaccatagcgcgtgtttcctcttgattatggtgaagggtattagtgtgagtctgggctttccctaccacttctcttagggtctctagattagagttttctcccaaattgactcgaggttatcccactgacactacaacaaatatgctaaatagcggcagagttattagcggcggacaaaatcgtcgctaatattggtggtattagcgacaaacattgtccattgctgattgggcagtttttttttaaaaaaaaaaaatactattagcggcgggcaatctgccgctcatgcccgtcgctaatactattagcggtgaggtccgccactaatatcccgccgttaataaatgggcgggatttttcctgcccattcagtacgaatattattagcggcggggtattagtggcggaccccatcgtgaataataattaaaaaataaaaattattaattactattagtggcggactatccgccgctaatacccctatatataccccatcaaaccaacattctccattttcccctcttttctcttcaaaactc

SEQ ID NO: 218294 - DNA, 5388 bp, Cannabis indica
tatagaatagatatatatataattaatattaaaactgtgaataacatatgaacatacatgatcataaaattaattaagttagttatattaaaaaaaattatcaaaaattgaattcaaaaatctatttattctattttaaaaaatacaagatttattttctcatttaatttataaattttataaaacagtctaaaactaaaatgttacaaatgtgtgattttgaaaaaatggtttaagtaaacaaaatggtaatatttttgggtgaacaaatttagaaaataagcacatcattcttcaaaattaggagagagaaaaatagagtagagtaggtaactaactagtatatataaacttaacccaatttcatgttttgtaaccaaaacaaaggctagagttaacttaaaacttcttcactttcatctctctctctttctctctctacaaggtgagtcattctttctctcataccatcattaaattttcatgttattataatactcttataaatattaaagtaacaatttttttatttgaatatatatatatatattgtttattgggtgcagaattgtgatggtagaatgaagaaggaagatggtggtgaaatctaataatgcaaaatggatagctttccttgtcataatattatcatttttctctctatttcaacacttatttcttgctaggttttcatctcttactttgcttaattatgcaaaatctggagttaattttcattcaattccaaggaaaacaaagaaaaaggtttgtgggtttttgtatctatatatgattatagagtatcatatattttatatttatattacttagtgttcttacaatgtaacagaaaattcataatggaaaattaggagaaggggttataaaaaaacatctccaatcttcacagcctaatctccataatcaaagtctaagtctaagcattgataatggtaattataaattttattagttttgtttaattagttaataagaatactaaacttctttttatggacacttttgctaatcttaattattatcttctaatccatgaaaatccaaatcacatttgtatagaaatcttacctattgttttttattggtataggaaactatgtcaataacaccaacaatgtgttccatgatgagaatatattccaagaagattacaaacaaatgaaaaagagcttcaaaatatatgtctatccccacaaaaaaaatgacccttttgcaaatattctcttgccagtaaattttgagccaagtggtaactatgcaagtgaaagttacttcaagaaatccctcttcaacagccaattcatcaccaagaacccgaaagaggccgatctcttcttcttgcccttttcgattgctcggttgagacatgacacgcgaattggtgttgaaggcatacaaaatttcatcagagattacataacaaatgttagtcagaaatatccttattggaataggagtgatggtggtgaccatttctatgttgcttgtcattctattggaaaatcagctatggagaaaacaagtgaagtgaaatttaatgttattcaagttgtttgttcatcaagctattttgtagctgcctacattgcccataaagatgcttgtcttcctcaaatttggccaaggaaaaataaccctcctaatcttttttcacccaagaggtaataataactaggttatttctttctactgcatcataacaaggcctttgtaagggttatgttatgtctcatcacgagttgaatgattttttagaagaaacatgtagaatattgttaagactaaatgaaacttaagaaatgcattttgtgtttctttgttacttcatttgacaatttatttttatttaatatgtggtttgtctcatctgaattgagtgaaacactaataaatttgtattattatactacaatttttttttatgaaaaaatgactttttgggggcctctgcaaatagaggccctaaccatggacctactctacctatctttaaaagttaaaagcaatcttgagcttagtacaaaatttgttgtttttaaaaaaatcaaggacccttttatatgtaaaaaaaaaatagtatttaaaaatttgagggcttcgtagtggaggtcgtaggtatgggcttgatccactcgtgcctatagtctagttgtcgatagagcgatacccataacatcagtggtgctcaatatatatgatagattctcgtaacattagattatcacaatgtcttcatttgtattaatatggtgttgaacattattagtacctcttagtatcattgtattcaatcgaatatctactaagaactcgaaaattatggtgtaaacttctcaaaacaaagtctcacattatgcgtcatcatgtatctatcccataccaaataggtcacttttcatttttgtggtaaaaaaattacaggaaaaagcttgcatttttcgcgggaggaatcaactcgccagtacgagaaaagcttcttcaagtgtggagaaatgacaccgaaatctttgtacactatggtaggcttaaaacaccctatgctgatgagcttcttgggagcaagttttgtctccatgtcaaaggtttcgaagtaaacacagctcgaattgcggattcactctactatggttgtgttcctgttgtaattgccaactactatgatctacctttcaatgacatattggattggaaaacattctcagtcattgttccaactatggacattcctttgctcaaagaaatccttaaaaatatcagttatgatgaatatttgaggttacaaagtaatgtgttgaaggtgagaaaacactttcaatggcatcttaaacctattgactatgatgcttttcacatggttatgtatgagctttggcttcgtagaagtttcttgagatttcctgaaaattattaaccaatggaattgattatatgtttttctttttttggtggaataaattgtaatttcaaaaaaatagatgttgaagaaatctgagttgggaaaatgtggttttttagagtaaaataggatgttatgagaatatttattagcaaaataacttacaaaagtgaattttttgaaaaattaatttgatcataaatagtttaattatagttaactttaatactcaaagatagaaattacattcaatgagattattttagctaactaaccacattcttgagcataatttttcagtccacagtcaagaaattttcatacatatccaccatttgcacgaatcacttgtccattaacccattcactaccatcactggccaagaatcccaccacagctgccacatcctcaggcttaccgagccggttcagaggattatcctccgccgctttctgaatttgttcctcagtctttcccatatagaacatatctgttgcgatcggccccggggctacgcagttggctgtgatccccgtccccttcaactcctttgcaagtatctgcgtcatagactccactgcagcctttgaccccgcgtatgccccaaagcctggcctcaatgcccccatttggtggctagtaaccgatatgattcgaccaccgccccctcgctttaatctatttgctgcctctctaaggcacaagaatgtccctcttgcattcacactaagaaataaaaaacaaaatgtacaaacttttatcatagagaatggtggtatcaaaacactagtcaagaatcaaaaacaaacaagaaacagattgctagaaactgcattagaacaatgatcaagaatgaatatagtaaagaaaagtaacacaagttgtaacggggttcaacacccttttctggtgtctaatccttgggaggaactgccctttggagattgaattacagagttacaaggattgagaacaagtggtttcgactccaatggtgacttgctctatctaaacatatcaaacacaatagactctctttaacaaccctcttttgtcaatcgattttacaaagaaaacagttcttaaaacatcattatctaagacaaggcttcaaactcatttataggctagcactaggagtaggagttaaccttgacacagagagaacttaacagaactaacagacataactaacttaactaacatgacagttcagttggttagtaagacacagttatcaagtgtctaaaaccccacaagaatttattcaaacagttataatttgtaagaagcaatcatggactatacaatcccagaaaatgaataattacctgaaaataaattcctattgtaatacatttccaataaccaattgtttaaacaatttaaaaaattgtgaagacaaaaagtttaataacaagtttaataacgagacaaaatatttgatgtttatgttgaagatttcattaaagaaacaatttttatatgagtatggacctgaatgtgcgatcgaaggtttcaattgaggtgttagagatagaagggtatgtggaatcgatgactccagctgaatttaccataatgtgaggttgaacattgaagaactgctcagccgaatcgaagagggacttgacttggtctggatcggacacgtcggctcggactgcgacggctcgaagtgcagcggcgtcggcggcagtggaggtagatgaggcgttgatttcggcaattacttgttcggcttgagtggagttggatgtgtaattgacgacaatgcgagcgccgagtgaggccagatgaagagcaatggctcggccgattccgcgggaggcgccggtgacaatggcgactcggtgtaggagtgggagtgaagaagggttttgggtttcagttggtgtggtcatcggaactaataacggagaatatattattggtggtggtggcgattgaattggaccaatattattaagtattaacaatgacaatgccaacaaaatgaaaattacctaaatacccctattttcttaagtaatttgcaacatacataatctctttgtaaataaattaatttattattcagtcgtatttttattagtatatttaaattaattttttaaaaaaaaataaaatttaataacttgaaccaattaaagattactacataataatttattttaacatttaaccgtcagttattcaattataacttaaaattaacttaaatatttatttacaattaagagttaaactcaagtatttatgacagaaattacttaatttttattaataactttacaaaaaaattattaacaaaataatgaatttatattgtgagaccataaatgattagggaaatttcattttttgcccttaataaaacccccaatatcaaaatttagaccctccactaatttgtacaaattaattccattgattacattaacttcccattttacccttttattaaaaa

SEQ ID NO: 218295 - DNA, 3059 bp, Cannabis indica
ttttttataataaattagaagttattcttgtattcttaaatagaactaaatattaattaactatacacgcagattaataattattaattataactatataattgtagttagttggatcaaagaagtagtgattcgtgaaacggattatttattattaacagttatgttgaggaatatttttattgtttttgtaaaatcatcccttaatataatagctcatattttattaaaatttttatattttaccttaattattattttaatttgaaaactatttttaatgtatttggtagcaaaatttgatagttaataaagttgtacgagaattttcattcaaagaaaatatagttgcagttgtaaaaattaaaaatgaaaacctgctttaattaatcaatgaaagagtgtcgttgattttaatcatgagtttgacagagacattcactcggttccaaggaacatgcttattattattaatattattattattattgatattatgttaatattatccaaattgagtgcctcaaggaaccacatgatctgtcttgtttattgtgtattaatttttatttcttaacttactgtgtattaatttgttaaataaagttataacaagagaaagaaaggtacctttaataagttttaaggttaatgtttttttttttttaaggttaatgtttttttttaattaatttattattattattattattattaatgttatttaccatcacaagcacaaagcagaaaaacaatgataatcttgtcttttaatttttccttttctaatccacccacatgcccaacaatagactgacttttaacagtgttacattattgtgtgtgctattttaataataataataataataatgatgatgatgaaagaaaaatggtttaatgaaccaatggttttctcattcacatgtagagagacagattgcatgtttgggcattgaattggctgtccatttgaattatatgaaggtgttttgttttttattggattaatattattatggatatgtattttgtaaaaattattaattgaattttttattttataaaataatagattggattttatatttataaaattatattaagaatttaatttttgaaaaattttttttaatataattaaattaaagataatttttaatacaaataaatgaaaaaaaatatatttaattagttttatcatgacaactttaaatcaaattacaaaaaaataatttaaagtattattttgtatcattttaaaaatacaaaatttaatttattatttaacaaaatataaaatccaaatgaatccaaaataataattactcgtttattttattattcaggcattttgttatatataatatttattgagaacaagtaggggttagggtgggacccatagataggcaagagattcataataattagaaaaattggagattcgatcacaaaatttaaattagattttgacaagtgcaattgagggtatacggatagtagggccaaaactaaccgccaccgcctaaccctagaataaggtaaagcaaaaaacaaatgataataaaaataaataattgaaagtgtaaacaaagacttttttgggtttaaaatttaaattgagcaactccacacaacgtgtttgttgtctcttaaaggcatagcaagtggggacccccttaaagcaaacacataacaaaaattatagctaatacatataactaactataaagaaaatcttgtattataaggttgtaagtactaagtaatgtgtgtttacaactaatcttttcttaattatatcatacactactcttattaatactacaataacaacaacaagagaaatgctaaaagatatgtatttagtatttttttttgttcataccgtcatagtatatataattaaatatcgaatttcatataacttaaaaaataatttttagagaatattattaactaaacttagagtgtcacttataaaaagtactgaatattactgatatccaataacaatactcaacaaacaaatatacatattttatatgtaatataaattaacaaaattatatgcttatatcaacttaaccaaaaggtcttggacttgcattaaagaaatttagattaaagatatgccatttttcaatatcaaacctcatcatcatcatcattctactcaaaatctttagagagaattttcacgagattgagcgatggcataatatttattttttcttgtgatgatgctccgtaacgatcaaggtagtgtcgttgcggctgcttccttttttcttgatgtttctttaaccggtggtggctaaagcccatgcagtcttccttgtcatttgtcaatgtgtcaaatgggcttcactaattagtaaaaaagttctcgctaatagttcatgtgattcttatttgggcaatgtaattcaaaaaattatggaggtatgctatgtagtacttgttaatgatagcatttagcatcaattaatagttagttactttctgttaattagttggttagttttctgttttgctaggtgtcagtttaaccaactctgtaactaattgctttgttcttcttgctgtatataagttcttttctgttatgatgtgaagtaattcattcaataataaagaatatctttcttctctctcgttctctctttctctctaaactcaacatggtatcagagcttccttcgttctaatggcgtctgcaaattcagctggttctgttcttcgtcccactggttccaatcaactaccgagatcttcgtccatctcattcaatcatactctttcagttaaactcgatgataacaacttccttccgtggagacaccaagtctatgcagctatcaaaggtcatcgtctacttaagtatcttgatcctaaagcagtaccatcaaaatatgcaacaacagaggatgaagcagaggatcgcatctctgaagattttttggaatggaacattcaagacagccttcttgtttcttggttacttcgtcaatgactgagaaaatcctcacgcgaatggtaggttgcaacagtgc

SEQ ID NO: 218296 - DNA, 1430 bp, Cannabis indica
actcacaaaagaaaattaatgtcggagtactaatagtgtcatgcatatgatgaataaaaattcaaaattcaaaatatttataaaatatttaaaacattcaaatttatatgtaaaatttgttatttttaaaggtcttgaaagctatttttcttttatttatttttgggacattaattacttaaagttatataatattatattaatgagccatatggtaaatattttgtaaactatatagattttttttcaataagttttttttatatatatatatacatataaaatagcattttagacatatatagtgttgagaatctaaatatggtgtttgaaatttttaagaaagtgttgagaatttttgataattagaggtttctcaaaaactatttttttaaaaaaacattatcaaaacaacaatcttaatataatatatgtaaattgactatcaaaataaattatattatactaacacgtgaacttcacatcattaaattatcatacatggttgagcacaacaaataattaatattcttttgacttattttttcttttcatataatcaactaaaggttgctaaaacataatgctattaatgttgaagaaaattaaaaacaagaattatgaattatgagtgatctttaaagatttttttttttctaataaaatcacgccgaacataacatttattcaaatatttttacagaattattgagagtgtgggagaaggagtgatagatttgaaagaaggagaccatgtagtgccaatcttcaacggcgagtgtggcacgtgtgaatgctgcaagcatgtgaagagtaacatgtgtagtagatatggtgtgaaccctatgatgaaggtgatggagagtgatggaagaactaggttttggaccaaagatggaaacccgatttttcattttctgaacacctcaactttttctgagtattcagttgtccattccgcttgtgttgtcaaacttccctcccaactactctcttctccatctgattttaaaaaaattactctattaagttgcggagtttctactggtaataataatttttctttttatttaatattatatcataaaaaattttataatgtgggctatttttcctcctacctactgataaaagtatctttatttttttttacgtaaatgatattttggtttcattgttttacaaaaattattgataagaccttctattttgttaaatgacaaaataagccttgtattttttaaaataatactacataatattctgaattgatttttttgtaaaatgaaggagttggagctgcatggaacactgccaatgtccaacctggttcaactgtagcaatttttggtttgggagctgtgggacttgcagtaagaattaattaattaatttactatacatatattatcactacaacaaaaactgtc

SEQ ID NO: 218297 - DNA, 6609 bp, Cannabis indica
gtcaaagttgccttatttatttatggaaactttgctaaaaaaactgtccaggttcactgtatctgtttgaaaagactgactctctgtttaaatagattttgactttctttttttgggaagattttcatttaatgacctaatcgtttcttggttatttgtccacggcctagagggtttctaaactgtatatattcatccttaggtcgctggtttttgttagctctcttggtgtatcaattctatattacttttcaaagttaaagagtatatttttttgttgtgtgaagaacttaagtccaacaagttcttagtatttaattattgtgttactctgtattgtttcttgttaaaattgtgcaggttgaataccttggatatttttaatcaagctttgggagaagttttgttcgtgagtcaccttttcgggaggaaaaagtacatgtgagtcactcttcaggaggaagattgcaagtgattcactcttcggaaggaagattgcaagtgagtcactctccaggaggaagattgcaagttagacacacttcgggagaaagattgcacgtgaaacactcttcgggatgaagtgtgcaagtactacaaattgaagggagttcaaggtctcgacacttttgaaatttaattagaagaatagattacaacatttgcgccaaattcaaagagggagtctttatttgtagtcaatttagttttgtaaacacttgtgattcatctaataaatttcgttctctgagcgtggcctcgtggactaggagcaattcgaaagagttgctgataccacatataaaatattgtgtgtcattttaattttctacattttgctttttgtagtatatttctgtcctgtcaggttttgtgtctgatagaacaaagataaattatgttcaaataattttattacagtcccacattatttaaatagtttgataatttcacttggtaattattaaaaacggaatttaaatcaacattgatctttactaacactcaagcatgattaggagaaccgtttagagaaaaaggcaagttctcaaccgagtgagacttatacgctaataatcaacaaggaaatcacgaccccaagaaacaacaatatcaggagcaattaccttattatcatgagtatttttattcctcctaaactagattcgccacatgataactaaaatcaactataaaaaggccacatgcaaagaatctaaaaacttgtaaatgaactcataaaaatcatgacaaatagtaagataatccctcaaaaatatcacaaagtttacgacactcagctaaaaacaggaaccccataaagcatggtgggtagtttttagtttaagaatcgcaaataggacataccccatcaatcaataagccatgctttgtaaaattacatttggtaggaatccaattagaagaaatatgccaagtgaacatcttcaccttggggtgaagattaagagaacaaatttgtttccaccaaccagataaaccaaatgaagaagaagcacgacctacccccaaattgtgccaatccaactaaattatttgggctgatggacaaggcccaaggcccaaggcccatgtaaagctacataataataaatacttcgaccgttcatggcggtgccgtcgtaaaattccggcatagagaagaagcatcccattctcactcagcttcagctcagagaaaaatggaggacggagaagaaatctatgacggtatcagagcccaattccctgtcactttcggcaagcaatccaaggcacaaacacctcttgagctcatccacaacaccactcgtcgcggcggccccaccaccaccaccaacaccaccgacggaaaaccctcctcctccttttcttcttctccctccgtcataaccaacgaccttcctactgtctcatcttcctccaagtcctggctccattctcttcgcaaacccaaaaatcagaaccctaatttcgacactgaagatgacgaaggcggggatgttatggttggaccgcctcggccattgccggagtcccgttctggtgatggtgaggatgaggatggtgaaatgattgtcggaccgcctcggccaccggctgggttggttcagagtgatgaggatgatgagattattggacctccgaaaccacctccacggtttaatgccaacgattctgatgaggatgctgatgatgaagatgataatgaggtggagaatcgatttcggattccattgagtaatgagattgttctcaagggccacactaaggtatctttctctgtaaattctttcattttcttgttctgtgagtttaagtatttaatgggtattgttaattagtgatgaagcaatgaaattggtgatatattcacactgttgtagttgttgttgtatgatctttcatttcttgattttttgttgtgttgaatgctcaatgtagactttaataacctgcaaattaataaccttacatagtgattcttaagttttactggcatgatcatgtcgaggagcatgaacaccccctaggatcgttaggactcctaagtttacttggcgtgttcacctcttgaataccccttaaggtgtattcatcaatgggcctagagatttaattgaatgtagtgggttgctgaagaactacgaggtttagattgagcatcccttaggcgatggtctccaatcaagtcttttaaaactagtgtataaaagagaaatctaataacgatacggagaagattagcattggccccttcgcaaggatgacatgcacaaatcgagaaattttttaaaaaaactagtatatttcatgtgtagtaacgaaagtcgaagttgactaacttggattcttttgcctgatgtagggttcctttcccaaagttattttagtctgctttcaatcgtacaatatactcggatttaagttattagagtccgctttcaattgtacaatatactcagataaattatgacgtttaagttattccagtccgctttcaatcgtacaatagactgccattgccatcttgagcataaacactctttaggatcgtcttgtgaattcccgctaaggtcaataaggctcttaggttttactggcgtattcaactctatgcctagagatttaatagaatgttgtcggtcgctgatgaactatgaggttgagattgagcgtcccctaatcgacggtctccaatcaagtcttctatagctagtatataaaggagaagtccgaatctaacaaccaacacactagcatatttcgtgttgtaaccacaaaagtcgaatgtcacttggattctttagcgagatgcggagtttctttcccaaagttattcctgtccgtttagctgatactgtaatttcagttctctttaaatagtttgggcaatttagaacatgaaggttattaaggtctagattgagcattcaacacaacaaaaaacaatacaagaaagaacacaatacaagtattcatattacacaaaaacagaactgaaactatgaaacaacacacaagaatattatactggctcatcttataacataagcttacttctagttgatccctttggtgtttagaataatagagtactggttctatgaagggaaacttatttgcctatatcttttttacaggttgtttctacccttgccattgatcattcgggttctagagtactctctggcagttatgactattcagtccgaatgtatgatttccaagggatgaattctcgtttgcagtccttcagacagttagaaccatctgaaggtcatcaagttcggaacttgagctggagcccaacagctgatcggtttttgtgtgtgactggctcagctcaggctaaggtactgaataccaaagttaatttatttcacaatgttattattttgtcatttcttcaatagttatgacttatatgatcatacaactcacatctgcattgaataccttttagatttatgatcgggatggactcacactaggagagttcgtgaagggcgacatgtatatccgtgatttgaagaacactaaaggccacataactggattgacttggggagaatggcaccctaaaactaaggaaacaatattaacttcctcagaggatggatcattgcgcatatgggatgttaacaattttactagtcagaaacaagtaagtgtaacttgtatattttttaaagtttttggagaaatgattcatctgattgtttaaattctggcaacatttgccaaaatgagctgctccagaggatgtttatgtgaatgaaaagttggaagttgttctaaattcaaattaagatgtaatgcgactttgaaaagcatacttttgaattgacatatccattgaactgaatgtgcggtaactcaatgaataggtaatcaaaccaagactcgcgaggccagctagagttccagttaccacatgcacttgggatcgtgaaggcaaatgcattgccggtggtataggtgatggttctatacaggtagcttttttccccgcgttttggattcactcgattggaatgctttttgctctgttctcaaactaaaatggttttgctgtcttttctgcattctatacttttctaacagatttggaacctgaagcctggatggggaagtaggccagatatatatgtggaaaaaagtcacacagatgatattacttcacttaagttttctagtgatggacgtactttattatcaaggagttgtgatgattctttgaaggtgattaaccacattttaaacataataatattttctattattattattttagcatgattttatgacattattaatcatgaaaaatatgtggcaggtttgggatctgcgccagatgaaagcacctcttaaggtgtttaatgatcttcctaaccattatgctcaaacaaatgttgcatttagtcctgatgaacagcttttcttgactggaacatctgttgaaagggagagcacaactggaggtttgttgttgcttcttcgatcgagctaaacttgagctcgtttcaaaagttgggatatcgccaacttgcagtgttgttcagtgctgctggcatccaaagctgaatcaggtaatcccacagccaaaccccttcagcctgaccgatatttatactttaaaatatactcaaaacactgtgtttctgtttgtatttgaagatatttgccacctctggagacaaaagccaaggaggaactcacatactatatgatcctacaattagtgaaaggggagctcttgtttgtgttgcacgggcaccgaggaagaaatctgttgatgatttcgaagctaaaccagtcatacacaatcctcatgctctacctttgtttagagatcagccaagccgtaaacgtcaaagagagaagacattgaaggaccctatgaagtctcacaagcctgaccttcccatgacaggaccaggatttggtgggagaattggtacaagtcaaggaagcttattaactcagtacctcctcaaggtaaattatttgttcttttcgtcatttcggtgcctcatgctatgttcagcagatttacaacttagttttccatttgcagcaagggggtatgatcaaggagacatggatggatgaagatccaagagaagctatactgaaatttgcagatgttgcagctaaagagcccaagttcatcgccccagcatatgcagatacacaacccgaaccagtttttgccaagtccgactcagaggatgaagaaaaataatctgactaatctgcttgtggttttctataacgacccccttggcgagataaactcagaaggctagttagagctaggataaggttgacgcctcacaccgatagtcccgtcttaaaaagcagaaacctcgcttcacatcgaagcttcgagtgaggaacacagaagagttgtttgttggtaaataccgtttcaaaccgaaattttcattgagaccatgtatgtaccacttgatttggcatatttcttttaacacaataaaaatatagatgtgaagaagaggaattcagctcttttacccaattatttgacgaataatgctagattactaacaaaaaatttatactttgtgtgtttaatttctatttatagataattatgtatggagatttgactgtttcgaagtgagaagagttgtcaattctaaaaatagtttggttcgtgcgtgtaaaataatgataaatgataaataaaaaataaacttacactcgaatttaattgttgacatttacaaattttcaaattgagatgaatttataggcctaaatttcacatcatatctcccctaaaagattgggattatgataatttgggctctaatcagaaaagggtgttggaatttgcaagaacttaatatgttacaacatttgaagcaaggttttttctccattgcaatatctagtcaaatcttttatgctacattcataagcaaatccaatcatatgaactaaactataatcactaagttacaattgaccattctcaaatcttaataaacgagaatctgatagaacagagaacatttgagtgtccacaaaatgctgtaaaaacatatacaaaaaaaaagattagaaactctcatatat

SEQ ID NO: 218298 - DNA, 3892 bp, Cannabis indica
aaaacaaaagtgttaacaaacggcagtgatacatttttgaagtttacacgcctatgttcctattcctggagaaaaaaaaacgttacaccttgccagactaaattaggcagagaggtaattaagaggattccattcgcttatgttatctaagtgatattaaattttaggaatgtgctatcgaattgttcaatcctttgcttaagaagaccacacaaattaagtgtagagaagtattgtgtcctcgtgagccattaaaataagtaccacgcagattcaatattttgaggatgatgatagactttttcacaattgacttttctatgcgatggtttaacttctggcaaaagtcaatgtaatgtttattattaatttttaactttatcacgttatttaatataatcaactcgtgcaatataatttggttttagtgccgtggaaagttctgttacttaatggatgagcccaataaaatacttgaatattgggcacaatacgattgagttgatgaaatatatatatttttttataattaattcgagagaatatttacacatttttgttgcataaagtatatggatatagttagaaggctaattagtaattttactttaacatgtactaaatcgtgtactttgaactttttaggtcgttaaaaattcctctgaactattgcgattgttaaatttaaagacttttgtctaattttactaaaaaaaaaattctaacatggataaatgttcaaggggcatgatttagtacatgtcaaagtttgaggggcatgatttggtagatatcaaagtctggggagcatgatttagtacataaataattattgaaacagtaaaattgaatgaaattagacaaaagctcttaagtttaacaatctccatagttcgggggaattttaacggctaaaaaattcagggggcacgatttactatatgtcaaaattcagactgaaaaattactaattagcttattgtagatacatttattacaatgttgaatatagaacttatgatttatataattagagtaaattttattatctagcttattgcaatatctgccctattttggattggttgtataagaagcatgggatttttggtaaaatatatgtaaaagaaaaacaaatttgaacaacacttgcgaattgtgcggaaatcgacttacaatgcaaaaccttcataggctgcttgttaacaaccgacctaccctattgagcactagaggtcggtttgtacaacggacctcattgcacaccataggtcgattctataaccaatctcccatgttgcacaacatatgttgattaggcaccaacagacttcccatgttctaaatagtaagtcattgtatgggagttcaaccgacttcttaagtaatttttttgtagtagtatattgtattattttttaacacattagtgatgtggaattatttttaataaaaatccagctatttttcaatgaatttgtgttgcgtatgcatatgtcttcccttcgatgtctataaacaatgcatttatgatgatcatgagggatccatattcaaaatatcagctactaagagacatgtatatacaagtgcaagtcgagctactcatgtgatctctcttttggcttcataatatcgtacaaattaccacaaaacttatgtgcattttcaataactcaaaaagtaacgagacaaatagtcactttcacattcatattcatctaaatggtcaagctaccaattaatgctttacaatacagtttcaagataagcatttttttaatgtatataaaagacggtgtagttaaagtacacttgattggaataagatgaaggcaaaaccatcatcatatgaatcatgttaagaaaaagaaaaaagaaaataaaacactcctatcaactttagttgagatacgcaaagtacacaaaagggtttttatgagacaagatgaacaatctttgtttagaacttaagatgtaatttcttaagatggaaactgacactaatattatatgttattatttgcagtaaatttaccttttcttgtttttgttttaatgaaataaacttacaaaaagcataatgtttttagtggcctttccctaaattactgtcctcatgtgcgacaaaagagacagctaacttaggtcaccattaaaaaaaaaaataataaataaaatagaatttgtaataaaataaaaaaataatattcataataccaaatatatgttgtaattcagtgataatttattacattataattagactgagataaaaaaaattaaaaaaatggtcaaatataatgaaggggctttttcatttttacatttcaaaataattttttttgcatttttacagaattctacatagaaacccctattacaactagcactgcaacgtaaattgcaacaaaaaatcgtatagaaacccctactgtaactagcggtgcaaccactttagaaactcaaaccgtaaatttgaaaaaaaaaatgttaaaaaaatagtatatggggtaatattagctaataaaattataaaagtaaatttgctacatattattttttaaaaaaatatataataattaaattaatttgtataatttttttagtactgcataatattatattgtaacaaacgaatagatatattagatcattaaataaatacaatagtatttgatctatcgtatcactaaaaatttactagtaataaaattatataccacaaaaaattataacaatattaaattaataatcaaaaaatatatatcattaaaaatactacgactaaaatatgtatacataccaaaaagttaatacataataaaataaaaactattgacctcaaaaagtgatcaactgacagcggggtcgtatgaatctgatgcttgccacgtattacatacatagaacgaaaaagtaataaatacacagatttgttatagaggttcggcctcctgtgatagcgggtaatgacctactccccttttagttgtattaataccgagggttaatattatccagatcattatcagtaggatcaaatatagcacgctgaaggatacaatgtatgaattagaaatggcaaatctcaagtgatagtgcttgtatgggtgtgtgagagaggaagtgaagaagaaagaagttatcagacaggataagagcttaaaggttagtatcaggtttaactaagcttagattttctaggttagagttaaggcctttatagaaagcctaaaaccctaatttacccttgaaatcctaggatatttgcatagttaattaattaattataaaagactaaaattcccttgaacatagatgttatttagctattctattaggcttttagggcccaatatgaagtctagataatgatgtccacgtgtagaagtgcacactgaatcatgtagggtccctcttggctggctagactcctcttgggagcaggctggccggtcatggagcagtccaaaggcttgcaagctaggggtgggctgccagcttccatgaggagggttgtctatcacttgatgcccgtttgagtgctagggtctccatttgcttaggtaatgacttggccttcttattggttagatgtactaccacatggcaccagttttatccacgcaagcactgccacattaggaggaaaaaaattgggatagcataaccccccaagtccctgtgcgaacgtctataaagacagggacttaccagctatgttggtgcggtcgggactgttgtagccttgactgaataaaatttcctgtgtttttagcttttaaaacactttgccttgactgtttgatctcatttgctattaaaaaataactactttaattgtctttttaatgtgttggtgaaacaagtgaagaaagggtcccacatg

SEQ ID NO: 218299 - DNA, 7804 bp, Cannabis indica
cagggaccaaactctcgtgcaccagtcgaggaagctgctttcagaccccacgagaaaattcaaccccaatcgctcccaacaaccctttgcaaaagggcagtaaaccaggcaatgcattgttatttcaacatttcttttgcaagttggacagagcacattcaactctactttctttgtcctcaaattatgattagtagggagacaatttgcagcagctctccacacaaagttcttcgtttttagaggaaccttaaggttccaaatttgattccacataggcgaagaggcactcccaaccgcacacttaacatcctgtcgcaacaaaacataagccgacttaactgagtaagcaccagaattttcaagtcagagagttgaaaaaagaaaaagaaaaaagatactctcgatacacgtgtactaatttattcacaagatattcgttatacggttagtattaaaaatgtatttctgtaaatattttaagaaagtccgcttccgcttgtagtggtaattttctcaaaaagtaaaaaacatgaggtaaaaatcccataaactaaaagcccgaaatgagattgagaaccacatagccccgttaatagcccatttcctctaatccagagagataccatctctcgactcgtagcaggctcttcctctccaaaccatccgccattggcgtagtcggagatctgagggagccaaatcccgagtgactcacgcaacgaaccgattcgacccgctgagtagctcagtttggctatcgaatcacaacgtagaatcggctacactttttccgaattaaggcaattgaaatcggaaaaaaaaaaaaacaatggcggatccggcgaacacgccacttggccaaatgctattggacgagatcactcctgttgtgatggtgctcggcacgccgctcgttgaagaagcttgtcttaagaatggcgtcaacttcgttcaaatgctcagtcccttttgcagcttcaacaacatcgacggtaacacattttcttttgttaatgtgtatatttgtattagtgtgtgtacatgtatgcgtttctagggtttcgaagaagaaatttgatggcttgagttcaatttgttgcagtacctgtacggacagctagtgatcaatcttataggcttcagaaattcaagctacgattgttttatgcttcggatattgggcaaccgaatttggaggtatgtactgcatgtgttaatttacccttcctatgttttcttggaatgtgggaaagtgataagaagaaagaatcagcaacgttcacttttatcgaaattaccttttttttcctgggattatcaagtgtaattgtctcaattttcatagcaataggatttgggttctgtaggtagctattatcttactagattgagatctgatttgttcatttatacctttttattggaagataatgatattttcgaaaaagcgaaattcttgatccatggaggaacattagcaatattattactataaattttgtgtacaaaaggaatgacataacccctaaaatagaactccagaaaagaatctaatttcttccataatcagtaacacattttgttccgagttctttcatcaactacacacaaagctactcaaaactttactctaggctaatatagtatattccctgccttctctttgaaatgaacatctcattgtggaattcagatgtgttgtctgtatactgccttatagttggatttgcaccactttaggcatatagcaaaggtgaaaatatgattttagatacatggtagaactgcagggtaaacttgataagacttttccttacttgaaacagtgatgattctagtttgttaaagcatgttttggtctgagggattaaagtctttatggtcgctgtttatttgcaaattagtttttggagtacaagtgttgttttgaaattgtaccagtcccacaccctcttttattatcttgctgagcctgaatttgagattgcgctttcttgttccaataaggcagcaagagagcggctgaaacaggtcattacgcaagccggggaaaaaggactatctgatttgatttcagatcatcctcaaataaataatgatcatccacgtaagtaatttgtctttcatagtttcctagaagaaattacttgtttaaaattagtaacattcttgtagaaaatattttctgtgtctaggtttttgtttaaattattcatctggacttgtcattggctattactatactgatgaaaagtgtaataggaatgtgaaaagaataaaatggttaagaaattacaaataagtgcccacatatcataattactttataaggtcattaattttcaaattaataatgtggttcttgctatgtcatgaaaactataaagaggattatattctgattaatttttcaatgcaacacaaattgatgaaaagtgtgataggaatgtgaaaagaataaaatggttaaaaaattacaaataagtgcccacatatcataattactttataaggtcattaattttcaaattaataatgtggttcttgctatgtcatgaaaactataaagaggattatattctgattaatttttcaatgcaacataaatatgtttgtgcggtttttttattagctagtctacatttgaattatattagcaagaagaaaattagaggtttagaaagatgggcgtgggatgtgtaacaatttgttgtttgacaatggaacttaaaacaaggaagaagggaggaatttttatttgacaggtacagcaataagtaacctatacaagagggaaaaaaaggagtataaataaaggaagctcttgtaacctttttagttgtattaattatttttattcatttgcggttctccctgtgtcacttcttactatattgcaaggtcataatttttagtttgtgatgtgccatggcttttctctgcaggctcagagtctgaagatctaccatcatggtttcagttcttcaataaagagcttgtgcgaagtgcatcgttttctgatcatgaagcttttgatcatccagtgacatgtaaggtgttggaaagttttagtcttatgtttgacttgtgccttataatgcaagactcaatgtatagcttctcatgacaaatgcgttatttagaattgttgatgattactctttcatttaaatttgattctgttctcctctcttgcctaaatttacttccaggtcttttggttgtctcttcaaaggatgaacagcctatcaaccagtttgttgatctcttcaacaccaacaaactgccatctctttttaatgatggtgcaatggacccgaagattttaaagcattatttattggttcatgataatcaagacggcagttctgagaagtataaacatattttctgatttcttagaacttgttatatataaatgttgttttaatatatgctcatgttacagtgtgagacttggtacctgatgactatttgttttgctgagaaatgtacattgaatttctattagctatctttatgaaaatttcaactaaataactacgtcattgttgtcctaagctggattttgattggaaactaaaatttattgctgtttcaactccatcagtcgtttccttaattaacatgaggatttgttggtgtctagatcatggtataggtatcccttgtcaagtttaagagtctaatttgctggttcaacttcatcagtcgtttccttggtctctgtgatgatatcttgtctactttcacagcttttctggactttaatataagactaagcaacaacttaaattgaaaataatttgggagctcttgcgattatctgtgcagagcagctaggattctaactgagatgaggagcacctttggttctgactgtcaattactttgcataaattcctctgaaggcggtgtagttgaacatgatgacaatccttgggtgccttatgtaagttacgattgaggattttataaatgatttatcgctgtgtattccgtctccttccatctttcagtttattaatagttgataagatacaacgaatctgctctagctaagccttttttttaatgacagaaatctgatgcaccccatggtcagaaacttggctgctttcttgatgttgatgatcttaatgaggtaaatttctgtttctcatcgttttcaataccatcaaaaggttacatacagttgatgattcaagtcgtttttgcttaaatcagaattttgaccatgatatccaatttttacaactgggaacagatgaaagatatcatgcaagatttgtctacaaaacacatcattccttacatggagcagaagatacgtctactcaatcaacaggtatggcatttcacatctttgggtgtaatatattttctttgatggtatatgactgtcttcaatggttgtaaacattaaacatggaaatgagaccttcccatctttttattaatacacaacttattgtatcttataaaaaaggaaaaagttgtgaacttgtgatttcatcatattttccagtgctcatagtgatgggaacactgcatgttatatatatataatatttctgataaatgaaaggtaataataatgactttcggtctttcttccttttccttgtttcttctttgtctcattttatgcttttatcaggtttctgcaacaaggaagggatttaaaaaccaaattaaaaacttgtggtggcgaaaaggcaaagatgaagttgtagaatcgtccaatggttcgatgtatgtacaaatatttaattgttaattgcatggttcttttctcaccttgttatcctgcctgatttggtttctttattttgcttttaaaggtacaccttcagttccattgaatctcaaattagagtattgggtgattatgccttcatgctgagagattatgaacttgcgttgtcaaactatcgtttaatttcaacggattacaagattgataaagcctggaagcgctatgctggtgtgcaggtagctgttacttgtattttagtgaattcatgtttgtttgatttgggatttgattctcagcccttgtgctttgtagtaatagtaaatccttattttatgtttttcctcttttataaatagttattcttcttatagttccttctaaattctaatcattatctctaatttgggaagtggcttgccttttaagggccttgagataattatgtgttcttgtaggaaatgatggggcttacatacttcatgctagatcaatcgagaaaggaggcagagtattgcatggaaaatgcatttaatacttatttggtacatacctcagtatcttttttttttattattgatatttaaggcaaaaactatatgaggagtatatacacaatatgagaagcccaagccttattaaacattcaactgagtcttctcctggaatctatttttaccttgtccgtattctgtgctctctaaaatctgtttgtttcttttctgaagaattgtgtgattatttgacttggtattcatgcagaaaattgggccacctggtcagcaaaatgcaacacggtgcggtctttggtgggtagaaatgttgaagacaagggatcagtttaaagaggctgcgatagtttactttcgtgtttgtggtgaggtaaagcacatattctacgaacaataatgggtaagaaaatttggttgtatgcttctgataaacaaatcctgttttaggaaccactacattctgctgtaatgctcgagcaagcatcttattgctacttgttgtccaagccaccaatgtcacacaaatatggatttcatcttgttctttccggtgagcgttacaaaaaaagtgatcaggtaattataccaaaaacaaatctgaaagttaacaaaggaagttgcatttgctaacaactgccttacttgttctttgccagattaagcatgcgattcgtacttataaaaatgccatttcagtttacaaagaaactacatggagccatattaaggaccatgtgcatttcaatattggacagtaagttgcaccaacttgctatgaccgtgatttctcttagttgttttttttaacctttcaatataagagttgcaaaccttttgctaaacttttggcttagatggtatgcgattcttgggaattatgacttggctgcttcacatgtattggaggttctggcctgtagtcatcaatccaaggcaacacaggacatatttcttaagcactttcttcaaattgttcaggtgacactggtgtggtgatatgtcatttttttgttaacttcaatagagtttgcaacttgtaagacctgtctggttcttgaagagtttttttttttttccagcctgtagtacttaatcttgtttgggctttcgattctttccacaaccttaattacttgttaaaactaaagcttctataaaataagcatggtttatgagacagctgaaagaatctaaggttggattagtgcataacatctggaattaaacaaataaagggtagaaaatattctattatgtcatattgctgtaatccaatggttttattttacctttgctctttaaaacaagttcttgaacgttaattgtatattttcttggtgttaatttatttatgtttttcaaataaatgcagaaaactggaaagacaattgaagtttcgaaacttagattgcctgagattaacctctcctctctttaaggtcgttttttgaagatcatcgaacatatgcatcacctacagcagtaagttacattagatttgaattcttgttggttcgaaacatgtgctatagtttttttttttttggtatggtcttctttctccccctcccttctgccaccataattgcacaaatattttctcagtcaagtttaaactttgcctttgggcttatattgatggattacatttgcaaaatatatcaggctagtgttaatgaaagcatatggcgttccttagaggaggacttggttccatctctgactactgtcaggactaattggctagagatacactcgaagattcttcccaaaaagcttaaagattcaaatgtttgtgttgcaggaggtatgtaggtgatagaacatcatttagcataaattagtttgattaatttacctttatactcttgtgatagaactgatatgttcttaggagtgaaagagatgaacatactggtccatttactgcaattatcaccatcttctcttcaccttctaattctccaccagtctttctctctcgctctccctcattttttgtaaaagctatttatcaagaaatctctttttttttctttttttttctcttgagtttttgtatggcttcaaaagagttatttgtacagattttttagtctatccaatggatgcttgtaatgcatcctcatccttttgcagaagcggtgagggttgatattgagtttaaaaaccctttgcaaattccgatatctgtttctagtgtatccctgatgtgtgagctttccacaagttcggatgagacaaaatctggtaagtggaccctatgttttcctgatttcttcttgtgtgttcactactttgatttattcatttagtttctttcattagtaaaaattggtaaataaaatattgtaaggagttagatggggatccagattaaaaaaatgggtaaatacattaaacaggatagctaaacagtttctgatgatgcagatgccaataactcagcacaggaggttcagaacaatgatgagtccgttgagacaaccagcaggtatgcatttcagtatttcaagctttatagttctttacc

SEQ ID NO: 218300 - DNA, 5287 bp, Cannabis indica
aaaaaaagaaaaaagagaagaaattgtaactggatttaatatagccaacaattcaagaagtccaacaaggtctaaaattgaaaggagagtcaaactgaccgtttctgcatcactggtttttcgcttaagagagtcccggaaaatgaagttaattacaggaatctgtagaacagaagtttagctcagagtaacagatgacagaaattcaatggtgtcacaattgaatgcatgtcaacattaacaaatgatgttaaacatttgatatgagataatcacccgtggaattccataaatgtcataacttagcagatgcttaaaacagaacgacaatctcttctttacttttttctattgtttattgaagagaataaatttacacctcttttgatttgttatctttatatattgtctcccttaatgggagaaacatagcagcaaacagagacagccttctttgatcatcctgaaaattacatgcaaaataaatcaataattttaaaaaacaagtaaaacagcataataaatagaaaataaaaaaaaaattataaattagtttatccgtcaaacttggatcatgttgccactcacattaaaggaagaacgtccaattaactgtataaggttccatgtaacatccaaataagcaatacaaagcctacataaatgggatcactcaaaattacagatgcgatagattaaaagtagtaaaagaagtagaaggaaataaatgaacaaaaaaataagcaggaaatgtgtcaacttgtttcaccatcattcccagccagtaaatatttggtgtttaggtcagccagtcaacttgtgtcaactaaaaacaaaaaggaaaaaaccagttcctagatgatataatatgcaagggtgtcttgaaaaaataaatttgtgtgaaaagggtttcaggtctaccaaaactcatgtcacagttgctacagtgaaagaactgcccaatcccccctacttcacataagctaactttggatacaagattgatgacagtatcatagccaatttataaatatgattagaaagccacctgtcacatccttctggtaatgcaggctcaaacttggggggaagattgaagacaacccagaataacttcaaatcccaaatataggtcattgctttaacaggtcggttgccagacatcataagatcaacctacattatgcatattaacacaacaataaattgttagttatcatctctgcctcccaaaagtggaaagttttgatataaattgcaagtttcaaattcaaattccagatacataatataaatattaacttattaagagcaactactacttgagacatggtaagataccaacatacttcagtaccaatgcgctctctgctaattttagcagccagtgcagctttcacatcatcacaggatgcagcttcctttagttcttcatctaatacaaagtcaaaccttgcacctaaataacaagaagcgacaggacgtggtatgaaaaagtgaacaatgaaacaggaatacaaaataaaagagacggtggaagttgaacaaacaaatagtcctatagaagttagagcaggcaaccatggaatgctggagaaacctccagtgtaaaaaaatgaacatgagaaaaaatgattataccaaatcggatagctcgaagaacacgtaaaggatcatccataaaagtagcctttgctggcaaaggagtcacaattcttccacatttcagatcctcaaggcctgtgtaaaaaatataggaaagagagatgcagcaaaagcaacaaataacaatatggaatcaaaatttccaatagaaaaaatgaaagcaaacgttattgatatgtactcctgcataaactataaaatgaaatacttacctcttttggtgtaatcttcaactaagttggtgttgatattgtagaacaaactgaaaaaggtccatgagaagcagataaccgcaaggaagaaaaacaaaatcaatttgactaaacaaaaacaagctatcattcttatttgcgccaattcatatcaaagaatgatacctattaatggttagatcccttctgtaggcatcctcttcagctgtgccgtatttttgctacaacaaaaatgtaaacttcaatgatcgtttaccttatcaaacagtcttagactgaaaacactgagaaattgacagattaaaaagccatgaaaaattccttcctaaacctataaaatgatacacacatatataattaacaatgcatatattacaaattaaaaacacttaaaatgctatgaaaaaatcatttcaattttctttaaagtgatacgtaattacaaatgcacattataataaaaactgtaaaagattgatacactcataaatatataccgttgtaggaatacggctattatcgctatactcttcacaccttaagttcacaaaatcaatccatacatcgcatattcgcatccttgctgtttccaaatgttttgattgttcaggattactgcaaaattaataagcaaatagtatcataagcagtgacggaccaggatttttactttgtgggggcttatttatcataaaaaaaatatttataactacattataatcactcttattaaatttatctaattttatggggttattctactattttgttttataattattaaattgaaaaatttacatttaatgttttaaaagacaatatttttgttagtattgtgaatgggtccgtccctgatcataagtaatacgcacacatacgatctccaagctaggtaatacataacaatttttttgtttgtttcaattactaaattaatcttcacaaaaaccatctaacagttgatgataatatagaagaagaagaagaaataaataaagaaccttggaatgacggcaattccttgtgcctcttccccaactgacaacaagtattctctgaccttatcaacaaattcactccccaacatattgtccagagctatatcaatgtcataacagtctttgcctagaagctgaaaattcgaacattaaaatccaaataatcactaagatcaaagacaaccaaaccaacaacacaatcatttcgccggaaaagaagaagagagaatgaccttgtcgcggacccagccaccggcgactcggagctggttttgaaggccaaaatggcgaagagttccgagaagcctatcgaaaatctgcttctcaacatcggtgagctcgattttctccttgacatgtacagtcggcgatgaagaagcagccgccgacgccgtcattggttggcgagagaagagagagggtagggttttgattggagtagggattgtggaaggagaggaataaggaagtggaaaattgaagagaatggtgttagcgtgtgtagttgttcggtggagggagggaaagagaagagctaggggctttactgctgctattcgcattttaacgtttatatggttaaactccaaatatatatatatgatacaccaaggagaaacagggcagctttgatatccaaattaattatatattctaattactttgccccaaaaaataataagttatggatgttcaacccatttatatggtaataatttactacttttttctttttaaatttttatttacttatttttttaaaaaaaataaaatcatcatctttattaattgcaatcaatagtgattacatgattgaaatctggagtaacattactactcctgataacacgatcgacaactaaataggatgctcgagctaagaagtgagtaacactatttgcagaacgtctaataaaattgacagaaacatctctcaaatgatttaacatcatcttacaatcagaaataatacttccaaagtatgaaaccataggaagagaactacgtaacgcttgcaccactgtaagactatcagtttcaatgacaacctccttctaatcctttgccttaatccaactcagtgcctccttaacacacaaggcttccaccatttcgggctgcagcactcctgaacgacagcagctaaacgcctctacctacgcaccagtttcgtctctaattaccccgcgaagctataagttccattctctgaaaaaatggcagcatcaacattaatcttcaaggtattaacaactggtttgatccatgtttcatctccatctacatctgtaaggaaagcagcagtgggaatcatagttgtatcttgagctcgagtccaatctatgaggagggctttagctaaatgaacaacgctctcaaccgtgggaattttctcaaaccaaactaattcattacgatgcctccatatcgcccaacacgtcattgcaactagccttcatttttcctcatctacctgctgtaggactgaagcaagccaattggcaaaagaaccaactgctgtcagattaacaccagcagccaaccgttgccaacatgccttggcaaaagagcaatccaccaggctatggtagattatttcatcagtgtctttgcacacagggcaaacgacatcaaccggcacatgtctagagcagagtcttgtttttgtcggcaaaaaattagtagcagcccgccataacaagtctttcacttttgggggaacacttagcttccaaagagtattccaaaacatggaattatcatcccgtgcccccaattctttgctcacttgcaagaacttataaaatgattttactgaaaagtagcccgagctttcccaactccaataccaagcatcacataaacgacttgaagacaagaaaatgctaagaatcaaattagcatccctttcattaaacaaatcatgcaccaagtcaatatcccaagccagcgaatcagtttccataagcgctttaacattttgatcaacaagagcaggattaataaagttacccttggattatcatcatctgggagccacggatccaacaagacattaatccgagaaccatcaccaactctacaccttgccccttttcgaacaatcccttgagtttcataaatgctacgccagacaaaacttggattgctacctaactccgcatttaaaaatgtaccattgcggtagtacctagctttaaaaagcttactgacgagagagtccggatgactaaaaagtctccatccttgtttacaaagcaaactcaagttaaagtctctcagatttcgaaatcccataccacctttagacttatgcaccgtcaatctatcccactttttccaatggatgcctttgttatttttagacgatcgccaccaaaacttacacatcaattgctccatctcattaca

SEQ ID NO: 218301 - DNA, 10064 bp, Cannabis indica
ttcgaagggaaaattactaattagcctatatattaagctgaaagtaaatagatgaaaagaatatttaactcttgatggctatcaatgtatccttgatttttttttcgcaagttgaatcctcagaacagtaatgacaaaaaccgcaccttcatcttctagacctttcaccaacacaaggattagtgtgggctagtataataatattgcatatgaagttcttgatttaatctagcaagaactatttcttttgtggtagagaaaaatatttacagaaaaattacgtaaataattctatatcaaaaatttatatagaactttgttatactatacatttaaataaacctaataaagtttttatttaattaattatttaaatttaaatttatttattaaatcatatttaattatttaatcatttaaataaataatataatatctctaaatcacttggcagaatatcttaacaacttttaacaacttttcatattcaaatatttatctatttaattaaagaaaaataacataaaacttcgtcatctttcgaaaaatgccttcatctactaggtgaaatataacaccttagcagtacattttgttaggaaacttacaaaaatactggaatttgggttaacttttacaaaaatactgtcacacggaaatcttttcaaaaatactgtgttttcagtaaaaaagtaaaaaattctacctgacagtatttttgtaaaaaaatagcaaaagttagtatactatgtaaatttcccttttgttatgagttagcccattattattgggcacaagttaactgggcttgatttaaaatgggcccaaatctagttaaatgggccttgaaattaatctctctttttgtagctgtcctatatgttatgttcgtcttcctcagtcagatccgaagactgaaactcattaatggaaaaagcttcttctgcaaaaccaaaccaaatcaactcttaacttgatggaaaagcttctgtgaactcaaatcaattgatcttacatctttatcaaatgaggcttttgcagttggctttcttactttctttggcttctggttttgcagtcctcttcatctacatcactggagtctctaatcttcgtatgttgtataaatatatatatataatcaagtgttttatggataggtaatgtttttgagttgtaattgaattgattgtaaatagatgagagactctcgctttcggatgatgatttggaggctttggaatctttacaaagcggtttccagaagtgtgtggtgagcgtaatttgaatttgaggactaaatcttttgtgtgatttgttttgaaacttaattttgttatgagaaatttcaaggttaaatcttttactgcatgaagttgaagtgatcttttagtaatgtgtttctgtggatatatcgtataatgcgtcttgagtttaaaattttattcttgatcattagttttggttctgagttgatttatctatatgttaatctgcttttgaattcagttttgttgagtaatgttttgttcatgtaatttcttgtttggataattgatacagagtgcaaatggattgggattacgggctgtgagtggcaaagactattgtcaagttaaaatgacatttcccagtgataccattccaaaatgggtaaatttctcttgaatttacttaactcatgtatgtattgattaacattggtttggttcatgaagtattttaggattttttacatctaatattacttatatacatgcttggttatgttatggttctgtactgagacttatttgattgcttttcatctgacataatttttgttggaaacagaaagatcctaaaactggtgaacttgaaggtgtgtcatatgacttcaatatctgtgaagctgtggctacatgggaacaggtgagtttctgcttttattttttgtcatatatatatataggatacactgagtccttttgcatgatttctcacttgaattttcttcaatgacatatatgtgaaggattaacaaattgtaaatgcttgtttgagattttcttttatgctttacaattgatttgttattcagtgagttgatccattaggttcggaacagcaccacgatactgaccaaagagttcattgatgctttaccaaatggttgggaggactatgcatggcggaggataaacaaaggaataaatctgtaagcactctagaacagcggttgagagtttaatatatggaaggttatgtatgacactactacatttttatttgatgcttatgttttgattcagcaatcgctgcgagaataaaaagttatgcatggagaaactttcattggtactccctgaaacacctccatatattccacgacagtttgcccaatgtgctgttattggaaactctggagatcttttaaaaacaaaatttggaaaggaaatagatacttatgatgctgtatttagagaaaatggtgcaccaatccaggtgaagctaatgtttaattcatggtggcaagttttggtgttatgtttactttaagcagctcctttatttacaattttttttattgttctatttgtatatgcagaactatactgatcatgtgggtagaaaaagtacatttcgtcttcttaacagaggatctgccaaagcccttgataaagttatagagttagacggtatagtaatttgtcatttttcatacctaaagtctaatggtttactttccaagaaactgattaacggaattctgcagaatcaaggaaggaggcattgatcgtcaaaacaactattcatgacattatgaacaagatgattcgggtatgtaatgagttttcctattttctgcataagaaatcagagttatatttttcattggagtatacagaatatgtttcatgtattcataatttttttgctggttgaaatgatattagtagaagagaacatttcttgtttggaaagatcacattataaattaaagatatatttccatttacctatagaggatttctgcttcctaagttaaaatatttgaaatttttatggttaaaatataaagggtggtaacaagattcaaaatcattaggcattattttacacataaatctagttagttatttttcccgattttatgtaatgtggaatctttcactctttttactactttttggtttcatattatgcaggaaattccaataaaaaatcctgtgtatcttatgctgggtgcctcttttggctctgcggcaaaaggaaccgggctcaaggcacttgagtttgctctctctatatgtgactctgtagatatgtatggtttcacagtggacccaggctataaagaatggtgaaaatttcctcccctataccaactagtaaagttcaatgtttgatttacaactttgagaaatactttcctctaaaggagcccattgctattgtttcaggactagatatttctcagaatctcgacaaggtcacactcctttgcacggcagggcatactaccaaatgatggaatgtttgggtgtaagtctttagtagctgctgcttggtattttctaatgattaataaaacatgtatatagagatacctttgtagaagtccctatacataaatattttagatcttatattagttaagattgatatttcctaatcattactatattttttacttgtctatacagttatagtaatattattatttttctttatatcagcttatcaaaattcattctccaatgcgagccaatccaaaccgtgttgtaagatgggtaccagacaaggatacaattagagctgctagaattgcagcggagaaaatattaaggtaactgaacattttattttagttttctcgtgtttgaaaagttaaaattactctcttcattgtgatagggagcaaagattacagaaatttaataatgcatcatttgttagatcatccacatctactacttttagttccacacaacaatgagcgacatcgctctatttatagaggcaatcatatcaggaggaatttatgcttgtttgtttttctagatttatggcacaataataaacttattttctgctggaaaaagcttctaattcagtcaccatttaggttgtgtttggttagaaggaatgaaaacatagaaatgagaatgagaataggaataggaataggaatgaaaacataaaaataagaatgagaataggaatatcaatagaatggaatgaaatttaaaatataaaaaaaaaaaaaataattaaattttttttcatcttgcattggaatggtatctccttctattttaaagaatagtcattccaccaagatggtggaaaagtcattacattggaatgacattccaaatacttaaaatgcaaccaaacaaaggaataaaataaaaattgattccatttcattacctccaaccaaacgcaactttaatgtttatcctttctgattttcagttttgacattttggctatttcagttctggtcgacgaccataacattgttgcttgaaacatgaatttgtgttctttgttttcctttgtgtctataggagggccggagcagggtctggagacccgctgggggcatgttcaatcataacgaaacaagttaaaagaaatcacatagaaaaagtgagaaaggctgccgttgatcatcagaaatatgtaggaggcgcaactatgtatcctttggagcataaccctgaacacggtatgctctgcaccgtgccgaaatcgtaatttgaaagcactggatcaaccttgcaggattagtgaatttttcgatgaagaactggtacaatctaacaaatggatgaaacagaaggtattcattcattttcgaatagcttcaacaactcccccattttttaatacaaattatgagtttttccataccatcaagtcattctagtttagttttcttgtagtcaaggggaaaatataggatgagattattagtttgacttaaatctgcattaaaaaaatatatggaaaaacaattctttttcttttattctagatgtggtttgaagataacagtgtctttttcattcatgtaacattattttccataacagtcataatctcgatatcttttgctgtgttacatgtggtgttgatttaagtccaaaacatttgtatcacatgtcctttaatttctattctagcttttatttcttgtatttcatgccaagtggcttgaggaccaccaattgccttatccagaaacttaacatttggtaatactttgatcctttttatattgctgaaaatttcataacatcaattcaaatgaagataatgacaattcactaatgggacttgaaagactcactatcttatcttctatgtgtccaaattcattctagtttcttttttggcaaaaatttagttgggtttgtgcttaaatctatagttgcttatatttttacttatttggtaatacaaacaatttacagtctctgcataatgaaataaaatagcagtctcatttaactttgagtgctttttagtttagtgccttgtatttttattttttatttataattattttttctaaaaaaaaatctattgatatgttgaatagtgcctttattatggttccaaattataatatcaatgtgtggaaagaattaaaaaaaaataaattgaggatttgaaattgaagtatgagaatgataagtttgagcaatgacaacgagtgtttccacatttatgggagggtgtttcttattgggaaacagctgttcataatgagctttatcagtcaaagtgggtgtctaactaaaatagtgaaatatttcttaatctatgtttggtagatgagaaaatgagaggagattaattttgtaagagaaaagtgaagggagagcaagatttgaagttgttcatagtctctaactctattctccacacactcaaatgcaccttcatttggtttttgaattatgcactagacttataattaaaaactcaataaatatacatactatccttaatgcaacaaataaataaagatatgaagacttgtttaactaataaaattagaatattttgttaaaattataatttatcaaatcctaggaaaaaattgtacatagtgaagagccttcttctcttttcacaaaatacaaatctttagttgtttatttatttttgttggggaaaaaaattgactagttcaatccaaaggtatataaattttttaaaaacattattttagtaaaatcagctatcaataccaaaaaaaaaaaaaaaattgtagtcatatattgagtaactacaaaataagatcaagaataattattcaaagtaagttgatcgaatggtgtaaagaaatagataaatgaatagaggataaatataattaggaagtttacataattaaacatgttgcttgtgatttgtgaatgagaaaaaaacaagttggacatcatgtatttaaggcatacaaataacgtataagaaggctgtttatgaatagggagcaaatttggtaaggaatgatataaataaggcatatgagtataagcacactatttatgaatatatgagcaagtttggtgagagattatgtaattaaggtgaatcaatattttgaagatagtgaagaataaacacataatttttaagagaatcgacaatgatattattttagtaaaaaaaaaatattatttcaaattaaataaatatagacaaaatgttatttactattggtaacgttgttaataaaattagatagacaagtattgttgatgctcttatatgataagagtttttactactagtcttttttttcgtacttcattatgcttttcttttaagactcatttggtaggttgatttaattcaatttttttataattggattagattagattgaattttgaggtttaattagatcggatcggatgataattttttaaattcaattattaattagattggatcggataagaaaagaaatattggattgaatcggatgtccacccctatatagatgggtgctagaacaccactaatacattttagtatttttgttcatatggaattagtcaccccctaacaaaacatagaatttttcactttgaataaaatttaaaaaaaaaaaaaaaaaacttcttcttgtcaaaagcaaaacgattgtcgtttttctcaaccaaaccaggtggacacgtgtccaattcctaaaccaatagaacataacattctctgtacaaaaaaaaaagaaaaaaaaaactaccacttcacttccatctctccaaaaaccccttacacactctctctcctctcaattctcacatttctcttctctctctagaaaaaaaaaagaacccttctaaatattcaattaaatttttctaattaaaaaactagaaagagatatcaatcaattgaattaaagaaaacccttcttttatcttgtttgttagagcattgagaaagttgaaatctttttctctcttttcttagttattatatggctgagttacagcccccggaagctcagatcaacggcgtcggagttggaataagtggagcagtaaccggacccctaggcggcggcggcggaggaggaggaggaggaggattacttgtaatgggttcttccgagactgttggatcgaagcgacaacgaagacctagcgtccgattaggggatattggaggagaccaatcgtacgattctcaggtccggcggagcaccaagaactggaagctttctatggaacatcaccatcatcaccataaccacggccataatcacaatcggactagtcgggatactgttaagacctcaaagactcgacctttaatgaattttagctcaaccggtacggacgaaggtctcgacggagttgaagagagggaaagagaaggtaatcttgaaaccatggctattgggagttggaaacttaaggaatcgaagaaacgaggctcggttgctactaaaagggtcagatccaattgggtttcttctaagcttgatgaaggtggtggcggcgttggaggagtagaagtcggagatggggacgagaaatacagtgccggagatgatcttgacgatgtgaatcgggatttcgaagtcgaaaactctgaaagccctttgaaagaacagagcccaattcattctcttgataatttggggatagatgggcatttgaatgaaagggaagtagtttatcatgggaatcggagaccaactagggttagggtttctgaccatcatgatggggtggaattatcagggccatcagatacagaagtaagggaatggaaaagtgggaatgggaatggaaatgggaatttaggattactaagagaaaggtatgttgaagatggtgtaagggtttggcttaatggattagggttaggtcgttatgctcctgtatttgaaattcatgaggttgatgatgaagtattgccaatgttaactttggaagatcttaaagatatggggattaatgcagttggttcaagaaggaaaatgttttgtgcaattcagaaacttggaaaaggattctcatgagcttttgaattttgaggtcaattgtttttctctctctttttgcttgttgctaaaatcttgtacttgaagaaggaaagaatgaaaatatataaatatatattttcagccattgcaatgtaagtgcatgtctgaagtgaaactagtttgagtcttcttttcttttctttcatataaaattttcccagttcactagtaatttttgaatgagtagtttctcttcttttgatcacttttcatggattacatgctttctttctttctttcttaggtatacaaaaagaaaagaggaaaaatgcccataaaacatataattgatcttataatctcctctgcatgaaaaatgtcttcagatgaatgtgttataatgattattgattagaagtacacttgtttttttgttttgaacaacaccattgaatattatcttcttcttgttattattagattctgttacaaaaattgtcttttttgttacctagttacataacttcattcagaaactgtattgtctttatctcatttaaaacatcagttactcttttcctttgcttattttcataacattactaatttgtcattgttttatgtggtgaggagacctgaatttgaagtttttgattgaagaggttgttgacacaattacaagtagacatgtaggactaaggaatctatctctttcttgtacccaattattgtgtttagtactaaagctgagattctcatcataatccactactcaccacttaaataaggagaatatctgaagatgtcacttatttcatatcaagttccctttggtgcaagaagttgaatttgccactaagtccaactttggcttagtaaaattgccattttacagtgttgttcatatcacatcagatttgtttggtattgaatgtgtaatattaccataatataggctattagatttcattccttctgattttttttttacatgtataaagaactttcattcattatgaacttttcagagttatgctggtcacataaattttgaggtatgattttgacatattgatattcaaggatctccataagaatagtaataagcttcttctatgttgaattggtttttcgatagacttattcttgttcttgtgtagttcagtctttctaatgttcgagttaagcgcaattcaccattgttattgtgttttttttttgtcccaaggttaaacaagaagccaagacaaggagagttctaaattaactgtgttatgcaaatttcaactttggagtattaaccaaaaagaacaataaagtgtcaacagtatagtgtgtacaatattagtgtgtaaaattctgagttcaaaataataatgtaatatgtgtagctaagaagtgccataaatacaaaattacaaatagtggaagaatgttgggagtactgacttgattggactacatatcttaaatgaccaaaaacttcactgatatatatatatatatatatatatatatatactatactatactaacaaagtactcctcgactatggttaatttt

SEQ ID NO: 218302 - DNA, 3255 bp, Cannabis indica
tttttttttacaatctgtgtgctgtgtgctatcaaagaatattattttcgctttaaatttaacatgaatatatatatatatatatatatatatcaatgtaaatggatcaaaacagcatttcttgcattttaatgctgctttaactttgcaagaaaattttctagattttacttctttctggggtttcaaaattgcagattccaggttggttgtaaaaaggctttactttggagattagagcttaattttgcatgttagtgtaatttaaaataagaaagaattgtgtaacaaaaaatggggatatgcttttggctttggaggaaactttcttaaaaagttcttttacagttcattctcggctaataacattttcttcaagttcaaactagttatgtttgaatgtgaaagtgtgatggagaaagtaaaataaagtgagctgtatggtaagatgcatggggttctatctcaaaactaattgacaatgagagaagtaactcatgcatcttacatatgctattatattcctacacattatcaatgtgactctaacaaataacgactaatatgtatttcgaagaagatagagtgtgtgtgtgtgtgtattatgaaagattattcttaattcgggtgtgtgtcacatactgatcaaacatttttgcttctttgcattacaggcttcctttctggccttatgccaagggtattattactgttttcctagttgtacaatgttttgctggtgcttgttacatttacaatcacctcattagatcaacttttttggggaattctctgatatggaagtttgaagaaaaaagagaggaaccttatgtttcaagtgaaccagagcactttgttcccgtggtcgaagaagatatcacgaatggtggactccacaaccccgacaagtttattgctgagcaggtaggcttttctgagcttatagagtttgatttattcttttagtaaatgaaattgtaatctatttgatttgtgttgttttcttacaagtaaagatgaaccaaatttgaagcctcagcaccaaggagtgtgcaaaatagtattcaagagtaattagtacacaattaactacctcatacatactgcttgatgaaaatatttttgtgttttgtctttggcagaaaaagcttgtgtctgattatgctttgcctgttattccaatcattcagaaggaatggtgctgtgccctttgtctgataagaacttcaaacgaaaataatttaatccaacacctcaaggggcggaagcataaggccaaagaagacgacctagcgctctacaaacagatcaaaaggaatggcaggtcttcaataatgatcaagaaaacttgtgttattgagaatcttaaccattttgcggtcaagttgctaaatccagttgcaagaccaatattttgtaaatggaaaaaaccgaattctggttggacaaaactaaatactgatggatccttagacaggacaactgctggtattggcggtttgcttcgtgatcacaatgggcaaccactttgtgcttttgtctctaaagctccaggaaatgatgttttctcagttgaattatgggctatatggagaggtcttgttcttgccgcgggacttggaattaaagttatttgggttgagtctgattcaatgagtgcagtgaataccattaatagacatcaatcctgtagtagtcagaaggttatcccctgtttgaaccaaatatgggagcttctaaagaaatttaacaagtataagatatctcactcatggcgcgaaactaatactgcagctgattatcttgcaaagatgaatcttatgggacatgacgtcgtttttcggccagttgacttcccagaaaagcttcacaacataatcaataatgatgctcaaggaaggatatatgttagaaataactggtaatctcctggatatagaaaaaggaaggtaaatggttaattttatggttgttgctaaagggcttgtgtatcatctacaaccatttaaagtttcttttctgaaatgttattgtactcacagaggagaggagtaagcagagagtactagcaggcattgaatttgaaacccttctgactttcattcttcttttttggatatggaaatggccatgtccatttggtgtatgatgagctaactgaaatgagcacaattacctcaacacactgaaatcaccaacattcttattttggtatgtaactaattaaactgcacttttgcttaggtttttaaataaccagctgagctgagctattagacttaataaattgtaccttagctatatactttgctagagtagtgaggccaaatgattatgagcaattgaacatcaatatcacctctcttttgaaaataatatatgaagaagatggtattaaaagaccaaatcaaaaattagagaacaataccttttgaatcttatcaagtgctatatatggatcggcggagcaaagtcggtaagactccaacttgactcgccaaagcagggcattggagcaaaactatatcttacgagccacaagtgatttaactattgggctacttaatgaatgtcatatttacatataaaataattttaaattcaacatggattaattaatgaataaaaagatctcatcttttaatgctctgattgtaaacaagacaaaattttattgttccaagatttttcattcaaactcttcctttaaatattttttaacttttcaaagttttttaagtgttccaataatatttaagtcaataatatatataacaataatagcagacccaaaaccttgtcttcttatgaaaactataagcaaagagaaatttggttttagtatgcgtaattgtaaaatatattgttttaatatcccactaaattagaaatagtatatatacttttaatatttttttctctaaaaaatacccttacatttcaaaaaaaaacttctctctttctctctggcgttaaccccgacccagaaccccagtcgcaaggcctcaacgtcatcttctctcacggcctctctcgttttttacgtttctttctactagtttttgggatattttacgaaatttagcaatgtatttgtaatgatagaacaaatctgagattaggatgaattttagcaatgatttacgatatttagcgataatttgcgatatttaacgatgatattagcgatgtgtttcgcaatgtgtttcgaaatattctagattggagacatttagcatgtttcatgatttcgcg

SEQ ID NO: 218303 - DNA, 7143 bp, Cannabis indica
ttttgacaactaaatcaccaattaatataaattaataaacctgtctttaagcactgagaagagatgatctgcatggaggatatcataagatcttggatatgtactgaaggattcacaccaatcatgatatatcccgatcaaaccgcgctcgtagattattggcagtgtgtcaggagaatcaattgggaccacattcatcacccatattttcaaatctttaagtgcagcagcaaatctagaagcataaaattgagatagcagacactatgaataagaaaagaagatctgaggatgttgctatccatgacataatttcagtttatcattttaagttacttggcatcaaaactagcagttatccttagtgccttcagccactgaaaaaggataactatatagtagctgagctagctcacagttttagtatctccgttatctactagtgcaagcaacaggattgtatatgcaagcataaaatccgttagctcacggttttactaacaatgtagtctctaaaggattgtatatgcaaacaacatcaatggatgtttttaagaagattacttaccctccatatacagctttcatgtccatgacattcctcacagaggaccagctgattcccattccttccaagtaggtctgagagactacatttttccagtgtttatagtctgcagcaaaatcttctggtgcagctttgccataaactcccacctgagaatttaaccaataaggagctttttctagtcttgaaggccattgtgcaggccaccgagatccacgctttgattcttcctctggcacttcatgcatgcatgcctcgagtggcacattcctgctcacacatagtaaaagcagcctcagaagatagaacatttcattttctcgcagatagaaggttaactgcattaaacaaagataataaaatatactcagaaaaataccaggctgcattagggtcatcagattcactgcatagtggaggctcgtttcgtgatctatttgaatagcactcgttagaaatgggctttctatagattgctgcacccactccgtttaatctgtccttattaaccacaatcagatcccaacacattgcttttgttaatctggacattgctgttgtaaatttccacagaacaccatatatcagaagaaatccagataatcccatctccataacaaatatgcatgaaatggaaagtactgtacctttccaaatgccaacatcttcaggaagcttctgataaacaggagtagcagaccaaacaaagtaaccaccaggtcttaagacacgattcagttctagtaaaagtttaccgcctgtaatatcccacttatatttattacactttttgaattttgaaaaaacaaggtgactaaagaaactcaatagaatctagacatcaccttcaacatgccaaggaaccctacagcgtgcacagtggataagatcaaagacagcaccagggaagggtagtctcttggtacccatgacagctgatatagcagggatcccacgttcgagagcaaactgcacttgtgcttcatgctcatccttgggagcaaacgacattgccagaacatctctttcaaaaaggtaacctccaaagctggccaccccacaccctacatccaaaaccacacggcttctttttccccaagcaatcttagggagagactacaaaaccaccacaaaagcataacttgagtagtaaatattaatgaagataaggacacaaattacatgagaagaactcaaaaatgtatgtgatacaaatttgtcaaatttctgagcaggactaacatattagatggaacttcaagtactcaaaaagctagactgatcaaatacgcaacattaatgaaaatttaactctacacaagtggaaatttcaatatatatttatatacatatatactagtgacaactccacgtgcacgcgaaacaaatattatgcaatcaaacttatggtataattgaaaaaagaatcactatattagttccgaaataattaaaactcaatttacaaaaaaaaaaaatagtataactcaaacatgccacttataaatccaacaaaagataatatctttagtataaatttcaccaattaggttattatatttggtgtgtttaaaacaagtcacatattagtatgcagtatatatgaatgaattaactaaccaagcaatatgtatagttttagttttggaaggaatgaattgactaatcctattgtgaactgtacactttacatttttaacaatgatacatcttgtaatgactttatgatccaaaaaagaaaatatttcaaggtctccaaaattcatatactatggccataagagcagctaaatacaatggtttcttgatcttggacaatgtaatatatattatatattttagtaaaaataataatcactatttataaaaagaacgtgacaagaaaaaaaaatagtaatacaaaaataaaaagataaagaactcttagatttcatcaacagtagagattagtgggttattatagaatagataaagaaaccccagcactcttcccattcactctctcaagatctcacttgtcgacagaagcatattgtttttattttctaagattatacactataactttatttatactttttattattaagcagctactcgaattaattcttaatctaataatcttttttatctttcaatctctctgtttatctatctcactcattatatttctgagtttgaatctctctgtttatctatctcactcattatctttcaatctctctgtttatctatctcactcattatatttctggttgcaactgttagagcaaatgagtgtttaattatgaatggttgcaactgtagtaaatgcaactgttagtgcaaatgggtgtttatgaatggttgcaactgtagtaaatgcagctgttagtgcaaatgggtgtttgtgaatggttgcaactgtagtaatacatatatttctgttaaatgcacaacaaaaaaaaaactagatagacataacatacacatacatacactctccctaattcatatcatgctgccattcttttgagcaccaatcgctaatcatgaatgtaaatattttacaagggtaaattaggtattggaggaaagtaaatgattgaagatttgttttttgagtactgtttctggaaaggatccaagtggcaatcaagaaatgttcataagatagtgactttaaaatcttagtgaagagatacactatatcattcaaattacaaaaacgttttgtacaatttgaaaagaaaaattttatttgcacccccaaaaatttataaaacactattttattattttattttgtacaaaatatatattttcaatatataaagccaagtcagtccccttttgtctacaccagaaatactcaacaatatataaagccaacactaatttatctatgtgatgtttcaactaggaataaggagaagtaattgtttttgggctccaactcaaccccagatgaaaattcaagtcaatattgtctacctcagattcaggggaactatgaaaaaattagttcaacagctctttctgatgatgaaaatcatgaaaacatgttcgattctatcccagtcaaggggtacttgatttgtggctcaaactcatttgctcaagatgatggatacatatacatatagagacagattagagagagatcacgtgaaaatggacttactttttgaatgaaatcaatgtagtggagagcaccattcttaaactgggttccaccccctggaaaggtaaggtattcaccagttactttaacccaattctgatgccccttgacttctgcaagcttagtgtgaggaacattgtggtaccaaatctgcagcattgaccacaaaaacaaattcaaacttcaattcgatacaaacagtgttattcacttatttagtagaaatatcatgtaccttgtccctgcttgcaggccacttgactgggcgtttatatccttcaggtagagcaacaagacaagtgggagattcatcagggcagtgccgttctcggtgttcatagtgctttgtgctcggaagctttctgataactcgccaattgtccagacaagggatgtagtcaggccctgccgtgaccttacaaagtttccaatcatagtcattttggttctgagacgtggaatcttgttgtgatttttcttgttctgattctacaacttgagttgaccacgccccattctcaacattgcgctcctttaaaagttctgcagcatcactttgttgtgaatcagtctcctgatttttctcatccttctcttcagtcgaactaaccatttcgtctttctgctttgtttgatcatcatttgattcattttccaccctcccatcagattcagcttgcccaccttcattagtttctctactgacttcttcctctttttctccagtttctgagtttgaatctccattaactgaattagcattgtcatcttcagaaactgttttcttttcatcaaaaccattctgagattcattcttggcctcagcttcttcctttgaactcgtttcttcttgggtttccacaacagtttgagaatcaaccccactgttatcagttgcatcctcttgtaagtcaccagaactatcttcaaattgcttagaattaccatcatttacgacttgtcgttttacctcattcctggtctcatcagattcggattgtaattgtcgatcctgaactggaactgctgatgacataaacatccatattccaactaaacaaaaggcgacaaaaacgactatactgacagttgaacagtaaccagaagatttcttcccttcaccccgggaatacttccctggagccatggttttaagctaagagtttgtacacacacctggaaaaaggggcagtatgcaaaaatctcagctatactattgtacccaaaagtaaaacaaaatttatcactatctaaaacttttgagtgttctgctcaaaaaaaaaaaaaagaataataataataaaatagaggttagttcttttaggaatctataaagccaataaaaagcctagcttttctttacacttgacacagagaatccagatctataaccaagatctgggtgaaaaaaaaaagatttgactatgcggtgttgaagttaactgttgcgcttcgaagcactcaaatgctcataacaataaaactatttcaaaacaaaacgaaatcccgcaataaagaagagaaaagaaaaagagcatgatatttgtgaacaagaaagttcacagaaaaagctagagtaaagaagaaatttggttgcgaattcaagaaataccctttttttttttccttttcactaggcgcttcaagatgacacctttatcagttcatcccctctcttttgcttttcagtgatgaagtagagctttgatgagcattggtttttatagcttaaaatgtgttagatttatattccttattttggttttattatacagtcccactccaacataaaactgaaagggacaacaacgtgatttcttccgctttgttgtatatattattacagcttaaggttcgaaagaaagaatctgtggtgtgttggtagagtttgttgtagtaggaggtcctaaaacaatgatagtatgataccaatttttgggttgggcggaattcccatcatttacccaattatggttgcatggaactttggtgataccccatcaactttgtttcaagcaaaaaataaataaataaataaataaataaataaaaactttggtggtacacatttttccatatccttattttatttttcagtaatttgcaatacaaatattaaaattttgttataaatgaaaacattgcggtaaaatctcaaaaatttaacttgttagcaattaacctctaaaatttattttttagtcgtaaaattttcaaaattcgtgttttgttagcactttacaatttctattcattttcagatgttaagtatcatattagattgggtaaatacgattttggaccccgtgttttacaaaagttaccaattagaccctctattttgttaaatgacaaaatggatcctgtatttttcaaaatggtacaaataggacccttaatttaatttttgacaactttttttttaatgtaaccaacttgaaaatacgaacagatacagaaactgtaaatagttttgtcataatacttttagattgaattattattaaatttttttttgacaaaaaatcagttcagggttttatttttactattttggaaaatacagggtccattttgtcatttaacaaaacagaaggtccaatcggtaacttttgcaaaacacagggcctaaaatggtatttaccctattagatttacacaatacaatgtctacatgaacacaatgtacacataacacaaattaattggtccacctaatttaattatttaaaaattatacaaattatttaaaaaaatattaaaaattttaaaaaataatatttataataaattaattaaaataaaagaataacaattaaatttagtaaataaataaaagaataaaaataaaatactaaaaaagaaacaattatccttaaacattctcatctcctctctcgattctgcctcttctcacatccgttcaccttctctgacctagatggataccgacgacaaaattgattggccccgaaatcggttttcctccattgatcttacaaattttgctcttatacactaatgtgtattgcttataacaacaaatttattaatatttttttattttattattactagttattttagtataacgctaaatacatatggccgaccaaaggtggggcagtcgggacataggccccaaggcccaccattttggaggcccccgaaaattaaaattaatttatatttatatatatatatatattttggttcaacaaacttcttaaaagtgatatagcacaattggtaagagtaagtgaaaaaaataatgatgttgggtgttgggttcaattcttagctcacaaacattttgactatttaaaaaaaaaaaaattacttagtaaggatttagatatgtgttggggttttcttatttaaaaaaaatgaaaataatataatatatatattt

SEQ ID NO: 218304 - DNA, 4736 bp, Cannabis indica
tttttttttcaaactttgagacagatttaatttttatcttctaatgagtaattttttttttaactttgagccaaatttatttcttatcttctatagattatgaaggcataataaatatgtgtgagaatactattttaatttaaatttaaatggtttttcaattattataattttttttagtttgccttaatggatacctaataggttctccataatcaatgggtattcccttacattgaattcgctggttattaaacggggatggggcgaagatgggagcgtaaataggtagcggagatgggggcgcggtttgtattccgtgtacattaaccgccaattttcattcttagcacctattctttaggtgtgagtgtatagcagattgtgagtccaagctctactcggatgggtggttattagatcttatcaatcatatatgaaggtatccaaaattggattcgtcggtttaaagcaagtgagctcaagaaagaagattacatatattaatggtctttaaatgcaagtgtatatactatatggaagacaaggaataaaagtttgtggcatcatgacatgaagaagttcctacaattaaaaatacaattatttttataaaataaactataattaaaagattaaacatattgagaaaattgacaaaaaagataggggctggtttgctttgatttgtacagaaaaatgataaatgttgatgtttgtaattggttccagttttgaagtaatacaattatctcattttgtttttctaaaaaaaaaagacgcgaaaagctttgacaacaaaagtaattaattgggagtatatcaataattttaaatattacaggaacaattaggtgtggtaaaatatacaataaaaggacatgattggttttaataatttacatctacaaatctgggaaaagtttaatctagatttaaatgacgaaattattgaacaacagcaatcttaatttttgtatttatttttcttctgaaagtaacttatttgtgtatttgaaagatgtttatttcttcttaacaatatagaaatgaaaaatgtttaaggagtttagtaacagtaacagtgaatagataagagagagtgtacagaaaccgtaccttatgttgcctagcctgtgagagagtcctatcaagccgtttctcaagattttgtaattccttaagaccaagctcttcaagattctctccatgaaaatgccttcaaatgaaataacaacgacaattgcttttctaataagcgtatgccaagataatatagccaaaaataaagtcactatctacatacgtacgtactactccaaaactgaaaagctgtactacaaaattccaatgatgaataagttacggcccaaatgtaaatgttatcagatttaagcatatatacacatgatgacacacctttctgtacgctgaagagactcatatttggccttcagttttggaatctccagtattaggttctgcttgaaaataatacaattaatatattatcccataaaactaaaatgatttatatgaaaaaattgctaccttttatgaacttcgtacgtagtagctctcattggtactacaaattaccacggaatacatagcattttgaaaacttttcgaattagttataggactaactcaacagtatacacacacgtacgtgtttgatttagcctaacagtatatatgactaatcttattattattccattattatatatgtaagtgtaaatattattatatacgtacgcttataccaactgtttatgtatatgtatgtgctttaattaattttgtgaccgccccattattagatcattaggccttgcaaaatggtatttcttttctttttttaatgtaaaatataatgttcaaatcgtagaatttttcatcatcaagataattagataataataataatatttttgtttggaaaagtaataataaagatgttagtatattgtggattaattctgggattaaaaaaaactttataaaagagagtcagtgtgtatatatataaatatatagatttatatatatctatattcaaagtaaaaatataacttgaagatgatgataaattaaggagacgagtaaaaaaggcaaacctgtggttcctcgccttcaacattgttgttttgtaaggcgtatgtactctgcctgtaccgctccacaattgtattcaggctgttaattgaaaagtcatcaaattactattatataacatttttatgcttctaaatcttatcaaatcaaatactaaatagattgcaaacaacaaagaaataaatttagaatgttggttaatttaaacatggaaaagcattatccaatcattgtatttacaatgaattttttttatactatatatatttatatatggaaattggttttattatttaatttggctgcttaggtagctcgctgtaattggtgaggtgattaatgaagaatttttctgtgactaaagaaaagaacactgcagaaatttttttattttctaaagaaaaaaaaaaaagtgtgttaataagaaagactttcattgtgcacgcagatcgactttaaaatacttgtgcaaaataaataaattagaaaacgaactaaattcaaattaaaccaaattcaaccatgaaagtagttgataaatttgatgtactctacaattttgtatcgataaaggataaaattcaagatctatattatatatataggtatatggtgccatatcactgcacatacatcagaacacgaaacaagctcttgctttcgaactattaatttagagacagaaaccctaaaaagaaaattccaagcaaattggaatatataacggaaaatcataaaacccctaaaattatacatttgaactattatgtgtgtgcctgtctgtaacagctatagtgaccattcgtacacttgtaaaaataaataaatgataaaatactgaaaatgaagagaagcgtgttgagcactgcggtggtgtattaattgtcagtaaatcggatcatggctaactgataatattgatttcatccatatatcagatgattttcaatgttgaaatcagatcgagtcagctaataaatagaaacctaagatatcatttaattacacacataaatatatatatacgtaattatatatagatggagagaaaaagagaaagggaaatggtatatatatataaatatatttatatactctgaactgccaaactcgtagagctttccacgacttgagaaaatgatgagaccaacttcagcatcacacaatacatgaagctcataagctttcttcagcaaaccattcctacgctttgagaagctcacttgcctgttgatcttgttttcgattctttccaataccactttccctcttcccatcttttcccacctctaatcctaatttggctctcctttatcttatgctctatttggttttttctcttcttttatctattacaaatagctgaaacgtatatatatatatgtatatatctatacatatatatgatgtatattccaggttcctattaattatttgtatacctaattagcaattactataatactgttcagaaatggaagaaactgtcaaattattactgttagaaaagtatatatatattatataattaatatatatttctccttccaacacaatatatattgtctttttttttttctctttctctctctatctttgtaaaaagaggttatacgtactagcatggacctaaccctaaagggcttcttttatttacttttatctccttttggctcatggtaacagtgctttgtgggacgaagaaaactgtttacatagtttgtactagtttttttttctctttcttaattacttttcattaatttatggagaagtgtacatactattgtaatatatatgagtgagtgtttgttgggtttgaatttgtacataatgataaatgatatcacatgtactccctcgtgggtttagcttatagcatagctaataataataataataatgataaacagtactctccttgttgtggaagtgtggttgtgccatggctgtaacaaaaacaaatcgaatgtgtagagtctctgtcaacactctcatactctcgtacgcgtgtcatcagccaattccaacgctcaagagaatcaaatagcttggagacctacttttcagcttaagcccaataagagtctgacaacaaacccactttactattcataatagtacaatatcataatatattatgtatgtactcttttatcttctggccccccttccatacctaactcgccccttatctcctctccctcatttttcttcctccttttctttctttaatttatgttaagagtaatttggggttctttcggctgaaaaaatgataagtgtaatataattatgtgttacttgtaaattgggtatcactcaagtcaacccatttctttagagacctttcaaaattgagattatattttacactcaaaaaatatatatttcatatttaataaatcaattatattattatgtatgaattaaccaaaatagacattttgtagttatctaccacctttaacagtaagtctaacattaaaattaataattattattaactttgtcaccctgatactactactattttagaatacacacatatttacatataggctaattagtaattttttcccccgaactttaacatgtactaaatcgtgcctcct

SEQ ID NO: 218305 - DNA, 2190 bp, Cannabis indica
tagagttcttaattgcaccactgatatcacttaatgcaacaatctttccaccaccttcatggattagcttagctgcccaagagcccacatttccaaacccctagaaagtaaacagtaattagataacctttatggacataatcactcagcaatctttgacagacaaaacacatttaacaaaagggttgaattgttggagattatatcaaatgtacctgaataacaaatctcatatccttgattgacttcccatattcagcaagcaaagcttctgtagcaaagacaacaccgcgcccagttgcagcctctcgaccaagtgagccaccaagatcctgaaaccccaaattataaaaaattaaaaagatgacttgataaagtatcaatgaacatttagatttcttttctagcgtccacttacaatgggctttcctgtcacaacagcaggtgagtgaccatgaaacttggagtactcatccaaaatccatgccattgtctgcaaaacataatgtcatatgtgtcaagagaaacattccaaacaaaggtaaacaatacacaacaacagtcaacagaagtgaatggataattcctattctcctatacctgggcattagttcccatatctggtgctggcacatcagtatgaattccaataaggtcatgaattttttgggtaaagacacgagtgagacgctccaattcactcttactcaactctcttgggtcgcacccgattccaccctttgctccaccatatgggatgtctgctacagcagtcttccaggtcataagttgggctagagcgttcacttcatcagggtcaacctataacattttaaataaacaaattacatcacttcagtattatcaaccaaagaacttcacgcaatataatacttgcacaaatgagaaagtaagaaaataacaaaaagcagttataaagggagattatttgtttctcattggtatattatattgcaaattaatcaaacagagcttttaccattgtttggcaagacatggttggatcaatttgaaagctacaaacaatcaaaatttaacagatatttaacttggttgttgggtcaaaatcaaagacccgtacatgactaaccctttaacaaggaaaaaacaatttcattacaacaagttatattttgtcttcatatatgctttttgtcaatatgatattaatttcagcaatcatagatagacctttttctctttttgttttctcttttgggtatataactttatgcgaacaataaaaaataaaaataaaaataaaaaaactcaactttacattctaaaattgcacaaaacaaaaataaagattaatatcaaacagagaaaaaccccatcccatccgccattaaagatatattcaataataactgaatgtgaaagtttcaataaataatcaaattccctgaaatcccaaacccataaaaaagaaggaaaaaaaaaggtggaatttttgaacaaaacagacaaaaaaaattgagcagaataaaaaagggaagcacctcagggtgatatctgattcctcccttcatgggtccacgtgcattgtcatgttgtactctgaatccaacgtacgagaccaagcttccatcatccttggggatcgtgcattccacctgatccgtcggaataaaaaaaaaaaaacaaagaacacgtattggtcaaacaattttctcaggaaacaaacagaactcaaagatagggagtactgaataaaaagtgggaaaccttgatctctctgaatgggatcaagagacttttctctatcttggagtcaagaccaagaagacgcgccgcttggcggaagttacggctcgttgcggcgagggcattcatggctgagtcggaaacacgaaaagagaatcacccgtccacaaataataacaataaaaagaatacaagatacccagaaaaagttctgagcaaaagaagtaattataaattaggatagcgatccaatagtggaaaagaggattcgagttagttgagaaaaaacccgaaaaaaaaaatattaaaaaggggaacccaaaaaagtaatgtgggtttaggcctaacgaaaaaacaaaggttggtgtgtaatgatgtgagatgagttacgaagttatatatatataggaattagtgaaggtgctttcatggcgtcttggaaagaaaaaaagataaaaacag

SEQ ID NO: 218306 - DNA, 4741 bp, Cannabis indica
atctcaatagttcaggaggaatttttaacgactaaaaaagttcaaaaggcatgatttggtatatgttaaagtttggggaaaaaattactaattagcgtgaaatttattattgaaaaagaaccaattgaagtgtctagattagatcaactaaatttatattatgtagcatgtatttcatgtaataaatagttgttctagtattttctgatgaatttgcttgcatgtcatcagtattaccattacaccttttactgtatgaacttgtaaataaaaaagataggacttataaaccttctctctctctgaaaattctcctcatttcaatagagaatatgtatcagcataagtacccaattatccatgcgattgaacttcaaagaaaataatcaaaagaaacgttgggagttacaaattgagttactgtactcaatttaataacaatggaaaatggatttaaataaaatggctgttaaattgagtctttgaaactgctacatgtggtctgttttttatgcaggaatgtgagtctgaattgccagaaaatctatcagatttcagaactcccccatcacctccttcgagctacgataaccaatgcttaaacgaagatgactttagtaggcctccaccggagacaccctctcaactacattctacaattctaaatattgagccatctttaaacgatggtcagcacccgcaacacacagagttgaaccatttgtacattcaacaccaatttgatggtcagttcatcgcacttggttccacgcgtagattttgccaaaaatatgttaggatggtattgtacaagcctgttagaagaacaaattgattatggtttggtgggagtaaatttatttgactgtgataatgggatataagaaggttttgtggttatggcttaaggggttttggaaagcagtttgtgtaagtaatggtaggactttcttttccaatatacttcattaaagcgatcatttttcatgatcatgaaattaagtttcagattcctgtccaaagaaactagtggttaaaagctcatcttttcaaaaatttatcagaaatcatatcaaatcagatgcaacagaaagtagtaaggcccaaatatctattcttcatccccctcatttaattcaacacattttatgcatcatgtactcttgcaaatgaaatttatagacaaactacaagataatacattaatgtattgattcattcgtatatgagaaacggatacatatatacatatctgaaacaagtgtaggtgtagacaaaaaaatccattgaagatatcaaatggtggcaattaaggtggttattaaatactaaattagaaaaactcatcatgatggctctgctaatatttttggtgctgcaattctaaccaactcatctaataggttagttttttttttttttttattaaaatgtcaattttattgaattaattaaaaatgctacaaccagaaagaaatcgagcatgcttaacaacttgatttgctgatcgtttaataaaacgtaaatgtacatcatgtagagaagacaataaaattgacaatcttgaatgattaagccaaaggtggaggacatttcttgattacttcggatggcttggactgtaacaaactatcagattcaatctctacattatgccaatttctactcttgatccaactaagagcttctttgatccccaacgcctcaaaaacctcagccgaatatataccacatttgtgggctattttagcttcaattagttggcccaggttgtttcttgcaacaataccaaagcagtaggaggtatcttgatggaatagagcagcatcaacattaatcttgatgtgatttaaagccagttttgtccaatgctcagctcaatcacaattgttttcgaaagtttatgacaatagagcatgtttatcctgaacttttctccaatagtcaagagtaatagatgcggagactaaagtatcatttacggttgaatttcacttgttccaaacgacattgttgtgagctttccacaccgcccaacacaccatagcagcacggcaaacaacatcagtagttgatgcactctgcaatgtctcaaatcaactaccaaatgttgcaatagcagccatgttaatgggaaaactgaagagtgcccaacaatttttggcaaaccgcagatgagcagtgcgtggtaagttgtttcagcatgggattgacacacagggcagctagctgaaatttgcacatgtttggatacgaggttcacacaagtggggagggagccagatattgcacgccataggaaatttaacattttgggtgtcgtaacttacgccagaaaccagagttgttaagcccaggtgttgctggtttttgtttctatagcaatgagtaggcgctttggacaaaaaaatgacctttgtgatcaacagcccaagaccagaaatcagtacctgttgtgttacccaaaggaatgccaagaatcaagttggcatcacgaactgaaaacatgtatttaaccacatccaaatcccaacttcggttattaacatgaaaatagagaactgaccattgattatgcagtccaggatgtgtagaactaatgaatctatacttagggtttggcagccaaggagtaccaataatattggtggttttaccatcaccaacaacccgcaaagcaccgaggcgaaccacgttttgagcactccaaatactgcgccacacaaagcttggattattaccaagttcagctgaaagataatcaccattggggaactatttgactttataggctctaccaacaagagatttgggtttacacaataagcgtcacccttgtttcgcaagcatggcaaggttgaaatcatggagatgtctaaagctcatgccgccatcttctttgggggaagctaatctatcccaagacatccaaataataccacgtcctttacttgagctagtcttccaccaaaagctggccattaatttctcaatttcagtacaagtgcatagtggtagaaggaaaacactcatagcgtaagggggtagagattgtatgacagttttgaggagaatttcctttccagcacaggataggaattcgacatcccaactgtttatccgagcaatgattttattcttgataaaaccaagcacgacatttttattacgaccaataatgttggggagaccagggtacatactgccttcaagagcttcgatcatatggaggatgtagcaaacctgagaccgagttagagcatcagtgttagggctgaagaaaattgaggatttggagcgattaaccttttggccagaagcttgttcaaaaagctggagaagtgtggaaatactgtcagtagcacctcttgtagcttggaaaaataagtaattatcatccgcaaagaacatgtgtgtgatagggggcgcacgatgagcaacacgacacccttgaataagattgttggcttcaaatttctagattaaagtcgaaagaccttctgcacatataatgaaaaggtatgttgaaagagggtcaccttggcagattccacgagacggctggataggctcaacacatggccaccgtgaacaactttatgacggactgttgacacacaagtcatgacaaggtcaatccatctacccacaaagcccatacgatgcatgactgctcttagaacatcccattctactcgataataggtcacccgatcatttccaacgactcccatgaaattcataattttttctattaaactgagtcactggtcagccttcatagcatccaggcttcccaaaaaaactggaggctcttgcttgcgaaacctctcatacaatggctccatacggtggccaataataggttgttttgttggcaccattggaaccaaagccatcggcagttgctgcggaggcactgcaagaggaccctgctatctcagcctctgaatttgttcatcttgctggaggattcgagcttgcgattcttcaaacctttgcttccaatccaaaggagcttggggtggattctcatgtctaccaccttgaaacctttcacagcctctgtcacgtccacagggattcgggggattttgacctccccgaccgcttccgttctcaaccatgttaccctaactccttgtatttcactaggcctccatttaataggacttagcatgcaaacccatgagtcaggtaggtcagaaagcgatcacatactctatgtatcgcactttatggattttaaggcaatgcatttaaataaataattataaactattatgctccctaacatgcttttctaatttactaaataagtaaaaacttattaaaccgtaagtcgagtttttctctgatgatgattgtacatgtcttgacaatgttcggtagacaaacttggtggctctaatatcaaaattttaacgccctaatacataggcgcgctatagtgattttctaattattgtgccacatttgataatcaaagggttttccttgataatcgtgccaaattaaatttttgatttaaactattaaactttataaacatatacattttataaatcggaatctcatgtttaaacttttacagtcataatcaaaataacttttacagatatgtcgcacagtgactacaaaatacagcctaagtcgtcccgagaaaaaacactccgggtcgtatcaccttgacatgtacaatcatcacctaagcttgaaactcactgttgttcagctttcg

SEQ ID NO: 218307 - DNA, 6950 bp, Cannabis indica
ataattcagttgttttccgtagcaaaaaaaaattgactctttcatcttacaattattttatttttcgttcaaaaatctatgtttacaatagagaataaattggattttgtcataattaacaatattaattttgcatatttgaaattaaatattagttctttatctcaactatgtatcaagaagtcattggctgcttcagtcatgtattactgtattatttaaaattttaaacgtataaatattactgctcaaccttttatatatgaaacagaaacttattagttattacaaatccactagaagaaaacaaagaaaacttggtacaaccaatggaaatgcttaaaataaagacatgataaactaattcatctgcctccagatgcaataagagagcagatgacaagtttaaatatatattctataaaactaggtacgaaaagaattgagaaaaagtatccaaaacatgttgcggtccaatgtgatctactacaagaacctacaaaatattgggtttccaaaaatacaaaaggaggaatagacagcaactagtatgcgccccagaaccaaaaatgacaaccctaacaatagaattaatccttatggccttctaagcaacagaaaaataatgagataaaagctaataatatgtaatactaatgttgtactgtgggtgtactatgaagtatatattatcagctaatgcaaaatgcaaaagttgctcactctgcagaggttttcttgtttggttcaaaaacaaacttaatcagtgcttccttgattggcagcatttcagggaactcgttgctcaactttgatgcatccaactcgttgttgcttcgaggggccacaatcaccttggcttgctcttctagagtgaagttttgccacttgaaatcagggtcaatgtatttttggtacatctcaagaatctcattgtggcttacaactccaggatttgtgaagttccaaatgccccttaggttccgcttcgccatctcaatggaaatgggtagaagttcatccaagatagtcatactgtttggaatgttaaccaccttgttgtaacgagtaatcttagtaatgaagttccggggattattcagatctgatgatataggcattctaactctcagggtgcagacattgtcgtattctctcaaaagctcttcaacctgatgacaaacaaaataacagttagttttagcaatggaatcgacttctaacgggaaaaggacagataataattgcagataaaattaccatggcctttgtttttgaataaaatgaaccaatgaaattcggtttgtcctcctccttgaatccaattccagaaccttctggatgtgcagcatcatactcaaaaatacacccagtggcataattcatcagtaagagcccttgttctctacaaacatcggctatggtcaaggttccagcaacattggcacgaatcacttctggtttatgggattcacaccaatcgacattgggtctaccagtcacacctgcggcattgaatacatgggttggtttaacattctgaagatctgccaagagtgatgcccgatcttcaagtcgcccttttccatattcaaatggaatcccttgtttctcacatagctttccaagtagaccacctatccaaccagtccgaccatagatcaaaaatttcagtgggggtttgcgaggagagttggtgcttttggtcggtggaaccaacatccgagtattacttgagacataagattcagatttgtcctcttcagacccatcaaaatgtctctcgagtccaccaggcatcattagcattcttggatgtggaagcagggcccctgaaacatcaccccaccattcaggattcttggtgtaccattcaatagtcttctttaatccctcatcccaggtagttctttctgaccatcccaagtttgttagcttctgatcatccagaaagtacctctggtcgttaaaaggtctgttctccacaaactcaatgcacgcatcagaatcaactgagaaaagtctgcagatatccttagccacatcaattaccctcctttccttcttagttccaatattataaacatgtccaacctctcctttgtgaagaatgacttcaaaagcctcagcaacatcctcgcagtataaatagctcctcacattagagccatcaccatgaattggaagaggctttcccctcatagctagaaggatgaactttggaatcaacttctcaggaaattggttaggaccatacacattgttcccacgggtggttatcacaggtaatccgtaagacctgccatatgccataacaagcatttcagctccagcttttgttgcagagtaaggatttgttggtaggagctgagaagcttcatgatttccaacaacagcatcctcgtcagtctccccgtatacctcatcagtgcttacatggatgaacctcctgatctggccagtgactttgcatgcttcgagaagaacatgagtgccatagatgttgttcttggtgaactcaaaactattaccaaaggaattgtcaacatgagtctgagcggcaaaatgcattattgtgtcaattttctctgtgattaaaagaaagttgacaagatcagcgctgccaatgtcacccttaacaaacttgaaatttggtgatgattttgaggggaggagatttttcaaatttgagcagtaatcaagcttgtcaaggacaacaatcttgtagtcagggtaactgcgaatcagccgattggcaacatgggacgcaatgaatcctgcagccccagtaatgaggatgttctttggcgtatatgtagccatgtcaatgcagtttctgaggaaatgtaagaaatatatcgttagaaaatataacagcttgtatcaagatgtgcgtaaataaaccagtgacaagactgaccaaatatgcagtttcaaagtgaaagtagtgtacaataaaaatggagacgaagactatttcaaaacccagtaattaagagatcagtaaacctcatttggcagttagaaaaccacaatagtttttccaataataaaaacaatataactaagccagtcacatgtcaatacggttcacaagatttcgatactcaaaaagtcaaactaataagtatacactgcataacaaattgcccaaaagacttacttatcaacacatctaaaaagtaaatcacatgaagtctaattatttctttagctcaatcccagttaatcattgtaaaagcaaacaaaagacaaaaaacccgaattcagtacaaacgaaaagataaaaaaaaaatcatcctatgccaccacagttcaaaaaaacatcagatccttgaagacttaaatcctatacgaaatttaaaacacctttttgcaaagcacaacaagatctgaatcccaccgcgaaattcaatttcttattctcaatggcacagtccaggatccagatcaacaacaaaatgcagtgcataatttaaggaataaaatatcacataccaaatgcaaaattcaacacactttatcacagatctagcagaatttacgaagactcggatcaaatttaacttcaaataacgcacacaaacacatcctattcactcgccgacgaaattcagaaaatatataaagcgataaacttacaaatttgacggagatcaaaacggatcaaccccagattgggagaaacagcagagaaaaaatctcgaacgaatatctaagatgataagactcagacagagaaatgaatgagaaaatcagaggactctgattgcagcgagagggaaaatggtgatccgatatatatacgcctccgtttttttctatttttttattttttttcaaaaaagaaaatcagtgagacagttaaggagaaccgtgtaaagattttaaatgacgaaattacccttgtattaggagtcattttacatgtttacacggtttgtgggcccagggtgaaatgggtaggttgggggcgtggagaattcctttttctcagcgaagccacacgctcctcgcggcgcgccgctccccactgagccacgtgctatcacgtggaaaccttttttattattattattttagtatgctaaaagaaaaatattgaggagtgtctcttaaataagaggttcacatttcaaatctgaaattagtgatttcttataataattatctagctaattttgttcctacgttatagtcactatcttatttaatctctaaattaaaatagtgtaactgtaatgtattagaattgtaaaatgatagaaagctgtgaagaaaaaaatagtgagatttgtatatttgaaattgggagaatgaaataatttgattttattccaatataatactttattaaaataagaaaaaaaaaaaaaaggaaatctaacctgatcatgtatttactaaggtacaatttttccatattgatgatataattaaattaggcacgacaaaagaaagacaaagacaaagacatagacataataaggtaaaacaacttagtttataatttaggtgaaacaaataaattaaacttttatttttatttccttgtgtgatcatataataatctatttactatgatttcctaataattaaataaatacaatatatgagctttcactatagaaaaaactaaacaataagttaatattaaaaaaaaatacttactgcacattgcataaagatttattagttcaaaaaaaaaaacatatcatgcatattataattatataaacaattctattgtacaatgatgattctaaattatatttatttactagcttttccttttaaaaaagaaaatatatatttgtgaaaattgaaaactacaaaaagaaatgtatacctattattttttaacaaataataatttagagattaaggtactttataattttatcattatatttttcaaaatttcagtcgtttatatcagtataaaactaactcaaaactaattctgatttttttaggcaaataaaaatttagtataagtgctaggaataaaaactcgcagttgaatcacatatatttctatatcagagttacatattaagtattttattatattttttcaggtgggtcgatagttcacacaggccttgcctgtgtgtggttttgccacccttgctaaaagaataatttctaaaacaaaattctaagaaaaaagaaagctaattttattattattattattattattaattaagaagctctggtatattatttttttaaaatacatacttagataacattttgaaatatataaagaaaaatcaaattaaggggattcagagttcagacccggccttcttgtacgtgacttcgtcatatttgtctgtgttatatatatctataaaattaagcaacattcagtcagaaaactactttataaggaaaatggttagagacatagtgaactttacgaatcataaattaatgatacatatgaaagattaaaagttaatctaatgactttttatggctattattatatgaaactttctctgctaacatgtatgtgtctcactctcaaaattatatgcacatgcatgaatgatgaaaacgttatgcattgttgtcacaataaacaccagatatatatatatatataattgggtagtcggtgttaaaagttttcccttttgttcagctgtacttgctaaaattctcacatgagaatatgaggttatcaaattcattcattttatgatcagccaaaagctagaattaatataaagtcacttagagaccatatatatatcatcaactaagacacgtgtaatattggttgtcactggagaacaatataaagaatattcattttaggacagatatatttttattattaatttggttttgtaatcatatggggtttcttcgaaaaaacgaaaagcaaagaatctttaagaaagatagcaaggatagttttaattgaatgggtagcaattaatgtattttcctcattaggtgtcatcatagtgttgctccttgtgccacttaacagtttattatgctgtcctaataaaaatattctctacgcctctctgttaagtcattgtgccattgataatattgactcaaatatatataatataataaagagaaacataccttttatttcctggaaagtgttttgttgataaatttgtgtttcttttgatgtaacattttgaaaatatgataagataagaataatccatttgatgtaacaatttaacatattggttttgatgaatacagggtcacaagtaaagcgtttgatgcttaattaagttttaccatttttaatagccgattaattaaagcttctttttcttttccctttcttttgaatattatcatgattttaagggacacatgaaaatattcaatattggtaaaaagaaaagtaaaacgatcgacgactctttcaaaagtagacacttgaataattttcaatctaaaatggtaattttggtagatttaggtgtaaatgtgtgatccaatatttcaaagcacaggaaaggaaaggaaaggaaggagaagtgaaagtgagagtgggagtgacaactgtgaaaaggactgagagagagaatgtatagtcaatgctgccaattggtgcaatttgcttgacttatttgtacacctcagcactttctattctattttactataatgaagccaaacaaaccacaagaatggcggtaaaagttaaggctgagatgatatatatatatagacagtatccataccaagtcctaattttagattactttagtttaggtggctgattaaacttttcaaatttaggggctctctattcttaagacttttcttcacaattgaatttttctttttttttttctaattattatggtaaaaatactgtctttaaaccttataatacattatacaccctttatacagccttacccaatgagagtgcttaattctctctctctctc

SEQ ID NO: 218308 - DNA, 5406 bp, Cannabis indica
ttttgctttattcctcgtctattttcgattgaaaaagcttccactcatccaccttccacacgtgcttcaccccattttctgtttagcttaatattttgctttcattttcgtttttggtctcaagtctttgtatctctctctaggtttttagttttggggaagaactggaatctggctcaatctgattctcacatattgtgtgtataattgtttgtttctccatctgggtattcttagatcttgattttgattactgggtatctcttaatttcatctaattcgatctgatctattctgaatttaattcttggggcaatgtcacaaggctatgccatcgagctttacttcgatccagcactggaaaatcaggtcttgaaggcctggaacgtccttgcacgccgtcagattagtacccaactcatcgaaatcgaatcacgtccacacatcactctcttctcaacctcctcgatcgaacccacaaagcttgaatcggtcatcaaagggtttgcatcaaagcaagatcctttaccgttgtctttctcttcaattgggagtctttcaaacgacaacaatgtcctgtttctaggcccaacaccttcaatgtcgttgctccaattccactctcaattgtgtgagttaatgaagaaagaaggagtcgaaattggggaggagtatcgtcctgattcatggatcccttactgtgctgtagctcaagaagttcccaaggctcgtatggctgaagctttttgtgtgttgagggagttgaaattgcctgttactggctacgccatggatattggcttggttgagttttctccagttcgtgaacacttctcttttgtgcttggtaatacattagaagcttgaattttgatttttttagctttgttgaagaattgttgttttgtgttttgttcatttttagatatttagtttttggctttggtttttaatccaataatgcctttttcatgttgttgtaattacaatggtgctgctgctatttttagcatagactgcatagtaacaaaatttgcatttttatgtttaataacattcttttctctttctcatctcatattttgctatttttgattgagtatattggatattttcttaaaattagtatattattagttctggtttaacagttcctggctgcagattttgttcttctcttaatagtatgctatatatacatattgactctacacatctaataaaaataaaattttccatttttacctattgagtgagaaaatgtgtaattttttctctgtaattctctattgccttttccttttggcatttttttttgtatgtaatttaaccatatgatttttataatgaagaggcaaacaaaccttggtaatgtggtttaactcttaaagatatcaatgaaatagaagtgaagatgttaaaagatatcaataaagtaaaactcatttttcagtattatttgcaacagtaaccatgccccataataaattttattgagagtattatatatgtccatttatgaaaattggacacaaataaatagattgtaaaatcagtatggtgtatagttttatattaactaataagaaccctattcttgtatcatgaaaatatacccaattccttcctcataacagccatcaaaaaatggctccaatgatccacaggacctggcatgcaccagtggacacagtcattgtaacctttcatccatttgttgccccaatgagaaccaggatgcccatctggtctcataagcatagccctagtcacatccacaactccaaacttctttccttgcttctttcctatttctctagccctttccatctcttccacttgaatgttcctcatttcccactcgaaaacccccaaatcgagctcctctttactcaggggactcgttcggttacagtaacctccggtgttccaaaatccattctcgaagtgagctggtgcaaatgtcctcaccagcgtcacaagaccgttgcagttcttgcaggcgtttatgtgatcaaatgctgttctaaatgccattcgaactgcaaagctaatgtcgtgttttgtgatgtttggttcattgcagtagacacaacctgtcaagctattgccttggtgaagatacataactcggaagaaccaatgtccatcagagattatggcatagtctaattcaggaagaaaatcagcccagctattctcaaccttgtcaagctggagatcgaaggcgcttgtcccagttccattgaccattctctcttctcctacaatgagaaacttggtccacaaaatcataagggtgaaatcatgattaggaaagtaccatttcttgaaccgatcttcagtgtccttgtaaatttccaaaggaatttcctcctgcaatgtcaataatctctattagctgtgtaaaactaatatcttaactttgaatttaacaatttgatggcaaattatacttcgttttttataatcatcatctaccaaaatcaactgcaaaattagtaactactttcagttcccacttcaaatttcaactatagattggttatcaaggtttgaccactacttttgtcaaacaataactcccaacaaaaataattatattacacgattctaagtagcttttccaaactaatagtctaatacaaaagagaacaaagaaaactctcagagcagctacattaatattctccattgttccacatgactctaaaccttcacctattaagttcaattttcatttagattaggtttggtaacagaatgtattgaaataaatttaaaatgtataaaattaataaataattattaaatttttctatattaaatgatttttcattctaatttaaaataaaataatcaaaagaaaattcatctaacattacaatactctaaaaatgtaaccaaaaacaatagattatttcatttccattccatttgaataatgccaacaacacaaaaggttttcatagacacatggcaaacaaattgttcttcctctgttttttttttctcctaacattatcatgccaatggtaataataaaacagtgttcatctccattcaagtgtttatatttatgaaaattatattgtaaagtttcatattcttaattacttacaaaattgcatgcaatgaataataaaataataataaaaaaaaccatccaagtaatgataaatttagagtctttaaacaaagcccaaaaaagaactgaactgactaacctgtgataaaagacaaagcagagactctatatggtttctagccactgagtctccaataaaggccattttcttgcctcgaaccatctccataaagaccatggaatcaaacattggtaactcacacttttcaggtttccatctccaattaacaaaatccacatcttgtcttccatgtttgaaacaattcttcgaatcaggaatagttgtacaacttgaattggtataaacagagcctttcagttctggaatccagtgacctgtaaacaaattacaattctccacttcttctacacacaattaagaatcattatcaataacaaatacaaatttgatgaaaaaagaaaacttgggttgtgtccaaattttttatttttgtttaccaaaatgatcagttttgggaaagttgccttgaagttcatgaaggttttggactgaagtaaggccttgtttggatgtgaccttaaaagggattggagaaaagagaaggaagaaactgaataatacagtgattaaagcaaaagaagtgaacaagaaaggaacaatctttcccatcttggaccatttctctcttttatcatagtgtttaagtctttctgagaaaagagtacttgtagttgtagacttcatcattgaaagacaaagagaaaaagaaagaaacaaagaaagtctaatgtgtatatatatatataataaaaaatgaaataatgagagaataatatgtaactttcatcattgtttttcttttgagatatctctcatgatctttggtttaccttttttaagtttgatttgcttaaatattttggaagagaaaaaggtaagaaataggtaaaaaataaccaaaacaaaagattgttgctattaagtattaatagtctcttttatctaatttttttttttttaaaaaaggttgtaaagtcattgtggaaagtaacgtcattggtgagagtgtgacacgtggctttcaaagataataaataaggttggaatttttagcaaaatgttaccattgatgcttgggtgggtcattactattctgaaagattagccttatttcacggcataatatattgaaatagtgatgtgtattgtgtgtttgttgtgtgtatgaatcttacaaataaaggctcttcccatattcatacttttccaaatgaaaattgccactaagccatgagctatgactattgagacaaagtagaatatggttaagtccaaaataagacacttgcaaatcagtcgacacctttttcaacttttaataaggcatagtagagaaaatccaatcaaatcaaacggttactataataaacgatcagatgagcataaaatcagagccgttgaagagactggcacatgtacttttatactagaagtagaagaagtggttcaaattatttatcagtttaaaattgatatgccttacccaagtataacctaaataataatctatgtatataaatgaaaatttatgtattttatatttttttaatatatttttacaattatcttatttaaaattttaagtttttagtaaaaaaataaaattccttaatactatttttttgactttttttgtcttcaaatttacagtgtggattgttctggtagtttgaatttttacggtagtttctatgtgggttgttatacaaattttggttataatttaggttgctctattagttgttataggagtttttgggtagaattctatagaaatgtaaaaaaaaaaaaaaatactattttaaagtgtaaaaataaaaaacctcaaaaaaaattatattaatttttactaacttaaagaaaaatttcacattgtttaaattaaaaatatattaaatgttatttataaaatctataaataaattttttattttttttactttaatgtaatccaaaattttagtaattttttgtaaaagacaatttagcaaaaataatgtatggccgcgtaatgagacaacataagtaataagaaaagtacggatggtaattatacttgcgtgttggtctttgaagaagaaaaactcactaatgtaaatggctatatctctacaaaccaaaagaaaatggggggttggaattccgtaacttgaagttgttcaatcaagttttattgacaaaacaaacatgacggagtatttgtaatcccaatgcactttgcaataagattttgaaa

SEQ ID NO: 218309 - DNA, 3194 bp, Cannabis indica
taataattataaaaaaaaaaaaagtgaagaacggtttggacgggttaaccccaccaaactgaagaaatcattgggcgggttgaactttctctaatttttgattgggcgggttacgattaaatatttacaacccgatatttatattgagttgataaaaatatgctataacccgaaaatcgaccgacgtacacccctaataaaaggtgcgtctgagcaaaatcaacgcaaaatttgaccccaataatttttttttaaaataaaatatcatctttagcatcagtttttcgttttggtgtcgaagtagcaactgatgcaaaaaactattattagcgtcgattaacaacagaagtaaaaaagtgatggttgacttttgcgtcagtcaacgagtttgaccagacatgttaatcgatacaaaaatccctttttgtagtgtgagactttattctcggattgatcatgcatttaagaatgaagcctgattagatacgtttcctgatttttgtgtgacttttcaataaaaaaaagtttcaaatcattgctcttatgttattactttctactgtcctacaaaatattggaataaagcctttttgattttacaactttttgatagagcatgaggattttaagcaactggtttatgatatttggtgtaaaccaatttttggtaggaatttaaaagttgtctatttaaaaactgtttgattaaaacacctcctaaaaaaatttaacagatgatccatatgagatgttgaaatcaattatcataaaactaaatcaatctttcaagaagctctgtatcaagctcaagctgattcaggagtggtttcttttatttgaggtagaagctgaagttactggaaactttagaactcaggtaaggatgtaccatagtttcctagttcaacgcagtaagatcacatgacagaaaagaggagatgaccatacaatgtattttctatacatgcattaaataaatgagggaggaaaatagaataagccaatttcataaatgagaattgctaaattttttactaactattccgaggtactagatcatcccatctcatttcaagagcttcatgggcagccaaagttcaatctctgttaaacttaacttgagttgtttggaggaaggtaataaacttttggtggatcaataactatatatgatgaagccttttacctataaagaaattaaatcagcaatgttcagtatttctaactctaaaagcccataacctcatggttatagttatgaattttttaaagttatgtggccagaaattgaaatggtggttagtaattctattctaaacttcttttcactggtaagattctttatgagtataatggagtcactatttcccttgttcctaagttgatagccctaaaaacgctattgattataggtcgatggcttattacactaccatatataagtgcatctgtaagttactttgctagaggcttgttgagatccttcctactattgtacatcaaaatcagagtacttttattaagcacaggtgtatcacccatcatatcttaaatcttcaggaccttataaaaaattatcgtatgaaaagtgcttctcctcaatgtgctattaaaatagacctaagtaagaactatgatacaatggattggttgtttcttgaaaatcttttaaaaggtttaatttactggttggattatgactatcctaaaaggaacaacatactttataatgatgaatgactgagttcagggaagttttaaaggggagaaggagctaaggcaagaagacccaatctttcctttccattttgtgattatcatggaatacttaactaaaagactgatgcttgaaggtaacaaaaatctttcaagtttcatcttatgtgtaaaagtctttaggttattacaagcccgcgttgcagataacctcatcctcttttgcaaagatactaaacagttcatcatttaaaaatagctcttgatgattttagtagagttttaggccttatggctaacaagagcaaatttcaaatcttctttagggaatagtgatgaagtcaaggctgctattgttcaggatatcgaatttaaggaagataagtttcatcttaaatacttggggtgtccctatgcgtcctacaaaattgagagtggaggattgtggtttaattcttaaaaaaatcaagctgagattgttaacctgggaaacttggcatttgtccttcgctagtcgagctcatccactcagctttactataactcagaaactactagatgaatatctttgttataccacaaagcattaccaaggagattgagaggctttgtcgtgattttttatgagatttgaatggtaatagaagtaaaaattcatatagcttcttgggagaaagtcttcttaaagcgtatgggaagcttggttttaaagatggtgctaattggaatagggttgtcctggctaagtatatgtggactatcatagagaagcatgacttttgggattataagcttcagcaagactcaagctggtattggcacaaattatgtaatccgagacagatattcagtgaaacaagcatgcaagttgttggttgtcatggcaaatttaaagttgttagactttacaatagtctcatcaatcatccccacgtgtcttataagcaagcagtctggtgtaggatgagattaccaaaacacatatttctcttactcactagtgatcttcgtatgcagttttgcattcctattcgcttcctttgtcatgtgtgtgggttgagtaacgagagctatgctcacctatttttttgaatgtcattactctgcttaaatagtaaatttagtgtttgattgattggggtatagagcttgtaatttggatgttagtggttggattgcttgaatctgtaatgatagatcaagtcatgtggcttcacttgtgaatcctttaatagtagctatagtactatgtactacatttggatgaattagactgggttgttggtcaaagcattttgggggtcttgtgtagaagtttaaaatttggtgtttcagaatcatgtacattaagatcacaatttcattatttagtttttttttttttttaaagatttgttgctaaacttttaattgtaaatttttatttatacgtataataggaaaaaaaaaatagggcttatcttttttttttaaaaaaa

SEQ ID NO: 218310 - DNA, 6881 bp, Cannabis indica
ggcataaaacccaacaaacactttgttaaatgcttctgcttgaccatttgaagacgggttgtaactagccaagaaacaatgcttgaatttgtacttgttaatcaacttgaccattgccttacatttgaaataaagggcattgtcggagataatttttgaaggagccccatatcgataaattacgtgggtccttataaaatcagcgacatcttttgctcgtacttcttttagtggtacggcttcggcccatttggagaagtaaatagtgatttgagaatttccatcgggactcgactatcatttcacaagactccttccatgatggacaagttagctgtccgggaacaaggtctaggtaggactgcacacaggtcaggtttttggattttcggagtttcgggttcgggttttcgggctttgggtcatggaaatgcacaactgaactcggttttcaagtgttcgggtgcgtcaggtatcaggtcgggctttttcaggttgggtgtagtcgagtttgggtcctattgggctgagtccgaatgtttaatttataggctgaaatgaaatttaatttttaaaaatactattttttttttttttatttttaacattgtttggaccttttttttttataattaatatttttttgtggaatagtgaattaaatctgggtgtgggtgacgacttgacttgactagtgtgggtgtgggtgtgggtgtgggtgagtcggtgatgacgagtccactgaagtgaatacgaataggcaggttgctgatgtttttctttgaaattgaatacaaatgggctgctgaagtgaataataaatagtattactatttacgtgaagaatacgaataggcaataggcattatagggcctattttttataatgatattaatttaataattaagtaaattattatcccgactacacgggtttttaggagatcggtttttttggcagcgggtcggggcaggtggtcgggtttttcaggtttgcgggtctaaatgtgcagccctaggtcgaggagagacctaacttttccaagaatgatattggaaacctttttatttagaggaattataccacataggctgaatattctatttcttaatttaatatatcattaaaatatatttttatagtagaaagataaaaaaaaacataaaatacaattgtcaaaggaaatggattcgagaagattatggattgattaaaaaagtaaaagaaaatacaaaataaaaactccactacagctccatactctctcatagagacacgcatcttaaaagtcaacgaagacctaaccaaaatgaaggaccaggtggtcgatgaagcagcagataactgaagggacatagcaattgttctgtttgggtggtttgttggttcggttagatgactagcttgccgcttgttttggagagtgggttccacgccttatatgtccttcatagttccatgtcccaaccttaatttatttctctctctgtctctacctataaataatcaaatcttgctaccgaaagtggtatgcaccagattactcgaaactttttcaggagaaatcaaaggcaaccaattccaatttcaggcatggcttcaacttcaagcaatgtcaattctactgtaatcaccttctctctctctcactcattattctatgtgtggatatgctaaaatttgtgaaagggagtgagttctcctctaatggctgctctaactttgtgttgtgtgagatatgtaattgtgttctccaaggagtttatattgttaagtaagttggtgttattatatagtatggtaatctatgagcagcaccacagggtattattttgacatgcaattattgtgtttgatgatgatataactatattggcttgtttaaacttttttcaggatgatacaagtgctttatccataaaacctaagaatggcctttccagatcaacttcgcttttgaacattacggaaagcgcagcacagatacttattcaacagaatccagttcagggaactgatgatcacgttgaaaagttctctgaagcttctaccagtaagaatatcaatttttataatgtttaattagtttgaacttaattatgaacacgtattcttgtttgcattctggtctccataaagaagatgtttgttccattattctaattcttttttaaagaagataagtttctgcctatatcttatctcattgatttttctggattatgatacaggcttgtcactcccagagcagcatagcaatgataaaaagatagagagcttggcttcccaatcagctgatcaatttgaacagggcagtggaaataatggaaaattgcctgacgtggtggtcaaagataatgatacaagaaaggtgacatccttacactagtgtctcatcttgtaaaatcaattacatggaagcttatgaaaacagagttttatggcctttgtattaagtaattaacatttatgatgcagacagtagagtatcttacttactatactgctacaactttatttttggattttaatagctgaacaggctgtgagtatagaacgatacattaaaaccttagctttctgcaacaggcatcttttaaactgtcatggcgtgtggaaggtgaacagagtgaacaacacaagcatgacattgtctcttttgaaaatgggaatataacaaccacaaggggcagaagtaaccaggtatttctcattatttgttttagaataataagaaatttttttctcttaattttggacactatctatcctatccctaaaatataatagatttgttaaaagttcttaaaatataacatttatatatttatgcgcattctattaggttctatttttcagttagaaaattagcacttttactctttaaaatttgaccaatataaaatggatcttatattttctaaaatcgtaaaaatagaacattgaacttaatttttaacaattttattttttaatataactaactagttttgtcataacatctctagatcagattattattaagtttaattttaacaaaaaatcaattcaagattctatttgtataattttagaaaatacaatgtctattttgtcatttaacaaaacagaaggtctaactagtgagttttacaaaacacaagttctaatatgatatttatttttttgttaagatttaaattaatgttttaaaatttactaaaaacatttttatttgaaggagtacgatttgatatttttcaaagtttagaagacaaagttgttaatttacaaaagcatgtcagtatttaaacgaaatgataggacaaaacttaacagaatgactaaatttctgtaattgtaaaagttaacaagtcgtacattttacgggacataatcaatattgttgaaagttcaggaaataaaattgttaattattctttattttatttattggggtatgtttcaatattctcatacatatcttttttttcaacgctacacatttatctgttcttctttctctatttcttatttctttctagtctcccaaattatagaaataatttatatggtcacgtcattactcgtatgagttttaaaaaaaaaatactatagtaatttactcttttatctgaacatttcaagatgtgataagcatatactttttacaattggttactaataaagtgattaattattgctgtatgatttttctaaatcttagtgacattaattttagaattttgttaattgaattatattatattatgcgataactaattagtttttaaaataataaatatatataaaataattggtatataaaaatagtagcttgttatattacatattaactcattagttttaaaaataatttttaatgttatctaaatatattttaaattataatctaccataatatgacttaaaaataattaattaattactaaataggtaaccaaaatatatttcaaattatatgatagaaaaattatgttttgttatataaagataattaattagttttttattaggaactaaaatattacttttaaaaatataagtaaataaaaataaaaaaaaagtgaaaaaaacattagatgtatcagtaataataataacattattattattattattaatcaaatgaaaaaaaaaaaactgtatagtattataaatttctttttattattattattaagaatatcatatttacaataaatttcatcatttatgtgtctagaaagtttttgtaatactatttacaataagatgataatttttatcatcttagggcaactccaaagaaaaaatttaaatttagtgttaaatcaatattaaaataatattattttaatattaaatttttttctaattccaactacaatattaaaaattacactaaaacatatttttttattatattattattttattaaattatctcacacaataatatttataaatataaaaatttaattatgaacatattatgttaatgttaaaaaaaaagaaaatttagtgtagtctatagtgtcccactattttagactcccacgtatgtacaatgacatttagtgttccattagggtaatttatgagtctccaaactctactatttttaagattttagcatcccattggagaagcccttacactgaaacttttagagcctgtttgactctagtttcagtttttagtttttaaaattgtgtttttaaaaatgagaatagaaaacaattttttgtcattataaaaatttaatagtgtttgacacaaattttttaaaactattttaaattttttcttaacgaaaaaaataatattttaacatcataccatgacatgaacttatccgggttcgggtatggttccagatctaggattcgagtatgcgagcaaaaatataaaatataatatattagacaaaaaaaaaatatttttgaaaattgaaaacaaatgttttctgttttctagttttttaaaacctaattttaataaattatttttaaataaatttgtcaaacggttcttattaatttttaaaaattgttttcaattttaaaaatagaaatcatttttaaattaggaagccaaacaagctcttaatttacaagtgtattcattctattgtctatcttaatacttaatttcatttcagatttctttgacgtgggcatcgcatcccatgactgtacttatattttacaaagctaaagtcacctccggtagatcttgtgtgtgaagatatggttaggtgtgtttggatactgagaaatatcctttgttttcttctcgcattcttcgtattaatgctgtagtgatgggttctttgagttaaaggtgtcctatgtttcgttgtcactttaggtggtgatggaactgttctttgggtatgtgattcaatacttttggaacaatttccccttgactttctatcttaaacaattaatgtcattactaactttcaaaaacattcctacctactttatttagaaaatcataaaaggataattgagaaatagcaggaattggtaatgaagacttgtccctaattttaaaaaatcatggagattgatagaccaagaaaagcatacacttatgctgacacattgtatattatagagctaggagtaagaaagagttctagtaagaaaccttagatgggatggactttttatcaaaattttcagtttattagaaaattatatacttatgtttcaactggattacacacaattattactcattaactttataccactaattatatagactaaaatgacaaataactatatatttatcaacccataatttaataaagcaactctacccaaatgcttctttgagaactcatcagtaaaaagaagatttgataatatttgagaactcatcaatgttagaatttggaataagattaacaggatttcatttcaaaattagttgacaataagaggagtagtctattcctattatgtattatattatctttctacacattagagtatcagactatctaagatcagagtccagcttataatttgtcttttaaaagcgtttttttttttctctttcaaatcttggagtaatctactgagtgctatgtcttaattgcataaactttttcttcaaaatagagttctcaacctttgaaattgagattttgcttggttaataatatcatttcatttactgtattgatgatgtcccttagcatctaatttgagtaataattgaccttttacaatttatttacaggcggcatccaagttcaaaggaccagtccctcctgttgttccattttcattagggtctctgggcttcatgacccgtttcggtatcctttgattgagtttgtgttgtttttccaccaagccaagtaacagttagcttatctgtttttgtctcatcacaaatcaatcacatgcttattgctcttttttctgtctactcaataaagttcctctttaagataatcttcagaaagtgaaaggtacaaagaaacccttgattcaattttaaaggggccaattaatataacactgcgacatcgtttattatgccgtgttatcaaatatcctgctaaaagtagtgatgatgaaactgaagattacacacttgttcttaacgaggttacaattgaccgcggtgaatcagcgtatctcacctttctaaattgcttctgtgacggttcctttctcacatctgtccaaggtgatggcttgattctatccgcaacatctgggagtactgcatattcattggctgccggtaggatcaatggttcagtccccaggtacttaacttaaaaataaagtgttcaagttttttttgagtattacacactttgtttttaacaaggtttacaatttcaccgtcggagtaactcatcggtagc

SEQ ID NO: 218311 - DNA, 5550 bp, Cannabis indica
attcaatagaaaattgaaatcgaagccctagtttttattaactttcaattttcttgaatcattgcttcttactagttccttatgtttaattctttcttaattttcattcagccaaatagaagtaaaggtttaattttaacgtacttaactgcactccctgcgggatcgacctcactcctggtgagtttactacttgtaccgatatgtacacttgcgtgtgcaaaatatcacaacagtcatacagtacactttagcgtcaattatgttcgatcctataacgtcgtttggatcagcgtcggtaattaattttactaaaattgacgctgaaaggccttaaaaattacctctaaaaccaagacttgtagtagtgaatggaccaccatctttctcatataaatttggattgagcatctcacctaatttttcccataaagttatctttaatgtgatcaaactatacataaaaattaacaaaatttaataataagtaaaaaagaaaaacaaataaagtaaaatatatataaaaaaaaaaattacaatacttactagtttgttataattttgatgtctctctttttaataacgatctctaacaatgtcaatatcaccgacaccacataattatctaataatatctatatatatataatataaaataataaaaaatgttagaatattataaagattattacttgaataaatttattaaatatcaataaaagttaacacttgagtaaatacttgagagtattgtgttatcattaatgcttaaatgagtcgaatttggagttataaattgaaactcattgatcggaatgttaactatttctccttctagtctctctactaaagttgtaaccaagaataaaattttatggttatttgaaagtgacctgtactcacctacggttgccacaattcttaaattttgtagacagtacaaagaactatcactcaataacttcttaaacttagaaactaattttttttcttattgttgcatgtagggctgttcataaagtatccaatgcgatccaattcgcatgatccaatccaatccaatccgcaaaatacggatatccgcacttgtgcagattggattaaattgaaaatctaaaatccacacttgtgcggattagatgttgtttgaccttaaaaaataaccgatccaatccaatccgcacttcattatatatattttttaaaacaaattataatatatgcaatcctatattttttttttttagaaaattacttgttattataaattaaggaaggtcatttacaataacagagtaaattggcggaggaaataactccgtccaaaaacaagcctcatccaactctaaagcatactttgctaacccctgtgctgccatattggcagaacgtttaacatgtacaacagtagctctaaggagaaaggataagagaccagatacatctacaattagatctttaaaactagaaatggcattgaaagaagtatttagagcttgagaaaccatcaaagcatccatctcaaagtgagtaacaggcagccacatttgtaggatccagttcagactatggaagagagcctttgcttccatctcatgggaggagaaattacccatgactggtttagagagggcagtaactggagaaccaagtgagtttcgtacaatggcgcctactcctatgatgttttttgttccatcaagggccgcatctacgtttaattttaattcaccttggttaggaggcaaccatggttgttgtggatgagagggagatggcagcagggtatgagttgcaacagcttgagttgggtcatatttcccttgtgcatcctgatactattgaatataggtggttgcattgttagcaagtgtagcagccattttagctttccccccatgaacaatgttgttgcgttcattccaaattgtccacataacacatataatatgttcaagctcagatgtgctatggattgtagacaaaaaaaccaaaaaatcaccattgaccattgttgaagactgatgccaatttaacttaaaccccgagtgtagccacaccgagtgtgtacagttgcaaccgaaaagggcatgacctatggactcccatgcctgtctacaaagtgagcatgtggagtctgtaataactttgcgcttgaccaagtttacagcaaccgaaagtgcttcatggataaccttccagggaaagatttttaccttcttgggtagctttaaagaccaaaaaagcttccaccatgagcctgaatacgttgaagaagaagacatgtctttattgtcaaggtctgcagccaaatggtagcctgttttaactgtataaaggcccgtatgatggtgatgccagacaagagaatcattgttgggaaagaaactaagtgggatagttaaactccgagagacatcaagtggagagaagtattgctgtaatcaatccaaattccattggcgttcatctgtaatgaggttagcaacaagtccagtagatggcccataataacaaagaggataaaaaatttcatgtccagggatccacgggtcactaccacataagatgtgtcgtccttctcccaccttccatcgtaaaccagagactagtagatcccgaccccataaaatgccctgccaggtcagtgatggagaatgcccaggttgtgccgtcaaaaaatcttttcttgagaagtatcgacacttgagaagcctgctaagaagtgaattggggttctgaaaaatcctgcaagcttgcttggccaggagagcttggttaaaatgaatgaaagaacaaaatcccaacccaccttcagctttagatttgcacatcaggttccaattccaccaatgaattttcatgccatttgcattagaaccccaccaaaagttcaccataatcgattcaagttgtttgcaaaaagtaattggcaagcgaaaacaactcactgtgtaagtaaggattgattgtacaacagcttttaggagtacttccttgcttccagtagagaaaatcttctcattctagttgtgcatcaatttccaaatcctttctttgacatgactaaaaagttccttcttatcccttcctaaaaaagctggtagacccaaatactgttcatgacactcgcttatgggaatcgcaagctgtctatgaaagaaaacttgagctgctagcgttgtatttggtgagaaggacatgaccgctttatccaagttaagcacttgaccagaagcatctcgataagtatccaaaactcgctttatagccaggcaagaattgtcatttgcacgacaaaaaaggagactgtcatcaacaaagaataggtgagtcaccgttggcgcatgacgtgttaaagagaatccatgtagattgcccaaactttcctcatattgcaataggcgtgaaaaaccctcagagcagatcaaaaagagataaggcgagagaggacaaccttggtgtagtccacgggtaggttcaaggctgctagataattcacaattaatttgaaaagtaaaactgttagtagtgagataggtcatgattagagaaatccagccatttgtaaagcccatcttcctcattacttcttcaataaagcgccattcaacacgatcaaatgccttgctcatgtctaatttcatagcaacaactccatttcgaccatttgttttgtgcttgatagcatgtaccaattcgaaggcaaccaaaatgttgtcttggataagttaatttgacagaaatgcgctctaagttccattgatcacagcaagtaatatgtgcttaaattttgagactaataccttagagatcagtttggaaatgacattgcataagcttattggtcgaaagtcactaacaaacttcgggtttttaatttttggcaccagggtgattatggttctattgagatccttcagattgactccttcattaagcacgctgagaacaacagtagtaaccaaaggaccaactatggtccgatttcgtgtacattgcagacataccatcaattcttggacttttatcgggagacatggattgtaaggcagcctcaactttagcagccgtgaaaggctttaaaagatgctcattcatattcgaagttacagtggcaaggatggaatttaaggtatattacagagcagattcattgatggcagtggtggagtagatgtcttggaaataactttgcacaacaccagccatagcagtctttgaagtcttcacctctcctgctgcagtatagagctttttaatcttattgttggcctttctagatgaagctttagcgtgaaagaactttgtgtttcaatctcccgcagcaagccaatcaactctagagcgttgttgccaatagatttcttcttgttcaaggagttcatctagaatagctttagaagttttgagatcagcaacctgtgctggtgtggagacaactgaattattaagatcagtcactcttgcttgtgctgtagaaattttcagcttcattttaccatatttccctatatgccactgctgtagattttttgcacaggaggtcaggttgtcaattatagttgcaatgggtgagtcaggtatattatgattccaccaacgagcaataatgtacttactctccggatcagataaccacaatttttcaaagcgaaaacgattgtgatgcttatgagtaggaggttgtgattgttgcaaagagaacgtagcagcgattggacgatgatctgagtggtagtagtcaagatgatccacctgtggagttgagaaggtggagccccaaagatgatttacaaagcaccaatcaaatttttgtttaatggaattcatactttgtctgtttctagcccaagtgaaatcatcaccattatggtccaactcgtgtaaagaacaatgagtaagagccgaacaaaagttcaccatttgggactcattgcaaaaaagtgaaatgttcgacatccatcttcggacatgaaacagtcgaaataagtaggatcaaatgttaataaagtgacatcaagattctccctccaaaggaacagtaggccaccttttaaaccattccttggaacctcaagcctatgagaaaaattaagagactgtcgaaatctagtgagtgaattctaacttagttttgtttccataagaaacaaaacatggggaaagtgttgcttaacaagcaactggagattcctgaatgcaaacgggttccccaaaccccgtgcattccaactaaggattttcataatgactcacgggattgcaaagcaatcttcacggaattgtccacaaagtcatccgaatatagaatctaaggaaacattgtgacttgatccttctccctgggacaagggagaggcttcaacagcagctttttggctgcgacatcttttaaggaattgtctcatagtgagggaatcgctttgtcttttaggcaggggtgttttcttggcccgtgacagcagaggataaaaagggagaggcagtagggggagcatgttgggttttatgccctaaataaaactctttacaatctgattagttatc

SEQ ID NO: 218312 - DNA, 4702 bp, Cannabis indica
tgaacccgaaacccgtgaacccgaaacccgccaacccgaaacccggtaaacccgcccgatgttcagccctaggttttattgcttttgatataatatgtttttccttttaaaacacatatttctttctttttcattaattagattaaaattttcttttaattcaattttaattatttttcccccacaataaaaatagatttagttattcttaattttaaactaagagagttcacaaaataattaatttaaacttattgcgcaatctaattgaatttataaagtacacttgtgtgtacaaatattcaaaataatattcacacttcaaaatggtggctagtcaagaccctcaccaaagctttaatgaagatggcaacatcaccactcgatagtaagaaacgagatgatgaagtattagtatttgaagcctaggtcacaagggatgccgtggtgatcattgtttagcttgaaaatgtttagaatactcaaaagtaccccgcgtattcttagatctccatgaattccaatgaatttctccaattatttttcaataaactaggactttgattcttggataggttttattgtttttgatatcctaagttcaaccatgcccttgcatttgagttttaacgatggtgggggttaaaaaatgctcgataaactctggactgtcgcaattttgacgaattgattctcctaagtggcagagagtgaagtcttgggtttgtggggtctaagatttcgacgacttttggtccttttggttaggggcgcatggcgcattggaaggtggtaatagttggcttgtatgagctcaggaaacatgttgtgaaatagactaacaggtggggagggggtgagaaaagaaatcgagagtgagagttaaaaaaaataggttatctaaccgtgtttattaatttaattactaatttttttctttttttctatacccaattttcacaaaagataaattaattatatacacattattattcttccatgagggcccacaagacaagaatacaccttgaagatatgaaggccaagagaaaaatttgaccaagcaacaaaagacgaagtggaatgccacgtggcaaaaaagatgccatatgtgactattggcctaaggggttgtcaatggttgcacatcaagggtttttctcctaaggcttgtttcttcaatatttcaagaaagggtatttcactttaaaacccttatctagggctgaacatttagacccgcaaaccgagaaaacccgaccgcctgccccggcccactaaccaaaaaaccaaaaatttgaaaacccgtgtggtcgggtcgggttcaacccgaaaatacccccacacgagtttcggaatcgggtatagtaaattgattttttttcgggttgtaacccgtaacttgaggagcaactttaaattttttttattttattaaaaacttaataatatattaatattaaaaactttttagactttattattcaacaaaaatgactattcgaagcaaacagtaaaccaagagtcacctccctcatgagtcagtaaaaattgtactgtacaatacaattgacacagactttattttgtacaatagtgagtcagtacaatacaatagacacaagcggtcaaacacaatacaatagtcactagtcagtacaccaagagtcacctccctcaagcttcttcttctccaaggacggcgacggacggacgactgcttctcttcttcggcggggtcgcatccaagcggtggacagtctggcgtccctaacatccaagtccaaagtaaactcgtccgaaaacttcttcttctccgagcctcgaagtccgaggtggtgacttcaccggctggcctggcgactggcgaggtaatacgttgacgatgatgttgcactgtcactgtgtggttatgtgtgtgtacatttttttttctccttaacttctttatttatttatttatttctttttgtttgtatgtaatcaggaacatacagtatatatacagtaacaatagactattggatagttgatagtggatacatatagtggatagtggatagtttagtttaagttttgaattgaatgtcatttttgtaaggaaaacttacaaacaaaaatattaataataaaaaaaatattaattattaaaaaaagtccaactaatgttaaaaaaaatggtatttttaaaaattaaattttatttcatcccgttaattaaacattcgggctcaacccataggacccgaacccggctacacccaacccaaaaaaacctgccctgatacctggcgcactcgcatacccgaaaattaggttcggttatgcttttccaagacccgaagcccgaaaacccaaaaacccgacccatgtgcacccctacccttatctgagaagaatttccacgagaggactaaaatgcttcacttatttgaaataaataagtacaaaggacaaagatgatatcatcaaaagctagaagtaaatgccacatgcgaccactgacatctctaatgttagtggtcacatgccataaggaaacatggtgatttaaagtaactcaaacttgcaccaaaagcttagcctttaagtcaatggtcgtagaagaagacaaaaaaagtgttagaacttattttatcaggatcttaatttattaatcatgtatgtttgattgtcacataataatctatcatcctaaaatatgaaatactcaaaatgatctatcaaataacacataagagattagaaatccttatattggttgcagcataaataatatgactccttcagttcaattactcaaaaccttgattcacgtttggtaacagagtattgccaaataataaacctgaattctccttccttaacttgaaaagtaacaatttttcataatttttcataaaagtctgagtatcatcttgaatagtgtggactgatactaaactcatcttttgaacacattttgagagagaaataggcatagtgttttttgaattagagaaagaagaagaagagagttattttgacatagaattagggttttctagcattatgaagctctttctcatcatcctcttcatatagcctacttagggttacttttagatgagatggaccaaaataaaaataattgggcttaaaattaaccctatggccaaattctacttaaggaaacccataaatttgatttttccactttattgcaatttaatgaaacaatgtgtcttttcctattttattacttatctcttctaattatttaaaatctaattttaatataataataattatcaaataaaatataatttaaatacatttattaaatagacacacaaagtgtactaattaacaaataaactcatatttctcttttcttctcaaaatggctcaaacttggtaaaaattctcaaataagatatagtctactctcgaattctaattgacttattaaatcaattaattgagtctgaaagatgatattatcccagacaatatagggaccatgagcctatgtaaccaagctcctaataagtagattcaaaatttactaagtaaatttcttagcttattatttcctcatcactccactatagatacgaaattgtactcttgattacatataacactctatataccaaatatagctataaattatccatttttacaatctaaacattaattgatcctctatagacgatttacattgagtagggataaatttactattttacccttcaatgtattttatccttaaaacacttagctacttgtaaatgatattttagtaaactaatgtaattactaaaatgagcactctatcattgttgtgtttagccaagctcaaaggaaaccattatttcactttgaatttatagaagctatagattccatatctacgatcaacgctaccactcaattgtactaccgaatttccaagatgtaagtatgggctagtcatacgggtaagcgggtcacgaacaagtcaaagaactcgtatagtacaattaagctagaacttaaccatctcaggattgagatcaattagtctaagatcgactaagtgacatcgacttagaaaagacttaatggtaagtttatgatatcttttacactgtcaatatcagtccaatctaatctattgtcgatacatttgatacaagtttactttgctaatgccttagaaaggacattacttatacaagtgtaattaaaataacatcgttgattatcacgtcagcgtaaatctaatgcactaataaattgtgggactaaatagtttgaagcatatgctcataattattttctactgtattaacaacacaataatcatgaataactatatttcgagatttaatagaatttatatattaaacatataattgtagagggtcaaatatataattatggaattcgggcactagcaacttatcaagaacaaagagagagacaaaagttcaattgggagcactggtggagtgccagccaaagggactctaacgctcaagtcagtcgattgcaataaaaataacaataacagaaataaatgaaacgtaatggtattcagatggatgagtggacgagtagacggatgagtgtaagtaaaacaacatcgttgatgcactgataaattgtgggactaaatagtttgaagcatatgatcatgattattatctactatgttaacaacacaataatcatgaat

SEQ ID NO: 218313 - DNA, 3461 bp, Cannabis indica
ggcagaagatggaaaatcctgatcttcgctcgtcgattggcatgggacctgatcagaagggtgtccgtattagaagaatcgagcctacagctccagaatctaatgttctgaagccttctgatgtaattcttagttttgatggggttgatatcgctaatgatggaacaggtcagatcttattcttcttaagattagaggatattgaagaaactaatccaacaaaacaatttaaatagtttcctagttttggataacttaatcccactgaaaagcggataactttatcctatctaatcaccatctccatgtatatacactatgagtgtttccataataagaaagaaaaaatattacagtcgtggccaacttattttcttctaattcgtgatcaactcattcattcttctgtgtttttctctaatattttttaatccaattctatccagcatgcccatattcttaggcattaattattttattgaaaaaatttcagttccattcagacatggtgagcgcataggtttcagttacttggtctctcaaaaatacaccggtgatagtgctttggtgaaagttcttcgtaacaaaaagatactagaattcaacataaggcttgcaactcacaagcgactcatccctgctcacattaagggcaaacctcctccttactacattatcgctggatttgtattcagtgctgtctcagttccatatctgcgttctgaggttagtcatttacctttcatgctttcccttctgtaggttttgtaagacaagtatctacgtatagagctgtatagtcctttccacgaactagaactttttgattcctttgggaggtccttttgagacccgaaatttactgtcttacagatgtgacgtgctttttttttttcttattcaaatgggaccataccttatccaagaggggtagctcaaatggtcaggcatgtggtatgctcccacaaccacaaggtctgaggttcgagtccttcttgggtacctacatagcaaatgttatagttttctagtccccaagtattggcgagttaagcggggatcctagtttctaaaaaaaatgggaccataccgtgtacatgagtagtcattgattgtgtctttggtgtcatttgtgtaacaatttacaaaagaaaacagttgttacttttctttacattggtgacaatatattctcttttcctctttttgtgaattataaatcttgatctccggcagttcgctggtctttttcagtatggaaaagaatatgaatttgatgctccagtgaaactattggacaagcatttacatgctatggcacagtctatcgacgaacaagttgttgttgtttctcaggtttctccctcatcttgtgctttcattgtttctagttcatcctgctttcacggctctcatttgcttactgaatttcttcaggttcttgtagcagacattaatattggatacgaagacattgttaatacacaggtcagtctttatttattattgctcacccttactttttctcatccttgtagttattctattattctattcacattcactcgttaaaatcgtgactctgtctcttcagattcttaagttcaatggtaagcctgttcgaaatcttaagacgttggccaacatggtggagagctgtaaagatgaatacctgaagtttgagctagaatatgaccaggtcctttctctgccattttctctctagataaaaccctgttgatgatccgagagcgttgtttctaactttttctcggtgaaaactgcttctctgtgcagatagttgttctgcaaacgaaaacagcgagggaagcaactctagacattcttgcaacacattgcataccttcggctatgtcagacgatctcaagaaatgagagaaagttgaactcttttgccatctgtttcggttctttgcatgctgcagcagctaccccacacgattctctgatgcttgccaaaattactttttgctcctagagagagagatagacagaatagagttaagaggctgtcgttgcatgtagcgcttcgatacaaatttgggcaagatgattaggggtttttttttcttgcatggttttttgtaaaaaaccatataggcatttttacccatgttgaagggagaagagggatacataacatttgttttcatacgtgatatatttttactattacttctacatgaatgagcttttagttttgagattcagacagaacaaattgattttatgtaatatcatcgtaccaaaatgtttactagtgagtagtcaatgaaattacaatgcttgatgtcctaattagaaatatttagctggaatttattctgattgggtatctattattggtaaagcagttatactatttatttaattaaaatgtgtgggatcgggggtaaacatgtaaaatttgattcggtcctatgttatttggaattcaaatttaaataattttttttttggtataatattgtttgttgtagtggtaaatctttgggtaaagtttaagaatttgaacctagcaataaatttaaaatattaattgtttattatttgatattttgttatagtcaattctataatttttattaaatgttgaatggagataatataattaagtattgttattaagtactgtgatcttgactaactctcataaatatttactgattcgatattaaattgtagtaataatttataacattagagtactaaatatcataaatgcctttagtatttcactataaaactacataattagcccacttaaattttatttctaattttacccatgtattaaattgtaatgtaatgtcacttcttatagtatttgagactagaccttaatgtttatcttaatgttcttatgatcttgttattcttttcgttaaaaatctaatggcttacatgattgttttgtttacttgtaaaatgagacgtgaagtgaattacgttcacgtaattattatcattattatatgtaatttctaatcaaacgacaagtcgttgagaaagtgacataagacgatatgtcgttttcttaccaacaaaaaggaagaagcgtgtgcaattcttaagatagctaatagctatgtaacaattctctttcctccactccacaatccacacgtaacaaagaatatataaacattttgtaacctgttacttttctacttgcaattttacaatacaccatgttatatattacatatgttacatatgatcatatattataaattacatttttttttaatggaaatttgatctctattttttgtcaattttgtaactttgcaacaaaggggtcttatcaataggtggtgattcaaggccctcaacacggtgatactcttctatttcttcattcacatcttcttctttagcttttccccacatcacagtataaaaccccaattgatatcatagttgctccaattacactg

SEQ ID NO: 218314 - DNA, 4061 bp, Cannabis indica
ggtaaaaaaagaacctcccaatatacagaatacacaagtgcttagattacctatgtgaaacacttaaaaaggaaaaagattcttcaacttctttgatatgtagtccatttaaaactaatgggcaacatattaacaaatatggtttactcagttaactcaagcaatcaaaccatttccaacaactacatcttattgttgtcagacaatgacataccaatagcccatcacttttacactgaaaatttaatcaaaactaatagaaaccatggacacaaaggctgctttcaaagataatatgcataaaaccaattcaaatattacacgttgcgtataatgaaggaatcattgtgtcccccaacccactcatcacaaaagtaaatggattggaataacatcagcaccaccttctatgcttcctcaaagaaaaagaaagttttgtctaattgagaaactcaaataagcaactttaaagtcaatggtctgagttggcagatccaaactcagactctgacaaaaaaaagaaactcaaataagcaaaaatgaaacatgctaagcatatatccctgggacagttaaaattctacttaatttgtaacaactcggattctgtgtaagggagatgtatgacattttagtagatgcctaaaagatatacccatgcattgacagagaactgaatggtttgtcggtcccagcgtaacgaagttggggggcctgcagctggtgatgctcctgaaggttgggcagttgaccctacagaatcacagataacgattagaatcaataatcactagcaaattcaatttgatgattcagaaaaagattatcattgttgtgtctcaagctacagagattagattgggaggggaaactataaaagaatctctaccagtgctgcgaggacgaggttggacattaggttctggcctggatgacggtgaggcagatcttgctggctgagaagaactgccagaagacatcgcatctagactctctacctcaagatcaggatcctgtacatgtaaatattaacaggatcaaatagtcaatctaaaaacgatgccaaaaccaagagaaagctaaaattagatgtgaaatcaaaataaacgtgtgctatataaatttgtcttgttactgatgaattttttcttggtagaagttgttacagatgaaattaatatgaaagatcatccgtgacaagcaagttccataaacagaaaagcaacatcattgatcagttaccaatcctagaacataggcatttataagatcttatgtttgtatcattgcgttcatacattgtaactctattccctttcgaaatttacacataaaagacaggaattgatagaaatatactctcatatatcccaaaaatagatagtaaaatatctgtttttttcttttcttttttatcagaagtaaaatcttgagagtatcaaacacaaatcgcaataaaggcggaatcagaatccccatatcgattcagttcttcacttgtcatagcaacaacctcagaaaaaggacagtcgaaatctatacttggagcctaaacaaagtctaatctggacaataaatactaataaattgccaggactccagaaacgatcaacctaaaatgaaatccacacactaagtttagcatccccagtaaaatctcatcaattcacatattatttatcatcttgggacaacagaattcaataaatcaacatatttaaatacaaaagaccagttctcaagattatccaattactcaaaacagccaaaaccctagataaaagtcatgggtttcactccaaattccaagaaatcaaacagtacagaatacaacataaagattagatgagcaagaaaagagaaaatgggaaagaagttgataaactagaaaaagaagagtacggacgatgtaacgcttgtagaacttgcgcttgaagtgatcaatgacaccggaacgagaagccatatgtggtggaatgaggacgttggaccagtaatcgtcccatctggaatcgttctcgtagtcataggaagcggcggctaacctcttgagcttttgggggtcttctctctcttcacccattctggttttggtacggtcctccgcactcagttctgagtagagtagagtagactaagaagatggtgcactacacaactgcaaaacccaaatctccaatttcccttgggcgaggactgggttgatgtgatgaacgcgacgaagaaggcaaggaccacgatcttccttctttacttcttctgcctattccaacgacgtcgtttatagtgtttttcttatgtaagagaacataattattccctacaaaattgactctcgatttacaatataaatatttaaatttaaatgtaaataaatatttaaatttaatattttgtagtaataatacttaatttgtatctctagaacttcgtaaattgttaagtattaagtaaattgcctctattattttttaattggtccaaatcataaattttatttttaaaaaataatttaaatatgattttggtggaaatacactgaggctcttaaacattggaatatcaagtatttagcttctgaaaggctaagctaagtatgctgtaaaatattttggtagaaatccataataggatgccttcgtaggagactatacaattcgaggaatctgttacttgaaattgaaaaaataaaaattagacaggaatcgatttggaataagcaatttagagaactatcgcttgcaaagggtgataggaattctaagttttcacgcttccgtagttgttagaagatgatgcaattttattttggaccattttcactaatgaaaggtcctgaatcgaggagaggtgtgacattgattcttacttataggataatttttccaaggtgttccattcttctaatcctattatccctcaagaaatttttgatataattcaaggtttcatttatgagaattagaatgagattcttatggtggtgttagaggtggaggaggtgaaaaaagtggttttggacctcccccattaaagtccacagaccacaatcgatttcttgccaaattctataaggtgtattggagcactgttggggatcatgtggttaatttttgtgcaaaaatttttttgttcgtgccaatttgtctctgagattaactgcaccttcctggttttgattcttaaacagaactctactaaatgtttggacaactataagccgattagcctatgtaatgtgtacgaaattgtggccaagaatcttacaaataggttttgtggggttctaagtaatcacatatcgcctaaccaatcgaaatttgtcaaaggtagatggattgttgaaaactctatattttctcaggaagttatcaatgattttaagcataaaagagggagaaaagcttatcttggtatcaaatgtgatatgtctaaagcttatgacagattgaagtggaacttcattgaaactgtcctcaaagcattgtgttcaattagaagtttatccatatgatcatgttctacatgacggtcccaccaaaactttctaccctccaaggggaatccaccaaggtgaccctctatccccatatatttttattctgtgttctgaagtcctctcgaggcttctgtatgctaaggaggcttgtggtctgttggaaggggtcaaaatctctagaagggggtcgtctattccacatttgatgtatgcggatgatactctcctttttgggagggcgaatgctcaaactatgggtgtgattcttgattgtctggaaaagtattgcctctagtctaggaaataactcaccattaacaaatccaaaattactttttccaataattccaatactcaactaaaggacgaacttcttgagttgttggatttcgatgtcatgggaagggatgagaaatttttaggaaaccctctttttgttcgtggaaactgttgtaaagacttcaagtttgttatggataaagtagtcagccgtatggaaggttggaaggcaaaattcctctctcaattaggtcgtattattcttatccatagtgtggttcaa

SEQ ID NO: 218315 - DNA, 4896 bp, Cannabis indica
tatcctaccagcaatggcaggaatacttcatccaagatgctatggactaatgtgctgaatttgcatataagttggttcagcaacacaagcaaaccaaccatctcctttggctgcaggtcacaataacgaattaaacttacagaagtaatgaagtgcaagagcaagcataaatgttggaattcaactcagtgacctgtatatggcaacaaggatatgttcccacaccacaaataactggaattcaatttatatcttcacagtttcaacaccatatcgattcatagaaaaccaagcagaagtaacccaagagaaagtgataagtatattttattctaagtcatatatgaacaaaaatgtagcaaaagaagtcaagagttgataaaggttactgtcaaccttctggactgtttaaattgttgtagacctcctaacttttcgaaaaaaggcaataaaaatattcgccttatgtgaagttttcctagtgtattattattaagtataggtaccactctttacaaggtacatgtacagggacatgaagaatggaccacttacacaaactcaaaacccaatgactaagcaagtatatttatgttttattcagtaacaaatatgatattttattcaaccacttctacaatgttactaataatcacttatattagaattatgattcttatttatcatagaaaaattacgttcacacgatcaagaatacttgagaattttaagaattttttcgacattttttcttctgtatttctatagacaagttctgtagacatttgcttacgagcataaaaatatcgaacattcctaaaagtgatacttatatgtaactgtaactgtattgtacctcactttctgccagcaattgctccaatgcctttggaaggtatggaaagacagaggctcccaatgtttccaccatgcggtgcaaaaatgatgtcacctgaatagcatgtagagtaacatcaaataaataggtgagtgaagtacaagttaactgttaaaggacatccacaatcctcttttcaactcttaccttgcttcgcaagggatctatctttggaaacgcaataaggacttggaggagaacatctaatgtcttgatgacaaagaaaaagataagcagactgttagtataaagtaaataatgacagttctacaagaattccccataaatacaagtttccataaattctatcatttctgaaaagaaaagaaataaactaatgatcaatcatcaactgggtgtagaaacaagtgaacctagccaaagaactaatctaaaacaggatagagaatcttcattaagcatttaattaacaaaagcatatatgttttcttttgcgagaaaaccatggccccaggagcacactagatttattttgccaccgagtgtgtgtgtatgttttggtggtgggggtttcaaaaaaaaaaacctagattgatttaatcacaagaaaatgaatttgagtaaacttcttagattaaacaccaacctgcttaaacatgatcccaattgcaggacggctggtagtgacaagacgctcactgaaaccctgcattgcatgtaaaataagacaaaaataagaaggcagtccaagttactaaaaaaagaggatatcgttttactttcactatgctatgtgcacctaaatgaatatcaatggctgcctatgaaaggttgaagaatgacagcaagaaagcaacagtaatgttttaataaaagtatagctaaggggcatcatatattgcctagcaactcttgatgcagcattctaatttaaaatattaaaactattaaatttaactatttaaaggataccacaccaaatgttgttggacaccacatagcaatactatttaataatatactggtgaatacactccaccaaaactatcttagagaagatatctattaaccagaagaatattgaatgaggaaaaaaaaaaccttgctgagagaattaattgcgatgattatctgctgtatgcttgcaacttttacaggtgtttcttctggagtcaatactttggcattaataagcaatgcctctacctgaatcaaccaaaaggttgtgtaaatttaagtttaacaaatttgtgataactagaagactcacaaaaatttatttttataaatttttgcactacaaataaccataacctgatggcaaagaggagtgagcaaagaagaaagataatctgcttgttttgctggtggcacatcttccataccgattaatataccaatagcctgtcaattgatgactcacaaattagtaaataaccattagcattaaaaaatacaaaaacatgtacttaatgctacatatataaaatgaatacctcaaaaatgtgactgccatcttcagatcccgtaagctcttttgatgtgcaattcaaactagtaaagcgagcaactgtatcttgtaagctctgacaacaccatatgaaaatgtcaagaatataaataagtagggaaatgaagaatacaaaccaagttttaacgataggacaccagacaaatgtatgtgaagcccaaggctagtttattttaactacctgcaaaattttctctatgtagggaacaagtttcactttcagcaatttcacaaccctcatgaacagataactagccctacgactcacgtagatactggggtggtgcatacccctttcatcaagaaaagcattcaacaccatgggaatatattctgcattttcctgaacaaacttcaaatatcttgttattgtttccaaatacacaagtgccaccagcctgttagagtggcaaggaaacgttgtagacagcagctggggcaccaactcactcaagagtccactcccagttctcatagcctcatcacttaaagattcaccaaatgcatagagaagagagagtgcagcctccacctcttctacatttctctctcgtggagattcagcagcactagctaatgaatttctgatgaataagtgagtaacattaggcgctacacgaccaacagtacgaagcagaacaaataaatcttttctaaactctaccatcctatcttcttcctcttgcccagtcttatctaatttatcaagactttcacggtagataggattgtatcgtatctgagaacgaattacttccaatatctgacccacatgaagcagctgtttctctctcaaaggagaaagactcttcattgtggcaacatagcatgaaagaaactgaactatactaaatgtcgaatccaattcgcaatgctgcattacataaaaaacagagggcaaaacttcatctagaagctccatggagatactcttagcatcctcagaattcaatcgtttaaagcactctaaaacctccacagcataccctgtaagaagttgagctaagctagaaatcaattctgaatccccatccttgtttaccagcccaaaaaccctattgatgcgaagattttgcaaaagagacagttttgtttgatgatccattcgcttagaaacaactgccaacaaacatccggctgcagcacaacgaagtggctctgatagccgatcaaccaaaaccaactcaaacaacaatgggataaaagcatcattcacaattaagccaatgtcaatccaagagacgtatctcttcatagattctaatacgctagaacaaagtacttcatccgaatttctatacaaagatattatatcataccaagctctaactatttgagatacacaatgctgcctcatttcatccttcacccgccctccaacagtcatttcttcaggtgttcgaggatagtccaagctaattaattcaacatccaacgcattcaaaacccgacagaacatatctattactgctgcccctttgctcaaatgaggcaaaaagtctacaaataaagaccaccatatcaatggatattccgaatatataagagtcaccaaaatttgagcaagtttgttcttaataaatgcaggaccctccaatatcctaacattgtgatcatccaatccctcgaaacaggcaatagagaacacagattttctaattaaatacctctcgtctggactaatcgctgaatacccaactcgaataacgtcgtgaagggtctgtaaacaccaaaactgtatctgaaccaagttagaaaagcacaacttttctatgcaaagtctacagattgccggttcttcctttattttatcacaatattcctttgcctttaatttcaactccgaatcaactgcgcccgattcatcaaaaagtatcagtattgccttctcaagatcagccatgaggccccaaaaaaaaaaaatccaacccaaaatcccacaaaactagaataccctttgttttctacaactctttttctctattatttattgttttcgaagaaatttaagatttttcttttccctctgtatctgagatgtccaggcggagtgtcaaaagattgaaccgaatcggaagtgagcgataaattgagagagatggctgtgagaaatgagaccttaccgatttgggatcagatcaaactgggacatctttatcaatgcccagttatatagaaaatgtgaattagcttcttttgaaactaggaacttgaagctagggtttttgtagtttaaggagaaaccactattagggtttgcttggaattggagtcggtctaatttattatctagtacgagtagtaatgtaaacgttatttgtgatggtgaaacccatagagtagacgataataatgtggaaaaacatgtatcacgattaattttggctcttaaaaaaaccaaataaagatatctatataaaaaagaatgtacattaagaaaaatatatataatttttttatttaatgatatttatgtacattgacctgataaaataataataaaaaa

SEQ ID NO: 218316 - DNA, 1786 bp, Cannabis indica
aaaatattacataaaatacaattcaatataatacaatacaatacaatacgacctaatacggcattccaaacgagccctaaaagcacaagctaaaatcatcaaaaacgtgacaacaatttctcttgactgtcttgcgagggacatttcatgacgctctcataattcaataaaaaatacaataataaagaatttagagacaacaacaaatccacaattacaaacaaagcataaaagatatcttataaaatcaaactccactgctacacatgctgcgttctaaatttcatatgtcgatctaaaattgctgatgaaaaaacagtgcagctaatgataatcttaatcgattattttcctaaacaaaattgccttttcagattaagaatccagttatatacatacattcctgtaaaatgatatcacagagaattaatcaaccggatcgatccatcccgatcgatcaaaacaatataaaatagataaattgtatagttttgagtcattttattcggtcagatccaaaaataaaatgtaaaaaaatctgatttaattcacctcattactttccccgatcaacaaaacaacacacatacacattcaaatcgattcaaatcggttaaatagaaatgcgtgtatttaaattcagacagaaatgagagagacagagagagagtacgttttccaccaccgaagaccttgtggacaggtttttctctaccgaagagcctgaaaatcttagcttgaactgcttcgaccttggatgacttgtcatcatcggaatccgaagacgatgacgaatggtggccgtggatcttctcggtgatcttctcaatgagtgagtcgggctcgtgctccgccattgatctcccaccaaagaaaaaaatgagagagagaatgaagaattttttagagagaaagagagaaaaaagtgaaagtgagtatgagaaggttggggtttaaagcatgaattatggaaagattaaatcagaaccgttaaaaatggtgatgtccccgaggctcaggttcggattccgaacgtactacgaaccaagtggttcggtttcaaaacggaaaccgaggagagggcgcggctgtctggagaattgtgaaaattaaaattaaaaaaaaaaaaaaaaaatcacagtgcttatgctttgtaattgatgtgagtgtgaccaattaattgcctcattttaatcaattttaacttaaattaaatatatatttcgattgaatttctttactataaataaccatctgaactgttttcaataaataaataacataaccatctgaactaggccattaagaacacattgaagaaaccccattattgtatttaaaagctttttctaaaggcaattgaagaaaccccattaggccattaagaacacattaatgtgtttggattaaagcaaaatattaaagaaaaaaaaaacttacagcaagtgtgaaatttcaacaagtatccgataaacaatataaactgacaaactattaaatgaaagggatatttgcttctttgctctttttttttacttttttaaatggaaacttcatttaaggataattaaaaagtaagagtcctacaaatctagtggaaaaaccacaatctcacaacaaaaagataattgtcagctaaccacaccgattcgaaaagatcaaaaaactcaaggctcatacaggagcataaagtgggataaaaaaatctaaaaaaagcatacccccaatgccactaaagacaaaaggtgcacatcactgatagagctaacaaagctaaaaaaaacaa

SEQ ID NO: 218317 - DNA, 3233 bp, Cannabis indica
aggaaagtgaaataattactactattgttaatgatagaaagtataaagtgactttttccaaacaaaaaaaagtcgaaagtgacattaacgagaaagaaataaaaacaaaagctctcgttatactgagttaaaaagattagttccctttacactgatgacttctaactagttcagtacatcttgtaattaatcttaccatcactaaacaaacttatcttctaaaataaacaaaaaaaattacagttaaagcccttcagcttctacctcctaccattaatataataataataaaatatatataggagattaatttttaactgttttatccttggacatttaccatcgtaacagaattaaccaccacaaacgcacgtggctaacagtaggagtagtcacgtgaggctggcttgttgtaaccgaaatgccgtactttcgtggtcatggaggcagaaccagacctcaccgaaaaaactccatcccagatctcggtgaaagctcgaacaatgattccatggtgggaaggagcattaagctgtagaaaacagttaagaagctcacggagatcgtctttagagtaaatctcattctccagtatcatctgaagcattgattgccggaaatccaagtacgggtcgtcggaatctttttccacggccacgccttcgccgccgactcgaccgaaacccttaacggtcgttctcggagagcttttgttgtcgtcggaggagaaaaggtggaagaagttgtggtggtggtagtggtggtgtcttcttcttcttcttcttcttcttcttcgatgtcgttgagtttcttcgttagagaatatgagcttgagtattgtcgtttgggcttacgatgggctttgattttgggcttggattttgggtgaaataagagggagagtttgggccgggtgcagctgcaaccgaggtcgactgaaactgtgttcaggaggagcttcttccttgttgtactactactactagccattttagagagagaaagagagagagtgaaaaattgagagtcagatatgtaaatatttatacatatagaaatatgtgtatatatagagagagaaagagagataggggtagggtgggtttgactaaaatgggtttaggggaaggttcttatatatagtctaaaaaaagtacaggctaaccaggggtaccctctatgctaaaatgactaacctgtgagcatttcctaaaacgacagtatgatcatggccgcgtaatcatacaaccacgtggtctcttacgctgggccctacctgtgacccgtgattataaaggtaaaatgcaaaagggttttctgtgtaatttagaaaataaatggtttaattaattaaataaatttttggtagttggaaattgggtacgtgaagaatgatcttgggatcagtaaaaaagaaaaaaactgtgttgatcagtttttctttgtttttgattttgattcggaaggtttcagatctataatttagtaatatgtgatggttatcttatggccttttattattacgtaactgacaatataaaaatttagtcacacttgtcaattgaataatatattttctgaaaaatgaatagatcagctgcaccgtacacttatgtacaaaataaaatgctttctaatatacattttagggttttttggtacaaaaaattacggagatttgcatgtagacaattttgaaaaatcctgtttttacaaatactaataattatattaaattttagtaaaaatgcaactgtaacaatagattgtaattttgttactgtagaacataaatttacaaaatctgaaataaatagtgcagaatttaaaaacttgacaccagagaattgtacgtggtaccagtgttcttttaaacactactagtctacggagccacgcccagagaatgaaatcaattagtaaagtatcaaagattacaaaagcaattgactcaaacaaattcagactccgtctagtgatttgtcgcgacccttttgtaatccaccttgctaatctgatctctgaaacacaccaagtagtgaactcccttcaactattgatgtgtacttactttctcccgaagtaaggcttaagcaaatattctcccaaagatatatgctcactttctcccgaaatgagacttcaaaaatcttctcccaaagacccacacttgttcaaagcttctcttcaacctattctatgaatagtataagatcataataagcaaaccaaaacttggttgaacactctaggtttttacaaataaaacactcttctcacaaagaaagatattaaaatatgagactaaaagagataaaatcgtttggctgctctctaggtcctatttgttgggtgtacaaccaaagtcccaaattggctacaaatagaaaggatcttgagtacataaggatgaacactacctccaaaggaatgaggccttttgggaaggtgcctaaaacaaatttgtgagagcttaggcccaaagcggacaatatcataccaatggagaaataaatggaatccgacggtccttacaagtggtatcagatccaaattccaaaaattagccatgtgaatgtatcctcagatttgccaaaaacaaaggaggtgaagcttgctgtgatagtcgtcaaaggttcatatctggttcgaagggattttgaatgtgttggaatcgagggatttaggtattcgaatgaattttgaatttagctggtgaaggaattcatctagcttactcaaggagatcttgagtgttggaatcgagggattcaggtttagatctgcaattgtctgaggggaggcaagatggtcctttgtttgaggggaggattgttgcgtgtacaaccaaagtcccacattggctagaaatgaaaaggatcttgggtatataaggatgaacactatctccattggaatgaggccttttgagaaggtgtccaaaacaaatctgtgagggcttaagcctaaagcggacaatatcataccaatataaaaatagatggtgtccaacggtccttacactatttatagaacataccaaacctaaagacagccacaaaaatgattttctagatgtacaaaactatgtgtaagttaatgattggagttcatattatgtatatatatatatatatatgaaaatgatttgggattaactctattttgaaatcccgagaatgtatgactaggattataagtgcttactcgggaatactcggagatttggaatc

SEQ ID NO: 218318 - DNA, 4293 bp, Cannabis indica
ttacatagaaattgaaatctaggagatgacaatggttttgtgaacaggtatgcagtctgttcttgagtagggatgtagcaaactttgatccttttttctacaatttgttctcggatatagtgcacatctaactcgatttgtttggttctggtgtggaaaaccggatttaaggcaagagcttgcgcactttgattgtcacaccataacactggtggagtcttttgaagttttataccaagttcaccaagtagggagctgatccagattatctctgttgctgcagaagcaagtgctcgatattctaactctgtgctagatcgagctactgctttttgcttcttggaactccagttaattagattgccaccaagaaataggcagaacccgcttgtggactttcgatcatcaaggctagatgcccaatcgacatcttaatatgcttccaagttaagtagtgtggagggcttgaagtgcaggccgaagtgagtggttcccttgatatatcgaagcactctcttgcaagcgttccaatggtggattgttggacttttgagatattgacttaacttgtttacagagtaggcaaggttaggtcgtgtcatggtaagatattgaagaacgcctattgtgcttccatataactctggtttgttaaagtttggactgtcatctagagacaatttgttggccattaccattggtgtgtcacattctttggagtcttcaaactaagttcgagctagtaaatctgcaacatatttagattgagtaagatacaaaccagagttgttcctataagcttcaaatcccaagaaatggccgactgatcctaaggatttaagggaaaatttctgattaagggcatcaatgagagcagagatggcagcactattttccccagtgatgaacaagtcatcaacatacaccagaataagtaagagtgagccttgatttttgctgtagaaaagtgaagaatcaaatatacatgctgtgaaaccccaagtgattaaggtgctctttagtgtgtcaaaccaggcccgtggtgcttgttttaggccataaaagggacttagttaattggcacacaaagttcggtttagtagggtcttcatagcctttaggttgttccatgaatactttttcttgtaattctccattcaagaaagtattattaatatcaatttgttgaatatcccagccaaaagtcactgctaaccagaaaataattctgattgttgaggcctttataacagggctgaatgtgtttttgaagtataaaccaggtacttattcgaaacctctcacaaccagtcgagctttaaatttattgagattgtcatctttgttaaatttagtcttgaagagccatttgttggagaggacattcatgtctgaagttcttggaaccatgactcaacttttctttttaaccaaagaatgcttttcatgatccatagcctttttccaatgtggtatgctcatggcttgttgaacagaccttggttcttcatagacttgttgctgagatgctgtaacaagaaaaacttttggtttatagatgccagatttcgatttggtctgcatagggtggccagtaggtaatggaggttggattggtatattgggttctggaatgatggtgtcctcaggtattgtggtgtccatgtgtatgtttctactgctggtgtgtgttgcaggggacacatttctggtttgaacagactggcgtggggaatttgggacagtggcagacttatttggctcaatatcaattgtgccaaattgtattggagtggtgtgattatgagaagatatttctggtatgatgaaggctggggcaagaagattttggtgacaaactgtggaagttgttgtgggaataaggtgctgtaagggaactcagtttcattgaaacttacacttcgtgctatgtaaattcgtcccgatgtatgtaaacacctatatcctttgtggaatggactgtagccaaggaacacacattttgaggttttaaattgaaacttgtgttggttttattgtctaagaaagggaaaacaagcacacccaaaaattttaaggaaatagtaatcgggtttatagtgaaaaagacattcaaatggtgatttgtaagcattaactatagtaggaagtctattaatcaaatagacagtagaaacaaaagcatcccaccaaaaatgcagtggcattttagcttgagcaagaagagttaaccccatttcaatgacatgcctatattctctttccactctaccattttgttgatgagtgtgaggacaagggtgtctaaagaggatgcctaattgttgtagaaatggctgtaattttctaattccccaccccaatcagtttgtaaacttttgattttgaggtcaaattggttttctacaagggttttaaaggttttaaagataggataggcatctaatttggttttcattgggtatatccaactatacttggtaaagtcatcaacaaataaaatgtagtatttgtatccttcatgagtgggataaggggagggaccccaaacatcggagtgaattatttgtagaggtgtgttggttttaatagtggaactactgaaatgcatgagatgatttttaccaaattgggaagcatcacaaaaggacaaatctttattagtaaatgttgtattgatagaatgtaaaagctttgcaagaattacagaggaggggtgtcctaatctattgtgctaaagattaggagtacaagaattattacacaaagccttattagcagaagaaagattacaaacagcagtgttagacacagtggcagtactagtttgtggtcttggctgatgtgcttgataatgtccttgacaatggggtggagtgtggtgtcttggcaagggatgagagattttgtagagtccttgactaagggttccctatagaaggacctgcttcattttcttgtcaatcacaaggcaggtgttagtgttaaaaacaatagagatattgttatcaatagaaagttgggatatgctaataagatttttgtgaataccagggacatataaaactagattaaaataaagagttttggaacatggaatggatatttggccagtagctattatagaaagagagtttccattacctacagtcaatttacccttgcctttgtagtcgattttgttggtgagggaggcaccattggatgtgacatgattggaagctccactgtccaaataccattgaggatcagcaactgtggtggctgtggcaagcatagcctgaggctcatcagaattgttatctgtagtgttcgaattttccttctccctggtagattaaatcgaacctatgatagcattttaatgttgtgtggccaaatctaccacaaacttggaaaataggtttattgcctcctctattattagagttttgtcctcctcttcctcggtttgtcccacggccacgattgttattgttgtaaccagtggaagggggtggtggagggcctttcttagcggcagctgcatagtttgctgtaggattatgcagatccagtgcagcaactgagttttgttgttctattctcttttcttgagtttggagcaagaattggacatcttgcatagagaatgattctttggaggttagagtaacgatcgcaggatcatactcacttccaagacctccaagaatgtagatgatgagttcatcatctatgatgttgttggcagctgccattaaagcatcaccaaggcatctcatcttgagtatgtactcatcaatcgaagtagagcctttctttgttgattgaagtatgccatgaagctgcagaacacgcgcacgagaggtgattgagaaaagttgcagcagaacactccataagtctgcagaagaaacacaacaagtaacatgtcctaacatgccttcagagattgaattgaacaaccagctgagtaagaactgatccaatcgtaaccaatcagcaaattctggattaggcagggttcttgattcatctgaggggtcaataatggtggtagggggtctgatgcgtgttccagtgaggaagccttcgagttgatgtgcacgaacagtggagaggacctgagatctccaataaagaagttgttgcgatcaaggcgtagggtgagcgagacgatatgattggggattacttgaacggcctgtgttggaggagcatatgtggtggcagaggaagcaccttggggtctggaaccagcatttgaagaggacgccatgggagaaagcttcaaacagagacaacaaagaa

SEQ ID NO: 218319 - DNA, 2569 bp, Cannabis indica
ttttaaataacatagaaaaactagcataaattaatatacgtgcctcgcacgtagtttttgctagtatatatatatatatttatatgtataaggatgaactttatcttttatgttttgaaaagtagcttttcgatctataaaatgtgatagtgaaaagtttatttgtgtttgtgggcttgggctttcacaagaacttttggattggacatttggtaagatattgagaaatgtctttttgaatgcttgcatccatgcttgaattgttgagtaacaaagagtgtccatattgttttcttcatccattgtaggatcgttgagtagaaaagagtgtagaccttgggttccccatttgttctaggattgttgagtaggaaagagtgtacaccttgggttccccatctgttctataggattgttgagtagaaaaaagagtagaccccatgctatgtatccatctcaggattatggaatggcgaaggaggttatctctgtgtcgatatccctagtaaatactatattttctaatagtatttttacttatattgagtagtaaaaaaggagtacccctcatgctttgtccctagtatatgattgctagattatttcgatattgatagtggtggtcgacaggttatggtccttatggacatggatggtatttcgatcaagagcttttagatgcttcgtctctcaaccctgtcaccatcgaggaggagtattatagtcagcatgtagatggcaatgatgtaattgggttagcggtggatggagagaaagttccagtaatgggttatgccttagcacaattagtaagtgaggatggaccaagtttcttatgtaaatcacagattattttacatattaattccatatctaaattgtcgatcccacttctatctcaaatgaaattggcttatgtaatataaaaatgaggttactttggaataaggaacagatagactgggatgtttcttattggtgtggcatgtattcatatactttttttttttttttcaaggcttcatgtttctttttccacctcaatcttcaattagtatcaaattgctaattgatgcatatttcttgaagattacttttaaccattgagagattttctaaggtatttgggataagtgttgacttagtagagttacgtgctctctacactataaaggaacatgccaaagaaaaaaggaggtatagttttgtgagtcgaaatgaggatcagagcttggtttggaaaacaaaatccaatgactgggaatgaaattttttttattgttttttccatagagaggagatgttcacacctcgagcttataggtttcctattagttggagggtgttaggcgggtgtcacacactaaatcattgtattagtttttttagcatcttgtatcttgtatttgtgtatgatttatttgtttctaatatattcgtatccctcttttgtaggtggagaatcgaggatgcttccaactttgtcaaaacaaaataagaagttataagagatttttccaatctctcaagaggatagggagtggaagaaattgttgaacgaaactttcagctttttgttggagcaaagtcgaggttgctaccaaatttttgccttttagcgccatgacattgaattctcatgttgaggtgctactccatatttttaaatttcttagcattagaagctccaattgcactggatatgttcactacaagaaaaatggacaatttcgacacaccaatctcggcgggcctccgtgtgtgtgccgagattgttctctatctcgacgggctcttaaaaaactgccataattgatcacaagaatataattttttgaaaaaaattttaaattttggaccctatatcgacgggcctagcttggactgccgatattgggtacatgtgtacccaatctcgacggtccaagttgggcccttcgagataggcccaaagactgacaaaaaaaaaagacaaaaccctaatcatctctaacttctcagccgcacctacttattcactctatttatctcttcttctttcttacaccagtaggcagcagatctcaatggagtcctccatgtctttcttctttttgtttttcatgtgcggtggtggcgccaatggaaggcaaatggctcgacattgtgaacagtaggggattagtccctctctctctttatgtgtttatcgtttccttagttttcttcttcttcttttctgtattttcttttcaggccaacgacgtacgtcggtgctagggaagaagctgctcctaggatgacgacggagctagggacgacactgacgtcggaggttaagaaatattgccctcatataaattttagaatagtcctcttctcttcatctgagaggtataaagttatttttctttttagttttcttattttactttttttttcttctacaatggtcactttccatataaaggaaaaaaatttcaatatcattgtatggatatttttattgatttcatttttagatttggttgtatagaataattttttttatttatgattaataggaatttattgatgtatatataaatat

SEQ ID NO: 218320 - DNA, 4144 bp, Cannabis indica
ttgtcttagactgacccccacttaagtttattgataagtctcacttgtattcatgattgaaaactaaagttaggaataaaatatataattttacgtaaacattaatcagttacttttgtatcacagtttgggcatttaagagtacctaattttcatgaattttcatgaagtagaagccttatctgctcttctacttcatgaattttcatgaaactgtaatattgttctcatccagctatatggtggttaatttgatcgattcgatgctggagattcttactgtgtcttatttatgttgtcagatatttcttaatcttaatcatgacgagcatggggacaatgttatggaaacaaatgaccaagaaattgagacacaagaaccagtatgtagatgggattatggcaattgactctctctttcacactcttaatgtgcttctctttttgagtaatgttgagggtcatgagttgatattttggcttggaattcatctaatttctgttaattgtctttcccctgcactctctagcctatgttgatgcagatgcgcttgtttaacgaaggctacgctatgaaaggaacccttcttgtgaacaagaaggtatgttttacatattcgtattcatggaaataattctgtagttataaataatattgtagccttactatcaatactttgctaaagttcaatggttgtttggtttcttttcattagtaaatcaaaatgtggaaaaaaaaatatttttttttccatttctgtttccttgtttgtttgatgtttatcatcttctttttgtttatgttatattctcctgatatctaaaatgaagttttttcttctatttaaaattttgtagcttgaacccaaaacaattgaggttcgatgttcgatggtaaaagttgagcaagatacagaacttcagaatattcctactaagaactcattggaagtaatcggaacaaggtatcaccaagactataacttcaacatgtttgtgtgaactgcattgtgtatgatctcatgttaaattgttcaataccatcaaccgtatgctgcataatgtcattttcattatttttaaaaaattgtctttgttttaaaatgttttgattgaggtgtctatcaagggttgtttttataacaacaaatcttgtttcctttgctaagaaatagtattactcttttgcttaattaccattttgaattagaaacttgtgaaatgaaatttaaatatgtgtgtgtgcctgtagaactagtataaactaatcaaattaagtaacattttatggttttcaacattacgcatagcaaagccgagtaacctttgaactataacctctgtcaaccgttataaatggaagacaagcaaagtagtaaaatacaatataacattgttttatatacatcacaacagatgcatttgctctcttattttctcttaaaatgtaagtttatgatatgctttatcaatagctaaggaagataagatggatcatgtgtaccaactgatctgatttctatggtttaatttgagatctattaacttttttatgaccagtaatcgaccaaagaaagcttacttgtcaaggaatttgattgcacttttaagctacggaggggtcccagataaattcttcactggtttacttagaaaggctttgaaagaagctcatggtgctttcaggaataagtctgctgcaatgagaggtcttatacacacatatatattatatgcatatacatatatccacaaaaataagtgttctggtttcatttatttatttccaatatttcagttgctatgaaccatggggccatggacaaggattcaacagttgaaagaatgatttcttgcggtattcctcttgaagagccatatttgcaacatcgactatctatacttcttaaggagcaaaagatgagcctcagagggggaaagctttgtgctgatgactgttattatttaatgggaacagccgatcctactggcaaacttaaaagtgatgaagtttgcattgtgctgtaagttatataagactttccatgttactacatatatctatagcattagcagattttagctagttcatattaatacgttaaatccctaaatgtagagcggtcgtgtttgaaacagttatacgtacactcatgtttccatattaacttttgctctgttgataatatatgttcagtgacaatggacaagtttctggaaaggttttggtgtatcggaatcctggagttcactttggtgatgttcacgttctaaaggctacttatgtggaggaactggaatcttttgttggaaatgcgaagtatgccatattcttttccagaaatggaccaaggtcaattgctgatcagattgcagggggagattttgatggagatatgtattggatctcacgaaattccgaggtttggcatttgccttttaattctaagcagtagtcttatttcactaatctaaagtggatccagttttgttcttcatagtgtacacaagtgagaccactactttgtttattaatttcatagagtgaaatttcaaggcatttattggttgctcataatcatattacccctagctattgcaacattttaagccaagtgaaccttggagtccgaattcctcggtacggaaggttgaaggtaaaacacctgaggagtttgaagaggaagaattagaggacaagctttttgaattgtttttgaagactagatttcaaccaaggtatgcatttgtttgaatcatgtcatgttaatgcaattattttatattttcactgttttttctgcgtgctggttaattttagaaattctactgaaaatctgcatttattttccatgaacaatcatagatgatcacaattaattgattatgtattgttttctttttaatcaaacaattgaacgccaataaagttttattctttgttaaatacccaatcattctcactatgttcttaattaatgtaatgcacacaaaaatcctaccttttccatttgaaacaactttttcatgtcaattttttttctccgttttgctgctggagcaagatatcaatggttggtgtctcaaacttgtccaaactgatattgatatatcttaatcgattttcttattgtgttcatctatcatctcgtctggtaagagggttatgatgattctaaattcggtggtagccattatttaaaattcagttatgcaatgggagaggcagcagacagcttgacagcattaatggatcgagttttgactctgggagatgactgtgctgaagagaaaaacattgtcaaggacaagataagcaagttagttgacatatattatgatgcattggatgcccctaagaaaggagcaaaggttagcttcttacttatttgcttatcatagcatttagtgattaattttgaccaaatggagataaacatcttttctcgttggtcattgttgactgatatttgctcattcaatctattcacatatttgtttacacttccttttcctcttaactacgtttttaacaggttgaggttccaaaagatctgaaaacgaaagtctttcctcattatatggaaaagaaaaatagttacaagtctacgtccatcctgggaaaaatttacgatgaggtgatggaatatcaagcagaggatcattcaagcaaaggtctgtatgaatattgcaatagaaataactcaaatcctttcaagattgtggtggatcatttccttattatattttgtactagactatgaggttacaaacttactgtctgcattttcaatttctgttgagtgtggtaatcaaatcactcttaataaagctttttggaaaaaggagttaccaatcttcattacatttctgtcatgtagagatctggaaactggctcatttcgaagttgatgtccctcaagactgcttaaaccgatggaacttgcactacgaagaatacaggaaagaaatgaacaatgccatgaagatcgatgatcgtgatgtcaaaaaccagacttcaaatcagattaaaagaaagtataagatggtaattgttttcaactattaaataaagttgcttttagtctttctgccctattaactaacttatgctatccttgctttagatactttatgaggctga

SEQ ID NO: 218321 - DNA, 7399 bp, Cannabis indica
gctttataagctcacccccttatgaggatggtaccgttgaaaaagaaagtcgttattagtttagttttattctactttttaatcttctaatgaaactggttttgtatttaggatcccaaaccctaacctagaaccatgactttaatgagagagaaattggcaaaagagaaagtaatgaaagagcaagtagtaagagagaaacataatgtgagaaagtgatgagagagcagtgagagagaaaatgtattgaaagaaagtaatgtcagagaaaataatgtgacaaaatgatgtgagataaagtggagaaaaataattgacaaaaaatcaattgtttttaaaaatataaaacaacattttgttgttctcaaaatttttcttttttgtaaactattttaaaaaattatagccaaacgtgcctgattattctcacaaaacagttttctacttttaaaaacaaaaaaaataatcttttaggtataatgtcaaacatgcccttattaatttcctcattcaaataatgttttttggaagataatacttctttacaaagaattcacattaatgacactaataatttaattattttcaatgattcttagaagataatagtggtagttcaatggaagttgatggagaagcataattgttactagttgaacttgttgtggtataagagaaatcccaaggctcaatttgctcagttcttacataaactatctcttcagcactctgtggattgttgtaatcatcaccactcgtaaccatttggattttgtctaactcaattgaaacttctttcattgttggtctcatttttccattcaaattcaagcatttcctagctaagttagcaactgcaacaatttgatcattcacatggttttgagattctttaacaagattagtatcaacaatctcaaaaagatgattctcattcattgcaatgagaaaatatgtggctagactcttgccttctttggaccttgtaatagaaacagctttctcacttgtcaacaactcaactagaacgactccaaaactataaacatcacttttatcagtaaattggtttgactgaaaatactctggatccaaataaccaaatgttccatatataagtgtcgtgacatgagtttggtcaacatcaacagcttttgaagtcccaaaatctgcaattttggctctgtatttctcatctaacaatatatttgtggacttgatatctctatggtaaattggagatgaagttgctgagtgtaaataaaaaagtgctgctgcaatctctgaagcaattcttaggcgcatgttccatgttagttgaaactctctctcatggtcatggagataatgagatagagtaccattaggtatgaattcatatactagaagtggaacttcagtaaacaacaacctaataatttgacaacattcctatgattgatttgtgcaaggatgacaacttcattgatgaactctcctacttttgcttctccatctatttttgattttttaacagcaacaattcttccatctgtcaacatacctttgtgaacagttccctgacctccttgaccaaggattctatccatatcaaaattgttggttgccttctctaattcctctgagttaaacaattttatattctcaatactatattcatgtgtagatagttgttgttgtaataataaaccaccgtttctttgaaaatgaacttctttgcgcttgatgttagtttttttcttaatgattcttatcaagtaccataaactaattagtaggaaaatgactccaagagcagaacctacatatattaataataaaacaaaaacatgaataatatgtacataaacatatcacaagattgttatatctttttagctttctaatacctaagtatgaaatatttatatatatatatatatcaaaattaaatatttataacattaaagatgaacttagcttgttatgttatttaacgagtttcatttaaattgatgaaacaagtatataagctacatctatttaaaggcaacatatatatggtgtcatatcgtatagattgaaaagggtacatagcggcataagtattcaaagttttgactttttaagaggcataaatccaatgaatttttttagcattacaagttattgaaggtagttaatataactaactatgtcagttagtagttaattttctatgagctgttagttttgagcttcatcttgtataaataccccttgtatctcaatcataaatagtaaccgaattcttttcaattatgttattctttacatggtactaaagctctagagtttctctgagttgttcttgtttttgtcccgaattctccttcatcttctatcttgcttcaaaagccatgggtggtttagctcaaaatcacatagaattaatctcattaaagcattatctctcgtctaaaatccatgaaaatagtaacctatcttggaaacattaggttctcatagtcgttcatgacaattgtcttcaatgattttttgaatcaaattctgctcctccaaagtttgatacagacattgattgtaactgaatcaaatctctcgagacttagattcaaaagttcttcaagactttgattttgttccccaatgtttctacaaatttgataagtcctttcttggaccagtttctacccttggttcaaattcccctactggtgcattaatgcaagccatgataaccacactaaattcagttgttgactccaactagtatctagactcggtgcaactaatcatcttacactagatgcacaaaatatggcaaacaactcagagtatcttggtaaagaatagatcctagtttggaattatttaggttcgagcattcataatattggtcattctgcctttctttctccattacaaccaaaaatacttattctaaagaatctcttacattttccctcaattacaaaaaaaaaatcacgagtgtttctcagttttctaatgacaataatatattctttgaattctatactaattcttgttttgtgaaagaccaagtttcgaagaagactctcctagccgagctgatcgtgggctctatgtgtttaaaaacactcagatcaatgacctacactcaccatctgcttccaactcttgtggccaaccttctccaacttcttttccttttaattctgtaacttttctctctgaacatcaaactccatccagttttcaattgtggcatagtagattgggtcacctaactacaaaaactaatttcatcttggaatatctcttcatgtaataaaactgtgtttgatttttgtcacaattgttgtttaggaaaatcccacaaattcccttgtcctaattctgaaatagtgtacacgacaccaatatagatgatatatactgatctttagggttctgctcctcacacctctttaaatagctaaacttattacatttgtttcatagatgctatagtagatactcctagttatatctacttaaaactaaatctaaggccctccatacatttcaaatatttaaaaagcatgttaaactccaatttaattttcccataaaagctatgcaatgtgattgtggtggtgaagttaagccatttgacaaatattttaaacaactaggaatcttatatttctaatcttatccacaaacttataagcaaaatggtgttgtggagaggaaacataggcacatagttgtaagtggactttccttacttgctcatgctcatatgcctttgaaatattgggataaggcatttaggactacattttacctcattaacaggttaccttctcctagacttggtgcttgctgacctttacaaatgctttttaacaaagtactagattacagctctctaaaaatctttggttgtgcttgctaccctactctcagaccttacaatagacataagcttaattttggtctacttagtgtacctttttaggctacaacctagtccacaagggttacaagtgtcttagctctaaagggagaatctatctatctagggatattgttttcaatgagtattgctttcccttcaaatcttctccctcctccacccctgttacacttgttactctcccttccctactctcaacatctcctccacttcaaacacctacacctcctcatcttacaccaccattttttggggcaagttcctcatcctttacctctgaccaatataatgtctccatctgattacaacaataacttaactagttctaacagtgtttccagtgttgcttctcatttgcaaacaggtacacctaaaactctgctacttcaaaggcatctccatcccatgttgatgacattccaacaattacttcaccacctatgccaattgttgtccacctacactcaacacgcatcgcatgattaccagatcaaagagtggcatttgaaagccaaaaatgttcatgttagaactgatcccttccaaaattttgtatgttgtccttgatgagaagtggaactcatttatgaatgaggagatgactgctccaaccaagaaccacacttggactgttgttcctctttctaaaggtagaacaacaattggctataaatggatgctcaagatcaaagaaaatatagatggctccatcaataaattcaaagccagatgtaacttccttgctttaagcctctattaggcctttccccacgaatttatagctcttatacatgagtatgttactctggttgcttcctgaactgatgactaggcctacaaaccaacacaagtgtttccaacatgctttgttctcactcgcttcctaggaaaacttcccaggaggtcacccatcctgaaattacccaagtcaacgtacttaactatggagttctttcatgatgggctaccaaaaacaagaggcaccttcttgatatcggtagtgccaatcaatccatttaagctctcttcaaatgtgtagtctcatacctacaaaatatgagaatcatcacacttgaccatccacaagcaatgtggggttgcacaacttactcagtatttccctttacagatcacaggaatactgactgtcacaatcaccccccttacggtgtctgacatcctcattaactacactttcagctgggtcaagactttaataccattttgtaatgtccccgcttcaagcctccattgggccttcccccacgaatttatgactcttataaatgagtacgtcactctagctgcttcctgaactgatgactctccctacaaactaacacgagtgcttccaacatgctttgtccccactcataccttgagaaaactttccatgacgtcacccatccagaaattaccacaggtcaagcacgcctgtggagttctctcgtgataggctactagaaaataagatgcaccttgttgatataggtagtattaatcaataaatttaagtcatctttaactgtatagtcccatacctacatagtctcataattatcacacttgaccttccccaagagatgtgagattgtacaacttaccagatatttctccttacggatcacaagactactgactatcactagacttgtggccaaagggtaacaccaacaacccggctttgatttataagagaccttcagtccaatggtcaagcctgacaccatcaaatttgttctcacttagccctgtctagatcatgatccattcaccagttagaagtgaataatgtgtttttgaataaagaattatctgaagagttttatatgtagcaaccaccttggtttgaagatacctctcaacctcaagctatctgtaaactcataaagttctttatggactcaaacaaactctcacaatgggcatacaactctcattctcatttatgttgatgatattctcatcacaggcaacaactcatctctcatctttgctttaatctctgatcttaaatcatttttgctctaaaaaaactgatggaatcaagtacttccttggcattgaagttgctcaaactaatcaaggctttcatctctctcagaccaaatatctcaaagatctactgtgtcgaacaaaaattcagtatgccaaaccaaattccactccaataacttctggtctaaggttatcagcacaaagcagtgattctatagaaaatgctcttttctatagatctatcgttggtggcttgcaatatctcattgtaactaaacctaagatagcttacaatgttaataaagtgtgccaatttatgcacaatactctgcaatcttactggtgtgcagtaaaaagaatccttaaacatttgtcagacaatttagactttgatcttcacatcaagaaatcaaccacactaggcctggtagggttttgtaatgcaacctaggctactgacccacatggtaagagatcaacaagtggagtttgtatctatattgggttaaaccatgtttcttggcaatctaaaaagcaataaatattttcaagatcattcattaaagcagagttcatgagtttggtaagcatcacaattgagatcacatggataaagtcttttcttagtgaacttcaagtggctcttcttggtgaacctatagtgtggtgtgacaatcttagcacctaatgttaattattaatccagtgttgcacgctcgaacccaaaacattgaatttgacctttactttgtgcggaaaaaagtcttgaacatggaacttgaagttagacatgttccaacctttgatcaaatcacaaaatacttaactaaagccatttccagctcaaggtttccaattctacgagacaaacccaatgtaaaaagcttttccaacttgagtttgaagggagttgttgagggtagttaatataacagactatgtcagttagtagttagttatcacaattaattttttgttagttgttagttcgttgtgttagttttggttgagctctattgaggttcattttgtattaataccccctatatttcattcattatcaataacaattttgtttttaattctgttaatcttgacataagtacttaatatttgtaaaattattattttttttagttttttcattacagactattttttaatttattaaaagaaaatttggaactaattgatacaaacatatttctctccagaactgatggtctagaattcaggctttatatgggttatgtttaggggtgttcatcaaaccgctcaaatcacctgcaccacactgcaccgcaaaaaaaaaacggcgatttaaaattctttgcggtgcagtcgcggtttgaattttccttaaaccgtgcaatgcggtgcagtttgcggttttgaattattaatatacgattcaaactgcactgcacattataaaagtaccaacttttatatttatatgtgaatgtccaacctaaa

SEQ ID NO: 218322 - DNA, 2665 bp, Cannabis indica
aaatattgcataaaatacaattcaatataatactatataatacaatacagtgtaatacggcgtactaaacgaacccttacattatatttttacgatgaaatttaagcattataaacgtatgcttccattttgcatatgctgtatatatattcattttaaggctgtctggctatttttctcttcggtaaatatgcataactttagtagctttatgctgaaaagtactattcttttttttttttgattccaggcagaggaggccaatagattgcgcaagagaaaaaaagctgaaagcatgcttaaattcgatattgaaagaaggcaaaagcaacgcattgaagaagttagagagacacaaaagaaggtttgtattttttttttttacattgataacatatgtactctcacattatctttttttttttaactgtttacattctttaaatgtactcctttctttttcctacgcaaatattaatctagatttggcaaatgaattatatatttaggatcaagaaaatattgatttgaaggagcaacttcggtgccaaataaggacagagatcaacaaattggaaataacctgcgttgatatggcttccttgcttcgtggcttaggaatccaagttaggggcggtttacgtcctatgccacaagatgtaagttatatacactatagcgtcttctccatataatgcttatagtttaaccttagaaatgtagctcaaactgtcagactgtgctgtggtttgctcccacaagatttggaattcaaatttcccgtagaaacacctgtaaattaattgttataattttccgtttctctaatattgggttagatgggatatggaactcagttttcaatatattatttatataatattcactcactagccttgtaaaaaaaaaaaaaaatcaaagtcccataggtatatcgtagaagtattttcgctcacaaaactatacagatacatgttacatgttcatatttgtctgtttgtttgatagttttatatggtattatcaggtacattcagcttacaaaaaagctctgttaaaatttcatccagaccgagcatcgagaactgatatccgccaacaggttgaggcagaggaaaaatttaaacttatttcccgcatgaaggagaagtttttatcaacttcatgttgctgaccaccaccatataattttcttcgtgttcaatgctcacaaattttccggtcacttgctactacactatcacatgtatagtgaggcatgtgcttttaatacagatttgtaattgtttactattttattttagtcatttacttattcaaaaagaaaagagaaatcaaggtaaaaataaaaataatgtatcaattattgtttggagtctaatttgtaaagaagtatatgtagttagttagagaaaggtagactatctcagttgatcgcacatcaaattcttatgattgattcaatgcacataagtcaggtgcatgattattcttaaaaatgttctttgctattgaacaagattgttttgtacatgctgtaattttatgacaattgtcaaagtcaagttttacatatactcttttggaatggttgagttggtcggaagaaagaatacatttatttttataatttgtaatcttatttaaaatattttataattatttttttttttaaaatttgaataatttatatattttaagaaataagatttaaatataatttatttagcaaaagtattaataacaataagtataaataagtgcaataaaattatatttctacaatttagaatttataaaaacaacatataattattatttatgtgctaaaaatataatatgaatcgggacatacattgtacaattatttatttgaattgcatttacagttctctatatttatatatatttttgaataggaaatataatttttgccttgcaaataattaacagtagaatctgatatgtatttatactaatagaaattaatatcttgtagtaatattttgtagaaatgattttttttctcaatatttatatggtcatgaatattttgttccacgtgtgtaggacacgtgtaactttcactagtttgtaactaaacaactatattgttggtgggtaaacacttactttgccatacgaaattacaagttctattaatataagataaagagcaactgtcaataaaaggaaaggtgctattacaaaaagaaacaaagttcaaaagcattcaataggaatcctttctaatgacagtgttgataaccatcctagagttgctctccacaataataaacttgtggctttttgcttgcgccacttctaatgctaaatagcaagccgctgcttttcctgatagagcatcaaaaaactctaaaagtttcgttctaacccaaaccacctcaccaagatagttccttgctaccacaacgatacacatgctcttcaattcaactctaacatcacaatttagcttgagccaatcctgaggaggagggcgccaagcatccaccactgccagggaggagagtgaaagatggaagcacaataatctacataagatgtacgaatagacccaatgcactgagatatattatccagcctattattgtgtaccttatcgttgcagacccgccaaatggttgttggaattattttacca

SEQ ID NO: 218323 - DNA, 10627 bp, Cannabis indica
cgttgattagcaacgagctgcacagcatgtttaaaaatcacgtaatacgcctatgttagttagggtgttacaatttggtatcagagccgccaggttgtcttccgaagatcgtcacgacatgtacaatcatcatcagcagttagctcgtttcacggttctaataagaatttctgtgataacaacaacagcaaaagaagccaagaaaagaatcaaatatggtgataatttctttctacaaataaaaatgcaatcaccttgtccagagtaactgccaaattttgaagcctttgattgtacacaccctcagcctgtcaagcagatggattttgaaaagttaatattacaccaggggacagccatagaagcacaacaagttaaaatgcatgcataagtaatacaaaagtattcacctgaacttccgcatcacttttctcgacctccagacaaatatctgaaaagtatttccttttttcctccaaattatgctttaaaatctcttctgggagctttgttctttcaaagtttataaatctcaccttcaaacattggagtttttggtaaatgacaactgaaaaaggcttataacagcatgaaataaaaacaaaaaacattctgaaagtcaatgaagtaggcaacatttagacataccaggcgagctgaatatgcaatcaaccaatctggcaatccaccaagcaaacaactgcccaaaccagcccttcccaactcaagataatcttcttcagatactgaattagcttcacaagcttctaacatcaactgatgacgatctagaactccatgccaatccttgaggacctgaaaaatagacattacacagataaaagagattaaaagagttatagctcaagagagaaacagaagattcaaacataaaatcaatttgttgcaacagccaccctcagaaaaccaagagtttgagccaagaaatcgttgggctctccacaagatttcacatgaagtgcagttattgctctgttcaaataccttttgaaatgccccttcaccagtcaaattcagatagcttcctcggcagacttggctgccacataagcaaacagatgcttcatattcttccttgctctgtcacaaaaataatcgggaataaacagttagatggaaaaccaagtggaataaaatttagatagtgtgtgtgaagggacaggaaaaagggccatacctcagtaacagagttataatcgaatgttatctcctcaccatggcctattttacgaacagtatatattccgatctgataatgaccacctactgcagtgaccctgcatttaacagattgaagatattacatctactaggatgccagaaagaaaaaagacaacaacaactattatggcacatccaatttaaaggaagaactatccacaagaaaactataataacattaacaacaataaactgctttaaagtatctcattttacatggtatgacaaatgaaattaaaatttcccacaattcacaacactaattaagagttaagaacatatatatacatatataaacacacaataaaataaaactagtaatgcattattaatagggaaactaagcccacagaggattatatatataaaaaaaaaattataagtggcaaaagatgataatcagatgatgttgcaacaatacatcagataacaaaagacctaattttgtattcaaggcaggacagcaattggcaaggccatggccttgtttagggggtgggataggatagcaaatgtatataccaaatgctaagataaatattatggaaaatcttactttgcctcgcagtttggccgacaggaatgacaaattcggctggcatagttagccttatgcattgcatcaacaacaactaaatcatacccatctgcatcaccctgcaggaaaataatgaatgatcaaagaattgtttgcagaagtacttaaaatttaaaattgtttgtaagagtcaaaagtaccttgggtctttcaagatatatgttgtaaaactctggagcctcttgattatttttctgcagggatcgaatcccatcttgcttttcaaaccatttccaaacaggatagacctattaaaagatgtaaagacattgtaaagaagaaaaaaaaaaaaactgtcccgtgaagccttcagaaactagattttaaagcacaaaatcacaagaagaagataaattaaattatatgaagaaaagaaaaggacttcagaatatggcggcatagatttcgtcaacccaactttcaaacatccagaataaatattctcagcaaacaaaaggatccaagaacaataagctaatacctctcccagaaactccacaacaaaatcatcttccccaaagccttcttctttgttacaaacaactccaagcccctgatcaaagtaaccagaaaaaaaaattgtcagaacaaatggagtccagcatcataaagttgcattgttggataaattgtagatcagaacatagaaaaagaactatataaaatggggctcaagataacggcatctacctttctataggcaacatatttgtcatcgacgcgactgcttatggcctttgagataccttgacacattctcacagttcgaaaatctccatccttctcagccgacgcctgaatttcctttataactggctgcagcggatatatcataggagtatttcctgtcccagtaaagtgcctaacttgcttattcagagtgcaaaggagaacttcctcaatgaacacatgtttatctagaagaggccaatccaactcatctggcatagaatcaagtaaaagattgtgggtataggggtcgattccataaacttcttgttctaaaacctcaccaccaagctgttttcttggcttgtagtctttgacttctggaagctccatatctgactcctcggttccattcttctgtgcactaagcttctcgacataatcatctggcaaagatacctgcatcttccgcttcacatcatcttcatctgctactactacatactgatcaatgacttcatatttcctggtaacaggagggaccaaacttgcttttgtcatgcgagcaccccattcacgatcatcagtagtagtatccagaccctcatcaggtgtaaaatatccatcaggtcttgactgccaagttcgacttcctgatctgtcactttcagcatcagagatggaactctcactcccactcttgctatattcagaagacctgttaggatcatcagaagtttcactttctgaatccattgattttttattcagtttggatagtctccttctgatttctcgatcggatgcatcctctccataatccaaaccaccattcaatgagaaggagccattactcctattaaagtacttcctttcactcactttatttagcttcttttgtacttggaggttgaagagagtaatgaaaatgaatcatcttcagacagcttgaatccatcatctctttcatgagaagacttggaacccccatccaaacgtgtggcgagttgaataaataatgtgatgatgcgattcatatttccagcatcaccccgattctttgctctgcatacagaaagttaccagaacacttagtaaaaagaactaaattcctttaaaaaaaaaagctaatttcgtcatttttttaaactaaaggaatgtataaagactacaaagtacatactttattgcatcccgacatattcggctgatatcttccttaacagagctcaatccacggccaatgtaataaccctttctcattttctcctgaatttcagcaacctggaatcaaaagagaattttaaggaacacaaatgaagaaaattatgtttattatttaagaattaaaatagattcaaataaatcaatgattaaccttgggtacaaagaaatcataggtattctccttcattatgtccttcagacttgaagcaagaaattcctccatcctcttatacccattttcagacttcttaatagcccatcgtcttgtacgggcatccctagacaatatagatgaagatctcctagcatcgaagagttttgaacgtttatataaacttcgtcggaaagcttggtttgctgagtctctcttattgacactatcaaaatactctttaagttcaccaaaatcatctgtattcccatacagacccttgactttaagaactgatgaagatttctcagttagctgtttcaaactcctaactttagaatgtgaatcctcaaagttcagtgtaccacgcaagttccggctcttgatccaattaatattgtgaaattttagagtgaggtcagtaaactgactgcaacctctggtgtctattgtagacaaacaagaaaatgaaccaagaatctcttcaagcgtagtggaggtgatgttgatgcaaccaaccaaaaccattgaattgaccttatctttgctataaccactctgcaagggaaaaaaaattgtaaacttgtgatgaagcaataatctcccgctatcttggaaaaccaaattccaatatatgaaaaacctaccatgatgttaaggaagatggagtcagtgcagttaggacctaacgatgacaagtcaatatgtcttgaaatgtccctgtaaaacctggcagcagctctccaatgcttacagctcaaagaagcgaatacgagggatttcaggtcagctctcagaaaatgaaagacccttgcaagcacatgaccatccaaggaaccccaatccatttgagagagagagcatatgctctcctctctgcagaaagaagcatcaccacacagatcctcaaatgtagattcggttttcgaaagagtctgttcatcgtcctccatttcattttctccctcactgtcatcaaccaaaagacgagctcttttgatggcacgtgcatcccctacttcagcaaagagatgaataaatcaataaattgcaacttcataatgagtactatactaaatctggatgcacataacaacatggataaatgcaaaaacaagatatttatattttaacaaaagagacaaaagagaaaacgataacattgattacaaaagttagaagctaaccaaatggaaggcaaaaatctacaccattaatagtcatagggtttgcaataaactgataagatgtctgatcacagtacaagatttatatataaatatttaagaacgtgttagatgcaaaatacaggacctgaaaaactattttacatgaaacataagaggctatgggggggttgaatacaaaataacacacaacaaaagtaaaataaaatcaagatgaaaatgacaaaattaaaataactcaaaaatatttgtaatgaaaagcagtgcttccacatttaaggaaactactgtacctgctttccaattaacatgcttatccatctcttttttgggctgtttcgcattaatccatgggtctaaaacttcattaatagctgctgcaaactcccggctcttgtatgatttcatcactagttcatgtagctttccacgggtataaccaataaactgaggatgtaggttgtggaacatatttggcttcgcattagattcgccatgtgaaataccctgaaattgtgaaagaggttctaaagaatcaccagatgttgtagtgttcccatgttgagccttaactatctgttcagaagtctcggcagaatgggcaactggaacccaggttctatcgaacttacggaaaacactgctatgtttttggatacttccttgatctgccaaagcctgaagctctgaaaatgatgaaggtccccgctcatgtccagcaccatcaagatagtaccattcacccaaatgcaactgtaagtcatcaaatgtgcaaatacgatcctttggggtattaatagatgaagtgtttctccaagagccctgaaaaccatgctcactaacactttttgattgaatatcaccttctgcagaagatcttttgccatcactacttgcagaatgtgaccgagcagaccttgaagaatatcgatccttaactcgaactttattgcgaggctcagaaacaaaagaaccatggtctttaacaacacatgtatttatcctaatgacgggaagcatagttccttttactcctctaactataagaagcttactttgggtggtcctgctgcaatcactcctctcatctgtggttgaaaaggcccaaagtggtaaatcaagccttcttccctgggatggacaatacaggtcatctttccgatgccatcgaggatcctcatacccagacttggccataaggcatagtgggaaaccatcattgagaacgagtttctttctattagatttatcttgggcagcttcatcattcctcttccagtcaccacccttgcatgaccatctaccagaaaaccaatcaccagagtcaccacaatcaaaaccatattccttgtctaagggtacaatgaacctagattctgcaccttctactaattggatgtcagaatgtgttgatggttcatcatttctctgttcatccctttcattgatctggccagcatgcaaaatgaaacctgcacatatccaggaacgtccaatgcatgaaaattcttagtgtaggtgcagactaaagaaaaatgataacttaaagatagttgaataataaattgaaaaggtttttattacatagtactatgttgaattttatgttttgaaaatatttataacttattcagacaagaatttaaaagtaaaactgcacaaccctagttatgcataagatatgtgcaatctaaacccttcctttttggctcaaaatgtagtaacaataacataaatataaatatacatataatatatagaaattttcattacggtaagtatgaaaattttaattaatcaatttctacggctcttatcccaactaccaaaaatgcaatgtgatattataaatcatacagctttgctaggacaaaaaaaatgaaaaaacttatggtaccatctagacccaaatgcggaagcaagaattgtagaaataaacagtctgtcaatagactcaatacagtaagaaaagtaataattatacaacaaacaggcatttatcaggcaatattataacaataaaaaagagttatcagtaaaaagcattaaattatctcgaacaacattgttaaccaacaaatatataaatatatatatgtatatatcttaaggatcatctagtgataatgaaaggagatctataaatgctagttactgtgagcgtgtatattatatgtacaacttaaataaacttttaccttcagattttccccattcctcccacagcgcatgctcaaaagtcatttgtagaacttctgcaagataataaattacccaaaaaaaaatacatgggcaaagtgagaaaaaacttaaggaatacaaaaacacgttacaaaaagaaaagaaaaaaaatagttcccagattttcttttaaagaagaaaaaaaggaaacagagagagagtacctccaacagcttccaattcttttccaggaataactgtaaagccatcaaacagagccccgaccctttcatcgatgcggagatcttgaagaggctcagaaagtgcttcactatcatttgttctttcttcagtagtctgagcaccatattgcccagtatccccagtatcagctaataaattacccggagcttctggagggctcgccaattgagttatagagtccgacataatggatgtgaaattcacagtaaccaaaggtgaaacagcattttcaactgtcacccacctatcaccatctatatgcttcaccatgtgatcggacagcagagctccttcttccaccaatgccttaagatcacataattttgaaggtccgtgctcaacaccatagtaatcaaggtaaaaccatttcccagtagatacgtcagaaacgactgggacatgtggcggtgtatcacagatatccatgtcttcttccatagaaggcatctcttcctgagaaactccaactatatcagaactttcttggcaatttataactggactttgaggctcctctttgtgagtctcgcatttggcacttgcttccgtggaaccactaatattgagagcattgttacttttatcttgagattccttagctgaagaatgtgagtctttcccaacaggttctttctggactggtttatcttcttgccctttggtaacatactgagagttccgcttgtcacttggtccaattttcctaactatttctctatggttattctgtctgctccgatcatgcggggaccgctccataaagtttggagttctatcccttcggtcatgatgtctagctcgatcttgtggggaaagactctgatttttgtgatcatactgacgattacgatcatatggggatctctcacgaccatatggagaccgctcccgaccataaggtgacctttctcgacgaacaggactcctgtcccggtgatcataataacggttcctgtcacgtggggagcgctccaaatggcctggacttcgtccatgcctgtcaaaaacagggacagctctggcaggcaatgtagaatcataatgcctggcagagtacttgtcagttgaaattctggtggaagaagaagaagaatttctgtatgacctttccacagaatgacgtgtatagtgttctgcagggacagcacgagtactgtcatcacaaagtctccgactttttgaaccagcgtaatccccataatctccgtaatgtttacgttcactaatatctggttctacaccataacgcttcaaccgattcccagtagagtagtctctcccatgattcttaccgttgctgaattcctttttataactttcatcgtcaacaatttttgagctaatcctcataatcctttcctgaccacattcccacctaggattagtactcttgccatgctgattcccacttctattaaactccttccttctaaaagaatcatcacaaaaatttgaatacttcccagaaggcggagtgcggtcacgttcaaatttccatactttgtccttacctggatcgtacctgcgcattttactataaccgtagtcatctctgggatattcacctttttgccatctatctggaatgaactctcctttctcaatttcatcccttggagccctccacgaagaaaattcaacgtcaacttttctgttcttatctgaaactatctcagccttctccacatcccctcttcgccacttccctgggatgaactccccagtctccaactcacttttcctccacttctcatcaactatctcacccttctcaatttcacttctacgaaacttttctggcacaaattccccattctccacttcccccttgggccacttcaaagtacccaattcaccctcctctacctcatctcttttatcctcactatcaccattctcaacttccttgacaaaactaaccttaccacctttattcaatatcacttcacctttctcagactccccgttccgagcaaaagcctctttttttgccttcattctcttatttttgagcgacttggaactgaagccattgttattagcgttcttgcttccgcaaagcacagttttctccggaatcgcaaacctgtccatgatgttgttttgctgcaaagacatgcatgccacgcctccatcgcccatggaaatcacagcccaacttttagcgaattcgaaaaccctaattctcttcttcgccggggctattgatgctcatgctgcgattcgcttgacactctatccctcttgaatcctccgctccaattcaaaaccctagtttccacaaattcaacagagaaaacatcagcacaggcccaatgtagggtttcagcaaaaaatacacacacacgcacagaacatactattccatacacgaacaaacacacaaaacttcagaagcgagaagctcagcaaatcaaagtcatccccataaaaatttaaaatcaacaaaagcccaagacagaggaaattactgagaaaaattgaagaactaaacgaagagatcggcgtgagaatccagctacgaacctaagaacatgcgaaagaaacagatttcgcgtaaacagatcaagaaacctgttgaaattaatggtagaaaatcaagattttcccttttcagaaatacaatctctctccaattctttaaacttttcctctttctctctcacgcactctgctctaatatcttctcttcttttttttttcttttttttttttggtttcgctctctcgttgtgttcccggtctgaaagtcgaaaccttctattttatttatttctatctatattaaaaaaaaaaaaaaaattgtttccccttaaaagaaaaagaaatatatattgtttcctaaatttgccctttgcctctgcgttacctatcagaaacagcgagtcgtatgctaagggaatttcgatttgataaatacactttattattaaaataaatataaatttaaataatttttaaaaattatttttaatattttttaaaaaaaaaattctaattttttaataattattttacttttatttttataattttttcatgtatatatattttatttttaaaaaaatcatataattttttattttaatttttttcataatatttaaa

SEQ ID NO: 218324 - DNA, 2621 bp, Cannabis indica
aatattccatcaacacattaaattatacaactttatcttcaaataggaacaattaacagtcttttttttttttttttaagaaattgaacatttttgtgattgtggttatggatgggtttatgatttattcacggctctttcattgcggaaaatgcatgtgggtgtgggtgagaaagagcaagagaacgtgggaataattgaatcaagactcagaacaacccctcatacgtacagactttcaaagacaaattcacattattattttatatatttctattttagttctctttagtttcagagctcacatgctacaccttgttgtattacttgtcctggtcccttatttaaagctgaacctctggttggaaatgacaataaatgtaaacaaaagtacattaattctcaactctcataatcactcacttaccttctctttttcttctctctttgctctctcatccaattaataataatggccaaactcatttttgcattggcaatcttggttggactagtactcaatatttctaccaaagtgggtgcatttgccgcatctggatggactccagctcatgctacattctatggtggaagtgatgcctcgggcactatgggtaaaatagggaaattaatgaagccatgcatagtcatagtcatagcattgtatatgtaattatggagttttaataaatttgtttttgttttttttttccaggtggggcttgtggatatggtaatttgtatcaagcagggtatggtactaggactgctgcattaagcacagctttgttcaacgatggagcttcatgtgggcaatgctataagatcatgtgtgactataaaacagatccaagatggtgtgtcaaaggatcttctatcactatcacagccaccaatttttgcccaccaaactttgctcttccaaataacaatggaggctggtgcaacccaccactcaagcattttgacatggctcaacctgcttgggaaaaaattggtatttacaggggaggcatcatacctgttgtgttccaaaggtaactattctcaactctcttttttttttgttcagaaaaaaaaaatgaaaaatagcattattacaaagacttttgaaaaatatcacttaaaaacaaaaattatctgcattggtacggtggttggtaaattaaaaaaacgaatggtttctctcaggcaaattttcattttttatggtttttaaagtataaaattataaaagtatggcttttcaccaataaaaaagttattttataaaaaaatttaaaaaaagttaacaaatatagaaaaaaaatagcataaagtaattagttacctctttatggtaactgattaacccctcaagttatcataagaatatttatccttacttgtattttttttattattttttaatttttttcgtcaatttttttataaaatactttttttttgaaataaaagttttacttttgcaaaaaaatataaaaatccataaaatttgtaatttactttaataataataataataataataaatgtggggatttggttttatggtgcagggttccatgcaacaagaagggtggagttagattcagcatcaatgggaggaactactttgagcttgttttgataagcaatgtaggaggggctggatctattcaatctgtttctattaaaggctcaaaaacctctggatggatgtccatgtcaaggaattggggagctaattggcagtctaattcctttctcaatggtcaatctctatcctttaaggtcaccactactgatggtgtaactagacaattcctaaatgttgttccagcaaattggtcatttggccaaacatttgcaagtcgagtccagttctaaaagctcaagaatagcttagggttcaaggtttagggttttgatcggataggccgaggcgtgcttggtattttcatgaagcagcccgccgctattttctggtcatccaatcagattgaatgaatatattttggggagcaaaaacctgtgaactcaaagctaggctagctactaccttttcaattattcttcctttccttttgtttctctaatttagcaagagaaatggaacaggcatatggccaaggatgtttctccttcctttatgtgtggattttgtatttgttatagtactcaaataaagagtgtattatttgaaggtgcaatttcgtcatgtagaaatattacttttcgcaatttacaatcctttgtagaatgaaatcttgttgtaatattcatattatttaaacttgaatgtgctcttttctttatgaagtaatttggttttactgttattatgttgtgaactatatggtgtttgtacatttaaatactttgcattgaggtgataatttacatacaaacaaaattataagaccaaatagactctataattgattggaaatagggttgtgcatgcaatttaataataaccgatcgattcaattataatcgactgtcaaatatcggatatttaattgtgatcggattagattaaattttatttttgaatatccaattgaatcggattggatgttggatagggtgtccaaaaatttaatacatccaatatctaatcgaattaattagtattt

SEQ ID NO: 218325 - DNA, 6338 bp, Cannabis indica
ataaaatctaattagtcattcaaactaaatgaaaatattaattagttcgattagatattggatggattggatttttaaacacccaatctaacaactgatccgatccaattagatattcaaaaataacatccaatccaattcaatcacaattagatatccaacatgtgactgtcgattataattaaatcggtcagttatcattgaattggatcattcatgcaccttgctttattttgatgtacttctgtttatcttggccacgtttcctaataaaattctatgatatttctttcaaaagtcaaaaaataaaaaaaatttactgctaaattatttctgaataaaattcatcatttcaaatcttcatgttaaaagtttcactattacttttcatctcacaactgaattttacatgtacaagttgcatacaattggaggaaatgaaaaacaacaaagtgttcttgcttgttgtacggacccccacaaaaaaaatgaaataaacataaataatgttacactgctaatacttcacccttctaaaaaaaattaataaattaataaaattatttgtttttgttttcgtttcggcttcttgaaatttcaatcataaaagacgcgttctccagtagcaaaaaggttccaaaatatggctgcagcgaaatagagagctgctgtgacagttaagaatgcttgaaatgatcctaaccattggacaaaatatccagttcctatggtgctgatgatggccgccaatgtacccgccgaatttgaaatccctgttaaagagaaacaaaataatctaagaaagagtcatagtaaacaaaaatccaatgtagaagatggaaaaagtagaaagaacataccatggagaaatccagcatattgaggagctatgtcctgtttaattcaaaaagagacaagaaaattattcatgcttattcgaacaaatttgtggcgaaaatttaaatttgatgatggaatagcaagggacttacttgcatattgaggaaataaccagcttgggtgaaagagcttaagctcaaagctatggtgaggagtacggctgcagctataggtgttttcgcgtagttcaagcatagcaatgccactccgggtccaatgaaaccgatggactgaattacaacaagtattacataatctcttagtgagttatataaagatgaacaaatagtcttgtactagtttcaagaattaaatgcaatatcagcataacctaatgggaataaacagcgagtcccatcgctcgtccttgttagattgttcacatgaaaagtgttacactactcgtaaccaatcagcattgagatgcgaaaccgtcaattttacttcctatagtttccgttctactactgtctaaaccttcattccactatcttttttaataggcctaatgctaaatttataatgtcattctcattaggtacttagtttggcttctaattcgacaaagagacgttgaagagtgaaaacaatacctgcatgagctttcgaactagtgtcaacgagtatcctgtcttgattaagttatctgatattgtgcctgcaatgaagccagaaaccgccattgttccccatggaacggcactaaaccatgctgcttgcttcaagttcacattaaatacctatagaagagacaaaaacaggtataactaattgttaaggacttaaattaagggtattttgcttgtaatctcatatgattaagttgagaaataacagtttcttttgtgatcatgctaattgtaggaatggtttacttacagtcttaaagtagacaggcatccatgagagaagaacaaagtatccctgcagtacagaccattgataagcaaagcttcatacataagctgtcatttcagccattcattaccggagaaaaaactcacccaattgttggttacattagcaaaaataattgcccatgtcggtaactttgatagtagaaggcgcagaggtgggaatttgtcattttttactggagaatcagttttgcctgcttggattaaaagaagctctgatttgctgatataagagctatctttagggtcatttgatacctttaacgcccatatcatcaaccagactaacccaaacgacgagaagagaatgaatggacctgacatccccatcgatgacagcattattggagtaagtaggaaccctgcaacattgccaagatgaaatccagccatagatagtccaaccgcactcgctctttcttgcgttggaaaccacctatacaaaaatcaccaattaacacttttcacttcttgaaagaatcgatttcctcatcgtgcagtcttaaggaatcttctagtttttggttggtttagaagtaacttattataagagtttagtctctatttataatgacactaaaggggaatcacctggatatgagagtgctcattgagggaaaggctacaccttcagcaagtccaaagacgacccgaatagctaagaggcttgttgtcgagtggttggcagccaatggtgttaagagagtagctaaagaccataaagccacaccatatgccatcactttctttcctccatatttgtccactaatgcccctccaatcactgaggagaaaatgtatccccatagaaaagacgacttcaaaaaaaaaggcacttaattcgtcagcattgatttttacaacaaaatggttaacaagcacaaaaaactaaggtacacgaaaataagaaaatatagcatttcgggctgctatttgctaagcattgaaagttctcatgttaacatattgtaatggattataatatcctccattctataagtagcattgtattctcttactctctcaaccttcatactacaatccaaagttatagtcaaacaagcacccaatcctgaacaatagcaagcaaattttgcttactaaagatctaatttaagattggtgctcaaaatagagccaccttctagaaaaagtatataagagtatccctcatcaaatagatgtgaggaaggattcaacccatttaagaccatgagttaccatacacacaattatatactgtaaatttctcctatcccctaaaatcaggtcttactatctaaactttttacacatacattcttcttcaaagtcatcatagattcatggtctcacactataaaaatgggcttgggttgataccaattagcccattaagagatttggtgagaaataagcttgttgattatggtatcatgttgtggggacaaagaggaacataacttaaattttagagaaacggctaaccaacaacagcctctaatttcaactactacacacaagtcacaacaaccacatctcccatacatttaatcactaaagataacttaagtagtacatgtgaatagaaaccatatgaaaaatcccaagtcttattagtttgattcaaaatgaaatgaatgaagaaataagtaatacatgcacaattataagccaaagaaatccaaaactcaaaaagaaaaatcacaagtcaaattagtttgattgaaattgaatatacctgaacaatgcctaagaaagagctagaccaaccaagcttggcagccaagggaacgacggccacagacataacgactctatcggcgttacataaacacataacggcagccaccatagccaccaccttaagtctctctggaacgttgactttgactttttctgtagaagaagaactccttcttcctcctccaaccaatattcctctttctaatccctctgccgtacacctcaccaccccatcatttcttcttcttcttctctcaaaatgctctgttttgttgggtattctgattcttggtccgtttccaatgcttgaaaaacctctccattgtttggttagcttggcttggagtatgggagcgtagctcaactgggtcttgttcaaatccttcaaattcgaatggggttttgagaaacaagatgggtaagaagaaggggctgaagtcgtcgccattggagaaagaacagagcaaaagcagagagctttgaagagagagaatgtgtcagcatacacagaaaatggtttaaataataataacaaatctttctgagttttgtgtgtttggaaagagagaaagatcacatatacaatctttccaacaacttgaacattggagaaatggaaaaagaaaagaaacggaaaaatgttgtttgttccaaggttggtatgtataaataaacttatttgttggaatatttatatgctataaaagtgtacatcaatatcaataattacattcctaattaagtcaattattaaaatacaattttgcatttattattagcattaaaagaaatagagaaatgacaaaagcaccaaatagtgtttaatacgaccccgaaatgaaatgtgatataaggtgattagtttttaagtttttttttttttttttgaaatgatagtttttaaattaaatcatatggatctcatatttaattttgtcaataataataaatattaagtgatttctaatatatattttttaatttaataaatattttaaaatttctttaaccattcataatttgtgaccgcatatatatatggacaccatacctaataacaatatttattaataaataatcttaatgattttgcctagtaattatcttatcaaaataaataactatgagaaattattgacttgtacatgtacttttaatgtttaagttgaattttttttttttacatagttctataatacaattagcgaggataaggattatctataaaattttagaaaatttatgataatataggatgcgagaattcttgtatatatatttatatgcaagtgtaattagtggtagactcaaaatttaaagtgaataagggtaattttttaagacaaatagacaaaaataaactttttttaaaaaatatattcttagaattttgagtccaccctcttaagtggcgtttgtttggaggtaatgaaatagaaagaaaattacttatcaaaaaaaaaaaaaagaaatggaaagaaaataattttcattctatttctttctttgattgcattttaaagtattagaatgacattcgaatggaatgttctttcaccattttggtggaatcactattcattccattttaaaaaagaaaaaagaccattccaatataataaaagaaaaatttaataatttttttatcaagtattttaaattttattccattttaatcttattcctattctattcttatattttcatttcttccaaccaaacactatctaagtgtaatacacgatttgaatgcagtcactaagaaaattttcattcttattttgtatttatcattctaaattcttaaaaattttcaaaaacagtatacactattacgaagaaaaaagtataattattaattattatttatttatgtaacaaaaatatataaaaaattataaagtattcataaatatgattttataaaattaaatcaattttaattattcataagaaatacaaatttaattttaataaaaaatagaaataataaaaattaaatattaaaataagttaattgtgtacagatacaactagttacaatttattaattaaagagtattattatagggtaccaaaatgataacttttataatttgttaacggttcctaataaaaaaaaattaaaataagctaataccaacaacacaatatttaacatttctcttgtgtaaatggtattgtccattagattggggaagatacgtggacattacgtgtaactacttacaaagtttacaacaacacaatcaccaccaaccctatgggcaccacctaccacaaaacatatttgaattcaattcaactctaaaccaaacccaataaattatgactttgcattttggtttcagtgtgcttttgtatagcttttttatttgaacaataaaatattcaaagaaaaaccacacataaatatcttttggttttctataaattacaaatttaaagagtgaatatctttatggtgtattagggctagttcgatacagttatgctgtgggaaaaaacaactatagcaaaattgtggaaaaaagttaagctaagtgtttaataaattataaattttaaagtattgtgagttgttaagatctattataatgataatgataatgatataatctagtttattataatcacaaatatgtaagaacatattttatataatagtttattttttatatatttttaattcttttttcaaatataaatttatatgcatttaataaaaataaattatagtatttttttattctgttttatcaaatgtaaaaaaaaaattagaaactcaagtatata

SEQ ID NO: 218326 - DNA, 6378 bp, Cannabis indica
tatatttttttaaaaaaaatctttaaacaataaaagaccaagagacctcttgaggtgagggcccttagagaactactcccatctgaagaccactagttttaaaacattccaagaaactaagaagaatcccatgtatgacatgtgtctctgcagcacacttaaactccatcacatgactctctcctatctacaaagagtagctgagaaccctaaacactctaagattgctataaattgcacaacattaaatgcattcattgcagccatttttagcttagatatatagagtagagcattgttattaagcatcagtggtacttaacaccttctcgacatgtgttgcgattggctagcgatattccttaaaaactattatattaaattatatgggattagatacttaattgaaccaattacgatattgacacataagaggatgctagatactactagtgtcttttagcatttatcatatagagtactatgtatgtatgcttaatttaattgcttaagacaatataattaataaataatagtaataatgtgtgtatattttctgaattaaaagataataattaataagttaagttgaagcctgctttggttggttgtactctagtctagtggtggtgggtgcttcaatttatgtgtaattaagcttttgtttttcgtttctggtgctccttaaagaccatcaataataatagaccaaagaaaagaaaacagagagaaagagagatgttgggttggggtgggtaccttttattctgttgtcttggacattgttccctccaaatttatgaaacaaagaacaaaaaaataaagtgtttttgagacacctttcaaaatttcagtactagctatcttatcacacgtgtgaacccacatagctactagctagtgtgaagaaaattcaatcttatttattatggtgatgatgatacatgatgtacataatatatatgtatagatatgatatgtggtgtgcatcatgtatgagaatgaaattgatgagtatgtatagattacagactattactattaggcttgggccaaaatagaagtttatattgttcatactctacaaggtgtttcttttattggctaagttgagttctaaaaggttttctgaccaatggggtagtaagagagagatgggaaattgagtttaagatgagagaatgaggtgaagttgacctgttgagcgtgtggaaaaagaaaatgaagtgaaaggtatatgcttttttgaccaacatcttattattttccactttcaacaatactgctaaaaagggtacatacaattttcttatttggtttccattttcatgtatgtgattcattgtcaagtgtagagttgtatgtttttatagtaaaaatggtagaggaggaaagatatatagacttgaattgaattaccaatttacccatttgtttatttagtcatggaaaaagaaaagcttttgagacatttggggtgttgatattgaatgccaactgtttgattttttgtcaattcaaattttttgataagtaataaggaacaaaacagtgaaacaagataaaaaaagaagactgtcaagattgaaacttacctagctgatgtggtcctcttttctaaaccttttctttgaactgtcttattgtgtacttacttagtcttgtggagggaacattaaccattcttgtataaaacaatcagttgggagttcacccaaccctaccaaaaaaaaaaaagaagaaaaaatccaccaagtaactaggaaagagccaaacaagttatacataagaaaccaaaagatcccccatgccttacaatttctccttctaacttgaccaaaaaaataaaataaaagaatcccatcatgagcaattctcttcttctgtgttttctctacttcattatgcttatgattatattctgcaatcatgggacacattctggcagtacaatgtcattactagaaggtttctttctttcttaacctttcctttccttttcacttcttctctgataatcttaatttccttttgtcttctttttacagaaagttctttgcattcatttcttgatgataacaaccagacaacagcaaagaaatttgagcaggcccactcaaaccatagaaagcttttggttcagggtaaaacacatcatgacaagttctttttgttttggccattttcataattgtgttttaactttttgttctatgatcttaaatcaggtagttgtacaagcagagacataagcatatctcagagcagagatacaacacctggaatcccacaattcatagtacaaatagtcaacacttgtgtttgtggatgtgctccttcaaatattcatctccattgtggttggtttgcctcagcaagaataattagcccaatgatgttcaagaggctctcctatgatgattgcttagttaatggtggaaagcctttgaaaaacagccagattatcagattcacttactctaactctttcatgtaccctctttcattaaggtctgtcaagctttgctgagttaaaatttcccacaaattcaacagatgagtgaataaaatcccaagttttgagaatcattgtcatcttcttcctttgccaatggtgtgatatattttcatctacctattttctgtgattatgttgtaaattttctctttgacctttgactctataggtcaaagagatataagttccattttctttattttgtcttgagttagaaactgtggtgaacaaaattgtcagtaacattagatttggaaaatgtcatgttatgaccatgcacatgcaaaattgatgattttaaattttttttgacaagaaagatccataactttcaatgacaccttttgaattttggttttatttattaaccatttatttacaattgacaattatatgcagcaagtttctgattttcctttcaatgtgaggacattgaaaaaggtatcatattttacaaccaactatacaaaagttcctataaacagaaatcaaaagaaaaaactaacaaaaattcaagcattatcttcctcttggattgacaagctgtgaaaaaactggaatagtgtgtaaatcattagttatctgggcagctggactctctttattcacctcttcctcaatgtttattatagaagaatcactattactcacatttctttctacaaaagctcttgcagcctcaggatttatattcaattgaagtgcatactcaaggttccatagaacatcacccattgaaggacgatccacactatgatcactcaaacacttctcagctgtctcagcaaacttcttgaaacactcgatgttcatcgaccctttaagatttggatcgacgatttcttctaaagttcctctcttttggcagtacataacccaatctgcaagattgacttgttcctttggcaaactatcatcaagagctggcctagcacataacacttcaaaaagaacaacaccaaaggagtaaacatctgatttttcggttattttttgcctgcgaaagtattcaggatccaaatatccaaagctaccttttaccactgtactaatgtgagtattattgatactaagaccttgttttgataacccaaaatcagaaacttttgcttcccaattttcatccaacaaaatgtttgtagtctttacatctctatgaatgatagtgtaattgacaccagtatgaaggtaatgcaatccttttgctgcaccaatacaaatctccaacctcttttgccatggtaatggaggattttcactcttaaacaagtgttcccttagagtcccattagacatgtaatcataaacaagaatcatctcacctgcttcagcacaaaaaccaatcaaggaaactaaatgcttgtgcctcagctttgaaagcaattcgatttcggtttggaactccatgaatccttgtgaagaagttggatttgatcttttaattgcaactttgatcactccatctatagtccctttataaacttttccaaatcctccaaccccaataactcgtgactcatcaaaattctttgaaccttgtctaatctcagcaagcgaaaagtgtctacaaagacttgctagattagaaagagggctgctattattagtactcttactggtgaaagttgatgagtatgaacttccatagattggcagccaattagcaggtccagaatccattcctttatcttttgttctcttatggtggtacacaagaaagcatacagatgaaacaaccgcgaaaccagcagcagcaccagcaacaccaccagcaataccgccaatagcctcgtagcgtaatcccaatggaggtgaattggtgtcaacctctacctcatcctcttggcgcatctcagaaggcactggattaggccctgctaagttcccatgtgtgtcatttaccttgaaaatctctaagccattaagaattgcatccagattttcgggttttgatgacacagttggatgcagggcaacccataattttgcacaaccaattctgctgtcattgacataaatagcataatctctatacacaggaactcctcttgaaccagcccaagcaatcacatccacagaaggttgagctgtttggttgttgagaaatatatcaaacactctctcattgatctttgtttgctcaatctcacagaaatggaacctaacaacataggtgaaatatgcatcaacttcaaaagtccaagtgagattgtagttttgatttgtttctgaactatttcccattgttctagctgatctatacacactccttggagcaatgtactcaggcatattaggtggataatcaatactaaggctcttaccagcttctgaggttattccataggctgatccaaacatgtaaggtgaatcatcataccatgtacggctaagacctgagtcacttgttgttggaatgtactgtccaccaacattaagcctatacatagtttgaaccaacgaagaccgaacatcgattgtttggccttgttcggatccaaccaggtttgcaggctcaaatatgtctggcatgggaattacctcaattccattgacaaaagcaaatgagccatttttctgtggagagggtttgaagctgattgagaggttgccattaaggacaggaagaaacgaaaactctttgattatataggcttgtgttaaagcttcagctgtaattgaggcactgaaattgttgaggagagtaaaaccatttgcaatgacagagaaaaatgcatcatttggattgagatcattgtaagaagatggatagaaatgaagccttatccagaggcgtttcttcggttgaacgttgaagttgtacgcggcttctgaggtgaaaattcttgctgtcatgtaaggaacttgagatggtagagaagggtcttggtgcattgctgtaccgtttattgaaacacccgaaggcgttaccaattttgaatccggtatccattttctaccattaatatctgtgctttcgatctgagctccacacgaaaggacataagattcggacaccacagacgattctgattccaagtttttggtttcaacaaatgccaaagataagaagaagaggaagaacacaacacaatatatggtattggtattggagttcatatctaaaagggaagaaaacagaggaaaacagaggaaaacagagaaagaagaagggaaaatgtttctctatttctttattaactaaaaaatgaacaatggaaatggattttccatccaaggtctcagttagagatattgaatccatttggaatcatctgaaacagaagacagaacaataatcacaagggataataatggtttcatatctaaagaaaaaaaacagaggaaaacagagaagaaaaggaaggaaaacaaagatttttccatgtagaataataattgaattaagaattttgggtacattttgaataattatctgtaacagaagggaggattgcagaggatgaagatgacatgtttgtgtttgttgggtattttattattattattattatttttttttttgagaaatgtgagtcaatctaagtttgttgttttaagaatctaaaggacgttaggatacgaggtagttagagaccaacggttttgtagagagtaaaatctaaaatatccttattttatttagtttatttatataatataagtaaagaaataaaaatgggagaggatatagatagatagttctaccatccattattaccgttaatttaggggactccttcaagttcaagggttttatgagagggaccatcacaggtttatcattgttatccagatataaactagagtttaaaagggttttttttttttttttactaaataaaatatctctcgattgt

SEQ ID NO: 218327 - DNA, 11679 bp, Cannabis indica
ttaaaatattctaaaattttacaggttgtagaataattattgcatacaagatcatagaaaaaaaaataaattaaaaaaattcttgtagatgctgaaatagataagaggtctatcgaaatactcaaactataaacttacccataaaatttattagagcattgttgtgaggcaccaagttgtcgtagcagtaccactataaagtgatatcctataattagttagcggttcgttataatatttattaaatgagcatattattaagcaccagctatgcccaacactttctatataagttgcatcccacgattaattaacaatatttcttaaaaattattttttaaattatatagactcaatacttaattacactagcattataataccagatgattaatagcttttagcaaataaaaaataaaataggtatatcatttctcaattaattaatgtataaaggatgagaaagcaattaattaatgtataaaggatgagaaagtaagtaaatataaagaaataaatatagtaccaacatccaaaccgaattgtgatgtcaacccatagccatagttatactcacgtactctatccactcccatggctacccatctctagttctacgcaaacacctccaaaacgagctcgtatactaaaccactccaccgctactaaacccataattcactcaccctcttcctcttcccaaccatggatcgaatcactgcgatttcaggtccgttccaatcttttccaggaagccatttcgacctacattcacatcacaagcaccggcactcctccggacaatttcgctttccccgcaattctaaaggctgctacggctcttcacgacttggatttggggaagcagattcattcccacgtagtgaaattcggctaccaatcgtcttcggtcgccgtggctaatacccttgtcaacgtgtatggaaaatgcggtgatattgacgatgcatgtaaggtgtttgagagaattactgaaagagaccaagtttcttggaactcgatgattgcggctttctgtcgttttcaagagtgggaacttgctttggaggcgtttcggtctatgctaagggaagaaaacgtggtgcctagctcttttactctggtgagcgtggcacatgcttgttcgaatttggacaagcatcgtggtttgtggcttggtaagcaagttcatggatatagtcttaggaatggagataggaagacttttacaatcaatgctttgattgctatgtatgctaagcttagacgagttgatgattccatagctttatttcagttatttgaggaccgtgatttggtttcgtggaacaccatgataagttcattatcacaaaatgaccggtttgtagaagccttagtgttcttgcacaagatggttcttgcaggatttaaactagatggtgtcacgattgcaagtgttcttcctgcctgctctcatcttgagatgctagacttggggaaggaaattcatgcttatgcaatgcgcaatgataatttggtaagaaattcttatgtgggaagtgctttagttgacatgtactgcaattgtagattagtagagagtggtcgacgagttttcgattctatcttggagcgaaggattgctctctggaatgctatgattactggttatgcacaaaatgagcatgatgaggaggcattgagcttgtttcttgaaatgtatgctgtttctgggatctctcccaatgctaccactatgtcaagtattgttcctgcttgtgttcgctatgaagatttctctgataaagaaagtatccatggctatgtagtaaaaatgggttttgcaagtgaccgttatgtgcaaaacgcgttaatggacatgtactccaggatggggaagatagaaatatctaagaaaatatttgaaagcatgaaagaaagagatatagtatcttggaacactatgattactggttatgttatttgtggataccatgatgaagcacttaatttgctacatgagatgcaactgggctctggtgaactgaaagatgagaaaggaattcgtctcaaaccgaattcagtaacgctcatgacaatccttcctggttgtgctgcattgtcagcacttgctaagggtaaagaaattcatgcttatgctattagacatttgttagcatctgatgtggcagttggtagtgcactagttgatatgtatgcaaaatgtggttccttgaatgtagctagtgctgtatttaatgaaatgcccattcgaaatgtgatcacatggaatgtactcattatggcctatggaatgcatgggagagctaaagaagccttggaactttttgacaacatgatggttgaaagagtcaataataaagaagtgaggcctagtgaagttacatttatagcagtttttgcagcatgtagtcactctgggatggtttctgaaggattgaaattgttccatagaatgaaagaggactatggggtcgagcctataccagatcattatgcgtgtgttgtagatttgcttggccgagctggtaaggtggaggaggcatttcaactcatcaacacaatgccttctaactttgacaaagcaggtgcttggagtagccttcttggtgcttgtcgaattcatcagaatgtagagatcggggagattgcagctgagaatctcttgcagttggagcccaatgtagctagccactatgttcttctctctaacatctacgcatctgctgggctttgggacaaggcaatgaatattcggagaatgatgaaggaaatgggggtaaaaaaagaacctggctgtagctggatcgaattcggtgacaaagtgcataagtttttggctggagatggatcccatccacaaagtgagcaactccatgaatttcttgagaccctttctgttaggatgaaaaaggaaggatatgtgcctgatacttcttgtgtgcttcatgatgttgaagaagaagcaaaagaaactttgctttgtgggcacagtgagaaactagcgatagctttcgggattctgaatactcctcctggaactaccattagagttaccaagaaccttagagtttgtaatgactgccatgctgcaagtaaggtcatctctaagatagttaacagggaaatcattttaagggatgtaaggagattccatcatttcaagaatggaacttgttcttgtggggattattggtaaatattatataaaggtgggaagaggtgattgataacctcattttttttctaacgattttgcttagcttgctttgtcattcttggatttgttgtttatggttgtacaactaaattgaacggttggaaatataaaccgaaaagagaaaagaaaatagggctatatcaaaaaaatgatcacaaatattctcctaaatttcttttatattaagttcctgaataaaactaaacatcataaaaaaattgattgatttgtgtaaagcctcattagattatatctctatataatatgaattaaagtctacatatatatcatgtacatgtacaaatgattacttttcccttacataaatatatatttatatataaatgtgtgaataggctagctacacttttcagaactaacacttaatagctggctgttttctccagtttcaattcttaatagctggctattgtcttcagtttcaatgtacaaagagctagaactatcactacaagggccataagttgacatgcttagggaagggcttgggttctgccagaaatgattcccagagcttctttgcttggagttagtggaagaaaacccgggatcagacagtagctcttgcaccgctgttcggccttcaagaatgcttaccacttgtgacattgttggtcgaagagttggggaggcattggtgcacaagagagcaacattaagcattagaattgcctcctctgatgagaattctgatcccaaagatggatcaaccatttccaatagattccctctctcttgcaacacataggcctaacatgaaaaaagaaaacattggttatgtcaatgtcatgatgagcatacttcatcaacaatacttaattgaatttgtgaaacaatttgctgattattacccagtcaagaaggtaaacgaagtcatctggtcggtagttcgaattgctctttccactgactatctccaatgccacaactccgaagctataaacatcagctttgtcagtcaagtagcctcgcattgcatactctggagccatataaccgctgcaggatcaacagttgaaaaagaggttttagtatgattaaatataaactaattttgcacagttggttctttttatgtagagaaaaacatacatagtcccagcaatccgagtgctgatgtgggtgttgtcatcttcattgagctttgccaagccgaaatcagaaattttagcattgaaatccttgtcgagtaacacattgcttgtcttgatgtccctatgcacaatttttattgtagattcttcatggagatataccaaacctctagcaatacccatgcaaattttcttcctggtagaccagtctaatttcaatctatgagatgggtccttccctgcatatgatttagaaaaagttcatcattaaactttctactataaattgtttctatttaaacagcaatacagctaaagaacttaccgaaaagtgctcgggatagacaattgttttccatatactcataaatcagcatcagctggtttccttcaacacagcagccatgtagcttcacaagattttgatgttgcagggcggaaatcatccctatctcattcacaaattcgcgatttccttgctttgattttgatgagagctgctttactgcaattatggtgccatctgataattcaccctgcattgaaaaaatagagttcacattgacggtaagtttcgccaaaaaaaattacatgcgagttacataataagcggtgaattacgacatctacaaagcacaaagtttcacacacaaaacccagtaagaattaagacatttggtacaaagatgttgatgtacatccaagagatactgatggatgatcatatggatttactttctcaaaaccttccaatgaattcaatatagtttaatcagtagtttctgcagcaagatacaaaatcttccatagcatttactcctacacttccaaataatctaaccaacattcatttgcagaagcagtaacttataattaccttgtacactgcaccaaaaccaccctccccaagtttgtttgcaggatcaaagtttgttgttgcagtctttatctgtctcaaagtaaatatcccagtttgcagatccatatttctgaattctgttacaaatgtggaagagaaataattgagattcgaaaaggataaaattcgtctctaacaataccaaggaaggagaaagcatttcagtcttgtatgttttttcttagataaaatttaaagattgatttgtgatcatgttatttatacaacatggacaaattctccacatcacttggtgttagtaacagttggactagaagaaacttcttttgaaatcatgagctgagtaattatagagtttgaagttcatacctttgtctgtggaatcttttcctccaagccaacccttcctcctcagaatgactgtgattagcaagcaaagaaataaagagctaaccaatatccccacaattaacaggacattaatctttttacttatagctgaagggggtgaagggggtttgaagtctgcaaaagaatgaataataatgttaaagatcatatacatatacataagcatatgtaagtttgacagtgccacaagtcttttctccaaaacagcacttactaggatctactgaaatggctgaaattagaggaccataaaaccctctctctgggattccagttgttccttttccagcccagtaaaaccgaatctttagtgtattacttgtgacaaatactgtaaaattcttcacaatgggtttaccaacatcaccagcttccttttctatattgaaatctttcaggactaacttttcctatatgcaaaagagttaagtgaataacttactactcacaattacaaacagtgaactctctagtctctaccatattgtatttgtgggattttagttacctggatatagacatcgaaaatacgctttccaagactgatgaatgacttgtcattagtgaatatgatctcagcaaagtgaagctttacagtgtagtttccattaataagacagagtccatagtaagtggcagagagaggagagacgcgtgctgttgtgtataactcagaaatgggccttgagacgttgagagcagtagtgttggtcaaaatataggtatcgtcatccatgtcattgtcgacgaagttccctgtgctgctcaacgcccagtcctggcctgagtaatacattgcagcacctctttgttccctatcagcttcataagtcgttccattgatagttacttcatttccgccacaattaatgtgcaaagaaaaacgatctgtttcaatccaaaaaaaataacatcaatggcccaagatttgcaaggttttaaacatcccattataaagcttaatgtattagacaagagtacttttcattcatttaccaattctttatttccatgaaatgctataccaaaatgcaactttgaaacaaaagtaaatcttcaaatgacaaggctaaatttatcatgctataatgtccaaatcccacaaccatgattggcagtaccgacacaaagttatgcacttaccatgtttccccgaagaacatggaaaattctgcttgaggcatgaatggatttttctgcagaacacacacttcttatgacttggaggtaaacagacttttgataagacttactaaaacaaaagtaatgataaatacagattgagaaggacattaaactatgtagaaaaaagtccttacagtttattagctgatgaggagtagccttctacaaggtttctgaataacacagaatgtattagtaacaatagacagaatgaaattaagtagataatagatatcgctattcgttacttacacacttcctcggggacattcattaggacttgagttatgccaagtgaaattgttggaagacatatccctgcaaaagaatgaaaaaagaagtaaaataaatagataactaaattagaaaatcagtagagtgatgctgaattagtattttaaacatgaaaaaaaaaatcatgttgtaagttatgagaatttcatcctagaaactactaaagttatgtaactggagccagaaatcctagaacataaggcgatatatgaattgaaaaatgaaccgaagaagaaatcatacacattgtcattcttagaaagcacccagtttggtaaacttccagtaagcttgttccctgtcaaatatctaaacaaaagaaaataaatattatgtcgggtcacattaataagaatggggtgatatgaaagtttagatcattcttctggcttacatgtaatctatttttgtcagttgggcaaaagaggcagggatttccccagtaaactcattatagctgagatcactataacgatatgacaaagcacgaatcaatatccagaaacaatggaacatgaaatggaatgggatacagattcaaagtgtaatagcccaaatcagtttctataggtaataccacactgtcctatatacttctttgagtacttacaggcttttcaagtttgtcatttgtccaatatagtcagggatcttatcatgaattaagcaattcctcagtgtcctgtgtcacaaaatcaacgttttcattctatcagatacaataaggctaaattgagagaactaaaacattacaaaaagctttggtaaggagagtccaactcacagtgttttcattgattccatcttaatcaacggtggaaaaggcgacccttttcgtttcaagtcacttatcctcctaacattagagaaaaagctaagtcatatatatccatatgctcatataattgaaagaagagaacagtaaataatgagagttgcatacagatcggttagttttgtcaaggcggatatgctagaaggaataggcccctcaaaggaggaaccctgtatatgtctgcaacatacagtaaaaacttttggatcagcaaaaaaaaaaaacttcactgtaaattgaaatgaaaataaacaatcagaaacttacagtttttcaatctttgtcaactttccaataaaatcaggtatccggcctgagaaattattgtcacaaatcctcctaaaatttacacaaaaaatagttcaacatggatccttgaacatcattatttacaaaactaaattatcaaattctaacaaaacaaaaacatatatttgtggccataaagtagacaaacttacaaatcagttaggttgatcaacttggccaattctactggcaacactccagtgaaaccatttgaagatataacactgaagaaaggcaatgacaatttttggttaaaaacaacagttggaaaatagtaatgaacgaaaaagaaaacgatttgaggcatataataaattacagtttctgcagatggaccaattttccaatttctggaggaatagatcctgaaaataggtttccctcaatgctcctgtagttttacatgtatcatctattagtttttcttttcagcaataagttctacaggaatatatatgtatatgtatatgtacatcagtttagttggacagtatcacaaaacaaagaacaagttagttggagaaagcttctttcaaaaatcacatagttccaataaaaggcttggcttttcctttctacaaaaaattattctcatttgtaaatttctattgggatgaaaaggttggataagttttatgaccagtgatacacagttggaaaggagtgtgtatctcaaataatattaaaatcgaaatgaaaccaaccaactcttttatactaaaatacactattaacaacataaaattttgacataaggactcaacatacaggttcaagagagtggtaatattggttagaacttttggaaatggaccagacaatctgttccccataaaagaactgcatacaaattcaacaaaacaagaaattagttaacttccttataataagataaaacattgaaaaagagataaagtgtggttgtttacaggtcagtcaagcgcatggaagaccatgctcgaggaacagatccattgaggtagtttcggctcaaatccctgtaagaggagaggaagcaagcaattagcaaaactggtgaggactgtgaattgattaacagataaagtagcataaaatggaataagtttaaatcagttcatatcagataggaattggatcactggtttcactcacaatgatttaagatgaggaaacttggcgaactctgctggaaccggagctgataaattcattcccttcaaagctctgcaatgtcattttcaattaaaagacctttataagattatttatatctacataaaatgcatattttttggcctgaagttgctcatttatagcttatttaatcatactttgttcttaattagtccaaatcaacagaaaatactactaacacaactatctataataacaccagtcaatttaagtgaagcagatcattgtgcattagtgaccattttcatatttgatagatatgttttcattctaacatgaaaaattagactgtgagacagttgacttgcagtgactagaataacaccagtcaatttcttatgaactgggtcaactttccattccattggagtaaactaagagccaagagggtagacttttatttgggtgggcccaccaccaagagcacccaaagcttttcaaaaggataaaaaaaacagttaataacatgaggagccaataactacaactaaattgatgtcgtactagaaatgaaagaagtgaaatcacactcactcacatctactcattaagatattatttataattatgatactaatttaatagatatatatatatataattttatcttaaacaaatgaacatctcaaattctcaacagtataaccccacgtgcttttactaaattctcagaaaaaaagtctcaaaagacaactcattttgcctcttctctgttcacggacatgcccatttgcacaaatccatggtaaaaagttgcagaaatataagattaaaaaaagcttgggttgaccaagaaccaatacaaattcactccaaataaaatattgaacaaaatagtatgatctgtgagaagagaagtgaaagagatttagagttaaagtattagtacatgcttacgatgtggcaagtagaattgttattgaaagtgcaattgcagatcactgatctccctgaacctttcccaccaactaattgattccagcttccttcttcactacatggatctttctcaaagttccaatctttctcccccagctttcttcctatttctttcagaaccatcactgttcatttaataaaacccagaaccaataatgatttaaatgaaggaaaaacacaatcttttggagaaaaaaccaaatgggcaattttgaaatacccaaaaaagcattctctgattgaaaagctcaaagctttagcttaaataagcacaaattgaacattacccatgaaccattttcttatcattttactcagaaactaaatgggaattgaatgaagtttaagggaaagtagtcaaagtaccttcttggttgtgaagtttagctgaggctgccaattcaaaacttgcaaatatgcaaaataaagtaatgaaaaagagaagcagatgattctgcagtactaagaaaccagctcccattttttggctaaattcttcctttttagtttcctccaatgaaaatgaatgcactgtgtatagaatcaaatacctcacattcagctttggagactagaaaaaaatattgtcttttactattattatatcaatacaaagaaagaaactattaagtgggacagtggcactggcacatacaaatcaatacaaatacaattaataaacctctctttgttttggtatgtgaggagactttataatggatttttaataaagttattaaaccacaattccatctactgtgtaaagtatttgtctttatatagatacttgtggctcttattcttctctctccattcattaaaatatatataaagcttgtgaaaaatatgagtaataatattagaaaatgtaatttgcaaagcaactttagaaaccaaccaaagtttttgtagaaactaagtattgggagttggttcaaatttaattagtgtgaaagggttgtacttggagatgtatagtttgcttaatgttcttttttacataacatggtctttcaaaggcaagaaataaaagtttatgcttaaaagattagtaatggtaaaattagaacaaaaagttttttgactgagatggtttgattggtccactttcaagtctcagataatgtcatttttgggtcaaccagagtcataatgaagagtaagaaatgtgaccacaatgttggccgagtgggtttttacccacaaataatttggtaacttgagagtttagtgtatttcgatttattttgtaatgaccaagaggtctaattttattattaatgaacgctcttttttaaaaaacaaaaaaaaa

SEQ ID NO: 218328 - DNA, 2727 bp, Cannabis indica
tgcacctcgaaatatatgtctaaacttccattcgttgtcatgagatcctgcaattagtcttgagctggggctgctgtgataatcctaaagaacaatcatagaaaaaagtgattgatgaaccaaattcacaacacacaaaatcatataaagataaataacctataaaaaaaataaaaaaaaaaacttgttccagctaaaaaatgtacttacaagaggaggaaagactttttctgcagcccgccggggaacagagaaacctccatgagtgctagtatcactggcagtcaaagtcttgcagaaatagttggttggctgtttactaggagtacccaattctgcaggcaacaggtacacatccttttgctcttgctaccgaaagggaaaaaaaacaagatgtattcatcaagaagtgaagacatgaaaaataaacaaatgaacatcctcaagcaagggaagtgatgtactgggctcaatggttgtagggtcatttgagcatatacttcatctgtttccacatctgcctgttcatcacagaaacgaaacattatgcaagaaacaagaagtgcacaaacacatacagaacatagataaaacatttacactcacatgcatagtcacattgtgaagttgagaaattaactgtggtggcaagttcgggtaattgggtatatgagcatccacttccttgttagttgaagcagcaacctgtccaggaaatttcagggattaatagcaattaccgacagcataaaagaatagggaaacaagcagagcacccaagaataaaaagcatttcggccgttactgctagaaacttaaatcagataggcaagaacaactgtcttagaaacacttagacaccaccaaaggctttaaaggaggtaacttgtgaacgatcttatcacatataactattttcattccaattttgaaagtataagtaatccaaaagaaaaaaaagataacaagatttctgatttcataaattccttcaaaagcagcctaacttaacccacatcttagaatacataatgcatacatgatcatcttactaaacgggaacaaaatgaatttatatctttaatatttcatgcattaaaaccagtcatagggactacataatttggagctactaaaagatgaaaaaacattcgtaaacagcaaacggatcaaacattttaattcaatagacaaactcttcaacacttccttgcaatcaagctttcaacataaatgaaataaaaatctttttaatttttgtaataaataaatggtaaagttagtgacgttataataattaattgtaccaacctgctcactatgaccctgtggaaaatagactacacgactaccaacaggtggcagagataccagtggacctgcacatgcgtgccacagctctgaattcaaacatttcttctcccctgcacataatttccacgaaggcattaatatacatgaaaaaatagatccacatcaataaattcccatcatttcaacaattcacaatgcatacaagtcgcaattaaaatccaagctacgaagcatgataccctcaagaacattaaaaaaatcagagattgtttctcaagcagacacaataactcatcctcctgtagctgatctatccatttttagataaaccaaacagacatgaggacacaagatataacatgaataaaggtataatgaaattcaactactccaaacttatatcctttaacaagcagacacatgcatgctaacaataatacataaataatcaacttcaattaccttaaacaagctcctaagaaaaagaaaaaaaaaaagaaccactaacaggatgtcatttcaatcaccacaaccatagatgagttagtaacaggtcaactcaaaacattatagaattatgcatgcacaattaaagacgcctcagaaacataagatcaccgtcctaagtaaatacatacaccagagaaagaaatgacaaaaataaaatgaacataacaaaggactaaccttcctgagcctgatgattaaaccccgacgaggacgacgaagaagagagtctcattcttcaccaatggaagtaagagcagaacaaaagggaagatactaggaggattagctgaaaccacctgaagcttcaagaaacgaactctgaacaaaaatcaaaaacagcagtcctctttcttactcaaaccccccattaagcaaatatagaagccatcaaatgtggtgattagtaagccgcccccccacccccccagctcaagaccaaaaaaaccaactaaagagcccaacaatatcatccaaaaccagtaccaatacaaaacacaaaccccctaaccctcatagagccagatcttcaccaccccaaccctaaacgccataatcaacttcaactaaaaaaacaaaaccctaaaatccgaaacttccctccaaaacaaaattcgcagctccaaccttcaactgcaacaaaaaccctaaaatccccagatctcagataccgaaacgcgtaaaagaaacgagtaagcactcgaatcaagtacagtagtaaaccccccacctttgtgatcgataatgagagaagcttactgagctgaaagtggcacttctaggaagctaaagcactctactttgtgggttcggatttgactatggacagagaaaaactttgcctccgtaactgagagagactggtttgttctgtgtgtgtaagagtaagaaaaaaaaattaaaaaa

SEQ ID NO: 218329 - DNA, 4668 bp, Cannabis indica
taagagagaaaataactcagagagactttaaaaaagaaaaaacttttattctttctctcaagtcaatacaactaaaaggggagtaggctattaccattcttacgaggtcgaacctctttaaaatctagtgttctttttactttactgtttttgctttctattatttattgtatctaatcgttttatcttgactcactgtcaatggctagaagtgaggtcaatattttggtgatttcattgagagcaaaaacacaagcttttgtcttaatcttgacatgttaacaaaatggttgtacaaactcgaagatgaggccttattggtcaaggcgatccaaaggtcatttcaagtagcagtacttacctttctcaacttggaagttggtgtgttcttgatcttctacatgcattttgatctaattatagccagagtatgcatccataaaacttaaaaattcatacctggaggtggcgcctaccatctagtctatttgtagaagcggaaagcaatcttttagacatgccttgtttaggtctataaaatcgatgcatattctccaggtcccatttggctaaaggaccaaaactagattggcaagccaaactggatatcaatcttccctgagaaactttattggatttaacttgtcaacctccaccttcgcaacttctgagcatatctgatcaagcactctctgcttttacctaactgatcggcatctgggtctatgttcaaggtgaggaaaattacatggggattgatccccatcatatatgcatgtctccatgctataacgtcttggttttgctttattgtggacacaattttttcttttattgttggaggtagggttcgactcactataataacttttgtgggatctactttgctggtacagacttcttccacatccttcagcatttctaccaatctttctatccccacacgtgggtctaatttgtcttcctcccagactacccctatgctagctaggcaggtactctgggaattggttcttctgtctcttcttggaccatgaagattgatctggttaagacactataacacttgtgtacgctcttttggtcacctttcattgttccaatacttctgttgtcacaatggaacttcatgcacaggtgttggagggaggttaccacactaaaatttaccaagacaggccatcctagaatggtagtataggcagttggacactctaccatgaaaaatgtacagtacttaaaggtagaggaagtattgcttctggccacattcagtgtaattggaagttggatcttccccataggtactagagagtctcattgaagccttgaagctggatggggcaaggcatgaggttaccttcagtcaagctaatggcctggaaagcaattttgaacaggatgttgactgaacttccattatccaccaggattttagatactcacttattgacaacatgagccttgatcaccaatgagtcattatgggggaaatgaacatgcttggaatcttcttctgtgagtttggttggaaaattcaacattcacagcctttgtgttggtgtttgcactagagcacacacttccccttcttattcaagctcattaagatacctcttctgggcatttttggtactttcagcgatatgcaggcctccaaaaattgtggaaaattgaccgtccaactaaagtggagcaatacctagaggttaggggttccttggtttgggagtttggattttttggatgcctggacatttgggaccccctaaggggcctgtattcctttattatgttggtaaattgctctctgaggagggtttatggcctcatgctgtccaagaataactagttgtccttgggctaccctatgtacagaataaatgattgggattctcaccctttcatggaggcgctcattcttgatgagattttttgatctcgtccttaaagtaatcgcattcatttgtagcgtgtccaacatcaccatagtactcacacctcttagtaggatctcttatgtgcttgcctcccttgtatatcaaaggaggctttttgtaatgaagtgtgttactcaatatattgtgcctcatatccttttcttcctttatttggagcttcactctgactttaagtttttctgcttctctcattttgggactggcttacacttgattctaaaactttagtttgttggcttgtccgtgtatattcgagagcgacactacatccggtttgtgccaccccaaaatcaaaaaaactaatctgcacaggtacaaaccctgagattgaggattcgtggattgtaagagttgtatgctatgttttgggaggttcaatagatgaaactaggagttaatgtgcgtttttagtattacttgcattgatttatggtatcgaagccactccaaaaactcgagtgtaagcatctttcagactgataaaaccttaggcccttgtcaaaaaatctgtcaaagtatcatacatttttctttgcatctcattccaaaacaaggatcttgctgaaatcccaaactgcaaggccattagtttcatatcatcattaactttcatcttggttgttgcctccatcatccattggatataggcttaaaggctctccccgggtcgttgcttgatgtttgtcagcgagttgacctccatatcaaagtccttcgcggctctacttttgaaacatggactgtagatccttctagtttcaaatagagccaaaaggcaatcttttccaccagtcctcggcaaatttggacaagttcaatgagaaaaacagacatttcccatctttactgacttctgccacttgcttcagcctattgtacttagacagttgggccctgagatctattttgccttgtaacaactccattttcggcattcggatattttctagcagttgtgccttaatggttatcttcacacatgattctggatcctcatcttatgaatcgaatttggcttcacgttgcttcagagacaatcggtctgtgagttttgttaatgtgactatccgatcttctagatacatggtatgatcattcgggagctcacatccacagattctgtcgttgatattgttctggggatcctcctcgaggtttagcctttttgccttttgctatttcttgtttttcattcagatgtacttccttccaacatatcaaaggcaatgttctttgctctataaaaggaccacttactcactttagagtattttgtgtttgaaaccatctccttgaacccggtataatataagttggattcaacctaaaggtttctaggaagtgtttagccaaaaaggctgaatttgctagtctactattcaaaactattccatatgtgcattcattctctagtttgttggccctaaatgttgtctcatctgtactaactctagatgcatatattaaccacttacatgttgtccctttacaaatggctttcaccctcctttggccatcgctaatgtatttgaaatctttattttgtggaagaaagtaatccttaagggcttttctgaaaacaaccacattagcaaataacatgcccttatcaaagttaaaagtctccttatcacacaatggattatactctttggttgaatttttcttaacaccaccttcttcatcatcacttgctaaacttgccaaatcatccactgtctcaatacaaccatcatcaccttcatttgcctcaccaccttggctgtaaaaacttagtcacactagcccaccatctgcttgggtcactaggtttggcaacatttctctcactttccaaatgttcatactcttcctcattaaattcgaatttcccttcatttgtagtgggttgggcagtagtggattggtttgtagtgggctggtctgtagtaggctcagtaggtgttgtgacatgtgtttaactttgtgtttgaattaggggtacatcatcccctacatcttgaacctcaggatcgtcccacccttcattcccctaaaagatgacataatcattagtgcaatacccatcatcatcttcatacccttcttcctcctctatagaaccaccctgacccatcttcaaaatcatcctcatcatcttcaaaatcattctcagatgaataatcatcactgagaatgacaacatcaggtttctgacatgttttattaccctattttcccttgttcatgcctagctactgggatccctaccacattaggcacaacatcataatttggtgagagttcctcaatcatacagtgcttgagcttcggggcagttggtacatgaggaacaacagttggatcaagtttccattctagcttatgtgtcatttttggcatcacaagatacacagacatctgtgtccacttcctcatctccatttgttccaaaatttcattaacttctttgtcatttcaaatcatccttccatgcttcaaagctttatcatttgtcttatataacatgccaaaaggaatcttgtatcctaaaccaattgcaaatccttctatgaatattttgctcatcttactattatcaatccaatcaaaaaaactaacatttccaccctcatactttctgttaccaaaaggtgtgaagaacattccaccatgatgtattgcaagtgtcaaatactttagagtatcacctgtttaattatgaatc

SEQ ID NO: 218330 - DNA, 3933 bp, Cannabis indica
aatagttaaaaaccgcaccaccggcaccgcgaacacccctatagtgcatataaatgtcacttgctcacaatcacaaataggattattactctaatcttgaacctcatattttctactagctactgatttgcttgaagaagaaaatgaagacatgatttttgttgaaattcgaagacaaataaatgacacaaaaccaagaacaactccagtatattttttttggaggatggttgcaagttgcagaaatttgagagagagaaattaaaaggtttgaaggatgaagaagaaataaggaagaagttgatgaatgaaaaagggcgccaatatatgtcaagggtattaatatttcaacaactatcattttataagacgatatgaaagccacatatacacaccgttaaaattttagactgaacaaaacggaagatagacttctcaacgtgatggggggatttttgccaactaaaaaagttcaggggcaagagtttacacctgtaatagttttgggggcaaaaaatcatttttttttttaattatatttaaataaagaatgtgatctatttttattgtttctcattctaatattctatatccaatctattcggcacaaatgtattttttaatccaatttgatttggattgattggatcgtgtaaattcctgatgggatcatatattttttgaatatctcaagcaagcacctctcctcaaagatcttaaagtttgaattcaaaaagaaaaaagaatcctttaatttatgaataatcaagcaactgaaatcacaaaaacagaccaaataaaaccaaaatagatgatcaatgaagaaaaaaagaggaaaagacagagagaagttaaaataaaataagagtacataatcacctcccctgaaaattacccatttgagaaaacataggaatatgatcaccagagccatcaactgttatactagaatgatcttcactaacatcttcaacatcatcaaccacactaatcgttttgttaccttgttcattaccattcaatttcttctccatagaaataaggctctgacccttaatattatcaacgtcttcaacaaccgcagcctcatgaagttgcaatgaatactccaaattccacaacacatctcccattgaaggccgatccacaccgtactccgccatgcacttctcggccgcctccacgaacttcttaagggactcgctgctgatctgttcggagatgaaagggtcaattatcgtttcaatggagccttttctatgccaatgcattgcccactcggctaaactcacttgctccctcggcaatttcgggtctataactggtctagcgcataaggcttcaaataagacaaccccaaatgagtaaacatctgatttctctgtcaactgttgtcgccgaaagtactccggatcgagatatccgaagctgcccttcacggcggtgctcacatgggtttgatccagagacggagccgtcttagaaagcccgaaatcagcaactttagcaacgaaattctcatcgagaaggatgttcgtcgtcttaacgtcgcggtgaattatgccttgagctgctccggtgtggaggtagtgaagacccctggcggctcctatgcaaatttctaaccgttgtttccatgataattttgataaatttgagccgtacaagtggtcccgaaatgggccattggacatgtattcgtagacgaggatcatctctgattgttcgtcgcaaaaacccaattaaggaaacgaggtggcgatggcggagcttggaaagcatctcgatttcggttcggaactcgttaattccttgctctgaactcgggttgcctcgcttcacggcgagctttgtgccgtcttctaacactccgaggtagacttttccaaaccctccaactccgatcactgccttttcggtgaaactctgcgttgccacttgtaactcggcaagctaaaaactctcccgaataatactgtagacggagatatgtagcttgagtagccacttttgctccggcgagagccgaataggctcaacgtggatcggttagtactacttctggagtaactggattggagaggtaaaagccatgacgaaaagctctttcgtttctcccaacctttaggctttttcttccagctgacgcaagccacgcataacaataccatagctgtcagtgacattgccaaccctgccgcggcaaagattttcatggccttttgtcctgaaggccctttgtacttcccactaactgtaaacaaaccatccaagctattagcagaattgctaatcttcataatctctagcccattaagaatagcatctctaattccggaatggaaattcgaattacaccccacttgaaccataatcttgttattggtaatgttcatcgaatggagaacaaaatctttgtaataagctgttgacagagctcctgtaagggtggaaaggtcaacactttccatggccataatctcattgatgtaaacattgaaaaacagagtattaagagctgcgctcacaatatcgcaaaaatggagtctgatcaagtaagaatatccctgatcgacattaaaaatccagctgaggttgaaatttggttccatggtaagtgggtcttgcatttcttgagccgaggcataaaccaagcttggagcaatcaatggagtcaggcctttacttttctggtactccacagtttcgggaggaactgaaacgttcctcgacccctctttgaacttattgaaagttgcatccgtttcccaaacccggtaaagggtgtcgttttccgagaccaacgtaggccctccaacgttcaaacggtaagaaacacggagcgcgtgaccccatgcgccggtgacgctctgcccaggtggataaacggcaggcacagagtccgaaataagagtgtttggagcagagactaactctatggcgttgacgaaggcgaccgtcttcttcttgggcttgaagacgagggagaatctgtctccggtaatgttgacaagaaactcccggaaagcaaaggtcatcgccgaaaaattctcgagtagtacgtagttgccggcggagactttgaaaatggcagcggttaggttatgagtcgggtcgggaacagggtagaagtagaggcggatccagtgaggaccaggttgggagatgtggaagctgtaggtagattcatgagagaagatacgaacagttgcatataaaggcagagacgaaggaggtacaatgctaccattaatggaggaagaagaaaataaagaagcagcagctttggctgagttggctatggcggaaaactcaaccgaagcctggacttcatcttcggcagataagagagaagcagcatccctctcggacttaaaattccggccgtcggagagccgagtttgctccgacgagccacagtcgatgagataattatcaggtggtgagaacgtggacgaagaagaagttgtgtttgggaagtggaaaaggaaaataatgaggaaaatggaaaaggaataagttggtgggggtaattttgatttgggatgttttctccatgtggcctttcttgcttcgaagtaaagctccattgtcgtgagcttggggtgtttatggtgaatacattaatggcggagtagtagcaagggtggtgatgctactagtgatgaacatgggaataattattattattattattattattattttgggtgatctgtttggagggagggaaagttggagagaaactgaaaatgtggggttttccaggaatttgtacgcacagaaatggttgagttaggaaaaataaagaattatggcaaatgttagttgggagcacgtacgggaaagggaaatacgtggagggatgtatcatactttgttgtgattaatgttaattatccattacgattaagaagaaaattgaacttttct

SEQ ID NO: 218331 - DNA, 5385 bp, Cannabis indica
tttaaatcaaactaacacctaatttccactgcagattgctgttcatttttgggctacagatggaggggttgtgtcttcacatgcctttcttattatacaagatctagcatctgtgtatgcttctaattggtttgacacctgctttgtcaaaacttataaatcctttattggcaattgtcagtttgtggaacctgatcaattgaaacacatacaatttctgaggaactcctttgttgagctttgttctgtagatgtacaaaaatcaaccagaaaggcaatggtctccatccagcaacttgcgaaaatgctgcaacaagctatacaaacaaagaaaaaggtgggcaaacatgttccattgaattcgtgtgaatatattcatttgctatacttttagatgctgaagtatttgatttctattataattctcaatatttttggctctataatgtgctgataaatatatattttatatgtgcaggaagcagtcaagaacttgtgcagttggcagtacattagctgtattgatgtatgggttatgtttatatcagctaatgtacgtgactatgatcttcagccattgctttatatgattgttcagattataaatggggtgactgtcctgtttagtggaccaagatatttacctttaagagtcaagtgcattcaatggttaaatcacctctctagttcaagtggggttttcattcctgtggcgtcattggttttggatgttttggagtataaaattggagagggtggaaaacatggaaaggccatcagcttatcaaatggaataaaggttagggattagggccttgctaatccaaacttaatgtggttcttagtctttacacactgagatttatagcttttaatatttctgtctagtttgaattaagataattgatattaatttttttgtacagctaccaaagcaaattttgaaatctcgaaacttccaagagcagtgtattttatctgctgtggaactgctttcagcgcacttttctcagtggagctatcatgtatcatttcctgatcttgcaacaatgccgcttatccgactacggaagtttcacgagacatctactgttgaaagtttcaaacgtgtagttaagcgttttatagatcaggtatgatttttcatctctctcgccctctcttgcaacaattttcttttagtgtaggtatgctagagatgtatctacttgcttcttcttgaagcagtgatggagactttgtgtatttttttttcttttttcaaaaattatatctatataaaatgattaacgacaaagattccgaatttcttgtaaattttgtattttttttcaaaataattgcgcaatttagattatttaaaaaacaaacaggatacgtgttacacgatgccccctaaagtaaatatttaacaaagagggcttcaataattaaaaaaaaaattgtccctccatcattgctctaaattgctattattattttattttttttatgaattcttcctacactttagtggaaagataatttccacaccacaaacccaaatttgaaagatatgttcaggctgaagcttaaagactagtaaaccatctagcacattttactactaaagtgatagacctcagggtaccaacaacagtaataggcagaatttagagaattgttttttttgaaaaaagagtggagggaccaatcaataagagtggcccccaccctcgagataaataaaaaccctcgcttatggcggaggaaaaccgtagttacaaagtgcaccattttctaagacttaaacaaggtctcaaggatgagattacagcgagcactcccctaggatacacctaaagagctggaaacttcacaagggaagagactataaggcataagcgaaaatcttacaacaacactctccattctctcattaaatctgagaaagaaacattttcaaatagcttagtcttgtacacccaagactataataacagaaatagaagtatgctgactcaagagacctgattctctccactttcctaatctgtctgacttttatcatagtccacccattgattatggtgataatattaataattacccatactaaacagcctctattaattggagtttatcataaaatcgtgttagaattgttgaaaaatattgtattggtcccaaataatgacatgctttgagtaatatgtatataaatataattacataaatatatacccaagacttccaatttgcatagcttgcctaatttcaaaactgggctcctcactaagccctactttatttggggagtaactaactatagccatattgctatgtagttgtacaaacatgattatgatagaactcagacaagatctctcaccacaaccagatattctgtcttttatttctcaaaaaccctagtctccaatggagacaggtcaacacgttacctaaggatagaacagtagctaattcaagatagcaaatctccaagggtctaaactgataattaaaactctgtagcaatcatttatacccactaactgtctaacagaacataacaaacaaccaataacactaaagccagctaacataactcagctaagtaaaacaatttactacttagctaagttagcttaggttgttgtgcttcacataagtgaaccttctggtggtctatcagattagttattgtttgctttaccttcatagataggaacccaaggaatggtaaaataggaatatacttagcagaagggtataaagttaattgtagctacaggtgagtatatagatgagaagagagaatttggaagggttatgtagatggctatattgtctgagcttcttaacatcttattactttgttcattcattacaaattccatttctgtctaattgtttccatggtatttactttcatgttctctctttctttgctgccctctggttgccattgattttaggatcctaattggggtctgtcagggtgatgacagaaataaatgggcacaagggtttgatgatttaatatcatgatgcactgcttatcgtgtatagaaagataactttttagcaattggtcttccctacaggtggagcaaaatattgagtttgtgcagaaaaaaagagatgaggtggctttctcaccaaaagatcagcaatctgtagaattatttcttcaggtatgcattctgaatacagtgtttgataattgttactcatagtatgaatgcttaacagtagatttatatgcagcttgcaaagcagagtggcagcactcctttctcgcaatactacaaaagcattatggagaaggcagttgctagaaatttggctttgaatgaaaaggtgcaagattcttcttttttttttccttgttaatatttagacatttgttatcttattttatcttattttggacaaggctatggtggtgaatacagtgtagtgtttgttccagttcacatataaaaataagttaaccccagtttttgcaacaactgcccttcggtttcaagaaattctgaattgcataagcgtgtgaattaggctgaatacaggactttttaacacttgggacgtacatgacaaatagtccagctccttttgcgattatttccttcatagaagtcatttaaaaaattcatttggacttgaaatgaacaacgaattccattaaattagccatttttttcacgaaaggagttgcccattgttcatctctcccaatattttggtaattgatttgttctgcattttaggctgactttatttcttgctacaaatatattatgcagttacctggagcagaaaaacttcacaaaaaaataaaaaagctttccaataatgtaaaaaacgtcaatggtggacaaccggagagaataagtggatctgattagggatggtagcaaagatgagaggaactggcgaagaacagagaagttttttacattttgtattagattgaccagttattacttacaggatcctttcacccattttggcatataggctttgagagatgttgattgtaatgttgacatgcccaatgatcttaaaggtctgaacaggtttttaggatttgggaccatgtcaaaaaggaattttgttttgtgatatcatatttaagaagttttgttaggaacatactatagtgtaagccttagaaatttgaatacatggcaaaacaaatgtcaagtaaaacataattaattaggctaaaagccattgcccattggtcttgcctgggtcatggttgattttctgagtttcttatattaaatggatgaaatcagccatttgtggtaaactgaataccctttgctgttttcttcaaatataattttttcttattagattgaatattgtgatgtggacaagttaaatcccaatttctttgcactgaaattatcatcgttttagttttacttttatcatatacagtagccaaactatataatacacctgtactattttttttttcactaaaaatgatccctgagttctattgctagagaaaattttagggaaacactcctgtgcctaattactcttggttgagacttgagagtgggaccttttagagagtttatcttatttgttaatttaaattttaaatgtacatataaagtgtacttatataaagttaaagtatgctttaaaatcattctaaataaatctatttaatatctttaattctctaatttttataattttttattctctttatatatttgttaggctaattaggattttttttctccctaaactctaacatgtaccaaatcatattcctcgaacttttctggctgttaaaaattcccattgaactattgagattgttagatttaaggacttttgtctaatttcatttaattttactatttcagtgattatttatgtactcaactatgcttcctagattttgatatctaccaaatcgtgctcctcaaacttttacatgtactaaatcatgtcgcctgaactttcatccatgttagacttttttttactaaaattggacaaaagtcattcaattcaacaatctccatggttcaaggagcatttttaacgaccttaaaagttcagggacatgatttggtacatgtcaaagtttagggggtaaaaatcttaattaacctataaataaatagtatactttcaatctctttatttttttttttgaaaattactccatatattattttttaatttttttttaaatttacagtttgggttgctccagtagtttctatgtaggttgttatacgaatttctgttgcgatttagttgctataaggtttctgtgtggaattccataaaaatgtaaaaaaactgttttaaagtataaaaataaaaaaccctcttattttttttccataattctaatag

SEQ ID NO: 218332 - DNA, 3724 bp, Cannabis indica
caaggaacctatatatgctcaaccataggaagcttctattgagtagaattaaatacaaaacacatggaagagattaggttaattgtaattacaatataggacaatagaaagctaaaattatttttaagcttaatattataattaaataacatgctattattataattttgtgtcttaagaccagaaggcatggtctttttctcccgacaaataataaattattatttgatgagttcctatatatatatacaatatacataatctatcttatatattaaatattggtatactaattaatactatcacaaagtttgttataaaaatgtggttgagaaagtaggatcgattacgagctacctagtccgatcttatgtatagacgagttaggctcctatttaaggccgacttaatttagaagtttaattttattttattttttacaaaaatacataatttttttattaattttaaaaaatattatacatatatattaatcacgtcggtgaatctcagtttttgaatatgaagtaaaataagaaaataatatataaaaggtgtcaaaatcaattacaattaagtatagctcatacattttataaataataatattatttaaattttctcacattatcaatattaaaactcgacaatactaaatactaatactactaataataataataatatgacatacttggtgatgcctttctcctatatattaggctatatataatatttatatataaatatatgagaaaactatataggtagcttaattaatgagtaatgttgtttataattaatttgcaaattggctgacaatggcatgggaacatctgccagcaataggtgcaatgttattgggagacattttctcatggtcaaaacattttaattaattatatatttatataaattattaacaactaagagtaagactaggatgaatgaactaacgaacccaaaaactttgtataataatattaatggtctcacaacaacattaattctttaaatttgcttagcacaacaagtgattcaattattattattattagcttgttgaacaatcaaataataaagtttaattacaccacttgcactaaacacaaaaatttatatatatataatcgtgtgcatgtgcatccatatgaagaagaagaaattaagcacaattaagtattaattggccatttgggaacattgaataattatataataaattgtacttcaaaatggtactttgggactcacaaaaaacaataaatggattaattaattggcccccgtgagtgaacaaaaaagaaaaaatttaattgagaagcaaaatgaagtattgctttgcttggtcaacaaagaatttaatgtaagttatatatatatttataggtatggaatgtaatgatttgctaaaaaggtcacatcctttgacgccgtttttgtgtttgagaaaattaaattgtaataataataataataataatactatatatgttcttgatgggtgacaagatgagcattgggatgagtttatatagttttgatggtttgggattttcaactaggcatgcgggtttaaacaattaatgttaatgtgttatgggtttaatttaaattaacaataatacatttatttgacaaatggttagtgtttagtactctccttgtatcatataccatgcattattagtgggtatcacgtttttatagatggcaccaaacccaattttacgatttagtgttatagaaaagaaaatattttttttagctattatttagaaatttttttaatattttttaaaattagtaaaaaaatatacttttttaaaagaggataatttttttaagtccctgagttaggtgggtcctaggcacagtcctagtctgcctatactcagggtcgggcctggatggcgctctgattagttatattctttaaaagctattttcttaagttataaaggactcgatatttaattacacaaataatagtatgacaccgagaagaatattaaacacgagtgatgctttttaacaattctctataattgtaaaataacagtgctaaacactacgtactaatacataataatattttttagaaaaactattaaaatctcctcatgttaaaataaattttttgagttaaaaattgaaatttactagttatcccattatctatttttactgatttaaaagtttagaaacagtttttacaaacacaacaaaccaaaacctatatagtatataggtagtagataatgaatgactacaactatatgtttattcttcttttgaaaaaagtgatgttaaattattggtacaaattggtttttatgtaaggtcaaaattgtataactaaattcactttgaaattgaatgccaaagcttaaaaaaaaaaattacttatgtaataaaatatttgtattttatttttttattgtaaattatttagaatttttttaaaatttacaaataattttacataattataatatacattattattataaaaaaaaaccaattaaaactcttaaatgtcaaaacaaataaaaaatccaccaaaataacctaataatacttgtatcttttataagttatgtgaaatttttttatattttttaaggtaaatagcggtataatacctaaaattttaagtttggaagtggcgtaaacctaatgtctatttatagtggcataagtacctaatgtttctaaaactgtaatttttctccagttttgtcggtacaaactccgttttgaatttattaaaagaacatttggaaataactgatactaacccaatgatttaaaatttagaccttatatgtgacctgtttaagaaaataaagagtctatactgataaaattagagaaaaattacaatttcacaaatattgattatttataccgctaattaaagataaatattaaatttatgccacttacaaattaaaaattttaagcacttattgtagtgtgggtcccatttgaggcacgtgccattgtggcactcatcttgaaaacataatagtgagaagagaatatggctttgaattgtaaagatatatatgatggttttaatgaagctgtcccaagcaagaatgtattcattaataattaattaaagaagaataagaaagaagtagtagtaatagttatataatataatatattgataataattaatgagtacccagaaagggaattagaaaaagggtgtaatgggagatccaaggaagactgaacaagtgagaaagacaaaaacattgagaagtgagtaaaattcagtcttctgttctcatcaaaccaaataatggctttattaaatgatcatcaatactatattactaaatgccttcaatgttcccaacaacaacattatcaaatattactacataagtatttgtggtgtaattaaatgtcaagttctatataatttaaggtaataatttttagagaatattgttaattaattatagtgtcactattagatggtattaaacaccactagtatctaatgacaatactctattaaattataaaatgtagaattcgatatttaattataatagtagctatacactacaaaaaaatcttacttttagtcacaacaaaacttatgactaaaagtaaaaaaattgtgactaattattaattattattcttatgttgtgactaaaggtattagtcacaaaaattacaatttgttgtgactaaatgt

SEQ ID NO: 218333 - DNA, 7623 bp, Cannabis indica
gtgactaaaaattatcactaaagatcgtttttttttgtcgtgttggcatatctgtctaagtatgtaattacatagtaaacatgtaatattttacataagagggttccccattgtactatcgtgaccccaataaaaattaagtgtaattattaaaaaatgttaattttaatattaattaattaataaccaaataatattatttttctgtgtaatacctaaataaatctaagataattaaaatttatacctaattaccacccacatctaatgtggataagttggaagagaaaatattatattgatcacatttagaaggataaaattgctaattatttaacagttgtctagtagggaagtctcatattttactagcagtcataattcaagagaaatatttaacattggtaatagtttaagggcatatttgttatttttgccaaaatttaggagacaaaatacccacgtatgtttcaaaataaaataattattggatcatgtaattactactttagtgtttatctaaaaacttagcttgatgacatggacactattatcatcatgtggcacgaaggaaataacaccgaggacctctcatcctagaataggacagtgttacctacacactaggggcacctaggtaagcaccaaaatctaacaaagtcattttcgagtaatatgcttcatcaaataggtcaccatgaccataaaacgaaaaactatgaagctgaggatgtcacgtggacatctcagggttcaacctaggtttaacatcagtattggacgctcaggttagcatcttgtgcgttgtctcgcatcaattttgattcttatcaaattcttatgggcaatctacttagacattgtcctaagatacatgagatacatgccctagaaaagtttctgactttggagatgggtgtacatgaaatagcacccgagcacctgaaagccctaatgggtgcccaagttgacatatagtcgatatgggcacaccgtggctagggcttaggtttataggcacataattggaacttaattcctcaaatgaatcaaggaacaatgcaaggacatgatatttaatcaatgacctttcgaaggagcccatcgacaacaatgggcgcccaagttgacatttcaacctgggcactgatttcatttcaccaagttctgcctgtgcaaatttgacaaaactaaaatttgtgtggagcaattttcattaaaaagaagattaaaagtcaacgagatcaattttggagatgtgaaaccctacctgggtgccaagtgcaggcccttaggccatcttgggcacctaggttgacatattggaatccattgtcaccctaagacgtcattctagagaagtctcttaggcattccccttttttttacccacaaggaagatacaagtacttttaggaagcaaacaaagtcatcaaggcctcaaatgaaatgttaggtgcccaagttgacatctcctctatcactgggtgcccaggttgatgtagctggacttctggtggttctattgatctgattggtattccttctcaggaattcttcttgttttcctccaaaaacatgatatgagacttagaattaggatagaatatcgtttgagtagcgagttaccccccaagcatcactaggcaccagtatgcaagcacattaggtgcccaggttgacattggcttagggctcggtgatttatcgcaaacaacaattctgctctaggaatcagtcttattttgttcccaaaatgagattgcaagtaaatatctcatgtacatgtgtcacatgcaagtccaccgacacccatctacactagtgatcacctagatgtctcctagtcgtcattgatgaatcaccgggaatcacctgtgcatatcaagtaaatttgccaagagaacttccccaaggttaaagaatgaactaataatagctatcaaattatacaagcatatcataatatgcctaaagcccaagaattcaagttttaggtgcttggattgacatttatgtcaaccccgacggccaaaagtcaatgttatctcacaatcactttttagcattgcacacccttagtaaaatagctataactctctcaatttttatccaaatgatgtgattcaagttgccaattaaagctatttttacagacggatataagtgtgtctgacacccccgctataatgccaacattttcagatatagtgttggatttcccagcaaattttgtgcacatttttctattattttattataatttaatcggacctaattccctataaaaagagagctcccttgtgcaaactttccatcctatctacaatgtcagagcttctctatgttcacactttctcgttctaaaaattgtgaagtgaagttagacttagtcatttttctagagttctcctataaggcaattaactttttgtgataataaaagcgctaagtagatgtagttctattaccatcgcgatatggagagtgaactactataaattgtagtgttctctttctttttctattcgccactatcgcttatcagacgataaagaattgaccatttttcaatattaatattttggtgctttcattgggagcaccactcgagtctcttggtttccttcaagtttttagtgttcgaataggtgattcattctgaaaggaattcgtaagtacaagaacctaagagctcactaagagatcgttgtatctaggtccaccagtgttggttgtgatgcttcggtgggcgggacctcgggtggtaggtcaagagccccttacttgagactaccgaaaaagacgccgatagaagctaggaacaatattgagggtactatgccaccacatgagttgcgtgtgagccttaatgaggagcctatgggcctcaaaaaggaacacgaagggcatggtgaggagcaggagctcgaccttgaggtcaagcaatcggaggagactactgttaatttgcaacaacagtcaagcctagaagaggctggcgagcttaaccccttggttgagcaatcagagcagatttttgctaacatgcaaccacatttgatcctagaatatgctaactagctcaaccccaaggttgagcaaatgaaggaggttattgcttacttacaacagaatttatatgatttactacaaaagcaatgagaggagtttcaacactggttccaagagcaatggactaccattgagactcagcaaggctcttaaaaaaaaaggagagtcaatttggcttatttaaaatgcgatgtgtgtcaagctgacaccatgtcggtaaccctaatagtctcatttgttagaggaaagttgccaccacatttgccaactagccatgcagccgccagcacttgaggtgaaaccctgaatgcgtagaaccatgctaccacacttggtagtaataccaatactcaatgagtatttagtaccaaagtctctcccgaggaagcaaacccttggtgagagtctgaaaggcctcaaactaaaagtgagcaaccccctaatgtgtcaattatggaagcaaatgcttggtaagatttcaaaaggccttagactagaagtgagaaacctcctaatgtccctcctagggaagttaaccctcagcaagagtttagaaggattcagactagggaagagtgaatccatatcgaccctccacctctattggagtggtcaaattgatgtttcattcatcagaattcaatgaccactagcactacttgtaaccaaatccctctacgcgaggtgcgtgtagagcttaacactgaggttgaacaactggaggaagtttttgctcactggcaacaacacctttacgaatctctcaagcaaaaataagaagagtttcaaagtttgtttcaagagcaatggactaacatagaaatttagcaagcttctcgatagtaaaggagagataacctacgatatctgaaacatatcatactaacaatatagctcctcctagagtcccgttcactagaataaacgaagctgaagttcctccacatctgccaactagccacgtggggactagcgctcaagctgaaaccctgagtggctagaacaatgttgcctctcgtaaaaataatgctaatgctcaacaagcaactggcactgggacccttgctaagggaaatcgagcccctatagaccctcacctcctttataaaaatctagagtgagcatattgcacaatgaccctcgaataggccgtcctctcaagagatgaaaagagaattacattgatggttctcatactgacaactttcgggatgattctaagaatcatcgagaccaatgtgttccaaaaaattccattccacctcctggtaatggaggaaatgaagactaaccattttcttaggcagagcagccaatcaaggaaatgaagaccaaccacttgctcaggtggagtaaatggttgaagatgaagaagttgctaaggcggagaaactaatgaagatccactaaaaggacacacaagcagagctagataacttaggaaaattggtgagagaccttgcaacctcaagaggtgttgtagataagagtctcaatagagacagattttctccactctcgaggcggttcatgacattggctatcccaaaaattaagatgtcaaaatggagtatgtatacggtaaagggagatcctctttctcttgtacataattttgaagtgcagactgatttacaaggtattcgagataattcttaatgtcgattctttctagccatgcttttagaaatagcacaatagtagtatatcaagcttcctacatgatctattaattcttaaggagcacttacaagagcattatatgactgattctcacaatcaaggcatagactatgagcttagcaatttggtctacataaagcaggagcaagaagagcctctaaacaattacctacaatgatttttagaggtatccactcagatgagggtactcagtgaagatgaaaaagtcattgcaatggagataggacttactaatataagtccattatggcgggacttgaaactcacagcagtatacactattcaagagtttctaatagagatggtgtcaaccacaaagaggccaccaagaaggctggtgctgttgatccactagtatttttgcactactcagcatgttcacttcctgagtctcgaatcaacacttatcaagaagaggagggatcaacatctagtaccttcattgaactagattccccctctctcctaggatgaccttgaacaagggggcaactatgaataatcagactctactattgaagatgagttagagtagggggcagtggcaaggatactccctctattacccatgatgaccaggaataagggacagtgatgaagatgttacaagtctcgggttgatattgagcatggaagcaacactgaagactcccaatgagaaaagggagagcctcagggcatcacaaaagcattagtacctggaacatgcatagtttgcattctaatttccccaagttagttccaatgccagtaccaaggcactagaccagggagtatctaagacaatccttacattacaatgttcttcagtagtggtccactttgcactttgttagtggatgagaagaaacttatttatttgaagagacccaatacaatatctctctatcaatcaataggattcacataatttatacatgatgggccctactccagtgtagcaaataatcttttggttgttaaactcctcctaagtagggtcgtcccttagttgatttgggccttaggaaaataaattttttggcccttattataaaagtaaaatatatttataaaaattcttcaaaatatatgtatatttactaaaagatattttttatttaggccccaaggatgagtgggccttaggtgcatgccttgcttggcttagcctagggccaacccttcacttaagtatgggatgatgtacttagcacaagtctgacatttcgtttttctttttcctcccttagagttttttctcttaatcctctaacgaggatctatgatttgaaatcataaataaaggtcctctaataacctttgatttcacccttataccagatctggctagtatttccacactactcttcagtagtgattcatcatacttctgctgatggatgggacttatatatgcttgaattctggaggcacaagctataacctaatacacctcagtaatagtctatcttgctgctagcagatagcttcaacatacaagtttcaacacttgtcaccctagttactaaaaaacaaatgctaggggggaaagattagccaaactaaggcaacttccaagcaactttatccatattcagcatggttgtcaagttcccgacagcaacaagcattggtcaaatcctcgataaaccaaagagtagctcgcaaatgctacaatactttgtcggcattcaacagggagatcttttccctgtgaaaatagttgagaatacaaacaagacctcctctgttcggagaagatccaaggagatgaacaagacctcctttactgtaacaacaatcaaggagaaggaaaagacatcttctactggaaaatagttgaggaaatgaagaagacctcctttgttgtgaacacagctgaggagatgttgaagacctctaaggctacaattggggaatgaataatatcgaacctatcactattttgatgtgcatccaaaatggggaagatgttgacccccgcattgaggatatggacttgagaaaagatgcaggggagcccaagctaaggggagctagtataaaaactaatgccaacctagttatttcgcgataaaaagtttgaattattcacattttaaaagttagcattgtaacaatataaaatactgacttgggcgacaaatgattacccaaaaagttagcttgatcacatggacactatttttaaaatgtggcatgaaagaacaactctgggggaccccacatcccagtgttaactacacactgggggcacctaggtaagcaccaatatctagtgaagtcatttctgagtgacatccttcagcaaataggtcaccatgactctaaaacgaagaactaggaagttaaggatttgacgttgacatcccaaggctcaacctaggtccaacatcattgctaggcgtccaggttaacatcatgtgcgtcgtctcacatcagttttagtttctatcaaattcgtatgggcaatttacttagccattatcctataatatatgagagacatgccctaaccaagttttagaccttggagatcaggctacatgaaatggaacccgagcacctgaaagtcctaatgggcgcctaagttgacatatagtcaatttgggtgcactgtggctagagtttaagtgtttggggacatacttggaccccaattcctcaaatccatcaaggaacaatgacaggacatgatatttcatcaatgacattctgaaggagcccatctacaactatgggcgcctaggttaacattttaacctgggcacgactttcgtttcacaaagttctgctcgtaaaaatttgagaaaactaaaatttgtggagcaattttcatgaaaaagaagattgaacatcaat

SEQ ID NO: 218334 - DNA, 4409 bp, Cannabis indica
acaccatccttccacttcaaaaacactcaaactttaagtttaacgctctctttctttcgttctcgctctgtgtcttcttcttcttcctccatgttagcttgatcataagcttttgttgttgttttcacgatgagagaagaaaacccatcagagaccagagctaaatcttcgaaattcagtgaccaaaaccagccaccaccaaagggtcatcatcaaattcctcacaataccaaaaccaatagtaattcttcgaaactaaggtctgcttcctcatggggttctcagattgtgaaaaatttagccggagaaaggaagagcaggtttcagacgaccaatgttgggacgaagaaaatcccgccggcgggctcagacgcgccaagccagaagaaccctgttgtgccggcggctcagtcgagggtgaagaggtcgctaattggagacttggcttgttcggtcaacggcagtcaagttcatcctcagtcctttcagacccaccggagacagtcgtcccgggacatgtttactgagcttgaccaactcagaagcttgctccaagaatctaaggagagggagtttaaattacaggccgagttgattgagtcgaagagaaacccgagggttttggagctggagagagaggttgaggtgaaaaagagtgaacttgatgatctttctaggagagttcagttactggaagaagaaagggctagcctttctgagcaaatacccattttggtgacttccatttcggagagggaaaggaatgaagacttggataagagagaagagaatacgagtttgagggaacaaggattatctcagagcatggagatggaagttgttgaattgcggcggctgaacaaggagttgcagcttcagaagagaagtcttgcttgcaggctttcttctgttgaatcccagttagcttctctagcaaaatcatctgaggtattatttataagccttttccattttgctttatttttatgttgttcacttaattctgatgtaatgtgattggtttgttgtttggactatttgagtttctgaattgtatcttgttttctatcagagtgacattgttgcaaatatcaaagctgaggcttctttattaagacacacaaatgaagatttgtgtaaacaagttgaaggtttacaattgaacagattaaatgaggttgaggagctagcctatctgaggtgggtgaattcgtgtttaagaaatgaactgcggaattcatgttcaacaatgaattctaataagttgtcaagcccgagttcagtagaatcagttggtggtggtggtggtgattcttttggttcattgtcttgtcaaagtaatgagtacttagaatatagtagtgcaaagagattaaatctgatcaagaagctaaagaaatggcccctgactgatgaggacttgtctagctcggagagccaagatgaattgttggagaaaaattgggttgatgaagaaagaagaagtccaatgagaagacattccattagtggatccaaatttggtgcagaagagttaatgctcaataagagaaggcaatctgatggctttatgtgtgcaaaagagatagaaaaggaggcagaaccactagcagcttctcagaaatatgacttggaaatgactcaaagatcacctttctatggaaattgccatgaagtagttaagttttcaacatcctttgatgttgagaaaagagctttgcgcattccgaatccccctccaaggccttcttgctccatttctagccgaaccaaagaggaaactggctcagctcaaattccgctcccacctcctccccctccaccacctccaccaaagtttgctgcaaggagtaccacaggaacctttcagcgagctccacaagtagttgagttttatcattcactaatgaagagagattctaggaaggattcttcaaatggagggatatgtgatgttccagatgttgccaatgctcggagcagcatgattggtgaaattgagaataggtcatcacatttgcttgcagtaagtgctaagcctatgatatcacaacttactgtgaatttcaaacacttttttgggatttgaagcttcaaaactttaataggttctgcttaaaaagtcatagttgcttattattgatacatcttaattgtcatgtagataaaggccgatattgagacacaaggagagtttgtgaattcgttgatcagagaggtgaatgatgcagcttttcagaacattgaagatgtagtggcgtttgtgaagtggcttgatgatgagctttgctttcttgtaagttgatttctgtcctacaccacaatctattttgctatttctgaatttcttttcagtctgaaagctagtccccaaaacttggctggatatgaatattgataagaaatcgaaatgagtctcataaacaatttataccaaagagctgcttaatgctcaatatcatgcattgattattatgctttcataagcctgatttggtgattacttgcattgtttattaaggtggatgaaagggcagttctaaagcacttcgcttggcctgaaaggaaagctgacacattgagagaagcagcatttgggtataaagatatcaagagattagagtctgaagtgtctgcttacaaagacgatcaccgattaccttgtgacattgccttgaagaaaatggtggcactgtctgagaagtaaggacctgaaaattttacactttctttagaagtttataatattttcttctaatattccaatatgcagtagttgtaaagttgtaagtgtttcggtaccactggcaggatggaacgtacagtttataatcttgtacgaacgagagagtctttaatgcgtaactgcaaggagttccaaataccagaagactggatgctggataatggcattataagcaaggtaagataattctagatggttactttgctattcataattcttaaaattgttgaaattatcacagatatattctaaattaagattatcaagatttttgttgcactgggaaagacaatgcacagtctcaaacaacttaatttctctttcactccaacctccatgcccttcattccccaagtgcaatgttaatgttatgattaatataggggtgtaacatcttttaatgttattgtatggacataaattagtttgtatcattactgaattacataaatggcaaagcaattgatgaaatactatttagcagatcaaatttgggtctgtcaagttggcaaaaatgtacatgaagagggttgctatggaacttcagtcaaaagcagcactggataaagatcctgcaatggactacatgctactccagggagtgagattcgctttcagaatacatcaggtattgttttattttgtaagtttaaacagtgaaaatgaatgtttagacaatgtgatatacattttagataagaatgatgagtttcgtctcaaaaccaattagaaatgagtcgtgtaactaacttaaatatccttctgtttcataaataaaaagaacttctcactaacatttctgtcctaccctttttcgtagtgtagttgtgaaagcttttctcttatttttgctgaatttaagatgtgtttcttgtttattacagtttgctggaggatttgatgcagaaacaatgcatgcatttgaggagcttcgcaaccttgctaatcttcttaataagaagtaaatgcttgacgaatactacacactatctcagtgacctttcaagaaagaaaacatgtataacatgatgtatacaatcatactctgccatatggtctcaaagcaaatcttttggattgaagacccaagttttggcaacaaggaaaaaggatagattgtggattgtttgttactattataattcatactgagttttccaaacaaaaaattgtcatctgtaaaaagtaggaaaggaaaaagatgtgaatgaagcatgtttttgacatcaatgcaagagtgttaggtgcttttttatgtacaaccaataatcttttttattcttttctagttttagctttcttgggctaataatagtttgacttattgaagatagtactttggtgaatggttcaattgaagcaagtcatattgatactttgtgatcaacaatgaatgaggcatttttgggtagggaaaaagtacacaccagcaaattatgaggagcccatttaatgttggaatttcttataaatgatcaaactttgatgtaataactttggaacatataatggaactcaaagtagggaataatgcaataatacaaaaaaaatagggaactgtctcaggataaatccatgaagttagagatgatgtccatatcgttttatgtaagagtactgttttaccttaaaacccaagaatgcatttagagctcaacaacat

SEQ ID NO: 218335 - DNA, 6654 bp, Cannabis indica
cgtagtaatttttctacacttttttttatgaattcgaaacagactctatttcgatggattctagtcgtcttcttaggtggagtcgccagaattaatggtggttctctttctggttgaatttttgtttcggttgcgttgggttactgcgtagttgcgtaatagttgcccaagaagcatggatcctgggttactgtgtaagtggtatttgtgtaatttttattatttgagctatacatttgtttatttagctagttgaaaatatttttataatttattgcttttttttttattaaaacttaaaaaaatcaatttaaaaaattaaaaataaaaaaattcataaaagctatgaaaaaaactaaaaaaaaaaaaagacaaataagaaaaaggtatgataaaattgaattttagcataaaatgaagtgagtgtgcgttggagaatgcaaatggcacatttgtaatttcctgacaattttgaaccttattcaatcaatgactaaaatcatgaaactttctgtgaaatgtctttcatgcagatactcactctcactgtcactaaccttttttctttttgtttcattattacttttcttcaaagaaatagatgaagaaaatctctctctctctctctccaaccctgatcatataatcacacaaccatagttcttattctcagtcacgtagagaatatgaatcatcaacctatcaagcaagaagaagaaactataatcatgtctattgttcactccattaacactgaaagatctaagcaccatatagaagagattaggtctcaaaagttctctattggtaaaaaagaatcaaacccattaactcaagatctccatcatgctgttacaagtttatcagctgagctttacaccaaagatgttcactttctcatggagcttattcaggttgatgtttaatagattaaagcaatatttttctgttctgagtttatttgttagagatggagattaataaatgtttgtttgtttttttttggtagaatgctgaagataatgagtacgaagagagtgttgagccaactcttgagtttattttaacaaaggaagacataactgagactggtgcaccggctaccctcttgattttcaacaatgaaattggtttttccaagaagaacatgggttctctttgtagtgaaggtcgttctacctaaaagggaaagagacaacaaggctttattggagaaaaaggtaaatagaaaagcttaagtttttctttcatttcattccacataactttttttttactcagatgtgtttttttgatactctttaaaaagaaagcttaagtttttcttatcattccatatgacttttttttttcactcagataggattgttggatactctttaaatgaaaagcttaatttcttatcatttttactcatatggggtttttgtatactcttactctttataaaggagaaagctcaagtttttcttatcatttctttccatataacttgtttttgttgtttactcagatggggttttttggttactctttaaaaagaaaaaagttctatattaatagtgtttggtgaaagttggattcttttattttgttaaagagatttctgttaccaaaaatgcaggaattggattcaaaagtgtcttccttgtgagccagcaaccacatatatttagcaatggttaccaagtgagattcagggaagagccaaactcaaattgtggtattggttatatagtgcctgaatgggttaccaaaaagccttatcttgaagatattgttaatatatatggttcaaacaaagagttgccaaataccatatttatacttcccttgaaaccagagaaggtagaagctgtcaaaacacagctctcagagctacatccagagatttttctattcttatccaaggttaagcgactatatgttcgcaaggatgaccgtgattctattggaaatgacaatgtccccattgtttctatagccagtgagactagttgtgtagatttgagtagtgaaggagctgattctcgtgtggttcagctctcagtcaaagagaaaacttgtgatgctgaggagacttgcagctatttcatgtggagacaggtgtttccggtgaagactgagaacagagtcagttcaaggctagatgttgatcaatggactgtaactcttgctttcccatttgggaatagattgagatcaagaggaacttcttctattggtgtccttgcattcttgcctacaactatggtcacaaactttccctttgttattcaagctgattttatacttgcttcttctcgggagtccatacttttggacaatttatggaacttgggtattttggaatgtgtcccaaccacatttttgaatgcttttcaggcttgtgtaaagtcagaatccctgttctcttcaatggtacaagtgtttgagtttttgcctgcttatgcttcatcatacccggaacttaacaaagtaagagatagcattaaaaacagattggagagttcgaagattgtgccatatgagatgtacaatggcaagaagtatttaactgagcctaaacatgttgttagaattctaccaagctttcgtctcctcttgtctaaatctgtgaaggaaggggcttccttggatggtatgcatagatatcaaaaggttttgaactcgtcgttgggccttgaaaattatgctccaattctggactttcttggcgtggcatacgcaattccaggttggtatggatcttgcatacaattatgtaatcttgttacacaaggctcggcagaggtttacatggaggtactaagttttcttgctgagaatgaaagaattttgtcttccacatatattcagcatataccacttgtgaggtatactgatcagaaagggaatgtgaaattgtgttccatttaccaaaccacaaaagaagttacagttaggtatgctttagagccagagattcacatgtggttgagaatgtgcagcatggagtttgattattttaacaatgtatattttttgccaaatgacactcagaagtctcttgtaaggcacttgaaatttctaagaatcagccaatggttatcaaacattattcaagttaagccattattggcttgtgattatgcttgcatgctatacagatatgtagcagcagagaagaatgttctgacaattcttgttgcccatttcctctatcaagcccacaagaaaaattcattgaagatagtaaactttatgatatttgttcgaagattcccatcattgactgttgtggtcatgttaggaaggagaaacatacaacccttgttcctacttttgggagcaagtggtttaagttatttagaaaaaatccatatctgaatcaacaatacattgatataggggatgtgtatgctaaaagtggttcatttctgggagaattcacacctgaaaaggttgttctagactttatatgcttgtataccaaagccatggatctacctgagctaactcctcctaatgtggagttagaaatagcttcttctccactttcaatggagcaagtgattatgcttcttgactagatcagattacttcaagctaggggcttatggataccagtaaaatttaaggcaagcattcaagatggaaaatgggtgaagacatacacgggttataaatctccaaggcagtccattcttcctaatgaaacaggcaaatcaatgtttgatttggtgaaacatgttctcaatgatgtatcaattatagaagaggagttctatggtgacaaaattagtacgtatcaagatgaactgagatttcttggtgtgggatttgggtctgatgatgtgcagaaattggtcactgatcgattggtctctcttagttcccggaatcagtaaagagcaggccttttctttgttgacactcattagtttcttgaagatgaagaaaaggattgactagggatggctgcaagtcatgaagaagggaaagtggttgaagactcatcaaggttacaatgccaccgaaggggttattctcttgccatataaggtagaaacaccttcttgtttgattactactgatcttcgtcttgttgatgaagcatattatgggtgccaattaggttctttcttgtctgaactaaagatgcttggagttatcactgatcatgctgaatcattaagattgattgcgcaaaaggcaattttccctccaaatttgccttctgtaactgttgattgtggtctgcttatgcttaaatgcatcaaattatctgacacttctaccactggcttgattgagaggattaaagtgcaatcttggttgaaaacgaattccgggttcaacagtccttcagaaactgcttatcctaatttagtatggggttctttggtgagagctttacacattcctacaattgatgaactctactatggtgatgagctttcccaatatcttagtgaactgagtgcagctggagtggcggttgatactgctagtataactgagaagattgctgctaagtttaagattctttcaagttcctcaaaattgggacctgtgttttaaagaagagaggcaaactttgttttcaggatgctctgaagtgcggtgtttgtttactgagaaatggttaaaaacacgccacggttacaaggctcccaactaatcaattattttcagcacgaactggggagcagtctcgccttttgttgatcttcctctaatcgacgatgggttctatagcattttcatatacaagtacaaggatgaactgcaaatgttgggtgccattactgactttgagggtggtgctggacttgttcttgaaggtctgaagagtcctattgaacctgaatttatcacaactattggtacaatgccattattaaagtgcctcaaatctgtcatgtccaagtctcttgataagtcattgcctgacaattttcttgagaacactgctaaaagcaagtttctaaagacgacaaatggttaccttattcctaaagaatgtgttcttttttattcaacctgggaaagtattttgaatcagactgatgtaccaagtattgatgttaagtgttacgagtcagacatatcggtgtacaaggagcagttaaaagccattggtgtaaaaacagattctgtggaggtttgctctcttatttctcagcttctctattcgtagaaaaacacttcttttataacaaggttatataaattccttagtctgttcaactagaagccagagaagccagatgagttcaaatcgcttgtctggataccaaccaatgttggtgacaagggaaaatggattgagtccaaactatgtatacttgatgacgacaacgatctatttggctcacacttgtattccctttctcatttttatgatgcaaaatttctacctctatttctgtcaacttttggagttagagaattcccttcattggatgactatttccagttatggaatgattggacttcaagcagtgatcaccatgtttctaaggtacaatgccactttttctgggaaggcatctcaatagaagcaagaaaccaaagaggctttcaagcaacacttgaccaagctttgtgccaccgcagcaacatgttcgcatgacaagattcacttggtggacaaggaaagtgtttttatactagatgatcttcatttgaagaatatttttgagaatgtttcacttcctttgtttgtttggttccctactggaaacttttcatcttcctcgggggtactcatgatgatctatcagtatctaggagtgaaaattttaagtgattctgtcaaggtggggagcatcttcgcagaagatacaaggccaaaaaatctcataccaaaaaatgggccaattgaaaaaggtctcatcaaaattatattggcttttcttgctggtcctttgcttgatatgcagcaaaaaaagagacaacaaactgttactacccttctcaacctctccctttacaagagtgatcaacccattaaagtcacctacttgctgaccccatatccaaatgaaatagtaaaagcagaaacaaagaaaatggttttctaggacaaaaactctaagcagttgatcgttgacgaatcaggctacgagaatagaagaagtagcatagagtttgcgtcctgttttgctcgagaaatctcggaaggactgctgccagaaggaagagcatatgtagtgtctagtcttaacagaatcatacacatggggtttgtgtacgagttcaaggaagattcagtggactacttgttggtcagagagaatttgaagatgttgaatgaagacaacgagtttcttggttcggcattccttgctaccaaacagtatggtaaaagagtagcacgagtgaaatcagagaaaatgtctcccttcacaccttcatgcaagaagtcatgcaggaggttattgccttgagttgatcctctccttctggtatgacaatgccgttttttaaatgtgcctcttgttatgtttatatattgtatctcaatttttgatgtcacttatgggactttggcatttttatggcgtgtaaatactccccaaaagctaagagcatgtttggtattgttttctgttttttattttcaaaaaattatttttagaaataagaacaaaaaatagtttttgaagt

SEQ ID NO: 218336 - DNA, 5346 bp, Cannabis indica
aaaaaatcgcagcacatcccttggatgtgagggatgtgctttgccactagaagtaatgagatcattgtagaattgtacaaaactattaataatatcaatatgattattaataatagaattatcatctaaagtgatcgccttaataatattatttcctcttctaagttttattgtgaaaataattagtattcttgtcaccagctttaagccagttgaccctagacctttgtttcctattgacttcctccttaagcaatagagcatcaagagaggattgaagattattggcatgtctaacttcattccgagtgagggaacagttagagtaaattttatcaatgacagattgcaagttcttgattcgatttttaaaataatttttatccttacaccaagacttcatgttttgaatactaaaatcttgcttgctaagaaaagactaaaaagggcaagtactgctattagtattcccatcagtcgaccaactatctttactgggattaaagaagttaggctccacgagccaatggttttcaaagaaaaatctgttattacttctattaaaatgaggagtgaaattataaaccagtttgagagctctaagatctgaaccatagaaagggaggtaaaaaaagttggttgtgggaaaagtgtcactccaagccttattaataatgccccagtctaggtattcaaaaagactaccatgctttcaagtaaaataattagcagtacagttcaaaggaaacatattgtatttaaagataaaattttgaaaattgtgaatagcatggggaggacgtaaattgtcactgctacgatcattaaagcctaagtaatcattaaagtcccttcaaattagccaaggagagaatggggcaacatctaaaagacgatccaacaaaatccaatagttagttttactatttatataaggagaaccatagaagaaagataagtgatagttaatatggaagtttatggaaacattacaatgtctataacatgaggagtaagatagaatattaacattaacaatatcattctaaaagagtaatacaccacctcctaatccatttctagggaccttaaaatcattatcaaaacacaatctagctttaaataaaaaattgcagttggctgccagcttagtctccattatgaaaagtatttgaggttgatgttgtttgaccaagaaagagaggttatggaatgcccgagaactccctaatccttgaccatttcaagtgataatactcatttttctgggtaaagttgatgagcaacacccgccagttcattagagtcagacaaagatgggaccacaacaaactcagagttggaagatcgggctctttttagcatgcttctaacagaagaacccacttgaaaattttgttagtgaaagcctctttgtcattgacttggttcctagaactgcactggcctatggaagtggtaaagtaagaaataggcccctggatatatcagggtacataaggcccttacccttagaggtggcaagccgaggcaaagtaaaagctgggcaatattctagtgttagatttgggaagcgaaaacttctggtcaaaggccaggaagctgttcccatagatactttagaagttatttcccatccccaaacttcttcatcagcagtggtctcttcttctcacggttgagtaaataacaatgcttttgcaatagtccttctctagcagagagcagtcgtcatggatgacgaagaggaggaggaaggtgaaggatccattttccttcataataaaagatctagctctgaactaggtagagagaaaaagttcaagaactaaagctaaagaaaagcttcaatagttggctaataccaagaagcatggttctgattcttctggataaagaggggtagatactcaagaaaatgataggcccatggcggagcactctttctgagaaagagattatcaattatcagcctctgccatcacaattaatctaagctctttcaacctagttccccagagagaggacaaatcttccaccacttcctccttccaatattgtcttactagttcgctcttccttgtttctgaaagaggtatgtgctcaattggatacaccagattaattcttcctcaagaaattcaactccaaatatgtatatataaggagaaaaacgtctttgctctgaactaggcagagttccaaattcactaatgttgtgaagtggaatgagtcacttcctcaaatgtttgatcgtcaggtggtttctaagaggccccaacccagggtatgctcatatctggcaccatttgtagcgaacttattagatcaaaatgctgggacttgtagcagattaggtgctaataaattcactacaatggcgagtagagatccaatctttatggcggaaagtctcaagagacaaagtgctgctgtaagtctactatcttttgtataagctatatcttctaagtctttttgcttatattttattattatgtattttatatttcaaacaagtctaatagcggagatgtaatcttctttggtcaacaaattggcttatgaagttgaagcgttgaatgcataatgtgataatttcgagcaattaaaagaagaagtagtcaattctttgaatgatgctaaatctcgagcagaggctatagtcaagcaaagagttgaggtgtccctcaatgacataatttacaattacaaagctttttccaaggcgaagaaggatggcgctgagatatgtaaaaagtcttacaccaagacaaattcacacatttttggattggaggaaaagcttgttgatgctcatgttgaagtcaaagagctagagcaaaaatcagacactacttctaaggactacagtactcagactgaggcccttaatgacaagatcgttgcaatcgccaatttagagaagaaaataaagcatcatcaagatatccaacaacaggctaaacttttgaacaggcgtgttgacctcaaaaagtaatcaattgacagtggggtcatatgcatctgatgcttgccacgtgttacacaaacaaaatgaaaaattataaaacatacaaatttgttatagaggtttaacccccttgtgatagcaggtgatgacctactccctttttggttctattgatacctagagataatactatttagataactataggtgggatctgatatagctatctataagatacaaaacatgaatcagtaagaagatctttaatgagagagtgataattccttagaggcgtgtgagagagatgaagagaagaaagagccctttggggcatgtagcagagagagagaaagagagattagggtttctgacttagagtaatttggaggcttagtgacttaagttttctaggttagagttaaggcctttatataggaagcctaaaatcctaatttacaatgaaacccctagatatgtacacattaaattcattaaatacaaaagactaaactcccccaaagtagatattttccatcaatttgttgggtcgttaagggcccaattcgcagtagcttgttggccacatttttgggcagtacatagagctctgctaggttaactggctgcccatagacctataggggaggtctggctgcctaaggtctgtaggatgaggtctagccgcccaaggcctataggatgaggtctagctagccaaggcttgcctgacctggcgtgtcactatagctctaccaagaggaggccagcctttggatgtaaaggccaaccttttgcaagttgaggacaattttgtacacaatttccttgtagaggccaggttcccttagtcaaacggaatctcccttggtccggaagtcacttcttggccagccagcttgtgcatagatcttggccagcctataggctcaccttggctagcctgtaggcttttcttagctagctaaggatgttggtatatctccttgagggctcgcttcactccattcaattgttacttgatagctatgctatgtcttgcctcgagaccctgttctgctaccggctgagctgtactccacatgtactctatcttcggcttgcatggacatgcctcgctaggtggacaaaatttgggatgacattttcccgcaagtccctattcaaacatctggtcagatagggactttctagctctcgtcttgtctgtagtagtctttgttgagcagccttgtctagccaagtgttggctctttgcatggcatgcttttggatctttaattttttctctgtatgtacgtcttatcttcggcatctcttctttgttcatgccattaacaagtttcaatctttttaagcttttggaaactttttgattgtcatattagtttataatctctttggtatattgatcctcatgacagttttagaatgtgtaatgtgtgactttttgatagaaaaaatttgattttggccttggctattattcttgactctttgagtcataaagaatacgaggctcatattcaagttttgaaagaaaaacacacattgggattcaaacctgaccttggccggcctgggaggtcttgctaagacctggccggtccttaggcttaatcatgggagttttccagctttacggttttaccctataaagcttgcttgttcatgcttgggtttggtgaccctggccaattcttggctgagtcatgggacccaggccaatcctttcaaggcttgagaaccttggtcgacatgggccttggttctaagtaggtggccagttttctatcctcttttaaccgacaagaatccagctctgtaggcatatacaaccttagtctcatgcgtggtttccttggaaactttatatgaaagttaatggtgagtctattatagttgaatgttcaacttaagactcagcatggcttagaacctgtaaggaactttgccttagccgtagcccggtacgtggcccctataggagctctgtccaattcttttctagctatgcaattctggtaaggccttggccttgtgtatgcaaaccaattttatattcgacctcaaggctttcatgttcttgctttggcctatgggccctctattttcaaacactactattagttagccttaaagcaatctatgatggacatatgatcgcttggctatcttcttatggcctttacatgtaaaggttgaaatttactatgtcaagccgaagtatgcctacacgacttagaggcaagtttagtagcttattctaagcatttaaatttctctgcataagtttgtggtgccaattcaatgcattgtacggtatgggtgccccccaagcgaccatgcatgtaagtctcttggtcacttgctat

SEQ ID NO: 218337 - DNA, 7126 bp, Cannabis indica
tgactaaatgtgctttagtcacgatgctttgtgaactaaagtaaattagtgataacttgtatctaaatactatgttttagttacaaataattttttgttgtgactaataatcacatatagtcacaaaaaattatgttgtaactaaaatattatcactaaaggtaactgtttttttgtagtacaagaatttatgtatatatgaccaatttttctggctttctcccatgagtgagatgttggttttccaatagtgatagcattgttaattggtaatttttttcttcttctttttattctctcaatggaagagcctagtcatgtccaagttttggtggatggtgagggttttcccttacaagaggaaaatatagagcttttcaggcacatgcagtaatagtcactgagaaacctttctttcccttccttggaaacaatctccatgatcctcatttctaaatgctagaagcaacaaggttaggggaaaaggctcttaaaagagtggaacaaagtccaaatctagtcagggacgtttggccagaaaaagtgttccctgtcgagtataccctttgacttagcttgagaggatgtcgaggacaatgctcgtgatcagggaggtttgttattgaaattcatgttgatcaaaatttttaattgggcgaggaggtggcccttatcaagccccctctgtcccaatgaatgttatttcctagaattgttggggtgtcgaaaggctaccaaatttccaaccttcggtggcttaggtcaaaaaacacaaagttgattgtttatttttgatggaaactaagggacattaatagcttctttctctattttatggcacccacatagttgacgattttgtgaaccaataaaaacaaaattttcagtcgatttgcacattttgtagtactgaaacatattctatctttcttcctattgtttatatctaggctttgaactctaattcctacaaccatttggacaaactttacaaaactcttcacattggaacttcattttcccataaagttcaaactcttcacaagcacttagagctaagatttatatatatataatataaatatatatatatatatacatatccttcctcaatttgctattattgcatcttcaaatccatttcaacaacccttttaatcgaaattggtttgaaccaattccaattcaatgaatactttttaattttttttaaattattattattactatttatttagatacacgattcttcattgaaattaggcactccaatgaagattctctattctcatccttgtcgtcggggaatgccctagggcaagggtgagcatagagtcacaagcttcatcataattttcaacctaagaatcaacatactttatttaacaaaatacaaacatataatttaatataatgaaagaactaaattcataatatatataatacataccaattatatcaatggtagtccggccattggtgaacctaccggttggactaatagcataattagcattaggattagagaagtcaatctcataaggtttgtaattagccttactcaatgttggaagcttgttgttatttccattatcagataaagaatcaccaaatatgtataagcatggtacttgtggttgtgaatctccattaacaccataattatgatcatgtaacaatatgataatcatcaataccaccataacaaatttcatcactgataattgggagaacatattatcatgtctttgatcttaattttcatactatatatgtgcttaatttatagataggtcatgatatgatgtatatatatatatatacctaaattaattaatcaaattattaaacaataactcaaaaattgtgactattgaaaattaattactcaattagtattggtacactcttttaaagtcaaatggtctataaatgtaagcttaattaattagtcttgtctagagttttattataactactcaatagcttggatatgcttctagatgttggggaacaatggagtgtgaatttttattgaagaaaaaaaaaaattatatacttaatggtattaataagtacagtcaaaattattttaaaaaaatcaatcaattttgtggggtgcctcaaatgtttaaaaatatttgtgaatattattattttgactaacataatacactttacatgtaataaatataaaagtgtatatttttaaataagtcattatcgtgttacttttaaattaggcgtatcaatctaaaaataactaatttaattaatacacgagttatataatcaagtcaactcaaaaataatccaaaaagttcccccttaatgtagttatgcacatgcatgaggctaaattatatattcaacattaattaataagttgatttttcctcaaactcactaccacttgcctttgtttttagactactattacgttttcttgttagtttaagtgggaattttattgagagagaaataatttaattgtgaaaaattgaggtcaactaattattataattaatatgcttatgttgcatccgtagctgtgacagtcagtaattctgtgatctgtgaggtgaaataccgagtaagatatgcactcccacatcacgtggagaaggtcaagtgtgatgattctaagactgcgtagatatagtactatacagttgaagagagtttgaatggctagatagtctatatcagtaagatgtatcttctttttggtagtccatcatttaagaattttaaagttaagtgtgcttgacttagaggatggatgaccttctaggaagttttcccaaagcatgcaagtgaggacaaagcacactgaaaaaacttatgttggtttgcagggctagtcgccattccatgatgcaaccaaagtggcatacccgtgtataagaaccataagtctttgagggaaggcctaatggagacttggaccagggatgttacaaatagtatcagagtcttaacccagtccgaagtgtgattaacgaggatgtcagacctcgtaagggaggagatgtgattgtgacagtcagtagtctcgtgatttataaagagaaatactaggtaagctatattatctcacagtattgcctaaagaaggtgaagtgtaatgattctaagactgtgtaggtatgaaactacacagctgaagagaacttaaatagattgatgggtactacttatattaacaagatgcatcctctttttggtagcccatcacttaagaactccaaaattaagcgtgcatgacctggaggatggatcaaggaaggcccaataaaggcttgaagtaaggatgttacaataacttatatgtggttaatttgatcttttaatgtctcatattcgagtccccaaatatcacggattaggttagagtcttttttttcttctatatatatatatagagagagagggagggagaaaatgaaagtatccatataggctaatcatacaaagcttattacatgaagatataactcaaacaacaaaataagccaccaacagtcaaacatcaaagagatgtgaagcatactaggtatctaaaccaaatgaacatctaattgtagtccacccatagatggcttttgccaataatcttgcaataaaattaaatgaaatatagcactctcattatttaaatcgtaaataaggacaataacaaaacgattaacacgttctctatcacgaagaagtagagtacgaaacacaaggccaattgagatatgagaatcccttaaatctaataactaagaaaagaatccatacccttaccaaagcgactgaatggaactaaagaaatacaaccaaccaagtgggtatcaaagttgtcctccctcatcaacaccattattaaaataaaaaaatgaaaaagaaaacaaaataatacaaaacaaaataaatcagctgaataaagaaataaaggaacaaaagaggagaagaaatcttactttaaaaaggaattgtctttatgttgtgcttttaatttgttcatatattataataaatttttcaattaagactggatgttatgaatgatatcttatttatttatttttttgaacgaaaatagaagcttccattaattaaaggtctttcaaaagtaatgacaataaattagcaggaacaaactccttactaatcatgcaatcagctttagagtaagagtccctagctaagaagtgagccacattattcgcagatcgctttacaaaatgaaccaaaacattaaacaattctaataaaatgagttttgattcgtggattacaatgccgtatggtgaatacatacaaactttgctcttgatagcatgcaccacattgacacaatcagtttccaccatcgcatttgaccacccatgagattttatctaacttagggcctctttaatgccctgcctcagcaaatttgagattgacaacacctggtttagatgactggaaggcctcaataaaatctccttcatgatatcaagcaatgcatctgaatccatagctgtttgattgactgaagatggcgtcatctacattaactttgatcatgtttaaacttagtttagttcctgcttatctttttctctgacagtgtgattgttaggagagaaatcgcaaggtgagtgttgagcagaaatctattgatccaaagtgagtttagcaaatgagaccactttatcaatcgtttgggagaaatttttaaagatgagatcattaacgttcgggagcgtaataacttcttcttatcctcttcatctaaggctatgttgacatattgttcttctagatggttggatgaagccatagcagaacgaaaattcaatgagagtaaacggaggcaagacaaacgcaaactttagaacatcagagagcaaaccatgtcatacgacaagactttatactatattttgatattttatttatttagtggtaggatatttatcatttttagtgattttgatcaaataaattgtttatgagcatatttattttattgataacagtatatgaaaaaaaaaaagagaattatctaactaaatatacacaaaaaaaattaattaatatataaataatatttattaatgacataggtgtagataaaaaaaaaatatttattatgtctcaaatttaacatatgccatattttgtattaaaaattatgacacataccaaattcaacacttattttacgtgatattattagagaagcatttttttttggaaaaatctatgtgctaaagtattgcactaaacccttatagcactccatagagttattttacagttgtagctgagtaagttgtttaacatcaataggataactgtctgaagcatgaagagaagtataagatctgttagcagtaaatttatttacagcttcagatgggtggactttatcccagaagaagtacgatgttctgttgttacatgtagcacttgaaggaatacataaattaatcgtagttgtcgggcaacaattccttttaaagttagtgattcctgcaaaatataaatattttaatatataattataattatatatagaaaaattatacaacatgagtttgttcctatatattggtagaaatgccttctagttttttaacattttattaaaaaaaattggaacttctaattttttttttaaatgacattgtacacattgtgattataatatacattccacctgctcttaaataattttttgaataatttacagtgacaatagcataatttaaatattcagttgcatacgtgcttgtgtgttttttatacatgtacaacatattattttgaattctatttttgtaaataactataatttttttttgaatgcctaactcactgtaatagatgcctattccatacagttttgtctcggtagtatattgcgtcacttttagaaacaaacggtaaaagttaacttgattgtttaaaacggttagaaaaatcattttttttagtagtgatacatattataactataatgtatattgtatataaaagaaattagccaagttaagttttctaattattgaaaacataaatagtcgtactagtaattaagggtcgaaaggacaccccaacctactatcactacaaaaaattatacttttagtcacaaattttaaaattgaaaaaattgggactaatattataaattgttatttttatgttgtgactaaaaagtctgtggctaaaggtattagtcacaaaaattacaattcgttgtgtctaaatatgtttttagtcaaactaaaaatcatatttaattacgtaaaaatttacgttgtggctagaaaagttaccactgagttaacgttttttttttttgtagtgtataatttctccctataattataacatatgttcaagtattattataacattttaagtgtgttatgatcatcatataacatatcaatattgaaaggaaagtttaccctaataaattaataaaaccctatttgaaatttattattaaaaagagattaagagtagtagagatatttaccaagagaagaaagattatcactggattgtatttgagaagtgttgacataaatgaatttagcatcactaaatttggcattaagtttatcaacaagtgaaatgagattttggttgaagagttgaactttcaagttcactttgtttataccatttattccatataaggaaattactgatggagtgtatcctagttgccctagtccaactagagcaaacttccttgcactagagttattgtacaatctctgaaaaaattattaattattaattaattaattaattaattaacaaaaattaagatagtatgtacttaatatatttaagccgccgcaatattaataaaaataaaaaatttaatatttaagtatgttaaatgtaaaaaaaaaaaaagttaaggtgttgaacttaagtgtttatgttgtcaatatttgtttctacaaaggattaagtgatgaagatgttaatttttattataaccctttttctagcctttaaagtaaatatagaaataaaagtattataggcaatatatatagactatagtaagggttaaaaaataaacaatataaagtaactggttatatattttttttaacttttt

SEQ ID NO: 218338 - DNA, 5307 bp, Cannabis indica
cttaagggagctgcatataagtgtttcaaaaggatcggactaggaacaattacatcctcaaataaatttttagaggaattccttcaacagtaccattcatcaagtgattacattatgcctataacaagtatcaccaatgtgaagaaaggggaaaaggaatgcttatgaagctacatccagcgcttcaatgcgaaagtcaccaaagtggggaagattaaagatgaactcaagttttccatagccactgcagtacaccctggaagcagagtttgggggaatatgttgaaaagggaatttgttggcatagaagacttctatgagagagcagggaagttcatccgtgtttaggaaggaaagaaagtcttgcaaacggataccagtgagtgctcttcgggaagcttatcatttccctacatggtctattaggtgatgccccaacactcgtaagtcggtgtattaaagtgaagcctctgctctacaacccataaaaattgaatatccaagatgttcctcaaagtgaagttccactatgtgggaaagcattccttgtgtagtcaagttcacctttaataccttgtactaaatttaaaaggggacctagtttgacctccaaacatagcatgtgtattcaggcgatcacaggtcttctttatcaataaaatgttaagttttcaccttacatatggcattcatcactctccactggtttgcttgagttgctccctatgattgtcaatcgaaattgtaaaagtgaatgaagcagaaaaggaaaaaaaaaagaaaagatgaattggatacgatcttaagagggacgcctctctaaaaggattatcgatcttctatcattcaatacgcactttaagtaccacgaatgcaatgtaaggggtaaagcactgcctaagaggcacaagctccctcaataaaatctttaatcttcaaaaaggctgagaaccacttaagaggcacaacctcccttatatcaaaggagtatcgatcatctagcatttaaaatgaactttaagtaccacgaatgaaatgtaagaggttgagcgcctaaggacaacatgctccgccaataaaatgtttaatcttaaaaaagcttgaatgtgacccaattggctaatagctcccttaacatccaagaacttgaaaaagttacgcacgacccaagaggctaaacattttccttacatcctataagtagccagtaaaaggtcgagaccgttgaaagagtttataatcccttcataataaggttacataaaaacgatgttaagaaagcccaagtggaaaaatactccctcaaataaaagatctcaaggcggaactgcctaagaagacaactgcagaaccgagaagaagtgatgatgcatcctgaacttagactataagaacacttaaatgagttcttatagacaaggggaaaaatgttaatcctaaaaattagcaaggcaaattctcaagattagtcaatgattaatctcaagatgttaaaaaaactatctttaagagtaagggaaaagatgaatagatcaatgtgtgtatcctgaggccattccaccaaaccctagcttgggagatactcaaccaagtagggttaatggtgactcgaccaagaagggttgatggtcactcgaccatgaaaggatcaaattactcaaccatgtcaagatcaaagtcacttggccatgtgacaaacttgcacatccattggccatgcaacatgaaagtcacttagccatgggtgtgcaagtcactcggccatgtgaaaaacttacacatccctttgccatgcaacaagaaagtcactcaaccatggctgtgtaagtcacttggccatgtggcaaacttgcatatcccttggccatgaaacatgcaagtctcttgggtaatacatgcatgcaagtcactaggctaaaacttgcatgcatgtcaatttgtaatgctttcctcgatgacataaaaaatgcttaatgaagttttcccaagtgttgaatatgtctacaacggaggtacgatcacaagaaaaactcatgcatactaaggatgaagtatgcatgcaaacagagtacaaccacacctcttgcaatctgatgctagggggtatgagtagtggagacaccacttttgtaagtgcgtacatcccaaaaaagagtgcacaacaaccaatacctttgcaactcgggaccactcgacaccaaacgaaggtacaaggcgtgagaccaccacctgttacctgcaacctccatgtcatgaatatcactatgtcccttaggaccactaatatagcccagaccattagagcctataaatacacctcttccgaatttgaggaggggttggacaatcattgtaaaacttcacttcaagaaatacaagcatttatcttcctccattgttgctctaaacatttctttaaggttttgaatttttatatttttgtcttcaattctaagtctttattttgagttttgattttttgaccttaagttagttgacaagtttttaccattaaaaaaatctatcaatatggtgattattttatttagcaacctagtccattttatcatctaaaataaatgggcttacatgttgatttagatgggctctatcatgtctctaagtttatgacaaagatgaaagaaatgagaagagtatacctttgttaaaaattatttaattaatttatcatcaatttactatggctaattttgatccattggatctatcatcaagttaaccatagatattaaattaattaaataataggttttaaaaaaatatagcctatggttaatttaaatttaaaatatccatgatcaagttaaccatatagagtatatttagattttaccaataaattaattttaaattaaaaaaaaataacaaacatatattggcaaggatatttttatttttaatgaaataaaatattattaaaaattaccgttaaatataaaaattccaaggttgttgtaacaacctatgtttaccggtgatgtggacattaatgtttgaaacgtgagaagaaggaaaacatttacggagttgagtagtcctgagtcatatcagtcgacctgggaggggtccctagccctgcgcctaggttgactctgaaacgtccgaagtgggtgtttggatcctgccatgttatttttaactcaccatcccttagtattatatccaagaaaacaagaagaatccatgtttgaggcttggaaactggaaagagatgaaattaaatgccaaagtcaactcgggcaactagggttttcacacagcgcacacgttaacactcccaactagggtttcagttattgggtctgtcttagtaaaaatggctcaaaatttgtacttatagatgaataagaccaatcatgaacatgttaaaggcaccataataagaatcaaaatacttcccttttgaaacactaggttcccgggccacctagtgtgcacccatggcctaggttgaagcactcactacctcggttgacatatggttcggtacgttgggttctgcttatccaattttggtaacgtcttgagcaaatgattatttttatctatattaaacgagagctatgatatgacttgtgacaattcaaatttacactttgatagttaataatttcggcaaagtgtaatatcaggaaattattcataatgggaaagttttgagaatgcccaattttgtggaaaatcgacatctttgagaactagctaacaacttcactaaaaccaagtaattaactaagtgatgtcaacatatcaattaagcatcaaaaaatacaactccaagatgtttttcaactcacactacatccaagttgacgtcagtatttcaacctgggcgttgggtgctaaacaacattcagtaaaattgccataactccgtcaatattgatctgactgatatgattcaacttgatttagaaagtcctttcaatgattcttcaagtcatgtgtcacacccatatcttaattctgaagatttcaggtccaaaatttgtcccaagacttattcaattttttctacaaataacccaaaaatgatccaacggacagatttgagctcttgaaattgaaaatcatcatcccaagtcattttcaccattagatcattttcattggccaagattaacacaaaaatatttttccatatttgattattagtttaattgaactctttcatattcattttctacaatggatcctaattgtatgttaatgtatggactatgagtttggtattctgtgatcaaaatctacttgaactattctaagaattctttgttgtaactagacctaactcatcaaaccacaacaatatatctattgtatttgcatcttgctcatagtggttttgacaagatcagtctttgaaaagagaaaatatgtcagtatccacttgaaagtaggatcatctgtattcgaacatatggatgtacattcaggggtggatatgagttatcgttaaattcttaaaacgactactctagatatatatcttatgcaatgaaatttgaaatgtttgagaaatttcatgaatttctagcaaatggtgaaaaccattgaggtaagcggttaaagatcttgcaaatttataggggtagaaaaatatttggttatgaagatgaaagatcattatgttgaacttcaaagtatatccaaaattaccttcccagaaattcgaattgcatattgatgaaagtgaaaggttatgattagttactagcagctgactaagtccttctaggaaaatatgctagtgataggaaaacttcaaaatgatagaatggttgtgtacttagtgtacaccattgtacttagaaacaccattactagattcagagatgtcctgatcatgaacttaagaaaagctagaactattaacaaaggtttgcatgtttgatagctattctaaagtgattaggggtggaccatcctatagtcattaagatgagaaagtatttgtttcaataaataatacttttctaagaatgtgactaaatttgaaaacaaagtagcaaagtagaggacatattttcaattccaaagtgttctatcatcttattctatataagatggtcctactacctcttttgtattgacacaaccaatgaggacaagaccattaatgttcttagatagaaagtcacagtaccttgtcatagcgggaggattttaaagaacctaccctattattgttggaaattattttaccaggatcttagatctactcacaagtatgttgattaacaccttaaatgtgaactttctaaaatgatgaaataaacacatata

SEQ ID NO: 218339 - DNA, 4728 bp, Cannabis indica
gtatttaacatcaaaatttgacccccaaaaaaaaaaaatccgaacttgctaaatatcacacttacaaatgattatgatgtctcatgttctacttctatggtgtttaaatccattttggtgtcctgtaaagagatcccttcattattctcctattttcacatactttgtttttcataaaaaaagtgttttaaacacaatgtggttttttgtgttcaaagtttagagtaaagccattgtaatattagtgaagattaaagtgttaccctcaccctgagaatagtcattgggcattaggagcattgggagcattgtgccatataccaagtgtatagggtaacttgaatgggggtgcacttatgtggcgaggttagaagggagtatttcaaacacagtgtatcaaagttgtttgagcgtctgggcaagcttaccctgagcatgtggcaccaagaccctttgaggggtgcaccaccaagcacttggtaattatgcttgagcacatccttcatgccctgcttaacatgcatgtctgagcgcatgaggcatttgcataggcctaacacttgtgtatagttagaggggtgctgcaagataagggatgtcatacagtaagtttaagggttaagtccgtgaattaattgagcatgggttgaataatcgtcaaagtgtatgacgaggataaggacgtacacaactagatgcacaaaaaactacttacaagctgtatgttgtgtatcaagtgttgtgtgttgtagtagtagggattgcctttactaatatctttttttgtttgggttaaaggtttgaaacccactccatttcttctcaaaagggattaaaggtgccattttgaaggcttgtttagctgtgagtggtgctatctttgtgatgggaactcttaaggtgttcacgatgattcaatcaaggtaggataatgtgttaggctcctatagatgacatgtggtccttgggattgccaatatgaccaaaggggtgaggaagaaatctacattacgtggtcttgctggttaatcaaccaagttttaggcactattatcttcttcatatgttttacaattaaaaaaaatgtggcagattaatctacttcataagtttgagtaaattctttaataacacgacgagctttaaaatgtgtaactgatccatctaaattggctttcttcattgtgaacaccattttttttatcatataaccaatattcttgctggttaatcaatcaagtctcaagtactattatcttctaatacgtatctccttaattattgtactaggtcaactaagatgagatattgcttcacaaataattttagaaataaacataaaatcaaatattaaaataataagaggaagatgaaaaacaattatatgaaacaaaagaataaataggataaatattgatgttcttgggcgggacatgtggtaagctcattagtattggtgtgacatttagagtcgtgatttgtaaggaaaaagaatgggtaagttgtaactatgtaagtatgatactacacaattaaatagagcttaaataaattgatatgtactacttatactaataagatgcattttttttcgatagcccatcacttaattactctaaaagtaagcgcgcataatttggagcaattttaggatatgtcaccttgtaagagatttttctaggaaatatgcgagtgaggacaaagtatactaaaaatattcgtgtaggtttgcagaggtgaggacaaaacacgtttcaaagactcgtcttagtttgtgggactagtcgtcatttcataaaacaactaaagtgacatacttgtgtatattaagtaggtatatgactacacaaatagcaccaacgttaaagttgggccttgttaaggttggcatgtgatcaattcaacaagtctagaatttgcatgtgggtccaaatgctcaatcatccagatacattgtcaaagatcaatcgattctccttctgtatataatctccaaaaaattataggattcatcttcttatagatagatagtttttccggatggatccatttggataaaaatcgtccaacatagggaacacttgatcaacatgcttcaaatcatcttacaattccaaaaaagcgcactctagcttttctctatcatacaaccgatacaaggatttctcatgaagaagtatagacttgagaaagggaaaagcatttttgctttaaaaattgagtatttttttttttttatttttataaatgtataataattaaagtatcaccacgaagtcaacaataattcatttctcaccctttctcttatatatattatacatttttatttattaatttattgttcgaaagtgaaatattctattatcaaattaagagggtcttctgtttcaaaaaaaaaagaagataaaagttgagggtcttccttttaaagaggttttagtcccattatttgagctaaagtttttcaatatcgaagccgttgtcatttgtgttattcaaatttgagaccaaatcacgtacgattccattttaatttgatctaaacagaactttgacctgggaagggataacgtaattagaattatatacatggaaaccataataataataataataataataataataagaaatttatcgattaagaagcaattaaaggtttatctttattgatattagtacgaaactataatctacaaatgtgtgttttgtacgaaagagaatctcgtcatatatacaacacaacttcgttattatttggtatagatattaatgtatacattttgtatcatcaaaattaaaaaatataatacatggattcatggatctattctgtcgagatatactgctataccaactggcattgtatttaaggatgccaagtaaaataaaataaaaataaaagtagaatgaaggttctcatcaattgagttgaatattaatttgtttaatgacaagataaaactgaaagattttggtcctggaagttgagttatatatctatatgagatacacgtatttaaaatagatatgttttgagcaatgtttgcattattattattattaaaaagaatatagaagagtaaataaataatgtgtgtaagaatctttctcaggtaagataaattcagtggattcttctagcacgtatattttctggtcaaccaaatctcctaatatttatatatataaatatcctttactagataagttggaatcatctaaagtaaataaataatacaaaaagacaccaatgcatataccaagacaaatacgtacccaccccttttccaattttcatcacttgcccaccttctttgtcttcattttaatctctctctgtctctctgaagattttgcttgggagctcatgaaaaatcataattttacaatataacaaataaaacagtgcaattaaagttcaagaatttgtattcaattatttaatggtggtccttatgattcataattttttcaatgaaaaaaaaaactttaatagaatagttaacattgaaatgtagattgattagggtagaagagaatatggcctttaataatttaagacttggtcaggtcaatatgttaattaatctaaacttaagttgcaatgtattatatgtaaccactaactttacttgtcccacgaaatagtttggcgtgcataatgtatgtatatctccccaataaaatacaaaaaaattaatcctcttctaaaaaaacaagattaatcctctagtcaaactttccaacttttgttattaatttggtaattttgaaaatgaggaatttaacccttttttaacttttaactgagagagaagaaaggaaagctagatttgatgctttatttaaaagataccttgatttatatatccacagagaattccaaaaatgtgcctcacccactcatatcatatctaagtctaattctaataatctaatagcttagctttgccttaatacgtgtgtgaacccccacacgcttcataatctgtcaaactcaatcaggctgatcaacttgccttattgatcatgctcaagacacttgctttttcaaaaaagagaaagttgaattggtttcactaatttgtaaataataaaattaaaaaaataatttcataatgtgattataataaatcaaaaatgtagaaaaggatacatggctattgctttgctcaattgtcttttgtcctatatgaatttattcatcgtttgcattatatgattccttcactaggaattttgattttgacaaatactacaagatccaatcaatttaaaatatatgtagatcgtaaaataataataataataaaaaaaaatcatgcgtgattaattaccagaccttttctctgtgcatattaattagtaggtggtataataatatttataatatatgatcgtaattataagtgatgatgatatccatgtcatgactcatagattagaacaataatggctcataaaagatggagaaaaaatagtgtactttcatttcatatttccaaatttcaattataagtaactgcttgatcagacaatgaaattggtatgcacttgaataactactcaactttcaagcataaatcattagaaaaattagtatagagtgtcaattaattagtgtatttttaagttagaataactttgcagacgtaaaactaaaataggctgttagataaattaacaattaacccaagatctatttgtatataacatagaaca

SEQ ID NO: 218340 - DNA, 5266 bp, Cannabis indica
agaatggaaaagtaacaactaaatctaaattatacaaaatcatgtcttgaatttttgggtgagtttctccactccttccctacaatctcccgcaactcgctttgcaccatctttaatgaccgagctaaagtcggaggtgctctgctgaagcttttgtgccgaaccactagccttagcaatggcatcatctcttaaatcttcagccctttttccagctttgcaggcccattccttcaaatttgatatcaacaaggctattgtttgaatgattctatcaagtgtatctctggatttctctcttacgcctgctgacattgccttgagcttgtccatcaagttttcggccctgcccactgtttcatcaactgaaaattgcttgctggcatcaacccatgtagctccagcgatggactcttcacggaggtcattgtcaacaaccaccttgatgccacgtctctcccatcgatctctagcttcctcgagtaccttagcttgttctcttgctcttcttgcctcatcttcagcccaagccctgtaacatgaggaaaatgagcataaaaggcattcataaaagttttgcacaatgaacttagtattttgtcagttgtctaattacttgattttctaatttgaagccatcaaataaatgctagctgcagttgggatttgttgcatcaatacctggccatggacaaagcttttctttcaacctctaggtcatgttgtaagcgcaaaatttcctcactttcaacttctgcatttttcctaagtttggtaattctttccttctcataagatatttctactttgttactcataaggctctgcaactgttcctctacctcatgtcttaatcttgacaacacttccatttctgattcaatagctgcacgctccttcaatagagtgatactgtctttttctctctcagctcttaacctttccaattcacgagtagcttcttctgccattttctccaccgcatctatcttctctctctctagcaaaagctctctctcaaaacttgcattaatatccttctcaacttcagctactaaagctgtatgagcagatacagcattttctgccatagattctgcttcaatacgagcaagctcctcactgactgtgtcagaagcttcaccggtagctagagcaatagcagcctgggcctttgtcactggcttatctggctggaaaagtcttgtgtagcctttcccaagaggaaaacaaatcaaagagaagtgagctatcaaatttgcaaagagcttgtaatgacaattagaagacatatcactaaccaaatgagagagcaataatcccatgttctccagcagacaggtcagcaacaagggcaggacatgcatcttgatgtattttatcagtgtcgataaatccggatacttgatagagtgcctgtaaaagagcatgactgttaaaaatacaaactacagtaatcaaacaataaatagaagcaggtactacacagaactgaactcaaacatcatattatcgacctttctgtcagcttctggcagatgccttttctctagtgccatcttccaacttacaagatcttgacgagatagagggctgaaataatttcaaagcaaaaaataagatgtaagaaagaaaactattaactctgatgaatcttagcagcaaaaaaaaaagccatttatgcagacaactcgttatggaaatatagacaagcttaatggatttaagataatgcaaggaataagaaaattggaaggggactttagaaaactaacttaaaggggtagaaaactaaatatcataatttaattgaagcctttttggcaagggtatgaatagcagtaatatgagcatttctcaaagatcagacaaaattcatgtttcaagaaaaaaatcatccaactaaaactagtcatgcgtttcaagaaaagaattgtgaacacctttccggagagaagaagtatgaactatgatcttcctctacagaagaaagcatatcacctctagaaagcttgcttgatataagtccagcttcggccaaacctgaaagattaaaaacattttagaaaattctatgacacaaagaaatcccacagcaaattcagtgatataacgaaatccatcacacaaacatgggagtttttcagccatgttaactaagaaattaaaatcttctacacaccttgaatagatgcaaaatcagggtcttgaggagtaatatcatcaaatgcaagttcagttacattttctatgtacattgcaggatatactttagacattgagttcctgcatacaccatgtcaaatagtcagttctaaacaaggaaagagttctatcctacgaagtagaaaaagcgattgatatgtaccttgagagagcattgctagcagtcactaaccaccgagcatactcacgccttgtacacaaatcactaggttgaacatcggcctcaatgacctaaaaatgtaatatactttcttaatatatgattataacttcaggtcataaataaatcacaagtacaatataaaagcttgatcagaaattatcagttaactgttgatgatggttcaccctttagcaagaaacccaagctccatattcaacttctaatactcaagtggactaacaatacttgaatataaaaagtaaatgcaaaaaatgagagaataaagtacctttaacacttgcaatgctgctagcgcctgcccctgagcctgatcaacaactgcaggaaccaacacctttccaggatgcacctgtagagctgagaaaaccacagatggagcaggtatgccagcagaagagaaggaagtcgcaggtttgggtgattctgaagtgcttccattaatttcattatgaccctcatctatgctatgcaattccaaggttaaactatttttctcgactgagacctgagggatatcactcaactcaaaattttcattgtttgaagacaaggctatgttggatttggaatcaacatgttccaaatttgtgtttggttcggaaccaaatggcacattaggagccacaggttcaaatggtacttgggcaactgaactatcatcaaaagaatgatcactacttgaactaggaattgtatccttatcaaggcttaagtttgatggaacatcatcggaaatgagcaagttgtttgattcgacattgactgggatctctttaatatcaggaattgattctgctatacctacagcagagtcactgtccaactccttaaaaccagaaacgacagatgaatcattgctaatttcagaatcatacagactatatgaagttgggacagtgtcagcatcaactgacttatcattagaagtaaagtcatgttgtgaatcttcttgaattaaagaattgttgacggcatcaataccatcagatgtgtttttaacatcatatacagacaaatccctgattaaagaatcatcaccaactctattttcactgtgaacatcaacaagttcagaagatgaagaaaaatccttataagtacctgtcccaccttctggactacttgcgtcttgcttcacagtgtcgtcttcaatttcatcttccaaaaggttatcaattttttcatcagcaaacaatgacagttcctgctccgttgttaagggctccatgtgttttgcctctgtgtacagcaacatattatatctagctcatgccactataaacaaagggtcttttgaaaattttgacatataaccattaacaaactcaatgaaagagaatccaacaaattacttgactcggataagaagaaacgacaaagcttaatcttatcaagagagaaagaaaaggattgagattactcactggaaatgcttcgttttcccaaagataatgctgaaaaggtaagccctgcaacaagaacgattcccgctactcctgctcccactgcccctgaaattcaaactaccttcaaaatcttaatcacttcacattccacaaaaatacaaaaaaaaacccaattcatacataataaaaggcatcaacgctaacattacctccaaaccatttcttcttatccgagtcaagtgattcctctcctccagagtccttaccagaccatcccgaaaacccatcaacgctagaatccgacctgatcaacggaaccacataacaacgtcgttcaagtcgagtcccattcgtaccccaaagtaggcgaggaagcaaaggactctgcttcctcacatgggtccgtacaagaaggaaaggagaaggagaaggaggtctccttgagtttccggggctgagagcgaagcgtagctggagcgagctgggagaggacgtggcagccatgaaaggataatgagaaaatagaggaaggtagttgagttggagttggttggttaatggttacatacaagaaacttaaaagtgagagaatggagtggagaaattctagggtttttgggggtagttggtctgtgaattttgattgattatatgatatgatcagacaaagtaatgtaattgtataaaattatcttgtctccacaaattacatacacgagagacgatgttgtagttgtagacatttggaccagtatatatatctctcaaacatttaattaataatttaaaaaaaaaaaaaacacacattcgtgtacaaagattcatccattcataatttcatatcctaataatttcttattggactgagtacaactgggagatcgaaagtaattttagggtggtgatcaatgtttttatgaggcagtgtaattggggagactgaaaattatgtgcgtcactgtcgatgttacgttttttttttctgtttgttgtttgtaatttttctaggtcttgtaattttgtggactaaatgggtgtttatctgtaatgttgccgacttaccatcaaatttattttgtaatgatcagaagatttaacgcttttaagttttaacctttatattatgcttttctttttaaaaaattcattttagcatttcttttgtttttgagttaaacatatgatttattaaattaattcaatttaaattttgtaattttagaataatttattattgggtaaatggcggcaaaacccctaatactttagttttggtttcgttaaacccccacaacccaaatttctgcgggtaaacccccaaaaccactattctgttagcaatttaccctttccgtccaaatttagatgttaagtgccaagtgggcttgtccacgtggacacaatatacacgtgtcacaattttattggtctacgtaaataattatattaa

SEQ ID NO: 218341 - DNA, 2036 bp, Cannabis indica
ctcttctctctttctctctctaacaatttcttcttctctctcttaaacttgtttcagtgctcgaaaccctagacacagagatactgggatagttgtaatcacactcacactcggagacgaggcgagtttcgttttctcttttctctctcgttcgttgccaccactgccattgaatagtttcgtctaaggtatattgattggtctgactttactgtgctgttgtttggtggccaggaaaatcagattctcccattttctctctcgctttttctcttggctacattattatgattacgaattgaataatattattactattactgcattttcattttacttgtctggttgttgaatttgtgtaatggattgtaatttttttttaactgattctgtttttttgagctttattttacttgatgctgccgtactgatgatcaatgtatatattttcatggaatttgggtttttattttggtttctctttcattgtgaaaggtttcttttttttttttcattgttgttgaatggtatttcactattttgataggaggcattgttttttattgtttttagggattgtaatttttggtggcactagcctttaatgaattcctggttgttattgattgagagctgttttttttttggtggtggggcatttaagccttaatttatagtccattgtttcaattggtcacagtgtgtagtgtccagctatttggtactctgattataatatgcgttcttgtgtccagtactctgattaatgttaatatcccttgaaatgtttccttaaaaggcttaaatgaagtgaaatgttgtttaaagtattcatctttttctatgttgtatatccagttgtagttatggtattgttatatttgcatttccaggtcaacttctttatttcatggagtgggatttatggaattggtcacatgatcaaggtttctgccacttcttaatttacttccttcattttttttacaattgaagaacatatcattccagacttaattgtgcacttgcttttcagtaacagttgagcacaatgccagcaggcaatctgaatggcaatgtgacttctattttggttatgggactggtatgtttgaaactgtttttctattggttttaattcattttacacgtattgtttgcgtagttcagctgttacacttgggatttgtagatgtaattgaagaacgtgctttggatgagaaatcttgcattcaagtgttacggatactgataagaaaggcagatgctgagcttgatgaacttgagaatgatctggtgtctcttcaaactgaattagcttttgcggaacacgaagaatggcctgaaagatgttgcaatgctttgaacgataagataggttgtcttgatatagcaataaagagtttgaagagcaagtctgagaatgatattgaggttcaattgtcactgcatagagaacctgcagagaagatacaagatcttatgagaaagtacttgccagagaatgataaacaggtttgactcgtaatactttgcaagagaaagatacaccatatgatagcttgtgattcttctgttccactgtttgtggctttgtgttttttttgttctgctgtcatcttctttttatggtcttatgaatcttatgtttatttggttcactttctactatcatttgaatttttcggactcatgaatgaaaatggatcatacatggagatattggtgattatttttattaatttggctttatgttacatccatatgtttttgtgggctgttgttgtttgtttatttgttttatttttcacaaagcaaaatacacacgtacatatttttttgaagacaatatatgcttgttattaccattttattacttttcctatgttttttgtatgttaaaggttctacattcattgtctgttcaaatctcaatgcatatatgtatatattttatattaatgtattatattttatatataaatattcttcaaatctttcaatatctgtatgttttttcctttccattaacgatg

SEQ ID NO: 218342 - DNA, 3208 bp, Cannabis indica
agctaaagtgagaatgataattttcgaccatagaataacggataataattaacaaatcgattgatatgaacacaaattagaatagcttcttttaagatgggatgtttatagcaatatgatatatagataaatagattgaagagagattctggcactgaaaacataacttaaaatcgtttctaaattaaaaaggtttctacaaataacaaaacttgtacaagataattaaagctataagctattcttgaaattcttttaagctctctacaaatgccagaaccctcctctccataatttattaaaggaaaccgaaaaacagaactaaccgaaagtatgaaaattgaaaaagagaggaagtaaaggcattttctttgttgctaccgctgttagccgccaagtaccttaaatagtcgctaggcttttcacattgttgtatagtacacggccgccattgctgttcaaacccaagaaaaaataggtactcagcatttcgaaaactagcaatgaaactaaaattggtgagctatgatacaaaaagctgttaagaaaagagacataccatatttagagctcatcttttgatcctgctgcttcttcttgcttttcagcttgcttctcagccttgtcccgattcttctcgatgaaagcaatgatggcttccttagtcctgtcctcctcgtattgagagattttcccgcttgctgacttgaaatatagagtggggtatcccttgatatcgaaagtatcacttgggagatcatttgctgtagcatcctgaaaatttgaaagaaacaagtttaaaccagaaaccaaaaatgattcctaatgataacgaaaactgacttgactcgacgacataaacaggcagggtgatagaacttacaagctttgcgataacaatttcagagtcactttcgtatgaggtagcgatttcgtccaagataggagcaagttgtttgcagtgtccgcaccatggagcataaaactctaggaggactgcagcaaaaagtaatttctcgttattcaaatattcccataaataacagaaccaagatcaacataacaattatagttaaaagaattcaagatcataaatcgaaatagagagagcttgtagtacgtactgtttttgtcagatttgaaaacaaagtcctgaagggtgttagcaacgaccactttaacaggttcgtcgttttgctcagggattggttcagacttcttgtatggtgaaacattgccttcctgcagtcatatcattcacccacaaaggttagaactaatatttttttacaagtattaacaaaattgtgtttagcctttcagatttaggtatgttgacgagaaaatataccttgtaatccttcacccatgttgcgatatgctcaggctccaaatttgccttcaaaaacttttggccgtcattggtctggacaacaattaggggcacttgatcctccctaagtccaaaatactgtaaagcaagtaagcagaatcagtaaagcttacaaacttaaaccatgacattacaagcttacagcaataaattatgtctgttaaacaatcttgaaaatagatacaaatggaaactggcaaatgaaaagacaccaacctggaaggcaccttggctggcctcaacatctcccaatagaaaacttaaaccatctgttttgtatttctcagcaacatcgcgatactttgctctgaaagcatcagccacctcgctggtgaagttcaaaaacaacattgcctaccaaaaaccaaaactcagtataaaagtaaacataattgattgctattaggagagagagaaaaagaggatgcgggggggaaaaatgagcatccaaggatgaacaaccaagaaactaacaatgtcaaggaacttccaaatcacaagttatacggtacaaatatacattatgtactgcccaattcattgtggtgcttgtttaagcataacaaaaacacagtatatatattttcaaaaccatcaaagtatactactgtgatcatgcaataattcatccacatacaaatttaaagaaaaaaaaattaagtattccatcatataatacctttgcgttggggctgttaaagaatttgataacaaaagggtgattgttagggtctttgttgaactcggtcacaactggcacactagactcttcaataaatttctccaaagcatcaacattgaattcctgtatccacgattgctaaattagataccttacttgacaatgtttcttgaaacaatcttgtttatggaaacaaaaaatgattgaactttttcaaaatttgtagtacagagtaccttagaatcaacaaaaagttcgtcaaatggcttcaaaagtctaaccaaaggcccagtgactgatgattcaccacgtgggacgagcttggcgtctgtagtatgagcaaactcatagtctgcacgcaatttgtcagctacagccatgaaattctcaaactcctcaccggaaaatttggggaacactccaacctgcaaatgcaaagacagttagttaattccatgccatgtaaggatgatgaggcaaaaatataagggtataacataagcagcgagcacttacaatgactatcttcttgtcgtcaatgataccactggcatcttctacagtcttaatttcagcagaagcagggccactttgtttcttcaaatattcaacaataccatcagcttcacgtggtcccttgtattcctgaacattcttaccaccattcctaaaaatcttaagtgtggggaaacccttgatgtcatgttcagaagcgacttctttgttcgcttcctcagtacaatcaattttggccaaaacaactgatggatcatggctgctcaaaatagaagcagctttctcatactgcaatgtaatagatattgacgtttagataatttgataatacaaaaagtatgagtttgtagataaatttatataaatgcttcttacctctggagcaagcttcttacagtgtccacacctaaaaaaaaataagaaaaggggaatgaaaattaaacataaattataaataaatcgatggatttgaataaaggaaacacaactactcgtagtgcccaaaacagttaaacattttcatttatatatgtatatatttataagaaaatcacgtcaaaatttgaatcagcctaaggcaaacatgaaggatcattaaaccattgtcatgctacaac

SEQ ID NO: 218343 - DNA, 6675 bp, Cannabis indica
tatggccaaatcgggatattacatgacatgtcagcagataaaagctaagcattaatgacctgtgggtttgctacaacgtttgacttttctcgagttgaaaagggaagacattactatggattttgtagttagatttcctaaaaccacggggttgtatgatttgatatgggtgattgtagatcgtttcactaagtcagaacacttttttccagtaaagagaacatatatagtggatcagtatacagaattatatgtaaatgagatagttcatctctatggagctttaaagttcattgtatctgataaaatcccaatttttcttccatgtttcgggagactcaccaaaaagccatgagtacaatgctaaaatttagtgtagttttttatcctcagaccgatactgagtccaagaggaaaatacaaatactagaggacactttatgagcttgtcttatggactttaacgattcatggagtaagtattttctattgatacaatctcttataaaacaattatcagggtacaataacgatgactcccgatgagatgttgtacggtagaaagtgtcgttcttcgattcaatgggatgaaattggagaaaagaatatttgggtccaaaggcaatacaaaggacaaataattctatcgagaagatcagggcttgaataattcattctcaggataggcaaacgagctatgcaaatcaaaagcatagagatgtagaatttcatgttttcctacgggtttcacccataaaaggtgtgaagcactttggaaagaaaggcaagttaagtcgttggtttataggactgtttgagatactagaaagggttatccaagtagcatatatcgattagctctacatctagcattgttcgaagttcataatgtatttcatgtatcaatgctgaggaagtgcgtattaaacccagcctatgtcttgagttaagaggcctaatcatctcttcattaggcctctctgtgagacattcatgaacagttttgagtagtgttattattcaattcactcaggtgtcaagctacttgatcaaggtggatttttcgatgatttatcaagttacttggataagaagacagttaatatagttatcctagttgtaattctctcctactttcagtctatataaatgcctatataaagtcttgtaaaatcaattttaaaggttaatcccattgttagagaaaagagagtttgtgaggtgtcaagtgtctttgagctccaaggactaagtgctttgattgtaaagttcttggacaaaaccttgtattgatttgatagagattgaataaagattattaaagcttgtgtggctttgaaagttattcctataatggactaaatcggggctgaaaagccttcggtggaacaacttaaaatcctcggtgttattatatttttattttagttttaatctctagtttttttgttcttgttctgattgtttatggtgattgagttttcttattgtctcccttttgtacattaagtagtgtattaaatattcaaacaaatattgtttcatttaaaggtcgaccttacatatattgcattcattaacttacattgtaaagttatagaatattccttccataaatgttatatggcataattgggatatatataaatctccatgaacatgcataacaatgaaagaaagaaattaaaataaaatcatgatcacttttaattttatacatagttacgcctttttcttttttcccacagtgatactataattttttcttaaaaaaatgattttacgttgtcaaattagatttaaaatatacgttttactcatgttacattatcatgattacctatcgaatcaataagataaaatacagcgttctatgatgttggatataagatgaagttatgggtctatggtcttctacaaactaatttcttctcaaaggattctcattcaattgattagtgtgaagcaaatgctgaaaagaatctgagtatgaagctcgagaaacctttcatttgcatgaagaatgctcttttatcaaatcagtgctcctcactatatataagatctcagaatatgagatccaagaaagacaaagcaagaaaaacgaaagagagagaaatagcataggagaacactttgaaaaaccagaacttgcatttctttattgataaatgtcttatttatatacaaactgaaagactaaagtttgttacaaaacaaaaccaatgtaacagatacagttaagaaaaagcagttaaaagcaacagtgttaactaaatcaactaactgtatttacatccccccctcaaactaaatggtgtattcacactttttagtttggattttaagtataaaattgatcagtaggtagtggttttgttgagacatctgcagcttgatctaatgaagggacataccgaacagagacttgcttatcaaaaatctagtcccttacaaaatgaagatctatttcaatgtacttggacctggcatgaaatactggatttgtagcaagtgccgaggtactttgattgtcaacccagatgacagggatttgaacaatcgaaacttgaagttcctacaacaatgaacgaacccacttgagttcagcagctgcattagcaagggctctgaattcgcttaaagtgctggagcgagctactacgtgttgtttctttgcagaccagctgattaagttgtcaccaagaaaaaccaaatatcctccagttggtctgtgatcgtctatgctgctggcccagtctacatccgaatatgcatgaagtgtcacagcagatgaaggtcgcagccataacccctcttttatcataccttttaaatatctcagtagcttcttgcaggcttcccagtgaactcttgttggagcatgtaggaattgactaagtttattgactatatatgctacattaggtcttgtacgggataggtattgcagtgccccaagcctaccaaggtatagagtaatgccatgaaatggctccccttcggttagagacaatttgacacttgaacttgtaggattaggacaggactttgcaccctccatatgctatttgacaagtaaatcagtgatgtattttgtttaagaaatatacatcccggtgttgtctttatatatttccactcctagaaagtaatggacatgaccaaggtccttcaaggaaaaattgttgttgaaatatgagattagtttggagattaatgttgagttggggcctgttatcaatatgtcgtccacatatactagaagagtagcaagagtgtttcctttgccatatatgaagagagaagagtcagctttagaactatgaaatccccaagaagtgagagtgtgtctcaacttgtcattccaagcccgtggggcttgttttcaagccgtatatagccttctgtaacctacagacatgagttggatcagtaggatctacaaacccatgaggttgagacatgtaaactgtttcatttataggcccatttaggaaggcattgctcacatctaatagagatacatcccagttgttagatacagccaaagacaacactgtccttactgtagtgggtttcactactagactgaaagtctcttcgaagtcaatacccgcttcttgtaaataccccttagctaccaaccttgacttgtacataattagagacccatctttgttaagtttaaccctatggatctatttgcaaccaatgatatgcatggaaggatcataagggacaagcacccatgtcttagctttttgtaaggcattgatttcattatccatagcaacatgcaattgagagttttctagagcttattttagagttctaggttcactaggtaacatggactctagaaggggatgtttagtggctatgtctgacttaggtttggttatacaatttagagaccgtgtacgtatggtgtgagtgcgggttggagtagtagcaactgctggtggagggatttctatgggaatatgaggttgattattttgagatgttggtgggggttgagatgacagaggatgggtaggacgtattagtggctcagggacctgtggtatgtgagtatgggagggatttgacacatgctcgggtggtatacaagtagtagtggtgggattagggacatttaaatgcacattagtggttccagtagccatattaggagaggtagtgaattctgcagtaggcaaattagttgtagatggaggaattacctgagttgcagatgtttgtgttgcagctaggaatagttgttcatgaaatacaacatttcgtgcaatgaataatcttccctcctgattttcacacaaatagcctttgtgtgatgaggaatacccaatgaatatacactgcagtgtcttgaactccattttttacttgttatacggtctgagatgtgggtagcaagcacacccaaacggcttgagaatattgtaatcaggtgtttggccaagcaaagcttctgtgggagagacatagtcaagaacaggggttggtagcctgttgattaggaagacagcagtgtgaaatgcatgccactagtaagaaaaatcaaggccagattgtgcaaggatggtgagtcccatttcagtgatgtgcttgtgtttacgttcagcccttccattttgctcacttgttttgggacaaggatgttgaaaggggatgccttgatcacttaggaaccgattaaagggtctgtattctcctccccaatctgcttgaactttcatgataggtaacttgaattgtatttccaccatagctttgaacttaagaaacatatcaagggcttaagatttttgagtgagaggatagatccaggtgtatcggctatagtcatcaagaaagtgaatgtaataaaagtagccatctttggatttaatgtgggaaggaccccatagatccgtgtgaataagctcaaggggttgagtggccttagaatctatgctagcgaagggttgtgtgtggcttataccaagttgacaggcatgacaaaattgcaagttatgtatggtaccagtatgaggaattgtggacagtattttctttagaacaataggggaaggatgtcccaatttttgatgccagacatttatgtcattctttgaactggtatgaaaaacaatcggtatgcattgagtcttttgaaaagattgtctttattcatatgagtagaagtacaaagattgtcatttgttacattgtgtaatggtaaatgactagtacaactcatagcaattggattgttggcagtaagcacatactgtcttgtctttttcagtgcacgtgagcactcttctagcacatataagccatctttaagtgtccccttgagtagtaccctccctgtttttttgtccttgacaaagcaacatgatttgtggaattcaagaaacacaaagttatcattagttagttgagatacattaacaaaattttttgttattacaggaacatgaagaactgaattaagcttaagattggtggaattaaatgcaggtaacgtagctaagccaatattagagattagtaatttcttaccatctccaacagcgagactttcagtgctaggatagggaatagctgattcatgactgtcaaggccattggtcacatgatttgtggcacctgtgtccacataccaaccagagtcattgccaaaatcaggaataaatgatgtggcaaaggcttgaggatcgtattcaaagtcatgttcagtgacataggcacggggagtggagttgttcgtggaagttgaaggacctgtggtgcctggtttgggtgtaacccaatttttatcaaaaaaatagtgacagaccagtgttgtgaccttacgaaggcatagctgacagaggggcctgttctgttgattctaggttcaataacctattctggcaccattcttgaatgattgtggtgctcgatagggattgtttcttgagtctgtaaaggcaacattggcttgtagcttaagcgcaagatcagtgacagaactatggtgttcgagacgattttcatgagcaagaagaagagcttgcacctcttcgaatgtaagaacatcacttcttgcagtgatcccagacactattggatcgtatgccggtcctagaccatttagaagctgtagaatgagatcttgatcaagaattggagactcaggaacagcaagagagtctgctatggcctgtatcttgtcaacataatcagaaattgattgtcctcccttatgaattgtagaaaactggttctttagttgaagcagtcgtgctttagattggctcgagaactcctgttcaagggtgcgccaaaaagcatgggaggaggagaagctgacaacagaggcaagaaccccttctgtcatcgacgatcaaagccatgacagaagtagctggtccttgcgtttccactagtgatacccagggtttggttccccagtgagaagatgttacaggggagggatgccagccagtaagatctcatccaattcatgtccgatcacagtggggatcacttgagatttccaaaacaaaaatttagtgtgatctagtttaacagtcaaaacagaggttagagagtgagagaagggattccagttggattgaaactggttctacgcagctggagctagagttcttgggaccggagcaggatcggaggaag

SEQ ID NO: 218344 - DNA, 6544 bp, Cannabis indica
atctacaccaatttagtatatatatttttttttttttttgcattctaactcttattttatttcattattaaaaaaataatcttacattttaatccacaaattaaaatttatctcaaaaataattgatttaaaacactaacatatttaaaatacaaaatagaaataacaaaaatactaatatgaaataaaataaaaataacataacactaagttataaaattataactaaaaacaacaatattgataaaaataaacattaaagtaaataataatgtaatagtcaaattgatcactttaggatcctaaccttgaagaatatcaaaagattagatatatggatttgaagtattttgagaatcttgatatttctgagatgcttgatattgttgtgagctcattttaaaaattttcgcgtatattagaatcgactatagaattttaataattttctttaaaaaaaatgtgtaatatttaattaatttaataaatattttattttactaaattaactttaaattcttactagtagttatgatataattatatcataaatcagttatcttgaaatattgatgtaaataatataaaatgagacatcttttaagtaaaatatatttatttggttggacatttgatgtgaatcattgaaattgttgcaccaaaaagaaaagattttaaactaaattagtataaattccacactaaattagtgtattccttgagaacgaaatattttcttaaaaaccataaaggaaagccccgtggattcacatgtaagtgtatccaaattcatagttctcctttatgaatcaatcaataagtccacttttatagactttttaatttgattttgttattttttttcgcagtcttaatttgaatttgatttgtgttttttttattatattgtgatgctcactacaagtttgtaaaaatgtccctaaaacattctcttataatttgtataaaggagcatagaatcaagtacatgtcattctctttgctcaaaaaggcagggtttttaattttaatagcataagtttgctttgaaatttgaaatgaaaacaaagtttgatacataaagattgtagtagttaaccataaattacgagctaaaaactacaaaatctatttgtaattatcattaaagggaagttaaagaatgtacaaaaatttaactgtgaattgaactgagtgtgaaagacttattgctgctttatgtctataatgtatactatacattaggtaataattcatatttatgtatttttgttgaaacaagctcatgagtcatgaatagaaacaaaatatcacaactcatttttaatttgaaaaaattgtcattttagtattttaactttaataaatataatggaaatttgtgatgctgcaagctacaatcactgaatcataatttttttcaataagatacacaattaggaagttgagatcctagaatgttattagaactaagcatgaaagactcatattcatatagtagccctagaagaattgtcagtctattgaagaggaggcaggcaagcgtgtcctttcataataagtcgtctagatttgggcagcctggagaacacaattcaaaaccttatgagatttatggatttgtaagttcaatcacaaccatcgtaactacaggcataccttctttatcacatctaaaaattttcctcttttttgttttagtccaagtaatctacctatttgagtttcattatactcctacattgttttgacaaacttagatgtgtgtcttcataaagcaatgatcatttcaaattcaaaaatcttcttcaagtcaaggtatatttctagattggttaatattattttttcgatcctgcaaacagtactatcttagcatattagatttgtttctttcctgtttctaatttgtcagttctttaagattcttctctgcattctatttcggttggaaataaagaacttttgctagttgagatttcgatcagagataagatgaaaattaatgaaagttttatggagaagtgaaaaatatagccaacaatttctgtagaatttttgagggttggaaaatttcttgcacatacgagtacaaaagttttgtgctctttgaaaagtatgttgtgtaattccttgaacacgatgtttggtgacaaatcgtggctaactttttattggttcttatttctgtatttgtagtttcatcttttcctattccgataaataaaaatttattcttgtgctgatgaattcagtagagaaccctccagtttcgaaccttcattcaagggtgatgatccattaccagaatttgtaaatctgattacaagtgataccaatgcccaactattgtgtttcctcactcataaacacaaaaagtaaattttttatagtaacatagaaaaatcaagaagaaaaagaaaagaaagttcttgagagaaaagactgattctgagctaacaatatgaaagaaaagaaatgaagcaaacaaaaatatacataaaatgaccagactgcttatagagtagagtttgcttttcttcaaatgagtagcataaaatctgccttttgcttctatatagtatggaggaaaagttattctagagagaagtttcattgtacataaaactaaagcacatgagctactcatgtgttgatcttgctggtcttcattgccaatttattgcatgaatgacgagtcaaccgtgaggtatgaagagggcggtggcttggcaatgcaagaatttacatgcgctaagccagcttaataatttggcaggtttgtagtcagtcgtcttgcttgcagatttcaaatttgtgtgacaaatcatacttaccaccagaagttttcaacagaaatgcagtgactccactctttgatagatatatgcgtgatccctcatatcgaaacttcaccttcttgtgtgcctttttcagcttggattctggccatttgaagactgagcatctcgtgaactttatccttcaactgcagaacataacaagtcaactgaactgataaattttcaagaatggcttcggttaatttatggaagaaagttggtaaaaacaatgaaatatggggaacatttcaaaattcaaagaaacataaatggttaaacattatgtaaacaagacagcatcatacaaagcagatgagtagtcaaattttatttcgaaacgttacagatcacatttaacagataccaagtttcaaataacaaaataaagtgacacattcatatcactaactaaatctacaagatttacattttggtttcttttctgggcataaactataaaggattcgttacactttcaagtcatgaaactcaacaaagggtgtcacaaaacttgtagaaaaccttaaaccttaccttgctcagccctacttcgtctgtaattgatacgtgtaaagccccatctggtcccattttgcggtattttgctagctcaagaccatcttcatcagcattttctgtgacaaaaaccacaggggaatcttgtaacagatcacacttggatacaacatcaagccacagatgatcacaaaacctctcttttatttctttgtatatgataaactgcattcaaaagagtataccatgtaagtaggtgatataaagtatcatagagcagcatcatcatgggcacactataagcaaattattctttgattttcaacattaaaagtaaaactaaaatattgagaagaagcattcacgctttatcctcaattcaattcaagagaaaacaaacagcattaccaatactgtttcacaccacaatcaagacactgcccaataaagtgtacacacttcaaatttattttcctttactttcctaatcctatgcaatggtatagacattgtgttgaagtgtctgagtcgtagttctataagataagactatatacatatatatatatatcccacaacaacagataataatatggtacctgatcggaaggagatgttccacattctccagagagatcatgaacataaagtactgcagttggaagatgagacaaaacggcaagggttaacttttctaaattattcctgtcctctgcaaattcaatcaaaagagagagataataaataaacatatatattcacaaaagacagcataccgaaaccaaatctttgacattatgaaagacgaaatgtaatcatttcttatcattataagaattattgatcagggtctctcttctctgttgaaaatgcctgtaaagttattaacacactattcgcatgtgaaacaaatttaatttcacaccgatcacattatttatcatataaaacgaaacattttacaatttcttaccatcacatctccttagcaaaccaggagtatctgttacctgcaagtagtgtctaaatttaattgttgatcaaatgataatccagtaaaattaggaatttacatgataaagaaattaacctgaaaatgctggtagtttgaaacaatatggcccattagtattcctctggttgtaaaagggtagttgcatatctaaaccaaagaatgaaacatgtcaaataaaatgtaacaaaccacaaaaagagaacagtgcttgttaaacaatgtaggcatacctcaggcttccctgtagagagcacacgaaccagggatgactttcccacgttcggagcaccaacaagacaaagtgttggtgtttcaagatcaaccactggcattgctcgcaaagtctgcaaatattattcattaggtttttctatggaaactaatgtaaaaaattagttcttggctgtgattgttctcgcatagaaagttaaagttttagaggccaaagtttccataagaagccaagtctgattcttaattgtctttcaagcattagttcacttgaaattcttttataaaattttgacagcttttcacaaaagacaacactcgtttcggctgatgtggattttgaaaaatacaaaattaatcagattttggggtatggccaaacgaaagcatacaaatagaagatggctgacattttcttatttaactctttacaatcatatcatgtattcttacatcattttgggagaacattctcaaggaaaaatatttgtaacatgctcagctgcagtgttgttacaaagtttatggagctgaatgcttgagtaaattaaattgaagaaaccaagaaaacttgattgagagggaccaaacatctacaagttggtaggataccaagacatgcttgaaaggagttcaagagcacacctcggattaagaggaatcttgattgtagcagctagtgttgagggttctttctacatcaagttcacttgctaaaggtattcagcaacttcaatacagaagttagtgaacttggcattcgacacttaaagttcatagatatctttatggcaacaagtagaagggaaatctagaatatatattacttagatcctttcttgttactactataagtatgaaactatatattacttttttcgaaacaagattgtatattatatatatatatatatataataaaaaaaaaactaacccccagcttaatttatataaaaatgaaatgattacgcttatctctactatacacaagtaataatgctacattccaatgaggattaccaaacttatatagtagcaagtagcaacaatgagatcgagtagaagggataatagaaatatgttttagaatagaaaggataaaaaactaccttagcaatgtttaataaatcatcaacagctttccctttgtgattaaatgtcgcttcaactttcttcataccctatatgtgattgcaagtagattaaataatttcaaagatctagaatagaaagcatgagcaaaataaaaccaacctcaactaatcgatcttctgcttctcgcttagtaaccgactgcaaaagttcatacgagtatttcatcaacttcacaaaatattattcaatattcaataacatagtttatattgaagttatagaacacgtgtcttaaatatggagtgaatcagaaaagtactaagatcacatacaaatgtaaatgcaaatgagagtagcaaaagtatacaagacagacataatacacatattataaaggaacagtgcaaattggaccaatacgcagtgcggcttcatattttatccttttgatttcttgagatatttgaacaaaatacttctttctgcttcttaatagagacttatgaagtaaccattaagggattttgaagtctcctagtttccttatggaatttcctttttgatttaatgaattttggataaacatgaaatttgatgcaaaatataaaagacaaaatgaaattaatagataaagcaaaagaacttcggtatactataaatttatatttgattgtgtacatttacaaacgtcgttaaaaactagtaggttttggaggagtataataccgaagtaccaaaactttaagggctcgtttggaacgtcgtattaggtcgtattgtattatattatattgaattggattatatatcatatttttatataatactatgttaaactttaatt

SEQ ID NO: 218345 - DNA, 3440 bp, Cannabis indica
tttttcattcttttttttttttcaagtgacgtcgagttacaatcctttcctttttttttttcacatgtttctcaatcatgcaagatttttttttcttttcttcaatacttctacacactatatatttcactcccccaaacttattgtaaggcttatgataccattcaaaatgtaatgaggacaaaaacaacagtgtggatacatcttttagttcaatgggtgaagaaacgaaataggtttaggttcaaaagggttcactaaggatattcattttatggtaggcttaaaagactcaaactatctaaacaaactgtgatttatgtctgttaagagagccaactgagttaagtttaactctatggacccatttgctgcctataacattcatagtgggatcgtagtgaaccaacacccaagtgttattcttgacaagagctcttccttcctgattcatagcagcattccattttggattatttaaggctgctttgagtgtcttcaattcaatgggcaatgtggactcatatagaggatgttttgttgcaagatacgacttgggtttatagattccattctgggatctagtgatctttttgtgaactcttgtacctgtaggtaatgatgtctcttgagtgggaatgggattatgtagagtgggttgggatgttgcaggaatatttgatggtattgaggctaagggctcatggtgagatgctgtagcagcaaggtgtatgttagggaaagtgggttctggtggtgaggatgcaacaggtaggacgttggggtttgagcttggtggaggagttgtgtttgagtgattaggtgattgagtagtgggagagggatctggtgtagggttgaaatatggtatagaggactcagagacatcattttcaaagttcatatgattagattcaggcataacattgggagaattagtagagaaaacagtagtaggcatagtgaaggaagattgtacttgacaaggagtcgatatatcctttgttggaaatgattgttcatcaaagacaacatctcttgctatataaagtctaccatcttagttttcacagaggtatcctttgtgagatgaagaataccccaagaaaagacacttttgtgatcaaaactccattttgtgtctgttatagggtctcaaatgagggtagcaagcatagccgaaaggctttagtatgttataatcaggtatcttgccaaaaagacattcaagtggtgattgttgatgtagaacaggggtaggtaacccgtttatagtaaatgcaacactgtgaaaggcattccaccagtatttgaatggcaaaccagattgagcaagcattgtgagtcccatttctgtgatgtgcctgtgcttgcgttctgctctcccgttttgttcactttgtcttgggacacgggtgcttgaatacaattccttgatctgaaagaaacttaacaaatggtcgatatccccccttccatctgcttgaacttgttttataggcaagttgaattgcttttcagccatgcttttaaactttataaacatatcaaatgcttgagacttttgaacaagagggtagatccatgtataacgactaaagtcatccaagaaatggatgtaatacctatatccatctttggaatctacatgtgatggcccccaaagatcggtatgtattaattctaagggttgagaggctctagaattagatataggaaatggtagtttgtgacttttacctaattaacatgcatgacaaaaagacaattgatttggagtcgtagaattacttatggtagacaaaactttttgtaaaataggtaacgaacagttaccaagtttttgatgccaaatatgaaagtttattttgctgctgagaattctctattttattgctgtcaacaatattacaatcagatttgagaattacatttgggaaattgtgtttattacatatcatagcagcaggaaaagaaaattgagacttggaccgaggtgggacacttgatcttgaggcattggaggactgtcctagcaagtaaaggccatctttaagggtttccttgagcagcacactccctgttgccttgtcctttataaaacagcaggttttgtgaaattcaagatagacaggattgtcattagttatgaaatgctaacaagatttttagtaatagaggagacatgtaagatggaattcaacttaatgggataagaattagtagagggtagagtggctgaaccaatatttgaaattcgtaatttcttaccactgcctacagccaggccttcagcacatgtgtaggtggttgaggagtcaagattattcgtgccttgggacacatggttggttgctcctgtgtcagcaaaccaccccgaatcatcaccaaagtcaggtaggaaggatgtagaaaatgcatgtggatcatactcaaattcttgttcagtaatataagcctttggggagggattttggccatttgtgttggaggaaggtttcgggggtacccagttcttatcaaaccgatagtgatagactggtgcaatgtatccaaagcgaagacagagatgacattgtggcatgttgttggtgttaggacctcgaaagaacccacggccaccattcttgaaaccttgatgtggtctgtaaatgccacttcttgagttgccaatggccatattagcttgcatctgtatagtcagatctgtcaaggcactatgattttcaagacgactttcatgggagagaaagagagcttgaacctcctcaagactcaatagatcacttcgtgcagtaattcctgacaccaccgaatcaaattctgggccaagaccattcagaagttaaagaatgacatcttgttcaagaatgggagaaccagctattgcaagagaatccgcaatggattgaactttttcgacgaagtcagagatcgacaagccgccttttcgaatggtggagaattgactcttcagctagagaagtcgtgccttagattggctggaaaacttgtgttcaagatctttccaaaccgtgacagaggtttggaagttagcaacagaggcaagaattccttcggtcaaggacgaacgaagcgatgagaggagtaattgatcttttcatttccattgagcaaagacaagatttggtgcacccgtaaccaaatttgcaggaggaggagtaccattgaagagaatatcatctagttcatgatcaattacagtaggaataacctacgatttccaagaaagaaaattagttcgatcaagtttaattgtcaaagtttattgcagagagtgagagaagggattccagttgagttcgtctggacgagaggatcattggttagagtatgaccagtagaagcttgagtagcaggatcagcagtagtggatgccattgaaggagaggatcgatggcaatctgataccatgtaaa

SEQ ID NO: 218346 - DNA, 4048 bp, Cannabis indica
cattttcccaatcatgtttgatgcagactttatcatatcagcatttacctctccagagttaccggcattcaaagcggcaagggtttccggatcagcatttgcaacgaatttctggaatgttctattaatgaagacatacatgcagaaaagtaaattacttgggttacaaatctgtgagtgagaaaaatagaccggaaaacattgcaacaaatgaacagtgataactgtacatagcatatcagaaaaaatgtgcagtgctggcttagcttaagcaataagttgtcacgcaagtggttgtttacatattatttatataatatatatatatatatatatatatagagagagagagagagagagagagagagagatgtgcgtgagtatgtaacatgatcaaacaaaactagatgaccttttacacaaggaaacagtaagcaaaattagagtgcctgactaagcaataaaattaaaacaactcatttagagtagaagcaagccacaagtaaactgtgttcttacttcatatttaacatgcatgttgatctatctgttgttttaaatagaaggttatatttctgtatattaatgctccaaaactaaaaactctacaaagtctaaggctcaaattttaactatacaaactacatctaacatcctatatgaagataccaacctaatagcttcaggattgttttttaaaccctgcaaatgctcagaattggttgacatgccaccactagaagacactctctctgttttatctgagtcgctgatttctcgtgattgtgtgactgagcactgtgttgttgatcgtttaatgtcataagaagctgcagtctcatcttcatttatctcttcaattactaagcctcttggtgcacgtgcaccaccctcctttactaatctttcctccgcatccctgtgaaaataataacacaagttatataaaaatatatttatctatacaattaatgttgatctgcaattgcaaagtctgagaaaatcattcacaagaattacaccttaagacctctgcaattgtttcatcatcaggagaaacttcatgcgccttgataagatcagagacagcatcctaagaacaagaattgtccatcagtatcaccaaaggtgagcatggaaatttcataaacatccctaagaagacatttaaaagagactcacctgtagttgacctagttctttatatgcttgacctctccggtaaagtgccttcacatttttcacatcatatcccaacacctataacaatgtaaaatattttttaagttgagggaaactaaaaatttcttcagcaagttgaaaagaaaaaatcctaatcagcatgaatgaattgttaatatttgcaaataccatctgaatataaaaaacattattttctgaaacatttttctttgttataagaaacataacaggcagattaaaatgagaaaatacaacagcaatatgcgagaacaaacagtcctctacctctttattattgatcaaagttgacttatatatagtataatatacagcaaatggaaacaactcaatacctcagagccttcttttatgcattcatcaaactgctttgttttcaagtaacatgacatcatgtttagtgagcatgccaactgtaatgttcggccttttgatgatggaacaccttttaaattatttttagcctaagatttcaaagatgaaaaaatacaaatcatactcaaaaaccaaatgttcataatgaaagtagagaaagttctcttcaagtaggtcaaagtgacagtaaatatactcacaagacagtacttctgcaaggcatcgttgtactttccctggctatgaagctcatttccctgccaaattttatgcaaacaagtgtgaattatagcaatgaagaaagacttgaagaaactatgaacactttatgaaatatatgttccactatattttcgaaggactgatcaccaatgttctgatcactccttttcaaccaaagaatgataaaaataagttgaatcacaggtaagagatttctaacagtaattggttctattatttttttcactagaggcaggaactgcagatcaaatgataaagttaagattttgtaagattaaacgcatttattgaacactagcaggaacattgcagatcaagtgatatggctcacgaaaaggtataaacataaatagttaaatgtactttaatgaaacatctgacccttcaataagtacgcaggtcagaaacaaaaattgataatcaaattgtcagtttacctttcctcatttcattctaactctcgaatccactactcatttcatgttcagaaaattagaaacagtataagagtatcactataagaaacaaaaactgtagtactgcttgtcctctgagtcacacttaaaatatatctttttaagtaagaaactatactacttatcagattcgggtcacagttttcctctcggtaagacgattgaagctcatgggaggtagttgtttcagttgaagcagcaactagccaactagatttcccacaatatgtttctgacctaaaagtcttaggcataaattctaaaactaagataatggcatatttttcccttttaacttttaagtactttctgctctctgtttccaaaaccaaagctaaaattgccaaaattctatggtgctaatagtaattagtaaagttggtatatcaaacaaataaaatagttcatttaattttggcagcattacaacgtcaaattcatgctaagtcaatataacaaatgtatggagaatataatgtaagcttaggcatactatctttcatcttataggcgaccaacttaatactgaaccataaaatattaagaatgtcaaagttaacattaaaaattgctcaacaatcaaaagtaaaatatgcgggaaataaacctgtttcttcagcatttgagctccattcaattcataagcgacctgggcatcaagacgcgtacgcatagctgctatctcttcaggcgttgagttagccatcttctctccaatctcagccatttcctccggacgggtatgcttcaactgttctgctgcattcttcaggtcttcaggcctcaagttcttcattccttcagaggccatcttcagtaactccggattagacatcatctgcagcgccatttaggcataattaccataacaaccatgcccagttaggaaatcatcactgaattctaataaaaccaaaaccccaattatcaccaaaactgaacttataagaatgttttaacctcacgcagtacaatgagcataatatctaagtaacaaatagaattttttcatgacctcatttggaaaaacaccatgaacaaaccaaaattctattctactacaaacatacccacttctcagaatttcataaattttcttactttaactaacaatatttttttgtttaaaaaaacagtgaatttgtccaaagcaattaaaaattgaaattcggaaaaaccaagaataacaaaaaaaaaaaacaagcaaaattggagaaagacataactaattatatcactgtcaaacatttaaaccttaataaaataaaaggattaaaaaaatggaaattaaaagggttagattaaacctgttgttggatcttggctaactcggcaggtgacatgcgactcatctgctcctgagcgagtctaatgaactcgggatccatcatgttcattttcacaattactctatcgaatctcttcaaccctccaatgaataatccaaatctaatacccaaattcacgaacgaagccaaatctcagattttcactcctacttttttttcttctagaaaacaatattatacaataaagaatcaaatatgaaagaaatgggagtcggaacaaagcagagcagttattaaatattaattaataattaataatatataatatcgaaaaattctataataaacccctaaaatgcctaaaatgcccattcttatttatttcagcatttaaaaaaaaaaaaattgaaatatttaataaattttaagatttcagacaaattg

SEQ ID NO: 218347 - DNA, 6639 bp, Cannabis indica
ggataaaagattacaaatatcagataccaaatcatgaaacgtggttacataactagtagatgacataacattaacagcagaagctaccaacatagaatcagtttcaatgaaatgaactggaatttgatgttgaatagcccatctcaaactgtgaaaaagtgatgctgcttccatctccttcggtgagaaacaccctttgaatggcattgaaaaaccagcaagaacttcacctttagaatcacgaataacagctccgaatcccagtttgtttccttgagaatcacaagccgcatcacagtttaatttattgtatccctccattggtggttgccaaattgatgaaggtctcacgggaatagaaggctgctgaacagaagcatcaacaaggtttgcagaagaaacagcagcagtattccgtggtgaattcgctttgtgatattgatccaaatatgcaaccgcaaaattacatatcatagcagctggtttaggctttgttccatggttctccttattgcgttcagaccaaatgctccacataagacatataatcatagtcaaatcaacatcagaatgtaaagctgccagattggaaaaaatatcaaaacctttaatatttgctatgttcggcaagaacacattataattaaactttctccaaacagctttggcacgatcacagcgaaaaatagcatgaccaacagattcccatccacatttacaaagagaacactctgttgaagttataatcttcctgtgggcaagattcacagcagtgggcagtgcattattaatgaagcgccaaacaaaaattttaactttctttggcacatgtaaattccagatccggttccaccatttcctatgtgatgaggaggaagattgatcatccatagagtccaaattaacagctaaatgatactcagatttcacagtataaagacccgtatttgaatgatgccatataagcttatcctcctttggaaaagggctaagaggaatagatagaaccctatcaatgtcaacagcaccaaaatgttgttctaagagatgtgtgtcccattgccgatcttcagaaatataatgttgcactgtaaaaaaaaggatctaccccataaacataaggggtgaaggtagtgtttcccgggagccaaggatctgaagcacacctaacctttgtaccattcccaatcttccatcttaatcctttaacaagcaaatctttgccatcatatatgctttgccacgtaagagaaggcatagtacctttctttgctaaaagaaaatccccatttttaaaatatctggctttgagaacctgtgccaaaagagagtctggtgcatccaaaattctccaagcttgtttcgccaaaagagcctggttgaaatgaatgaaagagcgaaaccccataccaccatcagctttagaagaacacatgtatttccattttttccaatggatcttagaattgttggtattagagccccaccaaaaattagccatcatagactctaactgattacaaaacttcttagggaggctaaaacagctcatagcatatgcaggaatagattgaacaacagccttaagaagtacctcacgtcccccaatagaaaaaagcttagcttgccattgattcataagtttccaaatacgatctttgatgttgctaaaaaagctcttttttatctttgccagcatagaaagggagacccaaatatttctcatgaagatcacaaatcggcatgttcaacacactatgaaaacgatcttttattccttgagaagcatttggggagaacgacatgacagtttcctcagtatttagaagttgtccggatgctcgatggtaaatctggagtgatctttaaatggcttggcacgagtcttcagttgcttgacaaaatagtaagctatcgtctgcaaaaatgaggtgagaaagttgttggggcatttcgggcaatggacaagcctttaagcctacccaaagactcttcatgctttaaaagtgctgaaagcccttccgaacaaatgaggaataaatatggcgacaaaggatctccctgacgaaggcctcttttcggaataacagcccctttgatagctccattaatgttaaaagagagtgtcgcagatgtaacacatttacaacacaaggtttacccagttaaaatgaaaacccatcttgatcataacctcataaagaaaatgccattccactcggtcaaaagctttactcatatctaatttaagagctgaaaaccccatgcttcctcgctttttatttttgaggcagtgaacaagttcaaaagcaagcaacacattatcagtaatcagcctatttgggagaaaagcactttggttcggagagatcacatgaggtaaagcatctttaaatcttgcagcaatagcttttgtgaccaacttataaagagtagtacataaactgattggccgaaagtcacttacaaggtgaggttgatcaatttttggaattagagtaatcagagtcgtagcaatagtgtccatatcctcaccatcattcaaaattcgtaaggtactctaagtgacaagaggccctacaatatcccaatgctgctggaagaacattgcagacataccgtcgattccgggagatttttcaggtgccatagctttcagggcagattcaacttcaagaggagtaaaaggctgaagcaacatttgattgatatccggagtaatagccgtatgaatcgttgagagaacataatccagagcctcttcatcaacattgttcgaagaaaaaagcattgagaaataatcaacaacctctgcactaatttcctcatctgtgtgaacaaagccaccattcctagcttgtaactttgtaatcttattaatcgaatttctggttttagcccttgaatgaaaaaacttagtatttgaatccccactttggagccaatcaattcgagcacgttgatgccaatatagttcctccttttctagcagatcatctaatattttgtcagcttgttccatcctgtgaatatgatcagatgtagtagcatgactgttatgaagttgagctgagatcttgtgtgcatcggaaatgtcacggcccattttaccatatttctgcacatgccaattttgaagagcatcagaacagtctgcaatattatgcagcagcaaagccatgggattagtttgaccattttgttgccacttctcttgaattaaacttctacattcagaatctttgagccaaaattgttcaaaccgaaatcttgacttcctcttagaagaagatgcagtaaaagttgtaggagacacaacataggcaatagctcgatgatccgaatgatagaagtctaagtgcgcaaggatattttacaataaaaaaatctgaccactgagcattaataaaacctctatccaaacgctccttaacaacattgccattgtgatttttgtttgtccaagtgaaagtatctccctggaaaggaataacattcagtttacaaaagtcaatggactttctgaaattttccataagcatatcaggtctaggaggaccccccattttatcatcattagacagcagttcattaaagtcaccaaggacaagccaaggaagattgggatcctgaggcataaggctattaagcagattccaagtattgatccgtaaatgggattcaggtgctccatagaaagcagtaaataaaaattgatggcaattatctgacgaaactaaaacatcaaagtgattcattgaatatgaattaagagttacatcaagatttgccttccacaagagcatcaatccacctttcaaacccaccctaggaacttcaagaccatgactaaacttaagagacaaacgaaaacgatcaatagaattacatttgagctttgtttccataataaaaagtaaatcaggagactgttctttaagtaacagtttcaagtgcctgaatgccgaagggtttcccaatctcctggcattccaacttattattttcatggctgatggcggggttgctgtgaaacaacctccgctagaaaaagatgaatgcccttcaacaaaatctgcaggcttatcagaaaattgttgaataggggtatcatcaccataagaaaactccttgctattgccacgacatcttttaagcatacttcgaaaattctctggattcacttgtcgtttgaacgacttgctgaaagcagggacatcatcactagtctcctcaataataacagattttcctttgtgcttgcctaccccagtagtggttgtagcagcctcagtaacaggggagatagaggatgggtgagagctttgggtagactgtgggtcctttagaagtgaaggtggtatttgtggtatatcagcagagaagatggtggggttatacgaagggaaaggaagaggcatttcaggacatttatcaggtaaagtggtaactggtttttcagtagaggaagactcagcaatggtaaggggttgagggtggggtttaataccagtggtgaaattactgttagattgaagagcacgaattgaggagaccatagttttccgagttaaccgagtaataaaaggataagcattggtcttggaaaaatccattcggtatcgctcaaaaccagaacttggaagctttgcccccatcagttgaggaccatattcaagatcaggatcaatcccagcatgcaccttttccataaacgatagacacttttcaaaagggtgccccaatttgccacaacaaaagcaaaacacaggaaaattctcatagcgaaattccaaccagtattcatccttcacacaaggcagagaaaccattttaccacgcataagaggctgattgacatcaatcctaacccgagttctcagaaaagaaccccaaccctcatgtaaagattcttcatgaacatcaacaaattctccaatccattccccaactttcttagccagagcccttgatttacttaagaaagggagcggtgagtttgaacccaaaactgaacatggctaagatcctccttagtaacattttggagagaagaaggcagatgtaataggatcaattggttgaaaaaatgccatggttcaccagaaagaatccttcgttgatcacctacacaagccaaagtgaaaagaaagagatcagaatgcatctcagaaacaataacttcaaaacgacatttgttactccaaaattcgcccatctttttgataaaagtttttggattaactaagtcagccaaacaacgtgcaaccagaaaaaattttggtgtttggttggggctagataaatcagactcgtcaagagagtgaacaactctctctttttcagacaaacaaagagttgaattcatattgttcagaattgattccatatgagtatacgattgagagaaggaaaacagaaatcgcagaaataaatcgtaaagattattctgctttatatatatagaattaaaacagaagatggagatcgtggaagaggacttagcatataatggaggtcgaaaatagtgaagatgtgggcggttagtctagattgcactatcattattttctttctctcttactgcaattttaaatttgttggtttagtaaataaattataaaatttatcatatctatataaattatatttatatgagtgattatacttttattgtaattatgatggttacattcttgttgacttgtaataatatgttaccaaaatataaaaatttatttttttaaaaattaaattaactataattaaccatttgcttaaaataattaatttttaatttaaatatttaacaactttctatgtcaataagtgaatgccatgaaacttcttggtctgccaacatacacattaagggataaaaagcagatatttagtggtgtcaatgaaaagatttggaaactgatgcatacctagaatgaaaaatttttctcaacaggggtaaagaagttctttagaaaatagtggtgcaatattctcacttatgctatgaattattttagacttacatccaccttttgtaagcaacttaaatctataatgacaaatttctggtggggatccaatgcgaaaggctctaaaatacattggcggaattagaatttactttgtaaaacaaaaattgagggtggaatggggtttcactcttttgtgcattttaatcaagctttgatggcaaaacaagcttggaggattctgcaaacacctaactctttgcttagtagggttttaaaaagtcgctatttctcaaataatacttttcttgaatcgcaactggggcactcaccttctatgacatggcaaggaattctatggggccaagaattattaattgatggtctttgttggaagattggagatggaagaatggttagaagtggtttagatccgtgaattcctagccacaaatctttctacccactgtgctatttagggccttctaatggtgtggtggtaaacctaattacggaagaacgttcaatgaaatatatctttgctaaagcaatagttctctccattattggatgttgaaagattttaacactgcccttaagttttttcctagtggaaattctcttatttggcaccaccttcactacgggttgtacacagttaagttag

SEQ ID NO: 218348 - DNA, 5678 bp, Cannabis indica
ctaattagccttttatgaatgtctgtaattaactattttaaagtttgtttatttaaagttttgccctttgaactatgacttatgtttgattgtgctccttgaattttttagcccattaaaaatgattccctaaacaatttcatagtatcgtaaagtggtccttttatcaaattttgttacatgtaacaaatataatgatgatgtggtggtttagactaatgccatgccgacgccacgtgtgtaattaatttgaaaagaataatttatttttaatttaattttacttaattttttttaaaaatcattaattgatttgtttgcttaataatttataaaaaataaatattttatttgatataaatatctatgtcatcattatatttgtcatgtgagaccaaacatgatagaaaattcactttacaatattgtaaatagttcataaactacttttaacgggctaaaaaaattcaatgagtacaaaaattctaaataggctttgaaatttattttcagtttaatatattaaaagaaaaaaacaagtgagatgattactataaatataatgtgaatcgtcatataaaaaaattgagttataacttttccaatcccgaaatacttttattggtagtgacaaaagtgacacacgtactatatagttactatctaaatagtaaatatatcacttggtatatattatacagggtaaagattgacatttttctaaatgttaatttgcaaaatgaatttcttttaacttttgcaaaatagctttttccaaacagaaaaaactattttacaaagaattatccaaagaagattactgggcaaagtgagtagagaccattttgccaagcacttcaatgagtgattaaagaatattatagacactattcatggattcttgatcacaacatgtgacttgatgtatagcatttgccaagtaattcacattgcctgaggtcacaccagccatgctgccaacaacatcaccatattcaccatccatacatacacaacataatcaaagagcaaagctaatgcagatatcagtacaacaatcttacctgatgcgaccgtcccgagtcatgtatacatgaaattctctagctagctgatcaacttgatcaggtgacaaaccagaaaagcagaacattccaacctgtagttttttacatacatgttaagttgtttcatggtttgttcggggtatcaacccaagttccatatcagaagaacggacaatatcatatactaatgtgggagttaaaatgagttttcagtccaacatgattgaattgttgttgttacctggtttgtaatgtgttcccagttgaaaggagagcctaacttttcaaggctatcgcgtagtgcagaccgtttcttttttatgcgatctgccatgatctggtatggaaagaaaagtgtatattttttttgaaaatcacagcaagtgcaaggaaagtagttagaagttattataattttctacctttaactctttgatccatagtgattttatatccgaatcgcctaagattgttgagactagtaataggccatgaataggaggactgctgtacattgctctggcaatttgctgtagttggcttttgactgcaattgcttgctttgcattggaacaaagaacactaaaaaagactcaaacattaagtggaaacataagatacatcaaatgatagaacttttaaccatgcaaacaaagtttaatagaaattacttgcctgagacaaccaactctatgtgcatacaatcccatattctttgcataagattgagcacaaccaatcaaatgtccatcttcatgaaaaatccgaatagctttggcatcattgtcaagatccccacttgcaaaaccttgataagccatatcaaagaaggggaaatggttttttacctgaaattcattgagttatagattaatgcatgttcagagattttggctaaagaacctttttacattgagtaccttaaacagataagagatttctctccattgttcctcagtagggtcaaccccggttggattatgcgcgcaaggatggagtaagaaaaatgatttttcaggcgcgttctacagaaaaaaggtttgtaaatgtcttaagtttcaatgtagggagcttctatgtactctatctcaaatcatggcattaatttagattcttcataccttgatatcatccataagtgcagcaaagttcaaacctttagtatctggatcatagtaattgaatgttctttgaggaacatgagcatctctccaaatattttggtggctgtacaaatgcatatgatcattctactgataatgtatcaaatacaagaaatattggaagacatgttatgttacagagggacttacttagaccaagttggattggataagtacattcgtgattcggggtaaaatcgcttctggaactcagcaaagaggcgacatgctccagtacccgaaagagcttggattccagcaaatgtaccttcagttataacatttgaatccttgccatacaccaattctaaacttccttgaatgaattttgaagtggctgcagcagaaattgactccctgccaatagaaattattttaacactgttgtgattaaacaatcacactaatgagatcaaaaacagaattcaagaacacaaaatttcagcaagacaagaaatcaaagagacaagtagagaagaatttgctcgatagggatttgttaggcctcaatctgcacatatattcaagacaactcttgcttatttttctgatgtagaacttgggatctttattaagaagaatttcgacacaggtcctaacaccgatatcaagtagactacttcaatataagccctcacggttttgtttttgaacttgcagaaaaacagccttcatggtattcatcgtcttcattaatcactcaagaattcaattacacaattaaaggtagctagatcactcatcaatggaaattgaactccttacaatgattcatcacactgagaagagcatgatcaaaatacacatgtccaagaaaatgaactctaaatctgatcccttctagtgtttgaactctaagttagtttttatagttgtaggttaggcttaactgaattaactaactcaaggggagagccaaagagagaatgccatctgtaaattgactaagggacttagaccatataccaacaattcagagcaattcagtttgcaagctactaaagaattagacatcttaattattggtattggcttaattagatataaaaagcatacacacacacacactttgtgttagtagtttagaaaaaataatggaagattaaggttaatcaaattgatacataatccaattgaacagttgttaatgcataaaactaagctcaaaatacataattgaatttttcccaactccaggacaaaacccaaaagattagatttctaataattaacaactgtacaatcaattcaattactaatcaaataactttgattcatgtcagagtgagagaatacccatgcccataaacacacacacatatatatatttacagcaagtgtgcaaggtgaccaatcaaaacaaaactaaataaacccgatacttaactactccaataatttaaacaatttgcatatgttataaatgtgcatatacagaaagagaagcatttaataccaaataagaaacaaatatatttcccaaaaaccaaaatttctttaagtgaaatttgtcaaaataaactcacttaatttattccatacgaccgtttatagttgttttgcgaccataatggtcatttatgatcgtttttgtgaccatacaaaattattttgctaataaaaaatttgataaaagcaatttttacaaaacaaattaattaatgttaattcaacaatcaaagaagctgaaaaaacactcacaagaaatcagaaccggcaatcttggtctcagcatctctaacacattgtagaaccacaggtttaccctgatcatccctgtaagccccctgaccaaccaaaccaatcaaatcaaaaaatggttaaacaattaaaacagaaaaaagattgaataggaagcaataccactccaagattgatctttttaagagttgggtcttgaagaaaagcttcagtgacaccaacaatggggtccttaggagaaggcttaacatggtcccaccaatcaccaactgctgctgctgctgctctgcctctggttgaagtagaaacgcaccgttttgtcaacttcatcatcatcatcatcatcatcatcgtaatattactttgattaatttagatttaactatacataattaatcagtgataacatcatcaatttcttcttgttaagctttatatataatatggtttgttgtgttgatgttccagtgggctggtttcatagtattggatttttgtcgagtaaagtgaagcacctagtttcaaaaaggcttaatatattactattaaccaatacaaaataggtttgactatctacatgtcgtcaaatgaattcatttgaccctttacttctatatatatttgaaaaatgtactcttatgtcaaaattatttttttttttttttttttgttttttacgattgtcttaattatttaagatatcctataaaattttaaaaaatttaacatctcaaaaataagattcaaaatagtacctatttttagtttaatatcaacaagtggaattaacgaatctattaaaaagaggaccagcagatttataagaatatcgagcttgtggagtattgccgctatttttcgagattggagacttatatctacatcaaagtgaactttttaaagacttttgctgcaatttttccttaaaaaattatttgaagtggctcaattaatgttgtacttcatatgaagatatgatatttttgtgtgccccacacttcttataattttaggaaaatttgaaaaaatatgcataaaataccttaatattatatgcctaaactaatacttttcaacattgaaaatatacgaccacttttccaaaatcccaataatacccctctcaaaaactcaaaccctatctctctccttccctcaaactctctctgcctcttccccttcgcccgaacccacattgcacaacgccccacacaacccactccgactgagacccacacccaccattccgaccctcatcaccgcccttcgcttgaacccacatcgcacaaccccccacacaacccactccgactgaccactccgaccgagacccacacccaccattccgaccctcatcaccgcgtcacggaggagacctacttcgacacggaggagacccgaacgatgcccaataatgtccaaggttcagatctgcgatttggggaaatcgcagtttggggaagacgatggcccgatgggatctgatgcatgtgcgaaaaaattatatttttgggtccgacgggttcgatgggggtctgatgcatgtgctggaaaaacttttgggtccgacgggtccgatggggaccctgattggggtccgatgcatgtgctgtgtaaaaaattttttgggtccaacgggtccgatgggtatgaagaaagagagaagaagagaggggataagggataatataaatgggggtattttagaaatattataaaatgtcatatctgttaggctatttttagc

SEQ ID NO: 218349 - DNA, 3673 bp, Cannabis indica
tcttacaacaattactcgagtacagacaacaaaaattacacaatgaaaattaagaaaatagtgtactctagattacaaatagactaaaaaaagaagcctaaaagctcatgagaagagatacatagagagaattttaatgtaaaagcaggtttgctacctagcttttggttgtttggattatatttgtttgtgattaatgaagattgttccttcttgaataaaaaaaaaataataatatttttgattaagatactaataaaaaaaattagacaaaaaaaaaaaaaattctctatccataatctataatagagccctatttttttatggttggaactcattttttaagtcttactctctatttcagctaaaaagtatttcaagagcataattaaaatattctaaaaaaacaaaagacattgttgtgcccaaaagtattgataaaacttttctatataattttgtttcaaaattgaaataataataaaaaaaaatacttttctattacaattattttatgaaaagttttctacaaaatatcccaatttttttttaatttaggattaagtaattctactaacaattttacgtttaaaagattgattgtcatcttattctcttgttttcgattctattgccaatccaaaataatcgttgttaatagttaattcaacaaaaatggataaaatattttttttatttgaaacctaattatgatcaacacctctctatttatatatcattgtgtaatagagaagaattaaaatgggatcacctaccataagttgccttcattctttgttcatatttgttataatcatacttaaccaactagttgaatataagcatgaaataagtgaaagtttcctgaatctagttgagtgggtgttcattgaaagaatgctacttaagttagattttaaataaccctgggtatgtaagttaatgagatgtgtcacctctgttcattattcattccaaattaatggtcagaaatatagagaagtgactccatcaagaggtttaagaaagggtgattcaccaccatatctgtttttgatttctgcaaaaggcttttagcacttctatgaaaagctgtgagtcgaagagacatactaggcttaaaagtggccaattctgctccttctattacacatctcttttttactgatgatagcatgataattgtaagagcatcagagagatctttggtccctatataaagaattttttccctttattcggaatttatcaggacaggtatgcaaaattatattattatttgcttagttagtctattattttaacgcaaaatttaaataatggttttatcttatatttatgtgtgttaggcaggtaatcaatttcaataaaaccattctttttttcactcctaatacacctgcgaatattcaattgatgtatatggctaatcttgaaatgagaaggacggataaaattgaaacatatttaggtataccaatgatgtggggagaaataagaaaatgatgttcaggccaataaaggataagatttggtaatagttaaatttgtagaaggctaaattgttttcacaagttggaaagaaaatccttctgaaggtagtcatccaagctatgccgacgtgtctaatgtcttgttttagaattccagtaggaacatgtgaggaaattgaaggtttgttggcaagatactggtggggatcttttcaaactaagaagaaaatccattggaaagtatggcataagatatgtatgccaaaaatagaaggaggtctatacttcagaaggtttatacaatataaccaagcgttgttagctaaacaagcatggcgtatattgattcatcctagattgcttatttcacaagtactcaaaggaagatattttccaagacaaatttttttggaagtagaagaaggtagtcattcgtctatgatatggcgggatattttatgggacagagagttgcttattctatgtctaagaagaagaataggtaatggtcgagaaactaaagcatttaaagatccatagataccaagacaaccctcctttttgccaattacaagaggaacatctgattcaatgacagtatctaattttatactttctccaggacaatggaatgaaggatatattcataaaattttaatggctattaactctaagcttataatgactattcctcttagaacatataatcatgaagattcgtggcaatggcatcacacgaaccatgggacctattttgttggtactagatataatttggcaataaattctaacaaatttctccctttctcatcgacagatgctttatcgaaatggtagaaatctttttaggcaataaagataccacctaaaatattattttttgcttaaataaggattttatgagattctgcctacagtaaaggggttactttgaagaaaagtatggacaaatagtaattgtcctttatgtggttatggtgttgattcaaatgtacatgctgtactttggtgtccatttgcacaaaatatatggaagcttctcgactatccttttttattacgccacaaggaggacatttcttttaaaggtgttttattttatggttctgagatcctagaagaagatacttttggaaaaatgatggttgtggcttggataatttggtttgcgagaaataaacaaactcataatcaaaaggcaaggaccctacatcaagtttaaactaggtatcatcaaactgggaggaaatcaagaagtcgagagttaaggatcaaaaagttggtcaagtaagggcaattaatcagagggaagaaatttctatgattcaaggtctcacactctttgtggatgcagcattatgtgagaataaaatatggttggagttggagtagctattttctttataaataatcatataatggcgtctttatcaaaacctttaaaaggtttggatcatctattaattaaaatagttttcctaattagcatgaaagactaaccaatggattttccctttggttagaatagtcttaggagtattttttttctctctttagtgatcttattttaaatgcttataagaggcttttatttgcaggctctttatcagcttttcaagcagaagcgattgcattgttggtaggcttaagatgggctctggatgttggactcaatatcaatggttttttctctgattctttgtcactagtttttgccctaaatagtggttctgtgtactataatgaatttaggtgttttattttcagacattaaggctttattatctagttttcctggggcatctctttctcatgttagctgcaatttcaatgttgcagctcatggattggctaaacatgcccttaggataaataatgagcttttttagatggaagagacccctcttttgttgatgtaattcttttatgatcaataaagtgatcgtgacaaaaaaaatatacttactcctatgatcagtatttaattacagagcattgctattgggcactagtagtacttagtatattctagacgtgtcgctttgtgattggctagcgatactccctaaaaattattacattaaactatatgaaactcaatatttagttagacctatagcaatattgatacataaatgcgttcttagaaccactggtgccttttagtatttctcttaatt

SEQ ID NO: 218350 - DNA, 4797 bp, Cannabis indica
atcagataatgaactttggctagcaaataattataagccctgtaatttagaaagatggcattgttaagtggaatgaaagatagacatgttagataggttaacactcccattagttcatccatccataaacacattctgaatactttgattttgttaaataaatataataaccaaaacaaaacataaagcacgagtactaacgtggaatagacgatgactccacccgatcgaactaactgaacagcctgatcgaacaatcttctctgatatttgccatggtttcttaaggactccattgtttcctgttccaagttactgaatttatgcctagacatattttccaatataacagtacaataaaagttattgcatcattataatttatacctctcccgaaaagagtcgaggtctcaaacctaatgctgaacatggagcatcaagaaggacgcgatcaaagctgttaggagcaaaaccttttgaattttcgcccctaccacctgtgctctgatttcgtccaggcccatttcgcattcttctcagattcttcctgatttcagctttgctaatgtaagttctctcattcgctttttcattgctaactaaaacattgagttaatcagaatttgaatgctggaaggacttgaaattatagtgttttacactaaatctatagaacttgctcatatcacatcaaatttacttaccagtttcctcagctatactttcagcaattaatccatctaaaacagcagatgaatctttctctacttgaatcttcattgaatcagaactttgtacagttacactgtaattatcctctcttatggctaggttagtcgtatcatcagttcccgctagattagttttatcatcacattcattactctgacgaaccgatttcagagcatctaatttatatgttgttatactcctcaagcccatttctacagccaatttctgaatattgagcacctagaaatagaatgaatgtaataaatagatacagggtcacaaccttgttgaagaagatgaaaatggaaaacataaagattgttgaaatccccaaagagtgaaacgaagatcattaacgccaccagttataaaccctcgatcaatgacaccagggtttggagaatttataatgccagaatcatctacaaggaacagaaccgagaaatcgtggacaacacttttgtattaacttttgaggctaagaattgttaccttattgtgagatctatcaacagcaataatttctccttcatctttcataagaattgcaatagcagttgtcttccctcctggtgctgcacacaggtctattatccgttcacctttcttaggatctaaagaataagagaaaatttaacaaatgagaaccttgctacgacatcaacttcatttttcatactgatctaataagaaacaaaattggcattactgacgaaatatatattctcaattacaacggcgtgatatatgaaagaaaagataatgtagatgtgatttctagcatagacagaagtataatgcttgacatgtttttaaatgaaaactacaaagaattcatagctgagaaaggtaatagttacctaaggcatgagcagcgataatgcttggtagattttgtagaaatatttctccctcaagcacatctgggaaccacaacgaaagcaaaacaaactaataatgcaatagaatttgtatgaaaatgacacaagcttttctcaagtgatacccaaaggggccacagcagatcaaagaaaaagttctatatttgctttgtaacaacagaaaaaaatacactttcctatcttcaaaaattctctaagttatcctagacaggtagcttaaaaatagtccaacacatggttcgctccaaaaaggtttgagattttagtctcacttcacatacatgttcttccacgagtacagtttcagcgaaaaattccccctagatcttatccttgcattatctaataaatagcaacaaatctcaacgcccgcaattaactaaatttccattcagaacatcatcagttggaggaatgtatttgatttttcagtttgttgggtttttggtggattgtttagtccactttcctttgacttgtattctatttcttttatgataacacattttcttaagctgtatcagaaatatataattaagaggccagcttttgggataaatgcaatcaatcatgtctttataataaaatatttaccataaaatgaagggagtttgaatactctattacacatttccacagcaactccttgtagcacacggaagattccagtccttgacaacattgcttttcctttgccaatatagagcctatttctttcagaataataaagatctgattttttgtttgccaacaaaccaaacattgaattatcttcataccaaaccgaaaaaaaaaaaagacacacaggataactgaatgtatacctgtgcatgaaccctgcatgatggtccctcgagttataccagagccccacccaccctcaagaggctgctctatagcaaccgaaactgcaacttcatcgcctttctcaacatgagcgctgcacgccagtactccaggaacatagacctacagattagctaccttttatgaagcagaagatatgatgttcgaatgtcattacattattaaaaagagacatacaaagagaataaaggtagtaactttgaaatgacagtaaataccaaactaattatatcaagcttgattaactccatgtcataaaattcagtgtcaccaaagccatagtctttcacatcagatgctagcagttctcttaataaaagttttaacataaatatttcactcctgatttacttaacaatgttgataaattgaggaaaaggaaactaacctgagcacctcgaagaactgcctcagcacattttctactcacaactatctcttttggaggcttgccatctacataaccataatcaattacatgtggccctgaccccttcacaaacagaacatagtctaaccctggaaactcacacttcgaaataggacccttttgtaagtttccattaaacatattagtaaactcattaactggtcctgaggctgccttaacagaatcatccaacttctgagactcactggttgaatcaccatttaaataagttttgctaagattcaagttttcagtaccaaattcactctcattttctttcaaaaccgccatcaacttctcgataacaacatctggtgaggacttgagtatgttaacgcgtatacaagagtagcaagatggacgcctgattaaatcaaacaacattgttataaaggaaagaaaaaaaaacaaatgcattccaataataaagataacaaatttaacaagactaaaatcctgaattcatatagaaatatattatacaagaaagtttgaattcaagccactaaaaatgcaatatactgttgatcatgagtttaaagtcaagacatctttctttttcacttattaagatgttggttagtatcaaccaactgctaactgctaagcattcatccgtacaatgaaaggactaatctttttgttattattatgcttaattgcagagaaaaccttaaagaagaataagaaagtaaaaaaaaaacgaatgtaagaagctatttcctgcattttctcgttaaccaacggaacaaagagcaaaaatcaacttcaataaagaacgaatgagaagagtacgttagagctttggagatacgtgcaaaatggtcagctccatatgctgaggagaagtaattttcaacctcaggtttccaccgcagaacaggttcaaaagaatatcgctccgataaatcctccattgccggcggactaaggttccgatcagtcgtgaaggaagaggagaaggaggagctcttgcttcgaatgcttctgaacaagtccctcgctttcctcattcaaagaggggttttttcggctaaagagagaaactttacagtcttgaattgatcgatggcccaatacgtagggaagaaacctcaacttccccaagggtttgggcttctgacaaggcccataaaaggggctctgttgattggtcgtcttcctcatgaattggcgcgctcgtacggtgatgacgtcacaaacaaaaaaggcaaaaaggaagagactttaatttgatcgctcttctttcagtttgggattttattgaattaattcaattccgaaaaaaaatggttggaatgaatgttatgcgagtcttcaccattactggatctaatccagctttgttgaattgttcttcgaggattttatcgagtccggtaaagtcgaccaagttagggtgtttaaaaacatcgacttgctcttatacgacgtcgtctcatccctttggcaagctcctcttccgtcagctctttgagaaggaatcatccacctacacatacttgctcgccgatgttactcaccctcaaaaaccagctctggtcagttttccttttttcttttttgtttgtttggattctgagaataatgtattatacattcctaatattatgatgtttaggtcaacaatgagtacatttaaatccatgtttttgttttcgaattgggaatgttaaggcaatcaaaccacaagggatcatttttattgctttgagtcaatgcaagctttataatttgtagatgaaatatagagttttcctgtaacactgaataggaatttccttttcttttcaagctttataaacactacctttgcttatcttttggtagaataaagtatcaagctttattccattgagagttgaa

SEQ ID NO: 218351 - DNA, 5071 bp, Cannabis indica
tttacatttctgtgaagcatgaacagtttttgtgaggctgtttacacatggaaaatgcttcaattatagctaagccttgtaaacttggggaactaggaagaaaaaatgatacaattatatgtttgaagaacaaagaagcaaaaccagaatggttctattctcattcttctattcttgcaaatagaagtaaatactttgctcatcagttatctcttccaaacactggtaatcttattgaacttcaatgctctgaattcaactatgatcaccatatcaaacttttgaagttgttatatctcccatcacatttgattttggattcgttgaactcggttgcatcagctgttggtgttcttgaattagctgtttcttttcaatgtgaagagattatacagtgttgcattcagtacttggaggcagttccttgggaagacaaagaagaagagcagattttaaaatcggtttcaaagttggggccagtagctatgcctatattagcaaggattgagcctgtggattttactgctacgaaaaatgttttcgtgtcagctgttcggtttgccatgtctattaatcaaccttgtcctcctttcggtgatgagcttaaaatctctgctcaagaacaaattgagtacatgctcggtgaagatgaggaattaccattggttactgcagatgatgaagtgagatcagttgtaatagagggtctttcgaagttatgtaaatcgtttgaagatgaattgagttccttgatttcggatcctaatcttgtatttgaaacagcagaggaaaaattgttgcattctttatctgatcttgaatggatgtgcaacatacttcctaagatggatttaatgaaagattttgtttcgaattggactgaaatctctgccaacgtgttaggtgttgttgaagatcagaaacttgattttcttatgtggggtttgaaaattaagctcatagaaattactgctaaagttttggatgcagttggttatgggaatgtgattcttccttcgccataccgagccatgttactaaacacatggctcccttatataaggaaaatcaaacctattttggattcgaaagggaatgaagagactggttttccttacaagatggacgacgaattatgtcaaagcattgaaggcgcgattgtttcattggtactgtcactaccgtcgaatgatcaagctgatatttttgcagattggatgaaagctgatcaaattcggtatcccgatttgagtgaagcttttgaggtttggtgtttcagaaccaaatctgcaaaaagaagattggagggtctaaacaaagttgataatgctacaataagcctttgaactctcaataaaagttccatttttttattattgttttcctatgaagattataactttggctgcaattgtataatttcttgttaacaatgattgtagtatatgactaatttgattagaccttcaaagttggtatcactttgttattttcttcactataataatattcaacccatctaaccatttgaatagtagaatttaaaaatcaagcaagtttggtatgaaatgatgtcttgtattttcaaactagctccttattttggttccatcataatttatgtatgtatggttgttttttaaattcattacatgttataatgattggtacacatattgtagtacaaaatttgtcaatgaatcactcttttacatattgagatctccgactcgataacaacctatataactcggaaccctaatagtctcccgagagtaaaggacaaagaaaggatacttttttctgttagcacgttatctttgatgctattttaaaagaaaagaatgtcgaacctcttcataataagagaagatgaatactgtaaattctgccactagtataatacaaaatatttgaacaaatgagtattgacttttactaagatgtaaaaacaaaataaagtaaaaaagtattaaaagaataacaatttagagttaaacttattggttttccaaaattagtagaaattaattagcttatagcaagagaaactacactactttttgttaaattagagaatcatcaacttactacacaagagtggatcaaaacacacatgtcactcttttttcacttttttctttcatccaaaaaaaaaataccaaattatttatcaattgaacacctagtaacgacaagtcgtttttgtcaataaaagaagtaaacgacaagtcattttgttaattaaagaaacaaacgacaagtcattttatgaaagaataaaaacgacaagtaatttccgtaaataaaagaaataaacgacaagtcgttttacgaatagaaaaagtagaaaacgacaagccgtatttcaggagggtcaaaaggccaacagtcaaagaccaaaagcttatagatattttggggattagatcaagaaccgtcgatttccatcatcatcatcatcaccaccgtcacaacatctcttctcttctcttctctcctctcccaaaatctcaaaaactctctctctctctctctctgtgatacccaaaaccattaacaataaaaaccccattcgccataaccaaatccttctctctctctttctctctgtgtaagccatcatcgtatctgaatcgatttctgattttttttgtttggtttggtttggtttggtttcgaattgaatcgataaaggaagaagaagaagacgatgtacgtacaggcagtgccacccacggatctgaatcggaacacggagtggttcacgtaccctggggtttggaccacttacattctaatccttttcttctcatggctcaccgttctatctattttcggttgctcctccggcatggcctggaccatcgtccacctcgcccatttcctcgtatgcccatcttctcaaatttttgtttttattgattgttttgatttttcaagattcaatttttaataatttgtctaggtttttgactttctattgttgggcaagtttaaatcgagtttattaggattaatatcatgtttgaagcattaagtgatttgggcttaataatttggcttagttaacatttttggatcccaataaaattgctgcacatattcaaagcctataggtcaataatggatattggttaattttatgtcttttgatgatttttgatatagaaaattaaacatttcaattgggtatattgataccttaatgtaattgatgcatttcctatattaataagagtctgtcgtttctgggttttggtctattctcttgcttatagtggtagttatgttggttggtgtggttgatgatcttttgttttgtttcaggttacctaccacttctttcattggaaaaaggggaccccatttgctgatgatcaaggtatttacaatggattgacttggtgggaacagattgacagtggcaaacaactcacacgaaacagaaagtttctaactgttgttcctgttgtgctgtaagtaatttagctatatgatcatttcaggcttttcaccctttttgttatgcaatcatatttgaatttcaggatggtattgtctccattttatgaacataagaacttttttcgtcttgcatctttgtgagtttttcggatttaggttggttactttcaagttctagtaatttcattttgtagaactttaggcacagacaaaacctgcctagtgaaatttaatgacttagcttggtgtgagatttgtctcaaaataaggctgctctaagtataattcggtttttaggagggtgggctttgagattgttgaatcttatgaaccttgagtcacttcccttagaaagagcgaaaacacaccctttgtatgatgtactgcaacaaaagagacttcatggacatggtggtatcattgtgaggtgccatgtctgttaagttcatacttccaccgataggtttttaccgttgatttctttacaatttttagttgggggggttgcaggtgaagagcaaaacattatgagttagttaatgcagatgcaactcggcactatgactggattgtgatagataccttaatgttgtgttttgtgattgctcaccgtgtttcattttgtcacgcaaatgaaaaaagcaaattgtttttttttgtatgatcagggttatgttttctgttgataatgaaatcgaaatcttgcttatgcaaatgcgatgcttactttccaattgaaattcaagaaaaagggtcttgtgtagggctcttaggaattataatttatgacacaggtggttgagaagccatttgaatgacaaagtggtctgtcgtgtgagtccttgtcccttaataccattgggttaggcgagagaacctagctttcgagggaaatcatgttgattcattaggactttgtattgtgatatgatgcattatgaaattctatgaacatgtgaaacaatgaataaaccgaacaaaagactgatatttctcatgctgtttcgctttggatttggctacacaggtacctgatagcctctcacacgacagattacgaacaccctatgctgttcttcaatacactggcggttttcgtgttggtggtggccaagttcccaaacatgcacaaagttagaatattcggtatcaatgctgatcattaagatttgagttactactacttctaaacagaattacatcttggattcactctggtttcaaatcattttgacctttccaattttttttgttaaaaacttggaaaaggagtatattatgtctaatgaaaatgagctcttcttcttctttgtttttttaaagcattagttgtaagttacagataacttgaggagaaaaatgtttttcaatgcattttgtggttatacgagctgagataatctccaagaattttactactcaattaaattgataatcattttttattttatatgtccacacttattattatatatatacttggaaaaaaaataaaaagagtaaataaaatcatttttaatgctggtttataagaagcatgtatttttatttttttattttttgcttcaaattttaaattcatcaataattattaaagggacat

SEQ ID NO: 218352 - DNA, 5088 bp, Cannabis indica
agatcctggtaaaataattcccaacactaattcctaatcaacatgactaactatgtaagataatggattataatacagattcaagtttaaaattctaaattcaacaattattagaataatacgtccataaattggtttaagaaaaattccataaatgaaatttggcatgcatgtttcaagtcttattttatcttgtagaattaatatcttctcctcatgataaaatgcttaagattttataattcttttaagaaaacaagttaagagttactaaatatgtttttttttgaataaaagttcaacttcattaactcaagagcaatcgctcaaaagtacaactttaagctccgaagggacatcatccttcgtgaacatacgatcagcagacaaccgagactgatgtgcaacaacatgtgcagctcgagcagaacgtttaacaaaccttaacgaaacattattcatagagtttaacaatgacttaaatcttgcacaattaaaccaaaagccaaaaacatcacaaccggactatgaatagcttgcacagaaactaagctatcactctccacacatacttgtcgagttcaaccaactcaaagcttctcgtatccccattgctttggcaacagctggattaggtttccccggccgattcaaccctacagccaccaaaagctccgccttgcagtccctcaccacgaaaccgatcccaaactggctattgttgtcaaatattgcagcgtccacattaagcttgatcccattagcaacgagtttagtccaaagctcatcccctttattgaaaaatgatggattcaacgaagggtagttctcgcccaattgagcttttctccattgatcaagtgatctcaatgcaaactgaacaacatcatccacattccgattttctgatcccataccaatccattcctagccttccaaatttcccaacataaggtaccagcctgagcaaatttatcctcactagctctatccattaagtcttgcaaccagtccctaaaggaatcccacacccgacccctccattcacatccagcttcgcccatcacgcaacaacaaagtcaaaattaattaagcaatgcgagatggtttcactggagactaaacaaaatggacaactataatccaaaggcacctttctatcaaaaagtctcttccttgtagggagacaattggaagctgcccttcaaataacatctttaacagtaggcgacactttaaaattccacaaatcctttcaaaactttgaacctccgtccctctctccatcaatagatccttggttaacaagcatttgacaagctgtcttaaccaaatagactccatgcttagcatcaccaacagctaaaagaattcctaaaataacatccgcatccccttcattaaacacatcccgaaccacctcctcatcccactccctaattccaactttgaataagctataaaccttttggtcattgtaagcagataagtcagaagtaggcattggaaactcatctcttgggagccacggatccgacgcaacccagatagataaaccattattaacacacattcttaacccatcttttagaacaccttgtgcctccaccaaacttctccaaataaagctcagattggagcctagttcagcagtaaaaaagtctccctgagcataatatctcgctttaaacacgcaactcaccaaagaattaggattaataatcagacgccacccttatttgccaagcatagcaatattaaaatctcaaagactcctaaaacccattccaccatcgaacttatgcttcactaagcgggaccaactcatccaactaatgcctttattttagttttaagaagatttccaccaaaatcttgccatcgaactctcaatctccttgcacaccccaaccggaagtaaaaagacgctcatagtgtaagtaggtaacgattgtacaaccgtttttatcaacacatcctttcccgcacgagacagaaacttagtatcccaacttttgattcgctttagcaccttctctttaagaaaccccaagacagcgttcttatttttaccaatcgtgtttggaagacccaagtaagaactattagcgtcagcttctaccatccccaaaaccacacagacatggtgtcagacctcctcccttgtattgctaatgaagaaaaccgaggacttcgccttgttaaccacctgaccagatgccaattcaaaaaatcggagcatatccataacacgactagcttcctcaaccgaagcttgacaatataagtaactatcatccgcgaacaacatatgggaaactctaggagccccattagctactcgaaatccatgtagcaattggtttcgttcgtattttcttacaagagttgagaagccttctgcacacacaatgaataagtaaggagaaattggatccccttggcaaataccctttgaagggacaatcgaccccatctttctaccaccatggacaatatgataccgaaccgagacgacacaatgtaacaataaatccacccatttttcggcaaagcccttttttctcaacatatccttcaaaaacctccattccaccctatcggctttactcatatcgagttttaaagccatatatccttccttaccgcgtgtcttccttttcaagtaatgcattacttcaaaagagaccattatgttatccgaaataagtcttcccgggataaaagcactttggaaatcagaaacgacttgatcaagtatcctctttagacggttagccaatactttcgaaagaaccttgtaaaccacattacataaaaaaaaataggcctcaactcccccatattacaagggctaggatcttcttcggaatcaacacaaggttagtatcattcaaaccaattggtagcacccccgtttccatgaaatcccaaactagccgaaccacatcattccccataatatcccaatatttctgataaaacttcgggctcatcccatcgagaccaggagatttgtcaggatgcatttgaaaaagtgtcgcacgaacctcttcctcttcaaccaaatagagaagtattgtgttttgatcctctgtgatagagggctaaacttcttgtatcacgctgccaatgtcaacattggatgccccaaacaatcttttaaagtagtctaccatcaccccacctaacccagcctcccagtccacccacaccccatcctctctttgaagtcgctaaatatgattttgcctcttccgcgagcttggtaagttatgaaaatatttgctattagtatccccggaacgaagccaaaactactttgatctttgcttccaatagatttctctttgcgctaaaatttcaaacaactcatcttgcttctcacggtgtgaattaactgaagcttcatcccttctcttcgtcaaacttagaatgacaattttacattggttaattctttctttaaaattcccagtaaaatccttcccccaaacttccaaagcctcgccacaacctttaattttatcaactaaacaactcccacttaacgcttcccaattacttcgaacaacctctttgcacattggctcgcgcaaccaagcattctcagagcggaacgttcgattatgcgacctaatagaataagcttcaggtgttaggataattggacaatggtccgaagtagaaatcttcacattatacaatttagccagaggaaataactgaatccaggaatgagaaactaaagctttatctaacctttcctccacccaattgctagagcctttacctttctcccaagtaaacggataaccttccaaactctaatcaatcaacccacactgatcaagagcagcccgaaatccttcgacaagccaattggggtagcttcttccccctctcttctcatcttgaccccccaagttgttcatatcaccaatcaaacaccaaggaagttgagattccaagtttaaggaacgaaaaagttcccaagtatttctccttaaagctcggtttggttctctattaattcccgtcaatctccaatgccttagctcattttcatggataatcacatcaatatggtttttagaaaaacctttcaacatggccattctttgctctttccaaaataaagcaagccctcaactatgaccttgggcttccacaacaaaacaaccctcaaagcccaattggacttttactctttccaccacatcttttctacataaagtttcacaaagaaaaattatatcaggcctcttctgaacaaccaagtcctttaggaattgaacagctcgagggttcccaagcccacgacaattccaactcaaagtgatcatgacgaacggcgggtctggaactcagaacccgccaacaacttgttttttggacccacctccacttcatgtccatcttgctccatatcctcataactcaaatctccttcaactaacattattccttgatccaatttccccactatgcccacctacctcaataacacccttaccaccagcccttttccttttaggatccgaaaaatcaatataatcattgctattaatcacatgaatatcttcttcatcacaatttgaatttccctcccccattttctccctcaaatctcgtgccataactccacctccccctaatttaggtgccagcccacgattgccaagccactcaatcaactcctcagtaactgcctttttcccatcccctaacatcgacgaagttacggtcttcgggctcccctcccctctctcggacacccccccaacagcacctgaccggagccatttggctcctattttttcagaagaacgtctactattttcttttaagaacatcccatacggcttttgaattagatgagtaggtatatggaataactgaggacaaaatcgttccgaatggcccaagataccacatataaaacaaaaagtcgagagattctcatatttaaaattttcccaaaaccaacttctatccttctgataaattttcatcctcctccgaagaggtttttccacatcagttgttattatccgattccacaaatttacccattaagtttccgat

SEQ ID NO: 218353 - DNA, 1757 bp, Cannabis indica
tttaatttttgacaataataatacctagattatatttctgaaatttttgtaagtacctgatcgtattcaatttttattttttatttatttaaatatactaattaaaatataacacggataataacttgaaacttaacagtcaagtacctacagaaattttagaaatataacttaaatattattattgtaaaaaattaaatgtagacatttatctgcaactgaaaatcaaacttaattttagaccgtaaattactcttatgaaaataagtattaatatgcgattcgagatgctttgagtgttaataatccattaataaggagtggataagaaaaacaaaaatcatgctaaagaaaattataactaataataattatcattttttttatcaaaggcaagagtgagacaagaactacaacataacaattcaaatcatattattatgaaatgccattattatatcctattatttttaagtaagcatctctaaataaacacacacatatatacatatatgtatatatatataaatatatttaatacattaataaatgccttattccaaatggcttaactaaactagaaaattgatcacctcatgaccatgtttgaacttttcacaacataaaaacaacaacaaaagccggctatatatgaatatgtaaacacttttcatctcatgaatataatgccggctatgatttttttttatgttataataactcatttaacttaattacatacaaatgttatgtactatataaacataataatgcatcaatcataacacattcatatcaaatcatattatatcaaacatgatggagtttcacaaaacaattcttacccttgttctgtttttcataagattttcattgttgattggagctacttcaaacactaaggtaataaaaactcgagcttttatttgttttttctttttcggttgggttgcgccaggccaatgcaatagtgcaatgcataggcaacactcgaaattcctaatagcaagctacatacatatcagatattaaactgataagaacagatactacacttggtcttagctaaaagaccgagaaatgtataatttgagcttttatttaagtctttaaccgatcataaagttgttgaatattttattgtttcatttgcagcattacattgtttatgtgggtcatcattcccatcccaactcagaagctgtcattagagcaaaccatgagattcttgcttcagttgttggaaggcaaataaaccctttactatcatataaatatatgtatacatatatatgtatagatacaaactcaaatgcatactaaaacttgcctttttgaatcatttttttcagtgttgagaaagcacaagctttatcacttcaccattacagtaagagtttccaaggtttctcggccaagcttacacccgagcaggctcaactacttgcaggtataatatacataatcgaaactgcaattaagagaagaaaacagaaatgaaaaattcagcaatagcatggcaggaaaatgcattgatattaagaatgtagttgttcatttggtatggttttcggttttgattgtgtatgttgctgcagagaatgaggcagtggtttcggtttttgtgagcaagatgaagaagttggatacaacacattcatgggattttcttgctatagattctgtaaaccaatataaccacctatcaatggactcgaaatcaaacatcatcgttggtgttattgatggcggtatgt

SEQ ID NO: 218354 - DNA, 6860 bp, Cannabis indica
gtattttacaatcatttaataatttaatagcttcaaagtcctaagttcgaaccttgacctctccctttttccatctctccctcaccactaatcttagtggcttcagttttctacttatgttctgttaaaaactgaaaacaactcatagcatagaacaaagaacgctttcattccagccctttaacttaaatatttataattactctaatatttttgttatgaaatttgtaccaaaacaaagctctgttaaacaactaaatagtaaaaaaagaaagtaagtatattttattattcaatgcagttttcttcacttcatttcattttcatgtatgatgaaatgatactttgaaacgcaggaggagcatgaaagaaaatacaaaaacgacaaacaaaaatacaaaaacgacaacaaaaagtaacttgctctaattaatttctagtgttgttctaatagtcccttcccctggtcttgaaaggggcaggagaatcctcttcttcatcgttcttagccatgccaagtgtacttttcacagcatcagcagtcgattgggccatctgtttcattttctccccagtatcttgaagaattcctgcagctttgtccttcccttcatgggccatctctccagtccttgccgccgtatccgatgccttctctttcgtggtttgggccgcactcttcgtcttctctttcgctgcttgggccgtatctgcagtcttgtcctttgccgcttgggccgtatttgctgtcctttcttttgctgcttgggccgcacttgcggtcttttcctttgccgcttgggctgtatctgcggtcttgtccttaccagcttgggccttctcccctactgagcccatcatttggttcgccttctcctataaaagacaaattttccaaaaatacataaagtaactaaaaaaataaaaaaattaacttacaaccatattttttgtttctgttaaaatttttgataatatttccgataaggtaaaaagcccaaaacaaaacaaaaagtgtcatatttctaagaaaaagagtaaataaagctgtaaaataatttgatacgaacgactttacctcagtacggcctttagtttcagcagctctgcgagcctggtcttgggatgccattgtttcttttcgactgaaaaaagtgaattgtgagtttggcaatggagttaatatgaataatatttatggaactgtgttttgcttgtacttgatgagaatagaagtgtgtcaatgagggtaattatatagtgtttttctatagggtgagacatagacacgtgttttatttgctgacacctgtatgccacgtgtcatgctctcgtaacgaagggggcataacctcgggggcatgtgacatttggggaaaggttaactcaatgactcagcctatacgatgtcgccacgtggtgccatttagtataaactgacacgtggtcagcgcagatcgcttacacgcttctttaattgagtataatagaaccacatgcaaatgcaatatgtatataacatagctatctttttagtaagtattatgatagggcaaggtaagttgtttagagtacgaatccttatttgtttaataataataataatagtattttccttcaaaaaaaaaaaaaaagttgcttagagtactatcttggggtgttttttttcgcttaagggatctgttttatgagctaattttaggtattttgcttaccaagctcttaactaattaaaaattcatcgtgttagcaaaaaactaaaaattcctcagcatcaattccgccactatagtgttaccaaatagactggcttgtttaaaaaatacgggccgatatgaaaaaagtacaatatgaaaatactaaatttatacggactgtgctgggcacctaccatttaaaaatattgcatgagacgacacgaatcatatttttttgtaccacaatacgacacggtttgttctttgaaaaacacgaattaatacagatcaggctaacaagacacgcataaatttattgcaataatagattatattaggaattggtaaaagagcattgagaaacaatcattcaacttaatttgaacatcttaaaaagttaggcttcaatgtagcgttattatgtgtttattaaataatcattgtgacgtattttttttgttccatctttatgagaatcttcattacatgcgaccaatgaagaggctcaagccatttcttgtaatctttatatttgtcctttcaaattagcaagtaacaatttatttgagtatattttatttactgattataatttttaaaatttatttaagatatagaagtaattctgaagttgtcgtcaatttaatcagttttttttaggctggattagggtaaagatattttttagatttattaggttcttgttatgtgtcttttcaaatatatatcttcaatatataatgcaaaatggtaatactgcaacacatggtgagattgtgcactatagatggaaaacgagatttcttggttggaaaaaatttcctccttatttaataacctaagtttgattttagtaacaaaattagttattataattaaaaaaaaaaattaagatattttttaaggaggaaaaatcttaaccgccaaacacaatttatttaagatatttgcctctatatttttatttctatcaattttttctctttttattattctattgaaattttttcttaaattattctgctgaagttttatttgcatctaataaatttataaatgcacctcaaattaataatttttattttatgtacaatatctttaattatattaaattttctaatttctttctcttaatttatattcttagaaaaaatatcttttaaacaaaaataacttatattttaaatattataaacaaaaaaaaaaaaaaaaaaaaaatatttttaaaaaaattacgaaaataaaattcaaataaatattgaaattaacacaaaataatgtgagaaaaaaattaaaaaaaaaatattaagactaatttttaaaaattattttaagcataatcttttaaatattgaaatgtatttattattttatgagatgcatattgaatttttctattatagtgaaatatagaatttatattatgacacatgtgaccttgataagttgtaacacattaatagtaaatttaccatttactattaataatcagtttagagtatatagtgctgtaaaaatggattgtggtttttggcatacaacgaaattggcacgagttcggaggacaccaaaaaacatgagtttattaggcacaatatgatacgatgctatatatattggcatgacacgagccaaaaaatatgtgcttaagcacgaatgacacgacaacttaagtacgaatagactaactctaaaagcatagcacgagacaagcctgaaaaacacgacacaacacattaaaaatcctataatatgctaaaattataattaaacttaaataaacactaaataaataattttataattaaaactattagaaatatacaattaaaactatatatattaatttatttataaaatatgaaataaaaatttaattatttataagtaataatttaaattttaataatcttataattttttaaaatgattatgtgtaaaatattattgaaaaattatataaatataattgaagttataaaaaatacttatacgttaataattggctccgaatataaaaatggatcgacccgtttaagaaaaatacgaaaacacaaataaaacatgacataaattcgagtaaggcgaaaaaaattgagcctactctttaaaaataaaaatgtaagcataacacgaaaagacttatatctttcaattagacgatacaacacgacccgacccatattttacaaagtactcctatataatataagctgaacaaccaagacaacacaaattttatttgaaattgctttttctatatttaaatatatttcggtggataccgttaactttttgtcgacttctataaagaaataactacaaattagtcgacatgttataaaacattactacactagtatccccatgtcgacgactatgacattattcataaatgtaaatattttttttattttgtttttgaaaaaaaaataaataaaaaatatcattcatcaatgtaaaagtgatatttccgaaaaaagaaggaaaaaaaatcttagagaagaagaaaatatctgatatgggccttacagaaaaaaaataaaaaactaagcatatggatatgggtatataggtggggtaacataatattaataacgatcgacaaaactccactgtaaccccacaagtggttcaccatgaagactgacacgtgtcaggaatctatgccttgtctagtccaaaatccaaagataagatttccctgtgaaccattttgatttcatgcaagcctaaggggttgataataatttgatgattttatgtggctacaaatcaacatcaacccattataaatagatccacaactttcacatactttcagtacacttactaaattaataatccatcctacatttagaaccaacttttttgttttctttatcaaaaatggcaagtcaggatatctcaagcaaggctagcgaaatcagcagagatgttcaggtactaatatataatattaataataagtctttctttttttctaatttagtgttagtgatgatgatcataataattgatatagatataatatatatagttgacacattattattatatatatatatataggaaaagcagatgaggcaatgaagggtgcatcacgcgcagcccaaactgtgtcggacaatcaatagcagcccaaactgcggccaataacacacaaactgctgctcaatccaccaaagactctgctgcctctgctataggcgtcaaacatgaatctcctggcttcttacaacaggtataataatggcatgggctcattatgattattttacaaaattacatacaaatagcccacctggccagccaattagttttattttgatatatatatattattttgttaatttcagactggagatcaaatttcgagcatggctcaaggagcaaccaatgcagtgaagaacactcttggaatgggagatggcaaataaactaattaatcaagtgtcttggccttgcctagctatagcagctaggaggaaaggaaggaaggctttattatttgttgcatgaatttcctttttattaatatgcatgtgttgtttaaaagaatttgctttttattattggtatgtatttgactgtttggtttaatttccaagtgcatgcgcctatatttgcctaactttttaagctgcatggctcttactaactaaccccctcccaccctcattattaccttacaacacgcttgcacgtttttttttttttttaattaggatttttgccctgaactttgacatgtaccaaatcatgtgctctaaacttttaaagtcttaaaaatgttcattgaactattgagattgttggatttaaggatttttgtccaattttactaaaatctaacatggatgaaagttaaggggacatgatttagtacatgtcaaaattcaacgagcatgattttgtatatatcaaagtctgggattatggtttagtacataaacaatagtaaagggtatttttaacgaccttaaaaattcaggaagcatatttagtacttgtcaaagtttaagggtaaaaaactatttttttaaagaaaaaaaatacaaaagccaatagactaaatgctagctaaacaccttaacaccatctttaatatgataagcaaaaattaattaatatactatatacattcagcataaaaggtcaacaaatcacgtgtgtttcaacaaatgtaaaatttgatgaaaactaaacaaatccataatattcattaaatatttatagaaaatataataaaagcaaatacacaatattatcaaatttattagaatttttagtacatttgttaaatttgatataacgtttggcacactatggaagcaattttttacaagtgagttgtatttttgcacttcaacatgtgtaagtataaggtattgctttttattatatatagtgccatgggcaccttatagtatctaatagtatagtgctttttattttattacaaacttaattggaaaaatattattattattattaggaattgataaataaatattttatatatttttagcatacttgtgtttatttatagttttcttaatcaacatgtaatctatacttatttattttaatatgaggtataagtatcacataatatttgtccttttaattactaaaccaaataatttgagcacatttgaattaaggatattcacagagaaaaatacttaatatttaaagaatgccacatttaaatactgatttcttttacaagaaaaaaaatcataatctttactagctacctaaattatttatttaaataattaataaaatattatttgaattacaaaagtcactgaaattattgaggattgtcaattataacctttttctatttgtgttatttttttatatttaatttaagtatagatccttattttttaaaaaaaaatatttaatattttgaattatttgtgtaaaaaacatagttttattaatttgtatcacaattttccgtggataattaacgttaagtttctgtagacttctatatgggaaaaagtacaaattagtcgacatgtgactataacactattacacgggtattcccatgtcgacggctacaatattattcagcaattttttttttaatttcagaaaaaatatatatatgacattcacaaaatgtaaaacagatattat

SEQ ID NO: 218355 - DNA, 4921 bp, Cannabis indica
tatatattatattattataaataatataacagttattggtataattaagtattaaattttatatgacataagaaagtagcttttaaaaaaatatcattattaataaattacggaaaatgaaaaagtatagaataatactagtacttaataacaagactcattgaattaatattattaatttgtagttataataagtcaacctattacttttaattttcttccatattgattctatatattttcacttttgactacaatagttaatgtgtttacttaatttaattgttaattgaaagcttgactttataataacgacttaaattcaataattttttaaaaacataaatacttaatattaattaaggtcagattttaaattattgagtttgaacaaaaatatgtatatggtattattaatttatacttctaaatcttcctttaacaaataaatctaattttaaatttattaagacactaatagagttggtgcatgttaaaaaaaaattattggatctatatatttacgaactaaaaattttaagtgtatgccatgtaataattgaataaaaagcaagaaataaaaaaaaaaaatccactaattaactacgttattgtgtacgcaaatataaacgcatgcactaataaatttacgttaatcacttaaaaattacaaataataagaataataataataaaaaaaaactttattaaggtcaaaaaaggttaagcatacacggcatatataatattataaaaaaaaatgtatcatacatataaatattaatttaatatttaaaagcaaagatgaattataatggaaacccacgtatgcatatacatagataattaataatcttaattatttattttatttacttaatttaaatagagaacaaatcgttacatgactaacaaattggatcaatggaccccatcgatgtaattataaagattacaaaagaataatcatataataataaaaataaataaatttaatgatgatcgacaatatgtcatcttctaagtatatatatgctgtttaattaactatatatataatttaataaattaattaaatgagtgattaattaataccaccatgaccatatcaatggcgattgcccataatataggcttactaatggccatctcctggacttggtcctgaatctttgactcctccaaggatatcaacattagtaaacttgtgtccctcatcggggctcggtcccgactctttaattcctccaagagttttggcgttagtaaatttatgtcccccaccaccagagctcggtcctgagtttttgattcctccaagagtcttggcgttagtaaatttatgtcccccaccaccagaacttggtcccgagtttttgattcctccaagtgtcttggcattagtaaatttatgtcccccaccaccagagctcggtcccgaatttttgattcctccaagtgtctttgcattggtaaacttatgtcccgcgccaccagagcttggtcccgagtttttgattcctcctaaagtttttgtattagtaaacttatgtccctctccagggctcgggccgtctttaatacctccaaaagtattaacatcagtaaacttatgtccctctccagggctcgggccgtctttaatacctccaaaagtattaacatcagtaaacttatgtccctctccggggctcgggccggccttaattcctccaagtgtcttggcattagtaaacttatgtccctcaccaggactcggcccagaatccttgatacctccaagtgtcttggcattagtaaatttatgtccctccccgggacttggaccggccttgatacctccaagtgtcttagcatgagtaaacttatgtccttcaccaggactaggaccagaatctttgataccaccaagtgtccgaccatcaatgaccttattaccctcacctgggcttggcccagattgcttaatggacccaagataaagcccatcaaagaatccaacaatccctctacgaacaagatcatttttccagtaatacttcttctcattattcaagatccgaccctctgttccattaataacagaattattaatcaacagaaccaataaaaacaaactaacaaagcatttgggcactatagtattattattattattcataatcatgtttggaaagtgagaaaaagaaaacaatgagagagaaaaatgagaaaaccccagaaagaaaaaaagtttattattttatttttctcaagtgtttatgtctaaagagaagtgtagctatagagctatttatataagttttactatatataatacacaaggaattaatttgtggattttcaaaacgtgaagaaactaaatttcagagaaaggaaatatctaggatggttcatatgggagactacaaaatggaacaaattaattaaatggagtccaagtaagaagattcatatatagaaaaaattaatacaatatataattttgaatctatttatttaaataaatagaaaaaatgaaaagggatttgccggcggctttattgagagatgtttttgtataaatttgatatgtttgtgttggtgatgagtgaccaaagacaatgcgtaaatgagagtttgaattccaaattttagtaaaagagacggctataaaatgaggcattggtatagtgtcataacttgattatttttcttctttgaggccattatgactagtcaacaataatgagttgggttattactattggtctatcttggactcaatataggtcatatatgactttcttggttttgttatctcatatataaaaaaaggaattcattattactctcatctagagttgtaggttaggaatttcgaacccgttttataggcgcgacacgaaattaaaatgagctaggaggtacgagtacaatacaaaacatatgaatttggttatgatataaaaaattattcatattttaactttgcatacagattcatatttaagcctgacataaatgatttaagcttatgagttgggtaaggccttgcctttaaaatatgattccgacataatacaacctatatttttatatgagctagacctttatatttataacgaactatattaaactttactcttaaccactttatctctatatttaattattatatccctaacttttagcttccaccttttctagaatgctaaactttcaattaatataattttaagtattaattaattaaagtaaatttaaccaaattaagtattaatgaaaagttttagttaaaccaaattagtacactttaacaatgttaaagaggataatgagtgcttcaattataagaattttaaaatatctttgaatttttaagttgcttaagatgttgatgaattcgatgaagtcatacttagtttgttataaattgatatatggaattagaaagaaatataagtaaatgagagtagttactaatttaataatttttaattatatttagtacttttacttttgagttaccttgattttattctcacctaaatatggaaaaaatttgctaaatcattctaacatttaatttgacattgaaaaatttttggaagaaattttttacatttagttgaaaaaaaaagatggtattagaataagttattaaagttggtagtcaaatttataaatatatatatataaaaaagtttctgcaaaaaaaaaaaaaattaaaaaatttgttgattttgatttaaatattttgtttataaatatatttttgatatactataaagaaaatgtattttgatatttttaaacttaagtagctatataaaacataaaaataaaaaaaattcttttattatttttttttagatcaaaatctaatggtttaatattttaaaaatcaatatttattgttaaatttatttaataaccatcaataaataatgagaagtgttatatatataaatatatgagtatcgctatattaggcactagtagtatctaacattttttatatgtgatgttccacagttggtattcattaaaaaatattttattaaattataaaaaacttaaataataatttattttaccaataattatataatatcgataaaagtgttaaatatcattagtatcttttaataatttacaatatatatatatatatatatatttctaaacatatttgtttgttttgggtacattattgtaaacaagaaaattacctttttacttctattaaaaagaagagttggcttggccattattctaaaatatataatacttgtcaaatttgtttgccatgtgactagtcttgaaagctatacatcattataaaaatatctatacaaaatttacaatataaaaggaaatttttctttgaaggaaatgatggtgttaaatgactaacaaacaaaattgaaaatttttacacaaaataaaaataaaatgctaaacttaattttttgaatttccctttcatttgttttacattttctcattatttcaactcaaactagtactatagagggcttatttattataggaatgacttcaattgtgagctcccaaagaagactttgtgtaccctttcaaacttctcatccatgggttacctcaaaactaaggaatttaggtccaattaaaaatatgagcaaaatgatttggtatacttttgaaaaaatatttgaaaagttaaataccatgttttttttattgaaaaaattacaactaaaattttgaaaaaaaattacaaaggtgaacattattctaatcaacccaacctcctttaaatggaaggggattcacctatttataggactgaacaattacaatacgtggttattatgatagacattacaaaaaggaattttgattttatatacttaaaaaattaaaaaaaattattattaaaccaaaaccttttaaacta

SEQ ID NO: 218356 - DNA, 5256 bp, Cannabis indica
tctctctctctctctctctctctcttgtttttttaaataatagtaatcagtttgatatgaaggggttgaagttttaattaggcaatgccttagtttgcacatcaaggtgggagtttgtagtctttgaaaacaagaaaattattgaaaacattgcgagttttgaatatgtaaattcatatactgacaagtgctatggtttagaaactttgatacacaggttgtttttccctctatatcatgatattcgcaatttgttaattgcttaaagataaaatacttatgctcaagttgatatgatgttgctgatgcataggattttgatgtacgggagtttgcgatttctttggctgggaggttatcagaaaagaatcctgcatatgctcttccagcacttcgacgtcatcttattcagttgttgacacacttggagaagaggtaatgcagaagagtcacaaatattgctgttctttttttcttttttcttacatacagttgtaaaattcattatttgtgcatttcaaggaaaaaatcattattgtgcagtaggattactttagtcccatatctaggctgaaaagcttcaaaatgctgacttttttgtttgctgcctcagcagtgcagatagcaaatgtagagaagaaagtgcaaagttactgggttgcttgatacgcaattgtgaacggctaatacgtccttatatagctcctatacacaaggttttactactcattggttgtcatacttacctagtctgtagtttaaatttcatttcttcatatccatgtatcttttgggctaaatatctgtgcaggcactcgtggcaagacttgttgagggtaatggtgtcaataccaacaatgccattattagtggagttcttgtgactgttggcgatcttgcaagagtggtgagtgtagtgttaatttatttgaatttgcaaaattcccactatgttttctaatggtttatttgattttttttgagtttcttaggtgtagtgttagttttatgcattgtagtacaaaatatgttgttcatattttcttttaatgaattaagcacacattttagtcggatttatggaaaaatttcactttgttctctaatggttcattttagttctgtgggacctcctgtgcatattttgacattttacacgttttagtacaaaatatgaagcttgcaatttcttttaattaataaacatgactttttcattctggtttatgcaaaatttccattatgatccctaatgttttatttgaatttgttgctgtttctgattagggcggtttcgagatgagacaatacatgtctgaacttatgcctttaattgttgaagctttactggatggagcagctgtcacaaaacgtgaagtggctgttactactcttggtcaagttgtacagagcactgggtacgtgatagtcttatgttctgtattgattgctttgcctattattgactttctagaatgagtataagacctgtccatggtaaactcttttaatgtgtacaggtatgttataactccttataatgagtatccacagttactaggcttacttttgaagttgctgaatggtgagttagcctggtccactagacgagaagtcttaaaggtaaccacttatgagctagatttctaattatttgttcagatattttttattttaaaaaggagagaagcaggggataaaaaaatagttagttaatgatctatacttactatgagaacattacttttgggattcttaaggttcttggaatcatgggagctctagatcctcatcttcataaaaaaaatcaacttagcctgccagggttgcatggagaagtggcccgtgctgccagtgattcaggccaacatcttcaggcaatagatgacctgcctgtggacctgtggccatcctttgctacatctgaagattactattctacggtagtacatcagtctggtagatgattttttttcatcttttgcatgctatggcttcctctgaatatgtcactgtaagacatgtgtttgatttttgaatttgctgtatctgtttgttaaattgtatattttgattccaggttgcgattaattctctaatgcgaatacttagggatccttctctttctagctaccacctaaaggtggttggatctctaatgttcatatttaaggtacattataatatggcttgtgtttgtgtgctgtacttattactacttactactatcattattattattttcgttttcttaatgtattcgtttcttctttgcgagattagtcaatggggctcggttgcgtgccatacttacaaaaggtctgtcatagattgtatgacggtttgaatctttttcttttttgaattacatttgctggtttgaatcttattttctttgctgcataatttcatttccatttttagtgcagattggaatgctattttaggttgaattttttcgtttggttgattgaaaagtgacataaaatttgattgattaacctgaaaaatacaagattaatggtccaaaaaaaaaatacaggactaatggggtttgcacaccaaaaccaaagtgtggcatagcaccccgaaggaaaaacaaagcagagacagtaaactacaacaaaattttcagtctcttgctaaatcagaactcaaaatgcccgtaatttctttgatatcatgtatcctgtttatgattatgtccttggaaaagtcattgaatatcctgactaaatattctttcaccacctctcattctaattgagttactgttgtcataatgaatccatccaggggtttatattcatcaacactgcattttctatttcatcttcagaaggtctctcaagccattttgctagaattttaggaatgccttgacaaattcaatccttactgattaggtgatgtaaaacatatcctactacttcatctactaaaatcaccgatgccttttttattctagatttctgattcattgctttcctagcatttattatgctatggaagagcctagtatttgcttccaccttttttggtccatttaaacgtagacttcaatgtgtaagttccctttcctcttcaagagagagttgatgccattcacatttcgagctttcacttttttcgttaagtttgcatattccatcttccagtagactcaattgaatgtcattgcaatgacaaagcacatttccatattgtttagattgtatttctttttattcatgttgctttgtttcttttagtatatattaatagaagtgcaagcttaattatctttttaattaataagttcattacgacattggagtaagtttttggtgatttcttttccctcttaaactagattcattgcctgacccttacaatatttgaggaccaataaattatagcaattgctatataggtgccctggatgtacttggacctcaaaccttgttggatcaagccattgtttttcagtctaatgcaaatattatcctttggagaacttcgtatcaattgatgcaatcaattttcttatgagcctttttccttcatgtaggttttgcctgatctctttcatactgtacgtacatgcgatgatgccttaaaggatttgattacatggaagcttggaactctggtgtctattgttcggcaggtacattttgatgtttattttccacaggtagtgatagttgagtttttttggagatcacgaatgagacttggttcttttgcagcacatacgaaaatatctgccggagttgctctctctgatttcagaattatggtcgtcattcagttttcctgctgctaaccgtccttcccttggctatccagtaagttttcagttctttcagtcccatccgcagatcatgttttatttaagccttttcatctgttggaacttctgctcatgtatgcatatatttttttattttcataggttctgcatttagtggagcagctttgcttggctcttaatgatgagttccgaacatatcttcctattatccttccatgttgtatccaagttttaagtgatgcagaacgttataatgattacacctatgttcttgacatcctccacactcttgaagtctttggtggttagtactctcattttgtatattttatgcactaactttttttttttttttttttgaataaccttattttatgctcaactttaattgtgaagcaagtaatgctgtttttatgaattacgtgtaatgacttcgagtaaggccctgtaaaaaaaatttaatttgagaggaatgacttcaaaatggagtcagataatatatatttatttttttttaaaaacagatattaaacattattaatatttgaaaaattagacaggtatgatattatatcaaacttgtaatttacaacatgaaattccaatttttagctaaatcaacaagaaataaatatcaaaatattgttggaaatattgatactataattttatgaaaatatcgaagattttttcgatactgatggaaattaattttctcttttatgaatatcacacatatttctatatatctagaaatatgaaatttaatacaaaatcaataaaatcggataattataaccacaattgtaatgaatattttaatcataaagcttttatatttatttattattttgagtcttatttatgtttttatgactggatgataaaacataggatttcctctgccataagtgagactcccaaataaagtttgggaggaggttaatctaagacaagtgaccttaatagaaaaaaaaaaggaaagaaaagaataattataacaacacatacaatataataaggaggaggtttcaattgttacatcaaatattgattttgactatgtatcgtcaacaaagttagttcatctattggttattgatctcgaatatgtgttattgataaaatattcttcatatatgaagttgttggttattttcaagttgtctctaaaacatgtaacttgaagatatgcagatgaaattggattttagatatgatgtataaaccatgaatacccatattttagtattttacactattctcggactaagtgattaattattcaaaaattaatttttgaaggggtgaaagtttaatttttataaaataatagagttttattgtaaatattataattaaacggtttaactgttaaaaaaattataataaagacttaaatataaaaattaaattattaatattaattgctaaaaggggtcatattagatatttaaatt

SEQ ID NO: 218357 - DNA, 1709 bp, Cannabis indica
tgtcaattaagtttggggagtgaacttattcttttagttagtcttagtgtttagtttcttgttagagatttggggatttgtatgtttgatttagttatttaccttccatatatggtggtattttacttgaaaatgactatgactatgatggacgattgtgtctcgatttgtcagtctattggccttgttgccgtttgctcgagatttgtaatagactttgtcctttggtttttatttgaatgtaaaacttagatctttccctaaaaaaattattatatttggttattttactattttttgtaaaaaaaaaatacttacttaaggtgtgtttggtaatacttttttaattagttatctgtttttttaattagaaaagtgaaaatattttctaaaaacatgttctatcaaattgttttcacgtacttttaaattttttaattgagaatcaaaatttgaacattttgaaaacaaaaaaaaaatattttcaaaatgtttttaaagaagtttttaagatgtgtttggtaacactttttttaattagttttctatttttttaattaaaaaagtgaaaatattttttaaaaatatgtttataaaattgctttcactcttaaattttttaagtgagaacaaaaaattctcatatatattttttttcctgttacccttttctccattgtgcatttactttattctcttcccgcttaatttatagggttacacaaagtgcaaattctcataaaatcatgaaagcttactgtaagctctcattgaaacagtgagatcttcattttgtttgagttctttatttctatccctaattatggaatccaaatgtttaatgttctgtatttttttatgatgtggctgaatctagtaattactaattaccttcatccctctctatatctacatactagtctctcatgtgaatgtatgctaaccttcattcactcatgtgtatactaacctctgcatatatatctgcatactagtctcatgtgtatgtaataacacaatgaaagagaagaaaatactcattgataatttgcctgagtcatttcttcgttgaaattcaaggcagttaggattgccaacaacgagagtttcatttatttgagcttctgatgtatgaaaataataaaattgactctttttttcttcttagatgttttttaacactgctcgttactatcgtgcgtattatggttacaagacggtaagctattttgtgctgtcttttttttttttcttaaattaagcatgtagataactgagctcaatttaattatgtatatttttttccaacgctgtctggctttctaccttacaggatcacgtgctgtctgttgtgcaagaaccaatattaaaccagcaataaaaccagagaaagaacgctgagacaagaattcaatgagcaatcttaatgaacatgacattaaagaaagacaggaagaaagttaaggagaattgaaccaagcaagggaaaattagcaacacaagaacttagctgaataattggcaaactttattgatgaataattggccaatgataagatcacaaccagaatcgattacaatcaagccttgcaaatagtacaatgtaattacaaattgatctcacatgggggaagctatttcaagaataggcaatccccttttacatccctccattcacacaaaagctaggcttaattctaggtgatctt

SEQ ID NO: 218358 - DNA, 4962 bp, Cannabis indica
ataattatattaatatttttcaagcttgaataatttttctgccaaacaagcatggcgtctgttaaaattgatatagcattgcattagatggtatttactgcttttttgcttcataaatgcgaacctaatacttgggaaacataactagtatccagttaacataaagtgtaactgctttagaatcagttaatcctacaatgtttaatagatttatgtcaacaataatcctcactgcaaggtttcattatttcatcgcatggtttgattttctagttctaacttctaataagttccaagcattaggtggttctatgagtacttgatgtaatgattttgaaggtttatatcttttcctgatttacataggaatcggcttaatcctacgatgagaactattatcttctacaaattttgtactcttttttcatctaaataatatcatcccatgttttcataggaagtgcatcttatggtgaagtccggtctacatcctggcactttgaagggtgtattatttcaaattttgcttgaacaaggaaacagtggattgaaagtttctgacatggcaaagtctttgcgagtaagttactcaaatgccaactttttttcttgggaggaagataaaagcaaagtgaacatgctctttctccgccattcatctttaatcaattatattaaatacgaaaacattcaacttatatcagcaacggattttgttttgtcttgaagattgtcgatttaaaattggccaccactactgaggaattggagtgtttaatatgttcaatgttatcaagtgacataactttatttgaaaagatctcaccgagtacatatcgtctacggataaactctatccttaagaaggtagaagaacttcagtcagataccgaagactctggagcagttgatgatggctccagtgagagtgatgcatatagtagtgatggagactcgagatgtgatgcagaagattccactcttatagaagtgatgaaattgaacaaaccgaaaaatcgaaatggcttatcaaacaattacactgaaattgatgagagccatcctggtgagtcatggctattaggactgatggaaagtgaatattcagatctaagcattgaagaaaagttgaatgtcatggtagctttaattgatctgcttcgtgcaggattcagcatcagaatggaggtaatcatttatcttcttgcatcgttatcccacgaataacatgcaatgattgttatgaattatgattaaaagtaatttggcaatgaaaacttagttgcttcgtaggttttccaattatccgagtaggattgttttggttaagttctttaaattaattagttctcaaattggactcataattttaaatcagcttagccattactagcagatggaggaaaaacagctgatttgtactatttctctccatcattttgaataagcagttgctcaggcaggaaaccaattatcactttttccttttttgttaatataattaaaaacaggaacctccagaaactatagctgaatgtgttcctagcacctaccattctacttcgggagcaaagattaagaggtcatcagctaagcatcaaaacctgcttggttcatcttggggacatcttggacaattacagggcataaaagaagcttatgcatactggaactgtcatgcaatagattcattttcatcaatctcaaagctttgcgagagaccctcttataaggaaaatgttgcaaaacatacagaagtgtgggttggtctacatccaatgcagtctgtatttttggggtccgatcgtaggtacaatagatactggctattcttaggcccctgtaatgcaaatgatccaggccataggaggatttatttcgaatcttttaaggatggtcattgggaggtgattgacacaaaagaggtgatatttctagctcttttttttttttcgtgtgtgtgcggcttcattttcccatccacacacatacaaaaaaataaaattgattttatagattcacacatatttacatatttgaaatctttcatggttgtatctacatggattaatgtaattgatcaataatttttgtatctcttcatatggctatcaagtgcaggctttgtgtgccttgttagaagttttggatgacagaggtaaacgagaggctctactcattgaatctttagaaaaacggcaagcatgtctgtgtgaaacaatgtctagtagaatggtaaatagtaatgggagtggacatttgacacattttgatcaatctgacctgactatcatccgggaagacagttattctccattatctgatgtagataacaatctgaccttgactgatgtcatgtgtgattctttgccttcatctggggccatagttattgaagttggaaataagggagaagaacaaaaacaaaagtggatccgtcttcaagcatttgattcatggacctggagtgaattctacttgtgtcttaatgctgtaaaacatggtaaaaggtcatattttgattcacttactagatgtgaatgctgtcatgatctattttggagagacgagaagcactgcagagtatgccataccacatttgaagttgattttgatcaagaagagagatacgctatccatttagctacatgtagggatgatgaagttactaatgtgtttccaaaagtcctctcatcgcagctccagtcacttaaagctgcaatttatgcaattgaggtagagatctcatctcttattttgctttttatatgctctgtcatgtactttttttatatggggttaagttgtggatggtacaatgtgccagttcatcatgaccctcgtttgatttggcctatagaaattaatatttccatttttatgcaaggttgcttatgaagtagagaggtgcttgcaaaactttgtgatttgttgtaataatatcatatttttcattacatcctggcaaagaatttacagttctatcagaacacctttaatttttcatttttttaagtccttaatcattatagccttggccttattatatgatttttttaaagccgtgatgatgtccagtgatttctcactagagcttttcgcgactttctttggaaatgtttgtcaatggttttttttttattttattttttatttttttgccattgtatgggaaaattgctcaattctagcaacaagtgaaacttaattttgcttatagcttatatagaagcgaagcttggacatcactaacacgatgcccaatagagatatacattacgaaaactggatggtatcattggaatagtagtgattgggttcatgatacgaaatgacttgtgttagttatatatggatttcatgctttttgcctatgttccttaaaatattatcatttaatgggggtgggttgggcatactttttttttattttaatgtttcttcttccccattcatttgtgcagtctgttatgccagaagacgctttaattggtgcttggacaaaatctgctcacaagttgtgggtcaaacgactcagacgcacctcatctttgcaagagcttatgcaggtcacaaccctttagtttatctattcattgttatgttttttccgcatagaaaatttgatttgaatatattttcataacacaaacactttgatgaaaagctttctcagtatgcatgcttttttctttccgaatcactcagtatgcatgagttaataaggtctgtttgaaaatttctagtttttaagctgcacatttttattctttttattctcatcttgcaggttctcacagattttatcggtgccatcaatgaaagctggttgagtcaatgcaatgttttaccaggttcttatgatggtgaagaattgattgcatgctttacagcattgccacaaaccacatctgcagttgcactctggttgtcgaaattagatgccttagttagtccgtacttggaaagaggtcattccggaaaaataggaagaagaatttgtcaatagaaaaggtattgtctattggttcagtgatactatctctagtatgaatcatagacttattgctcgcttgcgagtgtttctgctatcttgctcaaatactttttagttgtctgcccttataactgtcttccttgatgattagcggttcgttgatcagctaaagatctgcccttataaactaggattcggtttagatatatcatgtgaaaatatcttttgaagacttgttaaataatagaacaaaaatgtccattattatcagaacaaaaatgtttattatcttaacattagttctcaaacctgaaatgctttcttatgtgttagaagtaagataatcatggtctgaatctaccttctgtaatgatctcatgtaggtatgaagctttgaatccacagtcagccgtggaggacaggagcttactctattttgtgttaggaaacgtccggcttttgaaatccaagaagaatcgagctattgaatggttagatgtacagaatttaggacacttaaaaagactattttatggcatttatcaacagccctccttttctttgggtaagtttactcttttgcgagctctgatcagatttaatgtctgtctgagctcatattacatacattctgtgtatgtaggaaataaattttgtccagtgtacagtctaaaggaagaaaaaggtttctgagctttgtcgatttcattttcagcacatctcaccttctcaatttgaaaataaatataatgtatttacttatattatattcttatttttaccattaaaaaaacagtttgttctctattgcaaattggtgttgttgggattagttcatcaacatttgaaatgttacctttggtttctgctttcttgtcttgtgaattgatttaaactatggcagttaggcatatctgaggagtatggcttggcttaacaaaagaaaaaacaaaggggaactttac

SEQ ID NO: 218359 - DNA, 3915 bp, Cannabis indica
cgtctctctctctctctctctctctctctctctctctctaactagtacattgaagacaaaattacatatatgataaacctcagctctaccaattcagtttttacagttatagggcaagacaaaatatgaataacaactatcattttgttttgtgcacacatgtcctatccatattccaatcccaccctaaagtcctacactactactacaattcaataaaaggaaagctttacacatcttcagtgttctgatcatggtcattgtctccttcataatactcgtcctcccgctggatttgcttgtcccgggtttgttctgataacaagtcattttcaccctgttagtacaaaagggtgtgtgtgctgctgtgattttttgaatttttatttatttattttcacttacgatccactcgctcgtctggattctgctcatcttcatcaaaatcagggatatagaagtccggaggaacctgcaaaatttatcatgatgaaccatcttactaaagcttgcgtgaagaatttatcgaccatgaaccatcttacttgctactcaatgcttacctcttgcatttgtacactaggagcatgttgaatgtgacgaagattctccaacacctgcactttgattgtactaagatacgatttcgtgtttgcattatcctgcccgcaaaagaaaagtaaatatagtaaggacagtatctctatgtaatgtaccagaaaaaatataacaacctcaataacatagaagttctaaagtgacatactattatatgcccatgtggaatcttcaatgaatattctggcccaaaatattcaatgtaatcgttgtcggggatctctgcaaaaagataaaattataccaaaaagaaaagaaaaaacttttataaattgaatagagcagaacccaacattttttctcctatcaaaaagtaaaaagagaaaaaagaaacttgacataccgtttggaagctctgtgtctagaagaactccagtttcaacagtccaacaccgagcaacattctcttttgtgtatccgccacctccagtaacctgcacagataccatattcttgtgagccgtgagccaaatgatggcaatgacaactactgacccacccagtctacaataacaaagaataggcaccacataccagtaagggcaagttgaatttcttcacaaacttaacacactcagcatgacctgtaagaagcatcaagagacatcacttaatatcgttccaacatgcaaactgcacagaaacttaaaaataataaaatcggagaagaaagttttgtcaagaaatgatattcaccatcaatggaaagattgaagcagcctaagcgatctccagctagtgaatctgctccacactggaggactatgacacctggtcgatacgtttcaacaaccttggaaataatctacaaaattggaatttcggaaaatatatacatataaaagcaaacaattaggcttattatagttgacatcacacacaaacaacaatatacatcaacagtaatcttgagcttaggtgattcgaacagacttacagttttgaaaagacgagtgaagctattgtcatctattccatccttgagtggaacattaatggcataaaacttgccttccctctctcctgaatccttttaagaagcaaagaacaagtttccacgacatcacttggatatttcaataacaatggaaagggaagttatctagacataacctggacaaagccagctatcagcagtacaaaggataagagttcatcttggttacaaaaagaatagtgaaactacaataactacatccaaagattccagtctcttagtaaatcagaaaaagcaaaattgctgaattatttggatttaaagatccctaaagctacaacccccgaaacaggtgaaacaggtgcatcaattctcttttaatgacctgaaaagtctggttagcagattggtcataatagttctaattgatgagtaacaacatagatttccaagaaagccaactgcatgttttatctgtcgaggtagtatatataagagcaattttgttttagaaatagaatatatatgatatccttcattgcagactaccttagcaatacaaatacatgacatattagaatgaagttacaagtgtttatctactgcaataataatcataacaaggctaaaaatataaaagaaactttaattcaccttgacatcaccggttccaggaaaaaacttgtctccaaacttgtgaaaactaacagtcatcaccctgccatgttaaactatgaagattcgattagagtcccaagccagtgtaacagctacaataaaaatttgatcccctacaatttcactggtattaaaatttgcacatactaatgcctaatactcttattcaactgagtgcgagctgattgaaattttttctttacgatcaacaccattgcttctatcgcccttactgtccaacttctaaacatgaatattaaattcaaagaatacctacctatcagtgaaataaaaggcttcttcaacaccatcaccgtgatgcacatcgatatcaatatacaaaacacgagcatgatgttttaaaagctccaagattcccaagaccaggtcatttatatagcaaaacccagatgcttcgcacttcttggcatggtgtaggccaccagcccaatttatagcaatgtcacagagttggttgttcaacctgcgagcagcatctgcttgcaaaaatgttattaacttcaaaggagaaaacagctgaaacaaacactaacaacaaagaccagtccagcataatctacttacctattgttccaccagcataaatttgacagaactcaaataaattttcaaagactggacaatcttctccaagattatctaccaaaagagaacaataaattaattagaatagttagagagaaaaatcacagcatttaaaatgaatagagttggctcaaatcatggtcaaatttatccaaaagagtaacatgaaatcaaaatttgctttctgattgtgaacacataaaagtgagattggaatatgataataagttcataaagagagacatctacatacgtacatagtgaacaagcaagtaatcaaaagatatcatatcactaagattgtaactatatcatatgatatcagtaaagaaaaacacttcagttgggagttgagggtagtgtgattgtacatacatttgactagttcatttgagaatagacgctgggtgtcgggggtgatacggtgaaggaaatcaacataatccgctgtatggaattgagcaagctcaactggatatgccttgtgaggccgctgcatcatcatcatcatcatacatacatacatacatacatagaagaaaaaaagaaaagaaaagaaaaaaggaaagaaattgcagtgcatacatagatttccatcttcttgtgaagatcataggagagaaccaggtgatgagtcatacacaaccgatgaggtttcatcggatggttcggcccaaagtaaacacttcccacatctcctgcaacaatcaaacaatcaatcaatcaatctccattaaaacaaaactgaaaagaaattgaaaaccttttctttgttttcaagaaaatgaagaagaaagcaaacaccaaccatcatagaagtaagagattctgtccttggatttcatccttgctttctttctttcttgctttgcttatacaaaacaaacaaacaaagaaagaaagaagacgaagatgaaaccagaccagactcacccaatcgggtcaaccctaaaccgaacccggatccgaaccgattaatatacacagacggacttatatcctttttgggccagcccagcccagcccaatcgcatcttcaattcttcttcatattccaattttctctctctctctct

SEQ ID NO: 218360 - DNA, 3570 bp, Cannabis indica
tttttgttttttcccttttttgtttcatgcatgtttgtcaccgatcagttagccatatacgtaagtaggtagcatatactttcttataattaattgaatcgaaaaagtgtgacaagaaaatgacacactcactttcctctccaacttcctagcttcccaaatgcccatatcttaagacagaaattaaaaagataataataaataaaagaaattaatgtgtggcagtgggagtggcaatgacacaggcaaacaaaaaaaaaataataaattttagaatattattaaaagacattatggtgcctattgatattggtgcattaagtatcatcatataattaaacaaaataatttttaaataatatcactaactaatattaatatactacttataaaaataggaaatttacaaaaatactaaaatttggagtcacttttacaaaaatactgtcacacgaaaaagtttacaaaaatacagtatttttataaaacactagtaaaacacaaaatagaacaactcaaaacactagtagacaactaaaaaacaccagtaaaacaccagtgaaaatttaacacagtatactgcagtatcaaatttataaaaaaatatagtaaaaaaaataaaaaataccgcctaacgatatttttataaaaaaataacaaaaattagtataccatataaattttactaaatattaaacacaccgatagccaacaacaacactctaaattttattagtaaagaaaaagaagttgtacgaaaatgtaggggtggggcccagcggaggatcgtgatatttggttaaagggaaataaccacgtagttgagtatgatgtctatacgcgtttccgcggataaactaccggctttgccttttccttgtttgttttataaaataatgtagagaggattgtaggcagttattaactgtcaagttatggatcaaccgtgtttttattttcttatttttaattttgatttctgtgacgttatgctcgaaagttgtcgcttatctatgtgacacgtaagcctctccaagtgttcttcacaagcaaacctgaaccttccaacttgtttctccaactatcaattacatcacttccacgtctctaattagtcttttggtgagggactggctttaactataatgctaatctttttcatggaattatttctactaaaaaactttcttataaaaatgtcttatcttttttattattcttacatttttattgttaatttgtattaaattttcaaaaatactaatttcaaaattataaaagtactgtattttaataaaatagaaaactaaaacaactaaaacaactaaaaaataattatagaacaacttaacaaacaacaaaaaaacaaatatcaaacaataaaaaaacaactataaagcaattgaaaaataaaaaaaacattgttctcattgcaatatgtaaaatattatcaactcctcatgtttttgtattaggtaattctttttttacttaattttgacagcttgatttatctttttgtagtactacattatttttttcatgaaatttattattacaacttcatattttcaacttttttttctcttcttttttaagttaatgacagttaaaataaaaatttattttttagaccttaaataaataattacattaataataaaaaataatataatcatatgattttaaaatagggtaatataatataacaggtaatatatatgtgagaaaattacaactaaatgtgctgaatcaaatcaactacacttttaacaatcaaacaattagcaatgacaaaattaacaaattgcacacatcagatgaaaaacagggatgcatacagtaaggtaaaacctgaaaacaaataaaggcaaaaaataaagaaatacaacaccaagatacatactagttcaagtccgatggatcgatgtgatctatgactttactctagttctgaaacacccaaatgttctttattgattgagcaggaataggtacgatacattcgagattgattctctgatgaattctctcaaagtgtttcaactctcatactcttacccaagaatcttctttgtcaacctcaatctctcttttctctatacctctctctctctctacttctaaagctttctctctctaactctcaatctcaatttgatcgttcttctgatcgatcctctgaaatgataaatgttgggggtatttataggcttaggattaagatctttaagtcggtgcctgcaagaattaagattattaagttagttaagaaataactaacactattataaaaatagtttttctcgacatttttaaacagtcgtttaaagtattttcgtcgatttctataactgtcgcctatacgaccgtcacaaaacaggcagaataggcgacagttcaaaaaaatgtgaaattcttaacagtttaaaatcgtgtcctatactataggcgacagtataaaccttaaaccctaaatcgtcgcctatagtatagggcacaattttaaaccatcgcctataccctgttataggcgacggttttaagtcatgccttacagtattggttacatttttaattttaaaaagttttttcagcgaaaatttttttcagtcgttacattggaaaaatagggaaaaaaatgtagattttttgtcactttttcccctacattaatttgaaatttttttacaaatctctatagtcaaaataattaaaacaaatgctaatatcatctaaatttatttaaaattctgtatagtgacaatatttaaactaaaactaatatcatctaaatatttttaaaaatctagatagtaccagtaattaagttagcgctaataatcatctaaatatatttacaaatctatataataaatcgagatatatacacactgattaacaaggcaactgtcgctccgcttcggctttcacataaagaatctaccgatcatgcgtaacatttatatcatcatttgtttacgaagtggagaacatatcctgtaaaataaatgtatatattaattagtaaagactaaatattatcatatactatttaataaaaaataatatttattataatacttattaattattttagcggttgtgtcaacacatgtattggatcttctttggtcatgaaacttttaatgaatttcatgacgcactatccacattgtttattgtcaggttgttcaggacatataggagttatctactggataggtctatcaggctgtcctatcatttgattgtatatggtgaacgatctacacaaaaagtaaagttaacatacataaatttataaatataaaatacgcttacatgttgggatgttggatattgaacttacgtggaaatgatgaatttcaaatcattcggtgcattgccattgcctgaatccaagtacgccatcgtcttcatacttagtcggatgagtacaagcatccagtgaaatattttgcacaaacaaatgtgtgtaacactattaatacataataataaatattatgaagagttataaatactaaaattatattcattttaaatctacatataccgattgttgta

SEQ ID NO: 218361 - DNA, 7693 bp, Cannabis indica
agttttttctggtttgcaattatattgttgcgttgggtttgggtttggttggctctaactattctggtaattggtacattgtccaattatgttgctcctttattggattgggggtagtttttaaatgcgaagataggggtgaagatatatgttgctttctttaattagcataatctaaatatttatttgctagaccctcctcaattgcttgtgcagtggaaaaagtcagtttatggattgctttttttttttaatcagcttttaattttcattttggtttaggatgaggaagatgtgaaggctattgctcggttatttgctgacatgggtgattcatatgttgaactgattgcaacaggtacctgattatttttttaattttgttttatatttttattcactatctgaaggtggctagcaagactcattatgtaatattataactgtgtgctctgatctcaggttctgatgaatcaatgttgattgtgcatgcattactggaagttgcttcacaccctgagtatgatattgcttcaatgactttcaatttttggcacagtcttcaggtgaacttgaccaaaaggtaagatttctgagactgctcattcgactgtcatatgcttaaaacagaatactaatatacctttccaactttgtagggattcatatgtttcatttggtaatgagtcatccattgaagctgagagaaatagaaggctgcaggttttccgtccagcttacgagtcccttgtatctctagtgagtctccttttttatgtcatcatctttaagtaatactctaatcatgtcacaagcttagccttcagcttctgcaatttgtaaatcattattgagatagtctgaaggtaatgatatgcattgctagcctctctttttccacaatgtctttagcatgtcctcttatatttaacaatggtggttttagcattaggctggatatgattatactcttttctacatttatttttttcgataagaaatgaagctactaatgttgatagagttgggaataaagtatcgcaaaggccatgaattacaaacaaacctcaagtcttcgtcaaatctgaaaagaataaacctttgagtttgtttacattcaccagtcacaaagctactttaaaacttagttattccataccaaaatctccttcagtaatattaaaagttcttctatttctttccaaccaatttaaccaaaaaattgtccaacctagattgtcccttctcccttctcttgctaccatgttcacaagccaaattaaaaacatctgggcactctttgattgtagtcttaaatatccagaaatgttatttgttgttttattgttaaagagaaggcaatttagttttgtctgaagcaacctcttgctttagtatttcaaaattaaaaatagtaacgcctttatcaattgaaaaaatatatttaggatttaagttcgtcagttgtcttaaaaataatggattaaattcctgcattgaccttaaatagcagatgattcaatacatgctcatgtcctgttttattttgtttatgtaaacaaccattatcaactataatttttctgtataggtaagcttccgagttcaatatcctcaagatgatcaggatctttcatatgaagacctcaaggaattcaaacaaacaagatatggtaatttctagaattttagtacatgtggttttattgttatttttttcattatgcttttattttttgtttttgtttgtgtagtgtgtaaaaaagcaactgaattcatcataggatactgctccttttctgtgtacatttcaacattcaaactggaatttaagttttgattttggatggtagatagatattaactctgtaattttcaagactaaagttttgttattaatgtcgtctacaaacttaagtttgtttacacatatatggctcttcttccaaagctgtgaatgactctgaactcttggatgttagccctttcttgggttttattctttctaatatatcattggctataagttataaaaagggagagacgaaaggaaatcagataaatgattgaaatttaagatcacagaagttaatggatgtgaaaagaaatgattgtgctactaaatattgacataataactacatattacacatatatacttgatttatatatatgtatcgatttgagatttgccaggtttttctatatgatgcagtgttctgtttcaattgatatcatagattttatacttgttttcaaatggctttgtaaagtttgcatcttttctctctctctctctccccccatattattctttttaacgagtgtctctctttgtatacatttctaactctaagtaaactacaatgttgccagccgtggcagatgtcttaattgatgcagcatcagttctaggtggtgatccaacacttaaaattctgtacacgaagctatttgaggtttgtatcatttgtttgttatgatcctcctttttatacaattgtttaatattattattttctttaaggcggtaggcagatatcagaatgctgaacacagtgaatggcgtccagcagaggctgctttattttgcatccgtgctatttcaaattacgtatcagttgttgaagctgaagtaatgccacaggtatttttaattttaaatgtcttgtgtattggtttcatccaggaaaagaaaaaccctgtttgcctaataacaaggtcaaagctacttaaaattcgttgtcattaaaatatatgatcttattactagtgcaattatttgttcttgataagtttccttcttccgtttctgattaactacaataatatatttgtatgtttataaaattgttacttctgtatgaatttccctgctgtatacttgccttttgcatcctaattgaggaactttttggcctacgagtcattatatagtttttgatgtggtcacgagaaggccaaatttatatatgaagatttcaatgtgatcaagccttcttgctttgtttgtggatctatgatgactgcaaattgtaatttcatatcgtgtatataaatatattttacattctttgtttgattttcacaggttatgaatttacttccgaaacttccacagcatccccagctactccaaacaggtaatatgcaattattaaatttcatatgtagattttgtttttcttttactactatttttagtttaatttaattttaattttaacaattgatgtgtataatatttcagtgtgcctaacaattggagcttattcaaaatggcttaatgctgcatctagtggaccatctatactgccttcagttatagaaatccttatgagtggcatgggcaaatctgaagattctgcagcagctgcagccttagcatttagacatatttgtgacggtacatggtctcttttgattacaatttattatctattttgtaaatcagttaatgagctgtgttcttaaaagacgtggaagaaaaaagactacaattatagctttgatttaaataatgtagattgccggaaaaagctttgtggatttttggaaggcctcttccatatatatcacagggcagtgaatggtgaaggtagttttaaagtctcccctgaagactcattgcatcttgttgaggcattaaggtaaactgttactgataattttggggataagtgaatgtagcatgaaatacagttattatcctttgagtttgctttatttattgattattattattattatttttacagcactgttattacagagcttcctcctgagcaagctaagacagctttggggatgttatgcacgccagtcattactccgttacaagtgagttctacatgcggaacaatatagatcaatccaacttttccattattttcatacccataatagtgtgaggatgggcattgatcttataataactgaaaaccaggaaattgtcaaccaaggtccagaagttttaaataaaaaacccgcacgagagttaacagttcatattgatcggtgtgcctacattttcaggtttgatctatatcctgttgaaaatgttcttgtttcccgtgacttggaatatttttaacatgcaagtaaaattattttagatatgtataccatcctgaagccgttgcagatgcaattcaaaggctatggccaatttttaaagccatctttgatctgtgagtatttaacatgctttgtaccaatatagcaccatttgattttataatatcattaagggatgaataaaattgcattgttctctaagaaatttaatttgtcccgcaaaatgactttggtgtagtcgtgcttgggatatgcggacaatggagtctctttgccgagcttgcaaatatgctgtgagtttgctgacctgtctcaactcctccaagataatatttaaaaattaaaagaacaataaaatgtcagtagtgatatacacatagattatatatacataatatatatactccgtgactagcttgtgagatgaatccatcgtgtcataaattgaagagactgcaattatcattttgttttttaatctggtttgtaatgttaatctattgtgccttgagcactattcattttgtttgttagacaagtttgaaattttaaactatgacagggatattcctaaggtcattattcatgtctgtatgctcgtatattttattgatatgatcaaagacacttgaatctagctctcaaatggttgggtgtgtgttgcgtatgagtgttctggcgctcaaatcaaaccagccaaactaattaaacacaatggaatgctgtttcttttagaaaaaatgaagatgtattttattgataggattggatctgcatatcctttttattaatggttccagctaatttaatctttaggtgagaacctctggaaggctcatgggagtcacaattggcgctatgctggaagagatccaaggcctttatcaacaacatcaccaaccatgttttctgtatctttctagtgaggtcataaaggtaaatcttattttttttccctctcgttaattgtgagctactgattcaaacaaaacgttaattatttgaagtcatacattaacatttgatctttttatgcagatatttggttctgacccatcctgtgcaaattatttgaaaagtttaattgaagcactctttatgcatacaactcggattcttacaaatattcaggtaaagtgccgtacatttgttgactttaaatgctttcctcatctgatctgacactgcttgtactgatgtttgtcaatatgcataatttttttcaggaatttactgccagaccagatatagcagatgattgttttttgttagcatccagatgcattcgctattgtcctcaattatttattccatccccagtctttccatcaatagtagattgttcaatgatagggattacaatacagcaccggtatgtctgtttattgtaattgacaaggcattgtcattttccaaggagcaaatgcctttaaatcctgttttagcttgtcttgtggtctctgatgtcatattatcattactgcctactttgtctaattctaaacacggacttacataatttcttttctttggttttgcagagaagcctcaaattcaatattgacattcttatctgatatatttgatctggcaaactccaacaaaggggaacagtacttacctattagggattctgtaataatccctcgaggagccgtcatcacaagaattttgattgctgcattgactggagcactcccaagctctagactagaaacggtttgactattttctttttatttcagcttttatgacagaagcatgattgagataaaagtcccaacctctccttttgtctattgtttgtctggaacttcattgtgtctttctcccaggtaacatacacactattaacactgagtcgatcatatggggcgcaagcagtggagtgggccaaaaaaagtgtttcacttattcctttgacagctgtaacagagattgaacgttcaagatttttgaaagcattgtcagatgctgcatcagggggtgatattaatgctttggcggtcccaatagatgagttatcagatgtttgtcgccggaacagaacagtccaggagattgttcaaggagctttgaggccacttgagttgaatattacacagtgattacaccgggtaatatttatacctgtatcataggcatgattggagttctacgtaaagtgggggccattttggcaggcctcagtgattgtgtattattctctatttttaatccagtatttgttgtgattctccaatttttaaagagaatcattgcctctttatattgggtgggagagttgatcaatataattgtatctatatgttgatgagttgtgggatctttgagtggtttcctttctcttggctttgtcattttttggggtaagaaagatcacaaggtatagagctgtagattaaggttatgaaaggatttttttcttcataggagctgtttctttcttcacagttgggaattttttttttttttataaaacttgggtaattgctgtacaaattacggaaattttgagttgatttggttgacatttgtattgcaaaggactttccaattttctttttacctcactatgataatttcaagtcataaatactaatagaatgttcagatgaaagaaattcatgattggtaaaactgaggttatatttctcatgtgatagaatggggaatcttgcgggttttggggttgagagataaaagtataaaaataattacaagaatctgaaaaatgagatactaaatttaatttcactaatattggaaaaaaaaagataattccactaagatataaaactatatcaactaaacctaacatgaaaagtcgtcactaagtaagtattttcaaacaataattaattcaaattaataataatattcacacaaaagcctattaattttctttgtgaatcacattttttttttttttgagtgaaattattcttaatattgaataattttctgtatatttttggaattttttcttgaattatatcagtaatcgtttgacatgttaagtcaaacaactttttgatgttgaagtaatttgcagataatatgaagtagtaaattagtgtttactctaaaaaataaagaatgatttcaataaatgtatgatattaaaccagaataagttcaaaaagtgtagcctgacacatccaacacttgagttcaacagaattggaggaatcaacatgtttcttacaatacttcatgactttagtaagaatgttgatgatagttatttgaaattatatgtatgattttttatagatttattgtcttttttaatggtctattttatgtgagaattgctcatttttcttttttttcactataacatgtatttaaaaggttaattaagatttttgcttcctgaactttcacatgtaccaaatcatacttactgaactttgttgaccgttaaaaattctcctaaactgttgagattatcgaatttaaggacctttgtccaatttcattcaattttactaatttagtgattgtttatatactaaatcatactcctcatactttaatatctaccaaatcatgcccatcctagtttgatatgtgccaaattatgttcctgatttgttacatgtcaaaattt

SEQ ID NO: 218362 - DNA, 6396 bp, Cannabis indica
atcaaaacattaaaaatcaacgaatcgccaagatatgactttgattactacattaagaccccaaaattatttggagttctggagtttggtgcaactgcaaggtagttgtggaggggtatatgaagtacctatgtgaagggtctctcccaggcattttaactaaaagatcgtgactgcatatgatctgcaaaaatgagagcttacaatcatgcagaggaggttggcaagctccagaaaacttgtccaggtacaacgacacctgcagtgattagaaaatgtaaaatatcttagcacctcacacatgcagcaaatagcatataattatttttctcattacattctctcttcccttacccgactttctaggtttaatccaactcactccacacaacaacagcagaaataacaagcaataatttggtacatcctataatgcaatcatgtggctctaatgcgggaacaaaatgcagcttccattataaaaggaaaaacacccataccaattcaaaagcctggcaaggttcaataatcaatagaagatcataacagaagaaggctaaactattgttcaatcgttttgctaaaggtaaccccccatgtacttctgccagcaagaattcatacaactcctttatacaaatgaatacacttctttcaagttgcataggtgggatgtgttcacctgcatcgtgaaatttacatgttgaagaaataagagacagaagaaggaatttcctaagacatattttcattgcaagtaacttacctaatggaagactgcgatagaaaagacgagtcttttccaatgccatggacttgacgataagctcaagaaaaaaccaagccatggctaaaacatcatcatatactggtccaacacgaaaacgtctagcctgtagaaaaaccacatccagcaaattagaagaaaaaacatatgcaatggtaatatagtaatacagtaattcctgcatgcatatagaactggtcatcacaacatacagaaagagatggaaaaattacatcaaagagccaggattaaaaaacgaagatatctttccttaattattattcatcaatatctcttttcattttcaatttttttttatataggatgaaacattgaacaagtagaatatcagaggcacatccatactactagtgatttcagacaagagattacaatctctataaagaggagtttaactactagcctgacgtcataactgtgttgtggaacaatatagagttatttattacacctttagacttaattttgtatgaaaaatagtgatgatttgtggttttagttatttaatttaaagttaatgtgtatttttgaagttagtaattcaaatttggagttttaagtgttttagaagctaattgaaattaaataattattttgatatagttttttgtgtgaaaaaggatttaagtgaaccattggcaaattgaatgaaaagggacagacagaagtgggaaaagaaacaaaagctgaaatttcctagattgctaagattcatgtccataattcgtgcctaggcagaaggtatccataagtggtgccagatggagttattttggactgaaaagtgatccaatttagtgggccaaggaggagaaaagatattgtatgccctttctaatttgggaatgaagctactgtataccctagctatataaaagagagttaagatgaaaagaaagagtgtttggcttatcaaaggagtatgaagaagaagaagaagaaaaagaaaacacaaggatttgaaagaggaaggtaaggacaagaagattttacctacaacatcattaatctaggatttgttctctttttcttctctattttgtattttcttattttgcatagctattctagtattcgtggatattaattttctattttggttatgtttgctaatttagctatgagctaagcttttgagacttgaatggttaaagaacccattgtaatgttttttcaagtttgaatacattacttaagctaaatcatcgttattcattcaagtgtcttcatgattattaatttttgttgtttggccaacaatggcaattttttaagctagatttaatattagaaaagtagaaaggttagatttagtagttggcacttaaatgatgcaagagaattctcattgtctagattgtacttagtcagtagattaagaatattttacttaccttcaataacttttgagaattggtactttgaattatgttattaattctgatttgatataggaatatatttaactagtttggagaactttatccatgaattctggaaaaatctcatgagctttttgggaattctagttaactttgtgcattttgttgaagtgttgctatagcattctgcacatttttagacataggaggattttagctcttcaagtccagttttctattgataactctttcttgttgtcatttctctagcaattgtggtcacttttaagcatattttcattttgtttattttattttagttcacaacctccaatcaatttattttcttaaataattggttttacactaaattttccttgcaatccctgtggagacatattctatacttattattacttattactttattgcttgttcgaactatgtacacttgcacattaattttcacaacacttatactgaaagataaattagtcaacagaaccagtcgagtaaaggacctaagttttttaaactaggatttgggcctacttgagcataggagaacacaaagtaaaaaggaaatattaacagtgataatcaagaaaaggacatgctaaaaccaactgacaaaatgaagaactagtgtcaccttagctctagccaaacttccccagacaacggataaaccatgatatacaggaggctgacgacccccaaagtcatcaaacacataatcaacatagctgaccagaaaatggtttctttcagcatcatcaactgaatcctgctgcaccctacaaaaaatcctccaaacaatgtcaaatgaatccaaaatcaacaaaaataatttgagcataatacaaacaagaagatataacaatgcatgtatgcacatatttctttccatctcaactacatctgactcagagacttcaatctgtgtcaggcaggtacaccagtattttccttgcagaagaaattaatttgtgtttataatgtgttcggagcaatgcaaaggcataataaaaccaaataacacacctggtaacaataataaccatggttctgaaagatgcaacctgaaaagagtgagaaatttattatagcagtctacaagtacaacacccaatataaataattaaaagaagaagaaaaatgtccttgttgagctcaatcaaacttctaagtaaatgctaatgacaccaacgtcattaaacaactttaaaagcgacccccgaagagtcgaagacttgatatcttcagagatttttgggtagcacttaggctaaaagcattgaagagtaaaaattaacaatttcgaagttcttaggctagactagtttttggtttgttttccttcagatttgtagtctcttaaaatattactaatacaccatttattcgtaactaaaaaaactgagtcctgagacaccctgaatttagtagagcaccgataataacaaacctggagtgtttctccaccaatgactataagatggagaagcatattcaaaataggatgaagaaattgaagcaaagcagtagaatcaacacgctttaaaaagttcatagcctgcaatcaaaattaacatgtgagatgaaatctgcattaattaaaacaagaaaatggattctgagaaatcagcatagtcaacaacttttatggcactcgaattacattgctggagaatactatagtgtaagtctataattaacaagacttatagtctattaactataattaacgtcttgagcagaatattcacaaattttgaaccttgggacctagaactgacctttgttctacagcaaccaaaattcttgaagacagatttttttttctcaatgcggtaaatgttatgaagataaagagtaaagaaaaatggaaaacaatagtttgataaaaaaaatacctcaaggagttcacaaccccacggtggccttgttcgaagagtatacccatcatactcaagaaaaaaatctctaatgcgttcattgatgggatataatgatgaacaaagtcttaagcgtaatctaaagacattccttccatcctccaaataatgaagtctctcctacaatggagaaaatgggtaataaaataaaccaatccagaaactcattaactaaaaacataaaaagtgtaatacatcagaagctcaaacagtatctcaagcataccctgccagtatcctggagataatatggaaccaactcttccataattggcaaagaaatctcagatcgcaacctgaccaaagccataaacattatagtactattgagagatcataaaacagagaaagagagagtcaaacacactaattatttaatcgataggatcccatgcagatttcaacagctatgatcatgccctggtgagtttccagtttcaaacatgtataaactaaagcacatctgactgaagtaaccaaagtggccacttaaagctatacccaccacattgcaaacactcaccacccgtaatgatctaggttgactcttaacaatgataactatctttggcgcaaaatgtatgatagtcaatgttaactcaatgatagaagagggaagaaagtgcatcgtaaacataagtttattttcatgttccagtgttcggaaggaaagaatgaagaacaagaaataaaatcaacaaggtatagacatactgagcgtgtgtggataatggtagcgctgcatatccaattactacctggaaaatgcatgggaaacataaccatttaaatgaaactgaaacaaagttaactgtagaagaaggaagatgaaataacacataactacaaaaaattatgtaatgctatagatgtttaagtcttacaggctttggtgcttccagttttgtttgaagttccacatggaaaaaagtgaacaaaagatgatgagttggtgtccagatagctgggagggacagtttaatctcatcgtggaaactagccaccctagcactaacagcaacttgagtatgagtgcacatctgaagtgttgccccgtgctcctttggatacatcgcctactcacatgtgttgtaaaactaagttaaatattgttgaaaggaaaactgatttttgtaaaaacaagtcattatatttacctctaatggttgtctacgaatgtcagcgtcatccgctctaagttcaacccgcacaaacaaattcctcttccaacttaaactaacagtcaagggatatacatagagaaaatgaaaaggctgcaaaaaaggcttgtttcttgttgtagtacaaaagtcgaaagcttggaactgtaagccaaccgatacaatcatttagtttcatgggaatagaaaaacagtacataaaatgtactggagacctaaaatggcattcatcataatagatgtagacacaaagtgttataatcataaataggatgcaaataatagtaataagattgagaatcaaaaataaataagcagatagtagatacacagagatctgtcttatagcaagtgatggtttcagttcaaggggtaaaaaaacagagcaacagcttcatacttacatcatcagcaccaaattcctgatttctttgagcatttgatccatttccagaaatttctttagcttcaaaagaattcctcttagagttgctacaatgaagcccatctgaaatattactgctatgctttccatatgcagaatcagcaatgcgatcaacaggatcaactgtggttagactaccagtttctgatatgatttctaagtcagcatgatcaatgtgatgcttctcgacctccaatctcaaaacacattttacaggtttgtgtattttgtgtataggatcctacacatcaaaggaaaaccatacaaaataatgaatattatacattgatacatgggcaaagccacatagagcccaagtaaggcagccgccccatctgaaatttgactcaattctaaatatttttgggcctttatacaaataccaatctgctcaaatagtacttaatataattgtttggtgtagtggtaaaggtatatttaaaggttaaggatgtcacaattgtgtattattttatactttaaatttttatttaattttagtccacataatataaaaataagtattgatattaagtaccatggcttttagtactactatgagtctatgaggtagcaccctataaataattattggttttctataatcattattaaaagtaaa

SEQ ID NO: 218363 - DNA, 6565 bp, Cannabis indica
attttacaaaaatatttatttagaatgcaactgtattcatacttttttgttatgtggcagcaaatgtatcaccttgttctgtgaagttttgagtttgtttcaatatcttgaagctcctttgcataatttaatgttctgattctgttgccagttctctttgctgaacaggtatctaagatggaacatattctacctatctgggcatcttcatggagatcaaaatgttcaaacctactacatatgcaaatacgcttaggggtgagggtctctgcaatgagtcacccagaactgtgtagtttttaaagttttttttttttactccaatattttaattcctcaaggtattaggaaagtcctctgcatcttaaaatttctctgtggttccctctactattggagcatttcacattctagataagaggaaatatgttgtcttaaatttgcagcacaaacacaaatataatttccttgtgctgcaacttaataagttgattctagcctcataatgtgaaactacagcactgtcagtctgactgaaaattcaatttaatatttttactaggactgacctgttgcgtaatgccggttcacactatagaaaaggttagttctacgttttttttttaacaaaagggatttcaacctctaatctctggctgattttagctctcattattgctcttttcagcgaagtacgtactagtggaaaggaatggaattatcagtgttattttgcataaggattctacttctgaagatgtcttgcagtcttttgttcatgcttatgtgatggcaactctaattggtaaaaccagttccattcatacagaaagccaatcatggattgatgcagagtatatactctttcttcagaaggtatattgaacttgtttctttttcactgaattttcatatttatcaatcgaacagttgtatgattagcaaacataacataaaaagtcaactaagtacttcacacccttattcatcaacttcaagtttttgaccaagtcattggaagagctcatttcactcttgctttcagcagaccagttgtcctcattgctacaaaacatcaatcatcccttatcttaaaccagattggggtttcctactttttcttctaagaggacttgaagaaacaaactttatacaaaaattatatagttttctatcacaaaagaaagcttcttttttatttttcctcattatttcttcttttttgtgctgcagctgaagttaacaggttggaaaacagagcgccttctgtctccctatatcagttggagggcaaattggagctctgggtctttagatgagaagctggattaaccaacatatctagtgcattgaattgagctctgaaccattttatactgattatataaatacatatatatatatatatatatatattatgtatgaagttacacatagctcaagctgccttgaacttattttataatattgtaacagaataagactattgctcacattcacaacgacactgttagacagtttaacaccatgatgttttcttatctaggagttccttcttattttagaacaagggctttaatcgaaatggcaaaattttggctcttttgagtagcaactagatttaaaggtctttaatatgttgattgatgtgctgcctaatgtaggaaaatctgtactaatgtaaaagctattacatcgacgtccaagtgaagaaaaagaggtatagactaaaataaaattttcaaatccatgtactataactagtttagtttattttcttgtgggtggatattacaccttacgtttcttatttttacttagcatattacacgattctaaaattgagcttcaaaaacagaactcaacaataagagaaacaaagtaagctcgcagaaaccttccttcttgtatacacagttgtttgcttgctaatgttaatgctggcaaaattatacatatttgcagccagtttactcatgtaattaaacatctttcaccaaagaccaatagggaaagcttttgcaggcatcttgatgaaaaagtgaaaacatgtttatatattaatgctttaacacccccaacccacaaaaaacaataatatttaaaagaaaaaaactatgtaggtaattgcatcttattttcgatgcccagatgatgccataagaacagcaacagctgcaataaacataaacaacatgctgagaagcagtatatacgttcttcttgatgattttctgtactctccaaacagaagaattccccaaaaagtgctcactagtggaagtgcctgcccataaccaccccaaaaaaagtccatattagtaatgtgatgcatcctaattctgttcaaattttgcacaaacaagtttatcccacaaagaaaatatgtttggaatcaagttacaaaagatgtatttgaattttgaaccaacctgaacggcatctgctgcagcataccctgcagcttgccctcccatgaattggagaccattgccaaacccgcagagaagaccggccagtaaggcccagcctctgccattccaatcattcacgtaagccttgaaagatgatctaggtaagtccagcacagggtagtaaaggaaggtgatgtttaggatgattgcaatgacaaaacatgataccgagaagtaaaagaaggcagtgtagacaaccaagtgaggaaccctgtctttcaatgtatgccattgatcgtttgttgccaggttaaatgctggtgaaaagagagaaaagcaaacaccagcaaagaaacatatggccagtccaattgatgtgtttctcccaaacacctgcattgtcgttaagaatctcaaacatttggatttgtatgtaatgaacatctaacatctcaaaagaaagcattttctaacaaaagaactgaaactaccaactttgattgatctttttctctcaagctgcataagaaactctgcagttccaactttagccttctcggaagagacactgccatcttctagatcttctgacccaactgatgtccagtgttgacaaaaaaaaaagtcaataactactaccagtttataaatataaatcacattagagctccactgtaattcttacccttatcttgcaatgttgacatctgtaaatttctgtcaaaagtattaaatttaggaaagcatcagcctatactctataatagaaaaaacaaaatatacacaattctactattccgcagttattgtttttgcaacacgtataatatttctcttttcagtgagttttattggctttccaaatatttattaatttgcatagcaccatcttttgtagagtcacctatattttctggtttctcaggctcaccataaaaatatttacatataaattggaccacagccaccctataatattgatgctgttcttggagcaacatacccttccttctgatcagatgacaaacttccaagctttgcttcattatcagctgcattggatgagtgaacagcagatgcaagacaaactgcaatcaagaagcatccaacgccgggaaaaggatctcagctctgttaatttggtcgtctaaaagtagttcatggttgttcctgttgttgccaccaaaatcaaaagcagaaaccatttttcagtatatagctgataaagtgaaagaggtgtcaacaaaaacaaacgtcactatttcaaggctgtctgataaaagagtgagggaacctataacaactgttatgcttgaagtgatcacttctgtaacagacaaaccaacaaaagcccaagcatactgagttgagagatttcccaggctaaggaccactcctcctaacattgcaaataacacagagggccaattttcctacatcaataagcgtatatgaatcagaagcagttacatgattcataactaaatgtcataaatatgtacatgggaaactcacctgagagagctgaattagaaagttgggcatctcaggtgtgctgtttccaatttcaccaaatgtaaatgctataattacagcagccaagagattagtgattgaataatcaagataggtgtgttgaggcaacttgcctcttctctctagaagggtcaagatagcaggccatgtccctaagaagaggagagctagaagcatgcaagctatggcacctcctttgctctccaccacatacatattttagtgcactttgtgaaaattcccagttggtgaagtagtactcaacaaaacaatatcagaaagatcctgtaaagaagactctccactaatttttgaaagtaaaagaaagataaggaaaaatgaaaagagagggatcagtatataagacctgagactaactccaagttcataaaactggtgaatcatcagaagacaaacatgccttaatagaaagagggaaaaaaaatcttttaccaaattagaatatcagtagtcagtagcctttatcaaccacccatgaaaaggttaagtcaaaaacaaaaacagttcgtagacagaatcctttgaaaggaagattataaatgaaatacatgaacatttcttaattagaattttcaactcttcttactaaattaatttaactataaatattaattttaaaatattaaactattaaattttaatctaataacaaatattaaaagagacatttaaatttttataattaatttaattacttaattttaaaatatttttttttttacaatatataaaaaaatatgtatataaataaaatatttaagtgaaactcaattttttgttcttaaatttttttttaactcaaattttttttaatactaatatcatttatatatttactcatgataaaagaaacaaaccgaaacgcgagaagtattatcaaactctgtcacatcatattctctagtttctcatagatagccattagccattctcagtatggagcggaagcaaaaaagaagttgcttcctttcatgaaatttcttggtttccttataaatttttaaaatgttataaaattattatgaataatataaaatatataagaaaagaagaagataaagatcaagagtgaaaacgtaaatgaaaattttttaactcttttattctaatagggtgaatttttatttatacaaaaataagactaaaaaaatgagaaactgaatcaatataaaaaaaaaatcaagtatttatggtgataattaattttgtaatttagacatctattaatgttaatttcgaacattagcattgttaactctcgagatcagccaactgctagtcgggagatcaacagggacatgtctagaatgtcgctccgaaggcttagttgtatttgctcctccgaatgcactgaagtaatttggcatgctcatggtggaaattcacccagcatgcacatgacggaaactcactcggcatgcacacattggagagagtcactcggcatgcacacattggagagagtcactcggcatgcacaaagtaaagtcacttagcatgcacaaagtgaagtcactcgccatgcacaaagcgaagtcactcggcatgcacatcatgaagtcactcgaccatgcacgtgcatgcacaatcagttagcatgctcgagagtcactcgacatacacactcggctagcatgctcgagagcaatcgacatgcacactcagctagcatgctcaagaatcactcggcatgcacacttgactagcatgctcaagagacaccaggcatgcgcagtcgaatagcatgcttgagagtaactcggcttgcatgcttgagagacacttggctagcattctcgagagccacccaacatgcacactcagcaagcatgctcgagagtcactcagcatgcacactcaacatgccctcccacaatagcatagctacacttagtaaaattttcccaagtgttaagaagaatgaaacaagggtactattgattgtggatttagccaaccgacacagagtctaactaggattagattttgcttatgattgtcacatgtggaataataataaatgtggatttccactgatatgataatcatcaatgtagtttacttacaccttggataagggttatctcatttccagggcattggcgaagtaagcttagattggatgtattgttatacatcggagtggaccgatgtttaacttggataagatatcataaacttactgtaatatctatctaagtcaatatcactcagttgatcttagtttaatgatctcaatcttgaaatggttaggttctagttcaattgtattatttgtgttctttgatttgttcgttaaagttgaccaattggattttctcgatacttacatattgagaacatggtagttcaattgagtgagagcgctaatcatagatacaaaatctatagcttctatacatgcatagaagtgaaatgatgatttccttcaacttgacttaatagagataaatggtggagtactcattttagtaatcatattagtttactgaaatatcatttataggtagctaagtgttttaaagataaaatacattaaaaggtagaatggtaaatttgtccatactcgatgtagatcatctatagaggatcat

SEQ ID NO: 218364 - DNA, 7754 bp, Cannabis indica
cgcccccatgctcctactccgccagaagctccgatcgttcaaccggcaatcgcaccacagtttcacattccgaacaatcttcttcccctgaatattcgcttggatcgacataactattcttactggcgatctctgattttaccatctgttcgtgctcatgggcttcatggcattcttcttggcacaaatccacgacctgcaccagttcttgaaggtacgaacactgttaaccctgcctttgatcattggattcgctgtgatgctctgttaatgagttggctaatgaattctctctctgaggctatgttgggacacgttctgcactgtgaatccgctgctgatgtctggactgtctttgcaagtctttttgccactcaatccaaagctcgacagcttcaactccgtttggccattcaaaacacaaagaaaggatctatgagcatcgacgaatacattttgaagatgaaaaaccttgctgattctcttgcggctgctggtcacaaactttctgatcaagaattagctatgtacattcttggaggtgtgggtcatgaatatgaaactgtggtggttctccttacagcacgtgctgatgcccttactcttcaagaagtgcagtacatgcttcaaaatcaagaaatgcgcatcgaacaagctacacctccaatcttggattctgttcaggccaattatgctcaatacaacagaaattcatctggttcaaatcgtcccaatactagcaggggtcaatcaactggccgtggcaataatcaaggccgtggctctcaaaatggaggtcgtggaccctccaatggccgtggacgaggctctcgacctgtttgtcaaatttgtggcaagattgggcatcttgcctataagtgttatcatcgatatgacactgagaatccagcctcttcctctacatctaccaactctggccataatccacaagctcttatctctgattccaacactcctatggaggacaatgggtggtatgtggacagtggtgccacacatcacatgacccccgattctcaaaatctcacctccaccactgattacaaaggcaaagccaagatcacagtgggtaatggctctaaactctcaatctctcatataggccattctagttttaatactactaatccaaataaacaattattactaaatgatgttttacttgctccaaagattacaaagaatctattgagtatatcaaagattactacagataacaatataatccttctttttgattctgatacatgtgtaatcaaggacaagaatacggggcaagctcttcttcagggccatcttaaacaagggctatatcacttggatctctccaaagccaaacgcactacctctcagttcaatggtctctccacccctgctgctttcaattgtgtcaagcatcatcaatctgcttccttctctgacgcccaaacatggcatcatcgacttgggcatgcttccccacgaatattacaagctgttctctccacactaaaattgaaaacaagatgtaactctttacctttctgtcaggcatgtcagtatggcaaacttcatagcatacatttcagtagctcaacacctaagactactgcttgttttcaattagtgcacactgatgtatggggaccctctttttacagttcaatagaaggattcagatactatgttagtttcattgatgatttttccaaatttacatggttgtatcctatgacagctaaatctgaagttgctggtatttttagacagtttaaagcttatgttgagttacagtttaatactaaaatcaaggccattcaatccgactggggtggtgaatacaggccccttcaatccatccttacacccttgggaattaacttcagacatccttgcccgcacacacatcagcagcagggaagggctgagcgaaaacatcgacatgtcgtcgatatggggctgtcatttcttgctcaggcaaacatgccattaacccactggtgggatgcttttaccactgcagcatacactattaaccgtctccccacacctgtacttcaacttagaaatccatttgaggttttgtttcatcaaaaacctgattatacttttttaaagacatttggttgttcttgttacccattgctccgaccataccaaacccataaacttgcctttagaacagcccactgcttatttcttggctatagccccagccacaaaggatacaaatgtttgcatccctcagggagaatttacatagcacggtctgtcaaattcaatgaagcaagcttcccatatgacacactatttccaaaaactatttccccaaacatatccacctcaccagttactacagatgcctttcctataccacaacctcctacatcaatccatatcaccactgaaccaaacctaccccaagatcaaccacatactgctgaatctcagtcaccactgccagtacagaacccaatcctaccatctgacacatctctcataccagatattttacccacacctgttgttgctgctgcaattcccattctcgatcatgagccagagccgagtcccattccaagtgatattcaccatcctcacttcactgcctctagttcacctacacaaactctaaatacacacagtatgataactcgaagtaaagctgggatacacaaaccgaaggctctcactgtatcctccaacataagcattgaaccaaagtccctcaaagctgcacttcaagatcccttatggctcaatgcaatgcagagtgaactacaggctcttataagaaataaaacttggactatggttccctatcaacctggtatgactgttatagataatcgatgggttcatcgcattaagtataagtttgatggctcggttgatagatttaagtccaggcttgttgccaagggctttcaacaaacacctggcatagactactttgaaacttttagtccggttgtaaagccttgtactatacgcatcattttctctcttgctgtcactcacaactggcccattcaacagattgatattaataacgcattcctaaatggtgatcttcaagaatgtgtttacatggctcaaccagcgggctttgttagtgccactcagccccatcatgtgtgcaagttaaacaaagccatttatggcttaaaacaggcccctcgtgcctggtttgataagctcaaacatgctttacttcagtggggattcagtaattccaaggcagatacatccttatttttcatcaaaaaaggaggtaaactcacccttctgttaatctatgtcgatgacattttattaacaggtgaagattcagatttcattcatcatctcatacatcagcttcatcagcaatttgctctcaaaaatctggggcccgtgcgttattttctcggttttgaagttaccagaaactcctctggtctttttctcactcaggccaaatacactaccgatcttctcacccgcaccaacatggatactgctgcttcaacaccaactcccatgtgccccaacacgaagctctctgccaatatgggcactccaatggacaaccccacactgtatcgaagtgttgtgggtgcacttcaatatcttacattaacaagacctgatatttcattctctgtcaacaagttgtctcaatttctcaaagccccactaatgaacattggactgcatgtaaaaggcttcttcggtatcttgttggcactattgattatggtctacacttcacacccgcatctcccctcactctcactgcctattctgatgctgactgggccagctcgattgatgataggcgttctacatctggctactgtgtgtacttaggcaccaatctcattatgtggagttctcgaaaacaaactgtggttgctcgttccagcactgaatcagaataccgtgccattgctcttgccaccactgagctcatttggattcagtctctttttacagaactgggaatcacgttttcttcctgccctgttctgtggtgtgacaatcttggtgccacttctcttgcctcaaacccagtgtttcatcaaagaacaaaacacattgaagtggatttacactttgttcgggacagagttcttgctcatgaccttgacatccgacatgttgctgctgcccatcaaactgctgacatcttaactaagccacttccccaaattcagtttgatctgttcaggcacaagttaacacttagagaagctagtgtaacttgagggggggtgttagagttagttattgggtctgttagttagttagatctgttactttctctttctgttattttctcacatgttgtaattggttgtaacagtccctgactctatataatacattctcagctccagtctttaaactgagcttcattcttcaatttctctctgtcttcttctctcattctctgctcttacaaacccacacaaccttaataattgtatttatcaagaaaattacatctttctttctagctttaaactcagaaaaattacagcagctaactctagcttttaaaagctaagcttaatcatcgaactaatggccttgattgaaccccatacacatttaaagacacacttgttcctattacaccaaatgttataaacaatagccgcagccacagttgaagttatagcttcaattagaccatttcgggggccattcaatctgttcaaccaagcatcaagattcaagggccaatcaaaatgacccatccaacaaacaagtgatttcaagaatactttcttagagaaaatacaatcaaaaaatagatgagaatgagactcttgaacctcaatacaaaccaggcaaagagaagaatccacctgaatagttcttgccaacgaatctcgagtgagagcaagttctcattaagagtctgtcataagataaagtggtgtttagggactttgaacttgtgccaaacatccttgtagtaggagaattttaaaactgagaggagggagttgtagaaattcttagccttgaaaacacttgtctttcccgcctcaattagctcttgtttgttgatcttatctttaagattaataaacttcctgaagtaccaactagtatctttacttggacaacaagaccaaaactcttcgttcttcataaaaattgcattcacccatcttatccaaagacaatcttttttagtagacaacacccatatgtacttggccataagagctacattccattttttgccttctctaaacccaataacgccaaagtctttgggtaaacagacttttttccaggaggctaaatgaagtttgcttcgagtactagagctaccccaaaggaaaattctgtagattgtttatcaatttccttcgcaactttctgggataaattgaagatgtttatccaatagtttcgaatactcaacaaaatagaatgaatgagatgagctcttcctataaaatgacgactttctcagccatctagcttcttttgaatcttgttaataatttccaaataaacactcttccatacttacaatatccaacatatgccttttagtctctatagtgatgcctccaaaataaatagaagactttgacttattagcaaagaaacctgtggctttacaaaaattagtgaaagtctgtggctttacaaaaattagtgaaatcaaagagactcaaaggaaaattttctagagtttatcaatttctttcgcaacttatgagggtaaaataaagatgttcatccaataatttcaaatacccaacaaaataaagactcaaacgattttttaagccatgcagtttcttttgaatcttgtcaataatttccccacaattagaagattttaacttagtaggctaaagatttgtcgggccccgttcttctatcttgtacctcaccttcacttccacattaataatattgtttgctttgggcctaagccctcacagttttgtttttggtaccttcccaaaagacctcatactaatactaatagagtagtatccatccttatatacccataattctcactatgatatcaattcctaaatttccctaaattcgtttgataatccctcaaacacatgaaaagggatgagctccaagaacaacacagatggccgagcttttccagtaagaggcctcgacttcaacctcattcacatcaattttagcaattatctaatcaccctatttgattgtcttagtaaaattaagcttaatagagggagtccttatctgattaaccatgaattcggtccaagcatccttcgctaatgattgaaagtccttcacctcaacttcctctgtccaggatcgaattccaaatctaatcagataaatttcattcggaagccccaaatctatcccaattatgactgagtattgtgaaaatcctcagtctagctagcttcttccacattgttctggatcggagggagctcctattccgtcatgatgaagccaatagtctaaatctcaagcttgagaaaaaatgattcttcatgacttagattcatactaattaacaataaggtttaatagttgatgtatattataatttatataattgaaacataaattataatgaacattggtttaaaaaaaaaaaatttagacaaacttttttagtttaaacaaaatttgaaatagatagagtatcatgatttatatgctatactaatggagtgggtttcttttgagatacagaatacacgaagatttggttcacctatggattcaacatttatatatggtcagggtccaaataaccctccaactgctgtactttttggcccaaatttattggcatcaaaattttaccagctctctccaccagaggtagatattatattaagaataattatagtataagtacttaaaattttatgtttgtttcttaagttagtaaaattgtaatttttcactaatctagttaatacagacttcattttgaatttatgaaaacaaaatttagagataactgacactacctgttcagacttaataatttagaatgtgttttattaaaaattacagttttacaaatatttagtattcatgctgtttaaaataattattaaatttatacggcttataaaattaaaattttaaatatttatgttactatttacttattatatttttgccatttgcgtttaattaattgctaattttgccatttgcgtttaattaattgctaattatgttattaataatattccattattaatcaatgtggttaataagcaggatttggtgcttgccctgacattgttgagaccttatgatcagtttagtaatgaagaattgtttagtgaacaactaaaacttactaaagagaaatatgggagtgtaagaagagtttttatcgtgtgcgaccaggactatgttatcgaggagagtatgcagaggtggatgattgagaagaatccacctcatgaagtgatggtcatcaatcaaactgatcacatggttatgttctctaacccactcatgctcttttcccatctcgaacaaattgcatgcacaccaaatattcttacttaattagtaatgtaatatataaatgtactttttttttgtgttttaaatgtgtggtcatgcatattttaaattagacatttaatttaaaactagcatgtaatttgaaatttgactaataaattttatctttaaacgtgatccgtaaactaataacaatatgtaaaaattgtttatgaaaattatgtgtgtatttatttttc

SEQ ID NO: 218365 - DNA, 11812 bp, Cannabis indica
tgtatatgtcggggcagttaggcctggagcgtacagtctttgagatatcagggcttatttgtatagtcgctaggcgacaaacttttgtatatgcatagtgaaatttttgtaaatacttctgtaaacgggatcccggatttatatatgtatgttattttatatttttaattaattaagtaaaattttaattaatcacgattttcaataaactcgctgattagcaacgagctgcacagtcggttaaaaatcacgttaacatgcctaaaatagttagggtgttacacaatgtgtcaaccattgacagatcaaaggtggaggaagccaagtttggtgaaattgaattgtatgttgggcttgttattggtgtgaaaaaaataggtgcaagggcagttagtcatgactctaaaatactttattggaatccattgttgctgaagttatggcaatcttttctagtgctgtgttgtgatctcatctttagtactctacgatggaaattgaatcaaattgtgttaatgtagtttgtgccatctcaaatcatcacttggatcattcttactttggatggatcaaattgtctggtacagaagatagatcaaccatatcggtaacgttgttggcaaaagatcacttggctacattatggaccgcaaaattacataatctaagaataaaggaaaaattacaacataacaatttagtagagaggtttttacaatgtcgcacaaagttgtcaatcccccaactgaagcaagttcccttcagagtcttgatcattatctcagaatcgctctctaccagaacaaacagatgcttcagagagactgccgtcttcatagctagtagacaagccgcggtttcttcaatgaaaggatcaaagaaattgagcttggttttcaattggataatgacaatctgtctatgcaatccggttattcataatcaattaaattgtaattatatataatttttttaaagtattgctatgaactattcactatttaaagatcttttaccatctttattaagcattttctcattatttttactatgaacttgtgaagattgttggaacgtgatatcacgcgcgagtaagaaaacaaattaaaaagaatagaaaaaaaattaataacaaaaaaggtaaaacataacgcagagttattctggttcttggcgaagagaccgttctggattttggttcaaagatgaggaaggaagacacagtgaagctgatcagcgccgagggtttcgaatttattattcacaaagaagccgccatggtttctcagaccattcgaaatatgctcacctctcctggtaattttgcctttactttttgttatagtaacgaattgttttccggaattacctgagcagaagacgaatatgggggcatagggtttcatagtgggtttggtttcagtcttacttggctttaattttgtaggtagtttcgccgaaacgcaacatggggaggtaacattccctgagatcagcaccaccattcttgagaagatctgcaaatatttctattggaatcttcaattcgccaggtttttattctatatcatcatcgattgtttttcttaattactgttaacttttatgacattatttctgaagatttatatttctatttggttctttaatatgaaccgtcaaggttcagctgagtaaagttcgtacaatggggattcatatacttgttttctataatgaatcacctatataggttattggttatgctaaattttagatgcgtttccctgcaaattcatttctgtatatatactctgatttttttcagttgggcacttttactttacacatagatttttgctttgagctcaacctcatccttaagtatgttagttgtttgaaatatcgcttgcgaaggttctatgcttagatttgaagtatgatgtaatgatagtgattagttgtttagcaatgatcaaaaaaaaaataaaatgatcagacaggacatatatcaatattacttttaaatgctcgatataaataggaaagcatttcagtgtttggttttttatgttccaaatgctgtttttgctaacttttgttggtaggaaccgacttttatgtgggtttttcattgtatacaatcctcccctcaagaatagggttgaaagattatagctttctttatctgtggaaatatagaaccatggtcatcaccatttggttttaaaaaatttaaaatgaaaccccattattattaacaccaagttactcgtacatttttgatcaaaaataaaagtttctcatacatcaacttgtagagaggccactcactggtcttttagaaactttaggataatagaaacattaacgtttttttttttcttcccttgtccccctctttatgttagggggtagatattatagttgaggactttattagtttatttcattatctgatcttcttttctccaatctaacttgatggatatgtttctcttctgtcagcgggaaagagaccgagttccacattgaacctgaattgactctagagttgatgatggcagctaattatctccacacttagtatattgtctcattcttgcctcttgaagcacttgcctttctgtcattgtaagttaacttcaatattccttgccaactaattcttatctcgtgttaacatgtttcttaattttcactatccaccgctaccaggtttattcgaggagaagattgtggctggagaaggctggatttcataggaattgtatattgttaataagtactggaatttactcctagatttcaatttagtatagtacaaggatacatttgattggaactcttggaacagtgtatgactgcaaactgatgtggtcatgtcctttacaattaataagaccatgtataattgttgcataatcaaatatttgcagaaatgttttgtactggatgcagaaatttactaatgtaattgtgtaaaatgattaagttacaggatatttggaataccactgtagctcacatatgctaactgattaaacggagattctgaaccattggtagaaatcgagaatagtgtatagagtaaatagtgtggtgatatagaattgagtttgcacctaaattgaaacccaaacctggcaagccacagtgaacttttttcttttttgataagtaaccacagcgaacttgtaactcaattctatatcttttactaaattgaaaccgggttttagattttacataaaaccccaaggtgtaactcagtcagttctcagactaaaatgttgttatttgccaggttttcattctaatatccaacacattgtattagctgtattaatactgtattgatatatcaatgaggttttccatttattaagaagtatatattaattttatttaaatttttgtaaaacacacacgcacagcaaattctgtgatttaatggttatagatggaagagttttttttccccttagtgttcattgccatacttatcttataccatatatagattgtttccaaattatgtatgattatgaaccataataatagaattgattcatagtccaagataatatagcattagttttcaaattatattatttaagtttgtatttgtttctttctaaaatgaggcctataaggaagagtattagatttggtctaaaaacctttggttgacaattacaaacagtagcttaggaaatcgacaacagagacattagaaaggaaaatttgagaacgataatttttttttggttgacacattaattaacttaataataataataataataataataaataataacaccatatgggaaaaccaaaagcataattatttttactatttttttccttttttcaacatgaaaaagataacagaagggaagggattaaacaactaaaaacacaaatgagaaagcaaatgggaagaaaataaatgtagtaaatagaaagggaagtcaatattgtgtagaaatagcaagatagtgattttgtttcagagttatgccattgtatttgccacattaactaccctggtatttgtgcataatagcaaattaagctaccatatttgttgtcattgacaaatttccacttaatttataaaattaagcgagttaatgctaatctatacttgattatatgctatatacattaataggtaagaattttctaatagtttgtcaagctaaaatctgccatatcctagaagtttatatcttatatatatgatgaccatatagtgttcttactatataaatacatatgtatgtttcagtgtttgtataacacataccattcttctctttcacaacacaagtttattatttctaaaacatggggaataagtatggagattctctgtacttttacaatttcttcacaatttttattctcactctaagcttttcgtgcaaagccagtgatgaagacagaaaggctagtgaatttttctctgtttgtaaaacttctagtactgttaaaatttagtgggacatactatttccattttctatagaactcttttaaaaatgaagttaatattattttacaggtatatattgtgtacatgggggcacttcaagataagttatcctcacaaacatctcttcattatagtatactgcaaagtgttcttgagggaaggtatgtaaacacacacacacatataatctttgttacacttctcttattgatcagttaattggtctgtgtttgtatccatgtgttgcagttctgtttcggattctttagtgcgaagttacaacagaagtttcagtggattcgcagcaaaacttactgagaaagaaaggcttaagcttgctggtaactacttttgaaccttactgaaaaaaagaaattattaagtactcacactatgatttgcaggtatggatggcattgtgtctatcttccccaataagttatacaaaactcaaacaacaagatcatgggattttatgagacttagtgagacaataaagagaaatcccactgtggagagtgacactataattggtgttattgacactggaatttggcctgaatccgagagctttagtgatgaaggttttggccctcctcctaagaaatggaagggtgcttgcaatggaggaaaaaatttcacctgcaataagtacatatacttcttcctttattttaaaaatttcgattttgtagatcaagatctacagggaatatttccaatattgagtgacactagtattttatagtaaaggattcaaagcaccataggttcatcctcaaattaattcatgatgagtagataaattatatttttataagtagattaatattttcagacactatattttgtacagcctaatatccccttagatggtagctagcctttttgattagttttcatgtcttattatttttagcttgactttactatgctaaaatttatagaattttatttcaaaaccatttgaactatgctaataactatatttcaaatctttggatgggataatcttatatgacactgtatcttatgtcttaacgttttggtggtaaagcttttttttctttttctataatcttctctaatgactgatcattttgcagaaaagttattggagctcggttctacgaaacaacaataattgaatcatcaagggacgaagaaggtcatggaagccacacagcctcaacagctgctggcaacattgtgaaggaagctagcttttatgacattgcaaaaggcactgcaagaggaggagttccttcagccagaattgcttcttataaagtctgtgatgctagcgggtgctttggagcctctatcttgtctgctttcgatgatgctattgctgatggtgtcgacattattaccatctccattggacaagatgctccttcatacttctacaatgatgtaacagccattggagctttccatgccatggagaaagggatattaactgtgcattctgctggaaatggtggccctgctcttggaaccgtggcaagtgtagcaccatggctgatgacagtggctgctagtaccacagatagaagaatcatagacaagattgtgcttgacaaaggcaatggaaccaccataattgtatgtattctctctatgtactactaatgataatacatttttataacactatttttacttgaaagtgttatggttttttcttgtcatttcttattacaggggaaagctgtaaattcttttacattgaatggaacaacatttcctctagtggatgcatccaatgtttcagattttaagaaatgcccagatttggatccggggtatagtttctacaaaccatttatttgtattaatcttataaaagtttcaatagtgaatattaatttaagaaacaatataatttttcaggacttgtgacataaactgcatgcacagtggtttagtgaagggaaagattatgctgtgtgaaatatcggatgcctttgcagccggtgcactcggttcaatttccatcggtgaattggatgatacttcttttgttgtcccattccctgcatcaaatgtgaatgagaaagactataacactatactgtcctatctaaattcatcaaagtatgtatgaattaatcttgatcaagtttcctcactagccaaaacaacaatcttgatttggttcatcatatgttttatgtataaatagataaaatatatttcgtaactttgcagaaatcctcaagcaacaatactaaaaagtgaagctttgaaagattctacagctcctttggttgcctcattttcttcacgtgggccaaacttggttgtacctgatattatgaaggttatatataactacttttctcagtaactttctgaagctttctgttaatttaaagcatttttctcaaattatattatgctccaatacattagtgcagccggatataagtgctcctggtgtagatatattggcagcatattcatatgaggcctcaccctcagagaatgctgatgacaagaggcgcgtaaagtacaatatcgtttctggaacttccatgtcttgtccccatgttgctggagcagctgcctatgttacaacatttcaccctgactggtctccttctgccattaaatcttctcttatgactacaggtattgccattcaaaacctctatgttacacataacaattttctgtctttctaaagttaaatttcattatattttctttttggttgtagcttggttgatgaacaatactaaaaattcaaataaagaatatgactatggttccgggcatatcaaccccacacaagctatacaccctgggcttgtgtatgaaactttagaaggagactacataaagtttctgtgcagccttattggctatgatgagaaaaaagttaggcttatatcaggagataatagcactacttgccccaaaataccagagaggaaatcaggaaaggatctcaattacccttcaatgactgctacagttgcaataaacaaaccaattcaagtctcttttcatagaagagttaagaatgttggcattgcaaactcaacttataaggcccagattttctcaagatctctaactaatatcaaagtagtgcctgaagtgctttctttcaagtcactgaatgaagagctttcttttgatgtgattgttaacggtggtagtttgacaaagaaaattcctatggtttctgcatcactggtttggtctgatggtactcattctgtcagaagtccaattgtcttgcataattccaattcaattgaaagttttgaggccaaattggactaaagtcaaaattgtctttttagctggcttgttttcattttcctcatcagcttgtcaccaattcaactgttcttctgttatttgtgtacaacattgttatacataacaatggagttagttaatgagtagttttgttcatggtggctctgaaaatgtatcagcttggtaaaaataatacggaaaggccaaaatggaaataagtaaggctaatccgtcacatcttgtttttgtttttctttccctttctgttaatgatggaatggagtctataatacccaactattttgtttgtaatcttaggttttctttttgttatatgcaacttcaatccagattacatctaaggcattatctatagacatgtaattccaccacaaatcttgaaactgatgcataactttagagaaatgtaagcaaaatttgatgtggcattttctttttttgttattatttattcatttatttcgaaaagtgaagttttgattaactgacttgttattaataatgcttacatatttgtttgtccttgtaaccatgatgttttatataaagagaacaattcatccattaagcaagagaaaatatacacatattcacaaatgatacagtctcctattctatttcatttatttaacttgtcgttatgaaattaacaacagagaaacaaatgaagaatgcttgttatttccaattatatctcattgattaaaaaaaaaagtacagaataaagatgagcaaaagctcaactgaccacacctaattttatttctttttcacgttggatcaaaagttcagatcacacctggtatatctacagaaatgacaaacagtaatctaaaacagagcaattacaataacaaaggacccataacgataccaaaatcacagtcgcaccaacaaacgctctaaagatcaaccagatatttcaatggatttgacatcaggcttcttgatctcttctttagggactgtaacagtgagtaccccattttccatggcagctttgatctgatccattttcgcattctccggaagcctgaacctcctcatgaacttcccgctgcttcgctcgacccggtgccacgtgtcgttcttatcttccttctcaacgctcctctctccgctgatgtggaggactcgatcatcttcgacctccaccttcacctcttccttcttcagccccggaacatcggccctgaacacgtgggcctccggagtctccttccagtccactcgggcattgacaaaagcggagttttcctgagatagttttggaaaagatgagttagataaggggaaatccttgaatggatcccaaacgtcgagagagaaagggtcgaaaacgttgcttcgtcggccaccaaagaagctaggaatgagcgacatctttactaatctttacttggaaaggacgctgaaacagagaaatgttgagttatttgattacttgaaatgaagaatcgatatttctgaagtgatcgagtctgaggggtttagtgagtatatttataagaattaaggtgaaatttctagtaatttctgggggtttcggcagttaaatggacgaccaatctagagacatcgcgagccttggccaaacgacatatcgaatacattctagttgcttctaatccaattgctctgtaaaaagtttcgagaaatgtctaatttttgtgtacaaaaaatttgggttgatctaccattcacacttttaacatgcacctcttattttgtcagcattaagaatttttttcactttattttattataatagtcatgttgattataattatttaaaatatttagtaaattttaaaaactttagtataatttataaagcaatgtttaaacagtttattttacattagtataaattaaaaaaattacgcgtataacaaactttttgaactttatttttaatgtgttaaatttttttaaattttgcaagatgtctcttaaaaaaattctctgtcaaaacaaataataatgcatcaatacaagcctttttagtgggtacaatgtaaaatttccaaaaaaatttaattcctatcatttcatggtgaaaatttgataattgcttatgttcatgtaatttattcactaaacattttacaatacaccctcttaaaatgaatacatcaatgcacttttatttgttttggtatctaaaaaaatatttagtccaatttttttatggacatatacattgtagttatttaagatttctggtaaaattttaagaaattcagcacatcgaaaatatggtttaaagagtctgttgcacgactgacttttttatttaatacgtgtgtaaaataaatgggttgaacattgatttttgtattgtaaattattctgaattcttaaaattttgcagaatgtcttaaataactataacgtacacgactatgaaaaaatttagactaaaaaattcttataaatgcttaaacagttagaggttacatcaatacacctattttgatatagtgcattgtagaagcaccctatattaactataattcaaattacacctagcaaccaattttataattttagtaattagataagtgctatgtataaatgaaacttataaaaaaaaattataagttttaattttaagtatagtaatgttttttttcaaataaatagaatagaaaaattctgtaatgcacctttctaaaaggagtctattgattcactttttatatattttggtatttgggagaatattttaatctaatttttttttttatggtcgtctacattgtagttatttaagacatcttataaaattttaaaaaattaaaaaaatttaacacgtcaattatagggttcaaacaatcgatttcacacgcttataaataaaagactctctcgtgcaacaaatagtttaaatcttattttaggcgtgttaaatttttctaaatctctcaaaattttacataatatcttaaataactacaatataaatgaccatgaaataaaattaaactaaaaaattctctcagatgcctaaatagattggggtgcatagatagatatcttttaaggggtgtattgtagaagtatctaaatattattaaaaattaaaagaaatatggttttggatcttcttcttctgagttagatatggccccactttgtttccaggcaagacgtttcgtgaccttggtcaattcagctatttggtcttccaaacatttagtgttgtcgtctaggaattcatgtcaaaaaactctaccattgatgtgatttttgagatttttttttgcgaggtcttgccttctcgcctctatctcgatctttctttccatttaagcgttcttgaaggtccgttgtttacatactatcttctggaatttggtgaactttgtctaatccatcactctagttaacagaattctaggacaatttttccatccccgaatggtaggcctttctacctgagcactaggcctatcccctcgcgcaactttaccttgcgaatcaatcgggtggccttgctctggagcattagctgccttctttttctgcataggttggttggcagcattcatgttattctgtggagcaattggagcaatcttttttgtaggttctcccatgacacattttcccttgttcctcgcgggataagaagttctagggtttgtaggatttgttttctttgtattattattttcctaaggagcaagttcatcaggaatgttttcatctggagccacattccctggcctccaatcttgctagagtttctcgcatttgacaagacaattcttcttgatccctcaacttctttttggttttagtaagttctttagccattcaaatgaattcgagatctagttcatagtaatacccttccccgtccttattgtcaccgtcaccttcaggatcgtcatctttaagatcatcatctgaatcttttgggttgccttcttcgttgatgttattttcatcaatatattttttcattatattgagtcttctttgtgggacgattagttacttttgatgtatctgttgggttttatg

SEQ ID NO: 218366 - DNA, 2264 bp, Cannabis indica
taataacaaatatggaagcttattcctactcttcttcttcttcaaacactagtaaagtcccttactactcttcttcattgcactcggttaagaaagctgcaacggctaagccatggaagaagctggtggctcctcttccaccgaatccgcctcgagtgtacagagtggaccccattaacttcagggaccttgttcagaagctgacggctgcgcctgagttccagctcgacccacctcagcagccgcagccgcagctaaggctgcagagcttggcgccgccgccggtgcaagcagttggtcaggtccaccgccctgtgccagaaaaagcagcatcgttgtctacggtgtacaaggagttctctgaggtgttacaatacgaaaagaaaccaaatcagaataataataataataataaattgggatcagctgatattaacaacgttgttggatcgagttttcttggtctaaatcctcttctatatcatcatcatccatatcgttatcgccttctactaattctcataactggtgctcttttctgttgagccccggaactctctccagtctggggcagagtacagttctttagaccatcatattacacacacatatataattgttcattattgtataattacactagagttgggttcagatcatattcctatggatcttaattagttcgtgatttcattttatattttgatttaagagttgttagattaatgtataacgggagtttgtaatgtgctcgatgggaagagtacagtcattttaatactgctcaatatcaatattgtaattgcattttaataacaaaatgaaaataaataacacccatttttcttatatatagtatacaaaatgtgatatattaatattatctatgaggttcatgagcatatttatcataggaaagcaacttattgagagggggagttgagtagattagataatgcagtagcagacaaaatgagatgtcattatttagatcaattttatcttgaaattaaatgggttgagaatataaaattttagcattataagttataaaataatcttgtgatgtgaacctgagaaatgagagggtggacctagctagctagctagccgccgcggcgagtgtcagctggttaacactaatacaaaattgaaaattgttgtccgtaacctctataattcctgtgatatctacacgtttattttgtttgtttgtttgagaaagacaagggggaaaaactaagcaagacaacacactatgttgctgttgcagggtatatttggtaatataaacataagaaatggataaaaattgatttataattcatttcattccacaccatcaaatcaaaccgggtctagtgtgagaaaaatattttaaaaaattgacaaaacaaaagaattcgattataagttataaccaaccactaataataagaagtccaattataatcgaagtaaaactagacgagaaaactctcgattaaaagaacgactaggaaataatagagcaaaaatgcactagtaaacctcaaacggtaataatcatctatatatatacaagagagaatcattacattttgctataaatctaaattacaacaaaaacttttaactaatgcaatttttgagaaaaaacaatcaaaggaggaaaagttatgcaagcagttgttcaagtcactagttttataagcaggatttttgtgttaagttaatcaacttcagcttcattgatcccagtagtttcttagttgtgacatgtgaaggaggagctcatctctgcccaagccagtgacactgctagtcatgatccatggaggatgctttggaaagttctccgcaatcaattgctgaaaatttcggatgttttcatcaggccttttccctttccccaccttcattttgtcacacttggtaaaaacaaaagtcattgggatctgacatcagcaaaggcaataaatccattagaaatgaagttttaggaagcgctagtgtgcttagttaaagggtgaaaagtaagcagattaccttgttgcgtccaagccaattagcacaatccaagtcaatcttttgaggtggaacacttgcatcaacgagaagtagcacagcgaccaaattatctctgttcagaaagtaccctttggtgaatgatgaccaatccgttcgagctgattctgaaaccttggcaaacctacaaataaagtaagcatattaggctattagattatgaaaagtattgtgaaaatagaagacaatatatacgt

SEQ ID NO: 218367 - DNA, 6666 bp, Cannabis indica
aaaaaaaaaagaaagaagaagactctctctctctctacacccacacacactctctctctatgtacacacccttgtgtttgtcagggcttttacacctctttcttattacagagaacaaaagtagagattagagcgaactagagagaggaaaggagagagtggtggtggtggttgagtgtgcgcgcggcggcgcgtctgattctgcgccgccttgggttcgggaatgagattctgggaatgatttagaattagaattagtattggtattgttatcatcactattactatttttatttttcttcttcttcgccgagttcgcttcattcccacggtaacttggtgcctttgataagggaagaaacaaagattgattcagattctgattcggaaacaaggctttcctatttgggatttgtttttctataattctggcggaacttagaggaaccctagcgttccttgttcaaccctcagtgtcggcgagtttattaccagatcgattcgatttcaagcccaagaacaagaagaagaataggaggagagggtttcacgaggttaaaatgctttgggttaagaggctttctggttttgtgtcagctgcaatggtgttgattgttctatcgccttcgcttcaatcgtttccaccggcagaagcaatccgatcctcacaccacgattctcatctcctacgtcttcgccccgatgattccctaaatccattctcatttcgtaaggcaccgacttttcgcaatgccgataaatgcagctccgcagacccctcaatccgtgctccaataagtgtctgtgatcccaatttggtccatgtcgctattactctcgacttgaatacctccgtggctcgatcgccgccgttcattcgattcttcagcactcgctgtgtccggagagtgtgttcttccacttcttggtttccgagaacaacctcgaagcgctagtacgatccacgttccctcaactcaacttcaaggtatattactttgatccggcaattgtacgtgatctgatctcgacgtcggtaaggcaagcgttggaacagccgttaaattacgcccggaactacttagcggacctactcgagacctgcgttcggcgcgtgatttatctggactcggatctggttgtggtggatgacatctggaagttatggagaacgagtctcgggtcgagaacaatcggagctccggaatactgccacgcaaacttcaccaagtatttcacggcgagtttctggtcgaacggtcacttctcgtcggctttctcggggcggaagccttgctacttcaacaccggcgtgatggtgatggatctggttaagtggaggcgggccgggtacacgaaacggatcgagaggtggatggagatccagaagagcgaccgtatctacgagctggggtcgttgccaccgttccttctggtcttcgccggacacgtggcacccatcgagcaccgctggaaccaacatgggctgggcggcgactacgtcaaaggcagctgccgtgacctccaccctggtccggttagcctcctgcattggtccggaagcggcaaaccatggctgcggttagattcaaaacggccatgcccactcgacgccctctggacaccatacgatttgtacggacactcacagtgaatcaaatacaaaggggttaggattcatcgacggtaaattcccaccagtactgttttttttgtcacttttcttcttttttacttctaaatttgccatttttctccattattttgtgtcttcttcttcttcttactctgagctactcattttttatataacaattacattttttcttacctctttgttattatttagttgggtttatttgtattctattctaatcttgttctttttttagttttcttctgcaaataaaagaaaagatactcaatttgttattgtatataatgttattagtaatcatactctgtttgtttagaactggcatttgcagtagtgctagttgattttaaggtccaaccagtaagtaaccaatgtgcaaaagtaaaatgagaagagagaaaataaaaagaaaaggtatccttatctttcaatggtggagtattgagacacactacatgtgggcacaaaggtggccccgaaatggagaccatcgaaatgtccaaactttactctctttttctttacttctttctttaattatcccttcccaccacttagttacagcaacttgtaaaaaagataatctttttagtttctttccttttattaaaaataaaacaacccttaaaaatggcttctttttgagttttgtttggagaatatagatttgtttgtgtatgtaggtggtaggccagtgattttgccgttgttggtaaaagcttaagaagtctactgactatacataagaaaacccagaaacagagatttattcaatgatggtggtgaaagcaaatattagaaagaagacaacagaacctactactacacaaggtggagtgcacgtatgagatttaatattttttcttaactctgttattatttgtatcaatgaatttgtcttattgggtcaatggaaaaataatccaagaaaaacagaaccaagtggagattgattaggttgagataaggctctctctcccccctttctttctttctcaatattagtctcatattgccagctgttgagctttatagctagaatagtgagcagcattggaagaatctaaaagagtttgttttagtgatacattggcaaaagttaatgagataaaaacgacgtcggcatatggtgtgtgtttagcatcggtggcagcggcataggccttgtgagctaccttctcacatgatttaaaatcctacttgtccctttctgcccttttggttggcaatcccatattccctttctccttcttacatgtttttttttccctttgggttttatcttttaagtcatgctggtccatacgaaagcagagtcggctaaggctaattatataaatataaatataattataaacccatttaataaatttattcacctaaacaaaagtggagttttcaggggccataatagaaaatgaaataagccacccaaatatcacacaatttcgtttggaaatatccaaaggagtaaaataaaaaagggtcttcttctcttctagtctctctcggctaggggaccgattccctcacacgtggatagttgttttggagagtcatcatatgaaacagaaattttttttttttaaaaaacatggccaatcaacttggtacatgattgggtaattctataattgtttgttgatgcttattaagtgacttataatatgcaggcatatgggactttttctctttgtttcgatattgttggctgctactagctgctctctctctctgttctttcttcctctggctgcttccatttcactttgttaagtctttgcttttaaggcaaaaactttgatcataaaaagttgattaggaccttccaacaaatttcattgctcgactgtagatggtgaaatcattttaaaaatagctatctgactttcacagctttgttgtcacaatcgttattataatatattttccatattttatattttatattttatattttatattatatatatatttgttccctaatcatttggtatggctcaattatctgcaatgtgtaattgatattacaccaaaactattgcacatgactatttttttaaaaaactaattataattacgcaaacggactagacctactgttttaattgttttaaaagataatgtcagtacgtgtaatattttagagtatttaatttattggcacatatcattactcattatagaataagagtgaaacgggtacccagtttacctacccatttaagctatttgatgttttgaacgggtgggtttaaattatgacccgaaactcagaagcatgaggagcagagttaggtttatttctttacatgtgtgcccttcatattttatatactgagtaagataagagtagctgagtaggttattcatgctcattagatcacattttacactatgctttttgttacatgtcatattcattttctaacctttttttcttctttctttcttttcctttccttaaataaacgaaaaaaagagaagtgatttacttggagatgtacctaattttaattaggggtataatagtgccaaaaattttgtctaggccaatcaacatccattcgggtccccatttgtttgtaaatatcactaaaactcaattgactagctcccttgtatctcaatcaaactaatgaagatttacaacttgtgctgatgaatctacaatttgtaaatgcttcatcagcattattcgatcgtgagagtgcttaaatgtaacttaccaaggatttattgctagagatgttttctcttctgagagatggcttttgtagcaatcaatttatcaattgaatttttttcttcaccatcaattttactaagttatctggtatagtcctctttttctatgtctattaacattttattccaaaatagtttggcaggaggacagtagtagatgaaaacctcgaagcatacaagtagtgtcacgaggacatgtttggggaaggtaaaaatttggtcaaaactaaaagcataaaccattattattactgttggaaatcagtcctaaataaaaccaattcattaatgatatggcaaataaagacaaataagataagaacacatcagcaaggacttggacaaagttagttaagttagtttgtttatcatttttgtataggcttacatgtggtaatctatatatagtcttttatcatttaagaaagagaaaaaacagagttagatagagagaggagagactaatgtgtagtcagagtagatcacttagtgagggagggaaatccgatagcttagaagaaccaaatcaagaagctaagagaagaagaggatcattcttcaaggtgcttcgaaggaagtccaactttagggaaaagactcatccaatggaagttttaacacaaactttagtctataaaagtctgtaattgtcaacagtttgtatcatattgccattggcatagtgaaagggaattcttaagggagttcaaagggaattaggctcttcacaattgtgaggaagttcgaacctttataactttgtgtgtgtgtattttaaattctgtcattttcattcttgcattcaattctgttgatttttagtttgtcatttgttatttatgctagttgaggttgttggctaagcccaacaaatggtatcaaagcaaggtttcaatcgagagatcagccaggaacaatcaataaatcatgaagacttggcagagtagagaaggtgtttgatcacagttctgaatcacaacttcaagaacttcaagattcagattgtaagtgatcaagaaagatatcaacaacaaagatggacaaagatggacattgagaactacaatggcaaaaatgacttagggaaaagatgaaacctcatcttagaaacatttgactggatgaaactttgaaaggagaagttggtatgtcagatacattggagaaagctaagaaggatgacatactaaaaaaaggcaagaaacaccattgtgttgagccttgaagatgaaatctcgaggaaggttttttgagaagagacaactgttcacatgtggaagaaactactatggcacaagaaataaaatgaatttttctctcgcatatggagtatacacacacttcattaaatactaaattttatttcattgtatagttaaattccattaaaccaaagaaattcttttgcaaattctttttttcgctgaaagggattaaaataaagaagttgatttatgcatatatatgttatcttaaataataaataactaataagtatcttttctgaaaaaaaaaaaacaaatgaattaagaggtatgaactaatctaattcatgatttaggcacaatttaaattgctcttcaattcaattcctccattacaagaaataagaacatataataactcaataaaatactttttgaaagatatatatatataataattttatttatgtattagggtttaaaatttctaaactctcttctattgatgaatgattttagggtttaaacttttctaatttgaattagtttttttttttttttttttattttttttttttgaagattttaacattcagttattgtttgtggtggggtgcatttattaaagtaaaacaattttattaaaatatctatttagtaatttacacaaagttacatatgtaatgatatttttggggtgtaattataattttgcagggaccccttgcatttaattctactgatttctggtttgtcattgtgttttaggcaatatctctttctttctttctttttatgggaccagatcgaccactttttaaaatgcagtatgatttattatggtcatattcccttcctcatatttctattgaaactgaattgagagtaataaaaataattctttcaataggaatatatcgttatataccaaaagaataggtgaataacagcatctcaagctaagtacaatgacaacaataacaacatgaaacaaaaaccatctaactaatcactaaactgcttacatagaacaatgaagttgagagaaaaacttca

SEQ ID NO: 218368 - DNA, 3610 bp, Cannabis indica
acctccaagatcagcagtcaagaaagatccattaagataatacctgtccttgtaaattctactgaccagagcatttggtttcgtcattaatctccattcctgcttgccaagaagagatatgttgaaatcatgcgtgtatcgataccccataccacttgttgtctttggacgacatagcttgtcccaactcatccaatggatcccctttttcttctttgacgatgaatgccaccaaaattgacacaaaattctctccagttccttgcaagtttaaaggaagcaagaaaacattcatggcatagttaggaagcgcttgtgctacggtcttgatgaggattttttttttccaaactccgacaaaagttttccttcccaactctgcaccctttgttgcatcttatctttaaggtagcctaatattattgttttttttattccaacaatattagcctaatagcactatttttttagtaatacccgtaacctgtaatttttatatgataaataatacaactaaaaggggagtaggtcattacccaaatctaagagggacgaacttctataattctgtgcgttctttctatttatttattattcttaactctatattggtaattaatcaacatttatgagactccaagtcagttggcaaatttcccaaccaacgttttggtactttcattgaaagcttcaatattcttacgaagatctcatctcttttcacttgataatcaccatggtcctgacaagaaaaagcatgtccactaaaccttaggatccgatggctgtggaccctaatgtttgtgttccacccactgttaaaaatcctgccaaccttgcccagctacctcgggcaaacccatctacaggttttcgatcagaaggctcagttaataataagcaagatctaacaaatactgggcaagtcccagtcaatgttggacaacctgtccaaagtaccacgggggttcttttaacaagagctaccctaggtatatgctggagaaattgggcctggagttgcccaacctagtgtcaatgagccccatgttgacttgagggataattttgagctagccaagctaagagaggtcgtagggctagtccgggatcatacaaacatcctccatcatgagcaagaagaaacacgccctactgtaggcgatgctttcgcccaacaaagataagaattccaagattggatggatcggtaggtcgcgatcctccaagtccatcaggtggaattaaactaccgcaatagggagccgaatgacctaattagaaggttcaacaaaagagctgggtccagagtggaagaaccgccactcataagggacccccctttagggaaaaggtccctatgtcctggaggaaacttaacgccccagggaccgtaactttgtgccaagttggccaactgtttcccaaacaaggccgcctcccaatcgacttaatgatgaagtcctgtttgaaagggcatatggctggaccaaccagttctgagaccttttcaaagatgaaggaagggggaaagatatcccacccaggtagggccgaagtaggtctcactgttggaaatcttatcccaatgaggatggtgccactagcccctctattgatgaccacactaattgaagaactcataataacatcgggtgcaataatgatgttcctccccggaatgctcgaacacattctgacccgaggtctagaaattctgtgtttgatagaatgggcccctcggtaggagaagattttcgaaataactcaaaacaaagaagaaataattttcgacggatacatactaccccaaaatgatcaaccaagggcgcatgatagaccaattcttgccgtcccatacaaccaacctcctatcaatctaaaagaggagttggtcggataacggacgaccagagttagtgcaagcacgaatggatcaactcaagagccatgtacaaggcctattcgacccaaaaaaatttcacctggaacttgacaaggctcaagaattgtttttctctgcgcccattacttagttattgctaataaaagaaataatttatttcacatatataattttttttttttaaaaaaataaatattctctgcgaaacgccaattatttactagttatataataaacatagatcaaaatgttttgtgactaatgaatgtatgcatattaaactgctttttaaaaggtcaattttgggggcaataaagcaaattattaaatagctaaaattgtgaaagtgacccaattcctagacactacttaacaagtctttgttgccaaaatagaaccattaggagattttggcttggcacaatacaagtttgctattgttacctgatgatgttttaggataaatattatttttcattttgactatttacacatgcaatccatgaaattaatgaatgtttcagtcacatgtttaaaaataaaaaagaaacttggggccaattgatataaatgcattctaattgtaaaattattctcaacaacacgtgaacttggtaaacgaaattgctttaatttggttataatcaacgttttatcatttagtctgattatcgtttggtacgtcatattgtattgtattgtgatagactgtattctattctattgtattgtatcagtattatttaatacaatactatgtttgatattgacttgtattaataaattgtgtaaagttataatatattttcaataaactcgatcccaatatcgactacgggtcgagttcgggtccgagtctagtctgagttcgagttcaagtttgagtcccgagtccgggtcttggtcgagtttgggttcgggtccaggtcctaagtctaggttcgagtctcgggtttgggttcgggtcctaggtctgcgtttgagtccggggtccgggtcccgggatccaggtcttgtgttcaatctaggtctgtatctggatccaagtcataggtcctgtctgtgttcgggtgggagattggggttaatcccagatcctttgtaaatattataatataaactaatagaacaatttgttaagtattaaataatataacttacattgtattcaaaatttttatcgtaataattaatacaatacattattttctttttatttttaaaaaatgtgttatataaaacatgattttggaaaatatttttacttttttaaatttaaaaaacaaaaaactaattaaaaaaaagttaccaaacatactctaaaaaagtgttaaattgaaaaaatacctcttttttatattcattaataaaaaatattcttatattatattttattaaaatatatccagttttatgagtgaattgcccaatatattcctactctgtagcatataatttacattaacctaatgggtctaatggagaacatcatatataaaaagtgagtatatcttaaaaagtgagtatatcttaaagaatatgaaaatgaaggtaaaaattaaaacaaataaagtaaattaagtatacaatgtaatttctcccctaaaaaatgaatacacttatttagtatcatttgttttttcgaaaaatatttggtacctatgttcttaataagattcatttggtactttatatttttaaatt

SEQ ID NO: 218369 - DNA, 6975 bp, Cannabis indica
aaaaataaataaataaactaacagagctaatttataaaattgaatcagttaagtgaataaataaaaagacacatgttagatatctattgaagggacaggaatgtgacaagtaattagagacagaagattttttttccgtatttttgacctcattaattcttactacattcttttcttttttcaagaaagtagtactgacgatattgccttagttgtttcggacataagaagaagtttgcatgaagttgattccttctattttgatcaaccttacactttcaacgagattaaaaaagcaatgcatcaattctttcgtgataagatatctagtcttgatagtttcaatgcgtacttttaacaaaataaaaaaaaatggtctacattaagtatagatttcgttaatgctgttttggattgtcttaacaataatgtggccttctctactacaaacactattttgcttgttcttattcttaaaatacaacattctagtactcttaaaaactttaggccctttagttacactactatatacaaattcatttctaaggatccctggataagcttatttcaccttttcaaagtgtctatgctatcaattatagaagagctaacaaaaggggcttatttcaccttttcaaagtgtctatgctatcaattatagaagagctaacaaaaggggctggcttgcccttaagttatacatggctagttgatatgtatgccattcactttcgtcccaaatttatctattgtaacaattaaagtaccatccaaattactcacaactcaatttttcataaatgcactaagcatattaatatagattgttattttactcgtcactatttaaaattactttttgatttttcataggcaaactctcatttattcttgttgcagtatcatgaatttgaaagagttaaataattaattatagttattttagtcttttaagttaatagtctataaggcttagctattatttgtataatttactttcctgactttgcaattgaatagaactccagccactctatttttctccatctctttgttctttgttattctcaactaattatcagttctaaacttgtaagtgttgatgtctttctttttcaaattatgttccactcgaggattacaataaaataatctacctgtatacaattatgacatatcaaatatacaaaagggctaaagaatttgtaggcagtgagagaaaaacccaaaaaatctcactgtctaaacttgtttgagattctccatgctgctgatcatcttaatgattatttttttcatctactgtgttgtctctggcataggaaccatccatggcatgtaaaagctcttgaggggtatctgattctgtttaaggctattcctcatcttggacatggcgaggggagttagtttccatgcaaacattgcgaaagtcattgatttcttctgcctcttcatcactatattcacttccaaatgacttgagataagcctcggtgtcttcttcttcctaaaaaatagaattataaagaatcagatgaggcaatggtttggtacaaaagacgaaaaaagagaagatcaagctgaaggcagacctctgattgttcatcgtcgtcatcctcacttgtgtcttcttcatcaacattttcacttccaaatgctttgagataagcctcatctccttcttcctaggaaacagaacaaacaagggttcaattttttttggatcatcaagtaaacaagcaaaaaggaacaccttcaaaataaacacaagacctctgcatcctcatcttcctcatctgtagaataagcagaatctaattcatcatacaatgcttcatctccctgatccttgatcttgtccatttgttcctgccaaccatgataaagagatggattaagattacctaatcgtcgtatgggagctacagctagctccttctgcaattttggaaaagctcatcttgtagtaacgctaggtgaaatgaaaaagatacatacaagttcagacttgagtctgtcagctgtattctgcattgccgatatatgtttcagaagagcctgttcaacatgagaaatatgagttggggaactttgttttcacaatcaaaccaccatatgagcatttgaatattatttatgtaagaacttttggagatacctcttgtcgctgaatctcaattgaacgtgccaaagccttcctcttcgttaaaagattctttggccttaacaaggaagggcgttgatagtcctttcctcggaatacaattatagcaaatttctttttgtttgattctgtctactgaaaccaagacacctccactctcagcttcaagtgataatgcaacttttttaacttgttcaaaacttctagcattgaccactatcttaaccaactccctgtacttccaatgcaaatgcatgttctccacagtaccatcaaaaactccacgcctacctggaataagaaatcaatctcacatgatttgtagtgcaaaagaaaatattatatagaatctagaataatgatatatacacttaaaatttgcactcaaacattatctacatggactgatagttattttgacaaatcacatttatctaagatagaatcatggaactcaatgttatataaaaaaatgacaatgacgtgctactgtttgtaatgtttgggtgcatattttggaagcacatatcattacactaaggtggcgtttggttggaggtaatgaaatggaatggaaacgaaacaatttttatttcatttctttgtttgatagcattgtaaagtattggaatgtcattccaatagaaagactttccatcattttagtaaaatgagttttccattttgaaatgaaagaaaagaccaattagaaaaaagttaataatgtttttatacattttaaaaatttgattccattttattattattcttattctcgttcctatttctatgttttcattccttccaaccaaacatcacttaaattttgtgtttaccgctattgttgcaataggcaagctaaaatatagaataagctaaaagtatagctaaagatatgaaaaaggtttaagaagatgcatgcatcagatgagccaaagtagctccaaataatagctcatgaaactaatgtatgagtaacgttaatgtgtgagataaaatagaaaaagaaaaaagtaggattttgataaggtattttaaaagatagagtagagaagctgatgggactgttcttaccaagaagtaaaaatgctttcatcctcaatccaagcttacgaaacatgaacctctcctcatcagttatgctatctggatctgcctgctgatttgatggtttcaaaaactcctctaccttagacaacgctcgctcagctttcattacttttctttcagcctggaagaaaatacacaattcaataaaactttctagcagacatcacaatattagctcctggcccctaaactggatttctgtgcataaatagaaagatatgaatttttaaattatgatgatatcaatgaaggagaaaaatgagaaccgaaggcgaaaaaaaaatcacaccaaaataatgtgatgtctttgaatgtattctcatattagtcttaataggtcaattagaaatagtctaatataaacttcaaggaacttacataagcaagcttcttttcgagctttctaaccaaagtagcatgcctcataattgctgcctttcgcatcactttctccttgtgattattatccaatgtcttaccccatttagcatctgcatctaatgtttctccaagagtaccagcagtcccagattgttcggctattacaaattgtggtgtgattatggctgaggctctcaaacgagcttgctcctcctcatcttgcatggactttgccaatctctccctttccagtaaggtttcagtgacttccttagtcaaaaagtttttccctctgtagaagaccaggaagtccttgtttcgggatagaagcatgccccctgttaatgcctgtatacaatagccatcattttgtcattatggaacagaactgtgataatataataatgactaagttaacactaccaaaatgtatatatcactgccacttaagaaacacacatcatgcaagaactgcttgaataaagatggtcattgtctgtatccaataacttgctgcatgttaagaaactaaacacactacttttaattctagtttgaagctaaaaacactattgtgcttcatggtgcatctcaacagaaaagtagctgtcacaaaatttgtgcagcttatattaccttgagttcttcagccattctctcactagtagtcagttgtacaccacgtttgagtgcaatctttgcaatagaacttgtttcccatagtttgaccatggccatagctaaaccttggagctgcctgcctctacctacaaagagattttgttacgaatgaaataagtaaattcatgaacattaatgagtttagtaactaaacaaaatgcatacctaaagcaaaatgaggtggaagaaccctagcaagccttcttaaagatgtcgcctcgtttagaccaagagaacgtcgtaccccataaggaagtattcgatagggtggttcataattaggaaccattcctgggagcatatctgcatccacaggtaatggaccatctccagtccaatctgtatatctaggacccaggctatccaaaactctttctatttcatcttcatacctaacttctgaaaacttttttgtatcaatcttctgctcggaagttgattttgaattctcattggatgtatccacattactttctgaatcaactttttctatggatgtatccacatttctatccgatacaagtttctctatggatgtatctacagtaatacctgaagcaagtttggctagatttcgggtagatttatcactaagactttttgtagaagatgtttcagtattattatatgtccttttctttagttgcaataaaggaacctcgtagctcacacctctatataaagcaagagatgtaccagatctccagaccactaatccaccagtttttcgctgagcatagtatcaaatgcagaaaacttagttaataaaattaataataatagaaaacaacagcaaaaaagagaacagctattggtaatggccattgttagaagagaaagataaggaatatttatgcataaacttgtaagcttaaattcaaaagaagcaagcaaactctaatatctcatgcattctcttcatattaagtgcaggtggtccttcaattttcaatctcacaatctctgatgtcttccatctctcatgaatcatgtccacaaccgcttgagttacgccggttcctccaatcctagtcttgtgtttcttctcgaatgtcaaattccttaacctcctcaactcggattcaggaagagtaagttgtgcaagtgaagtcctatggtttcttctcctcatcaaactgccttcttggccatctttccccttaggtttctcccaaggaaacctcacctcaccctcaccatcacctccaaacacctgcttttctattccaaatggggaattctctgaaaacccacctcttgaatttggcaacattccttcctcaacataaaatatatcctctacagaccctttctcaatcactctgtctattttctcttccttattctcactcccagcatccatgtacccaaatttcttcaatttctccacaatcttctccattgtactaccacccccaccatcattaccaccattactactagctcttttaactaaacctgaactcggctgatttccagtctcactatcccgataatccaacacggccctaggctgttttggaggattgtgttggtcatgtttgctccatttatcaatccaattactagaagataagtttttatcaggtttataccgagtatcagtctggttcctactcacaaaagtggattttctacctgggttttcttctggggctgagctagattttacaatgtattgggtagcatagatatggtgttttgtcagtgttattgaagaaccgtacctgaagaaacgaatttgagtgccatggaacttggagaaggagctttggaatgagtcgaagaaagtggctgggtagaattgacgagtgggtgctactagagccatcagaaataaataaataaatggttcatgagattaagatgttgaaaattgatcggacccagatgagcaaaacgatgaaagtttgagacttttctgaggtgttagcggttcaacagctacaataaggaaatggaaatatccttgttattttgctgggaaataatagaaatagcctcttctgtttctgttatccatgtagtgtaagagtgttttttttggtcatttctaaaggcctgtttggataagccacatattgtgctatgtgattttttttttacttatgaataaattgtggctaaacctcaaatacttcaccaaataattgtttttatcaaaccgcctaaacttatgttaatgttaacggtttaatttttcatctaattttttctatttgactggttcacataatttaattatttatctattataaaaattattttaaattagaaaaatatatagttaaattttaaatgaattaaaataaaaattgaaaagaaaagccctaattttctcacgtattctccaattcctctttcataaccacaaccaataaacattaccaaatcaccattaccataccacaaatataaagaaaaaaaaaatcaaaacatcacaaatctgataaaaccaaaacaaacccagaaaatattcaaaaacaaacctatagtttaagatgctcacagatacatcaacaattaaattgttaaaaaataaaaaagagaaaagagagaatgggacatgagtagagatagaaattgaacgggggaaatgtaattctcacctctattcccgctacctatttatg

SEQ ID NO: 218370 - DNA, 5406 bp, Cannabis indica
gcgggtagtggaaaaagagacctcatttttttatttttgatgtttacagtataaagaaaaaaaaaaagtctcaaggcagtataaaagttattttttgccgtgtggcagtatttttgtaaagagtaagttaaaatccagtattttttgaagttttcccatttttgtaaggccgtttttcatgaatgggctaggtggaggcgtctggactttggaaatggattgagccgtgaagagcaattgggccgtagggaggcccacgtttgacacaaaaaggtggggttccgtctacaaatctgtaccccacaagcgcacgttatcacggtgcgctgtccaatactggaaagctatgagtgctcgactcaaacccacaaccagccgagagcccagactccctccgcttcgtgtccatgtctctcgggaccccaacgaaaccctagtccttttccgaaatatcacaatggcgaggaaagcctctctagccaagaatgcccttgccacagccgctgttctattcgccatctacgtcatcttcaacatatttcatggccctaccgccacctccaagcttggatcggctctacccctcggcaccggtgaatcgtattcgatctcactcaattccatgaagaatctgcagaacagtgccgggaatcctgtcagaatttacctctatgatctccccacgaggtttacttatggagtcattcagcaccattcattagcacgcggtggtaaaccggttgatgacctcaccaagctcaattaccctggtcatcaacacatggcggagtggcacctctttaaggatttgctccgacccaattcagagcgaactggatcggctgtggttcgggtttcggatccggatgatgctgaattgttctacgtgcctttcttctcgtcattaagtttgaatgtgaacccatctcggccggcagcggaaccgggtcttgacccggtcagaccggcttacaacgatgaggagacgcaggaggcgttggttgaatggctggaggcccaggaatactggaagaggaacgatgggcgagaccatgtgatcatagcttcggatcccaatgcgctgtatagagtgatcgatagtgttaagaagagtgttctacttgtttccgattttggtcgtttgaggcgggaccagggatcgcttgtcaaggacgtgattttgccatactctcatcgagttaatatttaccagggagatatcggtgtcgaaaatcgcaatacattgttgttcttcatgggcgctcgataccgcaaagaggtaattttcataataattttcttttccttttctaatatagaggagaaaacaaagaaaaaaaataccaaaaatatgcgtgttgccaacattcaatgcacaccagctaacggtggaggcacggggagattttagttttctagccatgaaaattaaggatgttgggttttgtgtaatccggcctcaatatcctataacttttagataatagggttcgcagtatcaaaattttaatcattcaaggacttattttgcttttccccatcctctgttcttcgagcactttttctttccttacacgtctctttctttctcagtgcttgctcactatcttagtattacattatggtttcatttatactgtgaaataagttgcgaagttctccagtcgtttatctaaatatgttatgatatccgcttcgcttgatttaccctttgccatatagggccacactttatttatttatccattggcaagttctaaataaatttatttagaacttgaacaaacatacttactctcttaattagtagcttgattgaatttaatattctagatgttcattggtagtcaaaagcttcattgtcaattaagacattcctctcaatgttttttctgtgttttttttcttttatagggaggcaaggttcgtgatttgctttttcaaatacttggaaatgaagatgatgttacaattaaacatggagtacaatccagagagagccgacgtgctgcttcacatgggatgcactcatcgaagttctgtctaaatcctgctggtgatacaccatcagcctgtcgtttatttgattccatagtcagcttgtgtgtgcctgttattatcagcgatgacattgagttgccatttgaagatgttatagactacaggaagattgctatatttgttgaaacctccgtggctttgaaacccgggttcttagtgtcaatgctgagagcaataaccactgaaagaattctagaatatcagaaagagttgaaagaggttagactatttcccctcatttttatctctcttttagcatgtatacatgtagatatgcatgcatataggtatattgagcttacattgctatgccttttttgggtgtaactttttatttgggtagcaaacgtactttgtatgttatattggggaaacttggtgaatttattgagagagtaaacaggtgatgagatatgtagttactagttagcaattctatattttactctctctggatagttttaaacaacagtaaatttgggttggctaactgcttagtttgaacttaagatttttgtggttttccggttaagtggtatgctctattctctctatgtttaagcatttttcatatgatgaaatattgaattaatgcttgatgaaaccatagcaatgcaattgttgataaatgaataaaaatgtgggaatgcaggtgaagcattattttgattatggaagtggaacagtgaatgagatctggcgacaggtggcacaaaaactacctttgattaaattgatgattaaccgtgataaaaggtttgtcaaaaggaatttgactgaaccagattgctcatgtctctgctcaaaccagactggcattctaacgagctattgaggcaacttttgtcagtgaaacaatggtgctagttgtagcatcatacagtttttctttcttcaaactaccatttcatcagttcaggagcacaaaatttccagtcttgtgtggttggtttcggaagttacattgcaaaatcgttatcggggttaaaagtgctcaagttctgccagagtttctcttttctctttcttttcttttttcatttttttttcacaagattgtatagcctttgctctaggatgtagattctttttactaattattctattttttttttcacagatgttaggtaataaaatacttagatttatctgattctcaaagcagtcactctgctctatagctctttcaaatttgtatccctattacagggctgatgagatgatatgtatacattctatacaaccgactatgaaagcatagttctttagaaaagactatgaaaacatagttgtttttttttttttttcaaaagaagtataggttttatttctctcacattcagtttggatagagttaactgttgtagagtaggatagttgctaagagtactcccaacagttattttactttttttttgccactacacttttacatatatcatacattattaaaatattttttaaaaatttaattaccttttattctatttcaaatatatatatatattaatatatactcatgtatctaaaaataattattaaaacttaaaattattaataaaatatatttaaagtgagtagtattttataaagatagagcatgaatagtaaattttaaagcaaggagtttagtactgttttttaaattttttaaaacatcttattttaaagaaactcttataagttctctgagggacaatatcagtcaaaattgattaccaattgacattgtgatcccatcacaagaatatcaatgatagtaaattaaaataaaataaaaagtaatgatccagcttatctatatatgtggataagtcgtttcagtaacagtgtctttctcaaccttcctttcgagaatcagatttgtaaatacaaataattttgaagattaccatttcatgagagaatttgatatatctattaccttatattaaagtcacttttccaggtgaagttatgctgtcatcccatcgattcaaaataaaccccactataatattatatgtaggccaattatgaaggggcaatttgaactatgccaatgaaaccctaccaatactgaccagtgacccctatcctatgtcacggcggaatcgagcaccccacctaaaaaaacaccattccattgttaaggtcgacacaaatattgaagtgctccacctaacacgcaaagattcatccctaatcctaaacccacaacaccaagtttaatgattctagcatgacatccatagttatatagctcgggaatcaatatactgacttgtatttttttttttgttgtcctttgaaaggaatatagtgattggttatatgttacatattcgaaaaagcgttatgtgttgatatttgttgatgggtgcgagttaaatataaataaaagagacacaacatatttatagtaatgtacttcttttgacgtgacaataataatttctcatgagaattacaagaaactagagattaaaaaaaaattaaaaaatatgaaaaaaattactttggcctgatcttggccattagtggtgatccaatggtgaaaaatgactcttagtgaaaatcatcaatttttgaagtttaaatctcgttgtcggataattttcgggtaatttgctaaaaaaatagtaactatgttaagaaaaaattttggacttgaaatcttcaaaattgcaataggtgtgagacacgacttgatagatctttgaatagcttcaaaatgcaagttgaattgcattaatcgaatcaatattgaaggagttatggccgttttattgaaagttgttcagcaccctgcaaccaagttgacacctaacgaccaggttgacatcttgacactaacctggatgtcaggagagtgaaaaaatgtcctagactttttttgatacctaattgatgtgtaaacaccacttagtcagattttgtgttttggtgaagctgttcaccagttcttggagatgtcgcttttcgtgaaatcgagaagactcgaaactccccgattttgtcgatattctaccttgttgaaagagtaaaatatcaaagtatgaatttgacctatcaaaagatttagctctcatttactacgagaaaagagttgaatgctcgaaacaaaatcaaattttgataagtagaacccagcgcaccaggtcaggtgtcaacttggaagttgggtgcttccccaagcttgtttaaatacttctatggcatttgaaattacgaacaagtctcctacctcatttttgaccatttcaagaacaattcccagagcataatttttatttgagtagcgaaaacatgagaaccaggttgcatgtcaacctaggcgcaaggtgtaatatccgctaactccga

SEQ ID NO: 218371 - DNA, 1869 bp, Cannabis indica
tgttttagtcacacataactttttgttgtgactacaaaaatatatggtgtgcctaaaaaattgtcactaaaagtagcaattttttgtagtgaataccaattactgtttactgagggagcaaagttccaccacgtacgactgattattttatacacattgtcaactcattttaccaaaagagtgtcatgttatgtcgcgatcacccaaacatacttttccaaagctgctatgacgttctaagaatcgatgtcctgaaaatccaatcctctttcattctttggtttactaaagctcattccaagctcaataatccaaaaaacacccttccaaaggaatgatctaaaactagcattaatttgtttcaatatactcttaggcaagaacattatttgagctcaataaacatgtataaacactaaaaatgagttgattagaattactctttcagcaaatggtaagtgccttgagctccaaacctgaataagcaacaattttctcactaaaagaaagaagacttttgtcggcacaaatttgtgccggccaaactagacacaatgcgccagtaaccttttgctggcgcatgtcgccaataactggtcggtaaagctggttttatcagcgcaatttgtaactgcgctcgcaaaactgctttacactgacgtatttcttcgctgacaaaaagtagctcgcctttgttaagtgtcagctaaatgatcactaaaaagttgtactggtgcaattatgcaccggtgaaagttggcacacttttttgcaattaattggtgggtgatggttttacaggcccaaatatgcggcaacataactgatacccaaccaatataatttggtgggttacagttataccggtacaaatttttgctggcaaaactgttacccgcgaatttttttttcgtgggtgtaagttttgccaacaaaaatctacgccgacaaaaaagtttgtgtttttaaatattttcataatttataataaatattacaatgaattaaatataataaattatatttgaaaaaaatattattaaatgaaaagtggtattcacgtatataattaaatagtatcccgatcgagctactataaaaaatatgttttgagttgtaaagttagcaactaaagtaaaatattaaaacatgttcgaaaaaaagtcattttttgaagttaattatcaaatatatatggttttaaagaggggtaattaattatgtcatcgtcgtcgttattctgagtctcgggacggtgtgattacgatccagtactaggagtagggaatggtggaagtggatccataaggcaagttgaaaccaggaacaaccgaagagatatactttaactgatcttggaatcgcatcatgtagagttgttgcgtttcatattgttgtttcaaatgttgagtttcctgacgtgcctcctgcacctgtcgttgtaaggcctcatactgctccatagtaatagtctacgagacagaagtaaaaggcagcgggtgctcttatggctccaactgtcttcagtttcatggccaaagcctctcagatgttgagatcgctcacccactacttgtgtcataacaggcaggtctcatgggtactgaatgtgatctatatgatcttgaggaggttgatcagcagtggtcttgataggctagttttaggtacattttataaagtattttaaaggtgtgttgaaactcattatattcattttgctcataattaggcttgttgtctacatgtttcaggtttaaatggtaaaattcataatatgaattaaaaatgagaagagatatgttaaatgatatgaatatatatgatgaattatcgtaagaatggttaaagggaaaaaagttccttcta

SEQ ID NO: 218372 - DNA, 8560 bp, Cannabis indica
tgactttgaccgatgtaactacttactatctcatctgttaaagcatgtcaatttaggttatgcagagatagagagagtgacttttacttttttcaggtagtaatacaggaagaaacaatgccaaaccttgaggagttatcgctggctatagatgctctaaagaagcaggttgtatctaaccgttgtatttctatacaggtaaaattattatggtttctctacgttatagctgttactgttagtctcagattattgtttgcttagtttcttatggggaccattgttctatacgcagaaacgaatggaagaaaacaaaaagaaattagttgatgttacaaactatatgtataaattgtcaacagaaagatcaggccagtttgttgatgcttgtaaaagtgtagatttgttatcaattaggcagaaagatgcatttgatatgcaaaacggtacagatataggtaatggcaacaaggataaccttgaagaaaacgtccatgcatctacagctgttcttttgggaattaacgttgcagccaagaatgctgttcgtcctattaagctgttagaagtaaaaagattacctccttatactacatggatatttttggataggtatttggaatttaaaagtctttttttaatttatttcttttgcttgaacaatgttctgtagtcagtgtgtggaaagttgtgaatgattttcttaatacttctaatgtagaaatcaaagaatgactgaggatcagtcagtacttggtcgacgaagaatttattatgatcaaactggaggtgaggctctaatatgcagtgatagcgaggaggaagcaatcgatgatgaagaagaaaagagagattttatagagtctgaagactatcttattcggtaaatatttttaagtgtctttttatttaaggcatatttattttaataatgcgcttaatatattaaatggtcattttgtctttttaatgtttacagttcgactataaaagaagttggtctctctgatactgtgctggactcacttgctcagtgtttttctaggacaccaagtgaagtcaaggtacaaactttcttcttatacctctcttctacgcttatcctacacatttattatctgaaggaaagttggtcagtgtaagctttggtgtaccagtttcccatttgctctctgctgactttacagagatatgaaacaccatcaaacatcttatacaggcaagatacgaaaatcttattaaggaagagaaagctgaggatgggagcaagattgctgaaattgaaaaaaatttacagattggacattctattcttgataaagatcttgatgctgctttggattcatttgataatctgttttgtcgacggtgtcttgtaagttctcatatcttgtgttattcctttgctgtttgttctttctttagtcatcggttttctttttttccttttgcaggtatttgattgcagattacatggatgttcccaggatcttgtcttccctgttagtaaagttattgtcttacaattatcaaatgtcataccaatcatgtaatagttgctaatatggaacgttgtcaggctgacaaacaatcttcatggaaccctccagatgatgaaaatgcaatatgtggtccacattgctatcgatcagtatgtcttgattaattattcatttggcatcaagatttaaatgtggggagttaccaaacaagaatttcaaattttctcgtgttaggtactgaagtcagaaagaattgctagaatcaactcttctgtgaatggtgattctgttgagaagacatttacaagatctgatggtaccagtgctcagatttcatctggaaagaaatcttctgggctgtctgctagaaaaggaccaagtcctatcaaagtgaaagtgcttcatcaaatgcaaagaacatctcagaaagcagcgactctgactttggacccagaaatcccagtgtccatcttacatcaccctccaagaccaaggttgcaggaaagtgtggaattcgcaagcggaacagcaaacgagttgctgagcgggttttagcatgcatgcagaaaagacagaagaaattggtggcacctgattctgattctattgttaatggtggtcttatccctactgatatgaaacttagatctaattcttgtaaagaaaatgaagatactagctcttcttctcataagaatgtgaaatctcctgccactggaaggtctagacggaagggttcgcctagaaaggacattcacaaggacattcagagtgacgctccagatgattcatcaaatgagatgatcactgatccacctgttactagttgtgatgacaattcaaggaaagaagaatttgtagacgaaaacatatgtaaacaagaatcgactgatgataaatcttggaaaaccatagagaaaggtctttttgagaaaggcactgagatctttggccggaacaggtcagtatgatttgttatggttcccttttgtttatgtggaatgatttttacagtcaatgttggtgtagtattagcatttgaaacattgaaatttcatatggtttgctgcatctttgtgtgatccaatttaattggttatttgttatcaagtttcactattatttttattcccgaaattggcataatttaaattaaatattaagctccttaggtgggaaagcgggatgcatggtcttaccgttgtcctagaagttgagttgctttgtcgatgttctatggagtaaatttttaacttcagttcgtttggcgtgtatttggaagaaaaggccaagaaaatctttttgatgccactttatactttatccatacaattgacttagaacaatatgtttccaagtacttttcttctaaatttataatttattgacctattgtattgtctttatgatatttttgggttgcttgttcagctgtttgattgcaaggaaccttctgagtggtatgaagacttgttgggaggtttttcagcacgtgaatcactttgatgctaagatgtctggacaggctggtgatggtgcaaactctcttgtcgaaggctattctaaggttgacttttaaagggtttccggttagtagtttcaatgatttactatattgcacaggatcccctaattcacaattttgtgtttttccacggtgaattgtcctgtagggtaataatgaagctagaagaaggtcaaggtttttacgtaggcggggtagagttcgtcgtttaaagtatacttggaagtctgctgcttatcattcaatcagaaaacgaattactgagagaaaagatcagccatgcaggcaatataatccatgcaattgccaaacagcttgtgggaagcagtgttcttgtcttcttaacgggacttgctgtgaaaaatattgtgggtgagtgtttatccaactcttataatgtgattctttgatcatttatggagtttattgtttaaatgtacgagtaaaggttcctaaataactgcaactagcttatttttgcagatgtcctaagagctgcaaaaatcgatttagaggctgtcattgtgctaaaagtcaatgtcgaagtcgccagtgcccatgctttgctgcagacagagaatgcgatccagatgtttgtaggaattgttgggtcaggtgagtgctttatattgctgtttcctgctttttgtgttaaggttgtacttgcgattgagtataaggtatgataccgtgcttgaaattgtcaatgtgaatcacaacaagactttaccttatgataggacttttgttcgacaaactttcaatttactaggtatacaaatgaggtgaacgttatttatgagtaacactttattattaagaatggtggtcaaattatgtagttccatgcattgtgctctagtaggagtaaagattattttttaaagtaccagtcgtgtccatttaattactaggaacatttggtaaaccatttttgtatcgaactttttatatattccaagctactattgctgattctgttatgtaatttattggatgttttagccttgataataaaataattttgtatggcgttctactaagcataaattggttttgcagttgtggcgatggttctcttggtattcccagtcaaagaggtgacaattatgaatgtagaaatatgaagctacttcttaagcaacagcagagggtaatgattttcacttttctgtcattaatttgtttcatcattagaccatctccaatgcatataaaaaatttgctaaatttggcacaaaaaagagtaaatagcaatagcaaattgaggtaaaacgtattatcattaatgataatattaataaataaatatgatctatttcaaaagaagtaatgacaatttttctttaagatttcgtggttaagacatttgagtcctgttgctacaatcattgtgtgacctcgggcttgttctctattgctttgtaggtgttacttggacgatctgatgtctctggttggggagctttcttgaaggtaatattcaatttgcctaccacaaccgttgattttccttttctgcttttcatccaaaatttattttatttgtttatttatcttccagaatagtgttggtaagcacgaataccttggagagtacactggagagttgatatcacaccgggaagcggacaagcgtggcaagatctatgaccgggagaactcatcatttctcttcaatttgaacgatcaggtatgtgacacatgtcaatagtactcaatcctagtactttctcaagtatggtgaagttttttatgttttgtctcttcaattttgaatctgtttttgcagttcgttcttgatgcttatcgaaagggtgacaaattgaagtttgctaaccattctcctgatccaaattgctatgcaaaggtacatttttttcatggcaaaagtataaacaattagagagttccttcccacccaagagggtaggtttgtacccacaaaatctgaggttcatttcatggcaggttattatggttgctggtgatcatagagtgggcatatttgccaaggaaagaattggtgcaggggaagaactgttttacgattaccgttatgaaccagatagggctcctgcttgggctcgaaagccggaagcatctggttctaaaaaagatgagggcggcccttcaagtggtcgagctaagaagctggcttaatatataccacgatgatgatttatttcaatctttggattcacatttattttgttctttcttgtttggctattcttttttttacaggtacaatagtcattctcattgatttagaaggcgcattcttcatcatttggtaatgggagagagagagagagagagattagccattgcttctctcaattcgagaaaattgaaatttgtcattttacgattcatgtttccttcaaagccaattgtatttgctaacttcacacgttatcattttaatgaaacattttctaaccaaatttatctattattattattattatttattattattaataataataataatatattaaaaaaaaagcgtttatatataaataaaagcattagacctcaaggtcgttacaaaagagttgtttaggaatagtaggaattcggaatataaccaaaacttttggtggaaaaatgtccacaaagtcacgttatggttatgggttgtaaaattaaattttttactaatatgttcgaaagtacaatcaacaaaaaaaaagggaagtaggatctattattattcttgtctaattcaatattaacccacttatgatttttttaaattctaattttcaatccagcctaatagtaaatctaggggtgtccataaaatattcgatccaatccaatccgcgcgatctaatccaatttaattcaccaagtgcggatatctacacttgtacgaattggattggattgaaaaattcaaaatccacacttatgtggattgaatattaattgacatgtaaaagtaaaacaatcaaatctacacatttataaaaaaaattaaaaaattatctatacaattaaaatgtaaagtctaatacatataatacaattatatttcaaaacttaaaagatcaaatttatgttccattgttacatataatattttttttaacatacaacttaaaataaaattaagggtaaaaataaaattaagggtaaatagcagcataattactcaaaattttaagtttgtaagcggcataaacccaatgtttatttttagcggcataagtacccaatgtttgtaaaactgtaattcttcttcagttttgtcagtatagactccgttttaaatttattaaaagaatatttgtactgactccgttagttttctaattattattttaaatattaaacaggtcaatacatttagtattcactttttaatttctttttacaaattatttatacgttgtacgagacacatacaaacatagaaaatagattctcattaaaataggtttactgactccgttagttttctaattattattttaaatattaaacaggtcaatacattcagtattcactttttaattttttaaaagaatatttgatactgactccgttagttttctaattattattttaaatattaaacaggtcaatacattcggtattcactttttaattttttttacaaattatttatacgttgtacgagacacatacaaacatagaaaatggattctcggtaaaataggtttactatgaaagatgttttcctcaaaattgaaagatatttgctgatttatttctcatgttgtaatctttagttatatgtgagggctactatatgtatgtgaaatagacggattgaacactgcttttttttatattgtaaattattctaaatttcttaaaattttgtgaaatatttaatgaaatataacgtacacaattgtgaaaacagatataaggtgcattaatgcactccttttaaggggtacatagtagaattattttatattttgtataaaataaaagttattaaaatataatatattcataaatttttaaagtgtaaataaaattaccctaaaattatgttgagtttgtttttgtagcgcagcctatagcttagggtttctttcattctttgaatggggtctaaaccagtaaacctttcataaagttgctatcccaaagtaactaaatgagtctatgacaatcgataaggtaataataaattaattaatatttatttaaaaggttgccaatgcccaagttgatctgaaaaaatgcatgatcgattaaccaggaaatttctttcaaaattgatgtatatatacatatatatatatgtgacgtatatcatgtacccttttttatttttctcaatataataattttctttctaaaagacgtagtcaaatttgatttggggtttacttttccactcctcctaattaaccatttcgatcctcatcttaattaattaaagatcgttattgctttaaattaatttcgctcgtgagaaaaaatgaaaaataataataataaatattagaagaaactcatacatatttcatgatctacataaaattttctttccaactgaaactgatgaaaccaataaaaagagaaaatcaaacgtcaaaggttagtatgacacttacgtatttttttaatctttctaatatgtgtgatttgttatattttcatgactttttgttattgtcaaccacgtggaagaaaattataaatatatagatataagcattgtttatcttatattttatttgagctaaatatattgttggacactattgaatgacgtccaataacaattttcataaatatctcaagaaggaagaaatgagataccattatattaattaggaaaaatttacagcaaaaatatttattttatatataaactacataaaataaataaataaaataaattaagagctagggctacagagacagcccctatgttcaactatatagtgtgagtagcgcacacaaggtatatgtgctgcaatttttgattttttaattatttgttatattttttatatactaatgaagaaaaaatttaattgaaaacatattaaatattttgacaaattgctaagttataaatgatacaatacataccagcacaaatatatgcatattaatacaacttaattgacccaaaaaaaaaatatttgtcttatatcatatcatttttagtatattttccttctaaaaaatgatgtagtgaaataaaatttcaatattaataataataaatttgtaaatttggtgaaataaattaatgtaacaataataagagtagatatactctgtaataatttttgtatttgatatataaaatgatactatattattatttttattatttgacaaattgataaattttaccaaataaaatgtagtattttttacgatgttacttggcccaattacaaaatgaaacaaaactgccacaaaaaaacaaaaaaataatataaacttagaatacatagaaatgtgaattctatgatttaatttaaagcaaatatcacatctaacagtaagatatgtttttagg

SEQ ID NO: 218373 - DNA, 3901 bp, Cannabis indica
catattgtaattacatgaaacgtggagattgatcacgtttttatgagcatttattaagataagtaccaaaagaaataactgtcatattagtaaattctataaataggatagaagaccaccatacaaaggatgtcaaaatgatcatcgagggatcatcttgagagaaatttatctatttattttttatatttattgaattcagtattcagtaaacaaaatatccataaattggaaagagtcatggagtatataaaattataaaatcacgtaaatatcttgtattaattattttattatctattatttattttgtaaaagttttattaaagttattctatttaattcataaataaatattatttattgttaacaaaattttgagttaatagtgatatttttaaaattagtaaaaaaattatgtatatttttaaaagaaaatatattttttggccagtacctaaaccctaaattatataaggggatattttgtatattaggaatttttcttccctattgataagagaaataaacaattagataaagacaacagcaaaaaaacaacaaaaaaaattaatagaatttttttgactttatgataaacagcttttaagttatttatatataaaaaaagattgtatgttattcgttgttttgttttttaatttttaaaagtaacttttttacaacttatctgtccttgtaaatgtgtgaacaaactacttttttttttttgtttttttttttcagatagtgatagtatttgttttgcttttattttttttttataggaaatatatatattttttttgctttgtcaatgagtactacatatataaattttttctaaaaaaattaaaaaaaatattatatgatttagttccacacattgtttagcaatattataatttttcacaaatttattaatattcatgcatttccacttttagatgcccataataaactaacattataaaaatgtatcaattttaaaagatttcatttaaaaattgcataaattggtctttccatcataaatttttataactcttttcacagtatattattctatcatagcaagtttgctaccttccaatattttactagaaaaaaaaatctttttcttccctagttgaattatagagttaataatttaattaatacaattattctaaatatttgggattttttttcatctatacactttaaaacaagtttttttttttttttacggaaatccacataacaatccacatgccaactagcagaacaacctaaattgtaatctaaatccagataactactcacataaaatactgaatcaatctacaccgtaaaaataaaattaaaaaattgcatataaaataatttgcctaaatattttcactttcaagttaactaaactatatttttcaatgaagaataacgttataccttaacataagtatatgaccccactccaaataattcttgtcttaatcttgtttatgtgcctaaataaaaggaactgatcaacttgcaagagtctactaccaataaattaaatatgtatatgtacatatataaatatgaaaatattatataatataaaaagaaagaaaagcttgcttaattttgaaaatgggtcatgtgggtccaaactaggggacaaatggtatccctatgattacaaacttgcaattggcatcactcataggcataaatatttgtgcttttttacaaagctcaatcatgggtgacaaccaaaaaagtaattgtaacatatagccaccaatttctatatgtacatatatttatttatattttgtaattattaaatttggataacacttaatttaaaaacataattatagatgaaaaatctagtgtagattttgagctatgattttatttttaagagtctccattataacttaatcatgataatagaagattaaacaagagggacccaaatactaattctatcttatcaaataataataaataataaaaaacagataagcccctaaatctatcacaagatttgaaaaccacattaattaaataaatatttctatattgatcttgaacaaggagtaaatctaggaaattttataaaactcaaataattaaatttataaacaaataaataaataattggtgtttgttttaatgatgggaaatactcatttacttttaaggtgaaaaaaagttgttgtagaatattgattttattatttatatgtgaaatagacattataataattaaagataaaggacatttcttttttgagatgtgtcccaagaaataatcatttctataaattatacccttaatttggtagttattttttttaggggaccttattttggtagttgagtcaactaaatcttgtaactgggctattatttgacccagatctggcccatttagccagaaataaagaaggtttttattgaaacttaaccatttattgccaaatatatttaataataggtacatctaaatgaacaataaattgaaaaattatgtttgaataattgcccaaaaataatgggtttttcaattcatatgataaatgaggctggtgtcagtctttttctaatttggaaaactaataatgggtcatttccaccttacaaattcataactaaagaaaaagaaaaataacaaatttaacaattaatacaaaacatatctttaaacacaaaattaattaaatttattttacaattgccaaaatgttactgtttcttttttgaaaaaggtaatcaaactttattaatcttaaacttctattaccaaacaagaaaataatatccccaaactgaaaatgcaattaagttataaactataaattcttataaatgtatgagctatttggtgaacctttaataaaataaatagagatattttatgaattcacaagcaaatttcttgtatgactaaaccaaacaaagaaatcattttaaatgatttgaatgcttgtaccaccgtcaaacaatctatctcaagaaccacatattgccatatttttttcttgaatctaactcaaagcttctctcaccccaattactttagttaactgagaataagaaaaaaaaaaaactaaaagaaattatcttgtataagaatacattaaaaatattatttaaatacgagaatattttaaaaacaaaaaataaaaattaaattacattttttttaaatttgagactaatacaatataagaccacaatgtaatttgcatgtgagatacacatgacatttattttttttttatattgggaagggaaattcaaatttgaaacattctctttgtgaggagaagtgtgaaaccattaaactatgtctatgaccactacgtaacattacttagtaattagtatatagaaattttaaataatttaaagtgtcgaaatcagagttcaaataatcagatgtatgcaattatattagactatttgaactttgattttaaattattaaaaaattttcaaaaactagtaggatacttgttataagtataatgtaaagttatacactatcataatcatatatatatatataataattatatgcttttatccatatagtatagtattataagaaagtgagaataacaccttatatattcatccattatgtagtagtgaatttggaaggttaattctttcaaaccaaccaaattgatgaatgaacattcatacttttatgaatatataatagattgatcctattcctaatcaataatgcatgtaaattttcaagtccaaaatcaacaaaacaatttggttttgaaacacacacatattaagttctttgttcaataataaaggggccacttagttaggtccggttgctaagcaacaaggcaagccaaaaacaaagtgttgtatagcaaataatattatggcctttgga

SEQ ID NO: 218374 - DNA, 5529 bp, Cannabis indica
tttctctcagataatctatattctatttgatattaaatacctagatctggcagcagaacatttagtattacgtatgttttatcttttcattttgcactagtagtgctacatctttacggtagatttaacttagcacattggaaataatagcagggttgttcttcacatcggttaagtcatctttaattggctttatgcagattttgcatataaataatggtgctgtggaacttgaagcatctatcatgggtacccaacaagagggaaagaagatcaaagttccacttaattcaaggtgagatattgctcctttttggtttattttgtaatacaacagaaagaaatcctgctttgtatatcagacattggttgcagcagtgatgaagtcttttctccatttcctgctgctgtttccatttctttatgagtttgtattgctgctataagaattgtggctttatatctggattaatgcttctaaaagatgtaactctttcatttagtgtatagtatagatggattgtatgtcatagattgatgtaccttactctgtttgtctgatgaggtgcagaagttgtcctcacttttgttattgttgccagaccagaaacctcaccacaaatttatacatctagaaacctgactatgatattcatgaaatttttaagtgtgatccaagtttttttcaattgaaacccatgggtatctggaccccacccaactaatcccaccatcatgcttcagtgccaggtccaagtccaaggggacatcaggaaattagtgtagtggctgggttcaaacgttgagagttctgcctaagaattagtgtagtgaccccaagattttttgtgctcatttcattttctcattctctgagaatacttttgaagatccatatattattttaagtagttgattgcacggccaaggttgacaaaaattaaataataagtatttggattaatggtcagtcttccaatttctattcttcatcattttctctagcctttcattattgatttactctctttgttaaaattttagcgacaagctctttaaggagatacgggatctgaactttgaagttgttgtccaggttcatcttttcttagcagattatgtttttcattgttcatttctctttcccaaatcctcatttaagtgtccattttactgtataattcctttaaagtgccaacatcttagttgctatctgcagtttgattgcagattctgcgtcaaaaagcaacatccatgaagcaggactacacagaaatgacaaccactgtgagtgaatgccacaatctttcacagtaaaatattttgtctttgttattagttctaatggacttatatctataatgttttacagaaccagtctgtttctgaattgaaggacttcgtcaaaaaactgaactctttgccagagatgactgtatgtatttttcagttggtgaaaattgattattttttttgccaccattgttttctaaatttgttgccatttgtggctttagagacacataaatcttgctcagcacctgtcaactttcacctcaaagccatcattcttggggcaacttgacatggaacacacacttgttgagggtcagagttacgacatgtaagctgattttttcttgctatttaaaacgttatgtgtggatatgtctggtaattctacacagctttgtagtcataataatttatgctgtcatggtggtagttttcttatctcgagcttacttttgtttgttcttcattgcacattgaaagctaagttactgaagttgatgaatgcagatgtcttgagtatattgaagaaatgatccataagcaagaaccactgataaatgtcctccgccttctcatcttattttctgtaacaaattcagggctgcctaagaagcattttgactatttgaggcaagaaagacatttaccatcatcaattttaatttgactccaactgtttaaagttttatagatttgcagctgtgatagtttttactcaattgatctgacgtggttcataaatattggtttaggagagagctcctccacagttatggatttgagcacatgggcacattaaataacttggaaaaagctggattgtttaaaaagcaggtttgctcttaccgacactgatcatttctgtagtgaaattccatagtagtaagccaagtaaaatgtaaattatttcaattataatttatatttacttatttgataagatgaagttttaattgtctgaacctggcaggaggccaaaagcaattggcagacaataaaacgtgctctacaacttgtcgttgaagataccgacacagccaagtatttcttatcatttgcactacatgatcctttttactaaaataagtagtgttgtttcattttaaaaattgcaccacatgatccagttccttgagaaagtttcccttctttatgttggctcacagtctgtaattcataaacatattgtgttacattctttttgcagttgaaatatccattttaatttactcatcatgattaccttttactgtttgatggcacttgcaagtttgcattcaagagcaaatattgttttttttttcctttccaattacttaaatgcttgaatattcatagtaggcacgtcataacctttttcaagtagaagtagtttattttttctgctagttttcaagttgtgcatccactttttagaaatttcttactgtggattgtccttgtttggtttagaaagtaaagacataaaccaaaaagctagaaaagattattcacttgagctcaattttcagtagaaaattgtatgtcattgtcggtcactgctagttgcacattctttctattctttctattactgtgtaatcattgcgactaccttatctccttcaatggtttgcatttataatatgttcttattgttccttgtgtcttgctcgctaacctattataataatttgatattgtaacagccccaacgatattgcctatgtattttctgggtatgcacctcttagtattcggcttgtacaacatgctgttcggtctggatggtgaggcttatgtttttagctgtcatgaaacattcttattagtttgtattagattccaactattataattttagaatgcaactgctgattttattatatttcttggaaagtttgaataattaaaactgattacagcatataactctagcattttgtgcttccatttgttaaaatctcggcaaataaacaatttcaatactattgcacagttcaaaacataatatattaagtttaaatgtaattactgatgctaaatcactcaacatagccctacaatataaagcattcatcaagtcaacatttcccgaggtgattctcttgttaaagaattgtggggtctactggtcaaaatgaggttttgagtttgagattgtaatagacatttaatgttcagagaaaagaaaaagaaaactctggcattagatccctgttctttcaaaatcttttgcactacttaatctgaaaattctgtactatgattccatcttctttactgacctttgtggatattgttcatagttaggttgctattttagaattgttgctaatcagttgatgttccttgtatttcatatttgcttagcttcaaccaaattttgttgtacttgggtacatgacttgttccctttcttctttggctacaggcgtcctatagatgaaatcttgaagctgttgcctggacctcattcagaagcaaagagggtctgttgaacactctctctcttctataattttgttttgggtggtggggggccggggtgatcttttgttttcatttactcgaactatgctccctattttctgaagcagtctttatctcttttttttctttgatttgctttctgaatatttgtttatcctacttattgcgcagggtagattctcaggtagttcatcatttgacaacctgcaaggtgcttcagctagcacagataagtatgtctaaattattctttttttttaatttttttttaatgattggcatacgctgtaattgtaatgtgtatatatataaatgtctaaattatgtttcacgttgaggttttcaactaaatcagttgttaccaatcatttgtttgtgttgccctttttcctgttttaatgagataaatttcaaatgcatttatatcttcattttaattgttcctaaatttattagcagagtggctgatggaaggcgctccctcgtacttgtagtcttcattggaggagtgacatttgcggagatctctgctcttcgatttctcagttctcaggtaattgatagtattttgtgttatctaacattaatacccagaaaaaagaagaagaaaaaaacaggtagcttttacagctttgcctgaaattcctgaaaatgtttagtataacatggaattaaatccattttccaacttggtaaacttggaaattttcattgtctaccaagcatatatgtgttgtcaaggtagtttgaaagacattgtaaccacaactatataatgagtatatcaaagtattctaacaatctcttgatttatgacttagagcatcaacattgagtgccaattttttttttcttttccaattgatctatgtaagactctcaaacatctttgccatcatgctataaaatgattatcttgtttcttttcccttaattttacaaaaatggtctgttgagcttattatgtgaagcttctgaccatgttcaaagtatgaggttgattaataccgaggctatcagaaccactgtttttaagtgacttagatatcttgtccaatcagtcataactatgttctttctatattagtacatgcatactttttgttgttacctggtgtataaaggagttttacctattacaggaagggatggcatacgatttgattatcggtacaacgaagcttgtcagtggccactccttgaccgaagcatttgttgagaagttgggttaacttgtaagtaaaatcctttttgtcaagagaagctgaatactggccactggtgaaggacttcaagtctctgtaacaatgatgcttaatttattttctttacgtaaggttaactccaatttagtagtgcataaatatttctaatagttggggaacaaatctcagccattgagggcatctcttgttggagtggacaaatgggtttagtcaagttttgaagtggaattttttgcagaagaagtcaagattgaaactaagggctagagcttgtggagagctgcttccactagctttacttggaaaaaaaatgttggtctcttatttattctcatggagggatttgtgtgtgtggtgtccttgggtttattgttgacataaatcagactattgatggttgtggcaattttaattctaagttattaagattgattgcgtaccactttggtactgactcatgttttgaaccctttatttataagtgtgcaaaatatgttaacaagttgaagtttggtgtagactctccaattgattt

SEQ ID NO: 218375 - DNA, 1901 bp, Cannabis indica
taactaaaatttaataataaaatgttaaaaataacataataatgatacaaatttacatcatgttatattgagatatgaacttcaatcacttttgatcctgtaaaatttttgcatcataagttaacacactaatagagtagacttttaattaagtcatattttgcatttgtatctccattaagaagatcatcatgctcttatacatacaatgtgtacaaattttaatattttcaatgctaattctcctatttttaaaaacagaaatactctggaaatcgtatttattaaaaatatacacaattgatataattgtaaaatatatgaaagaagaagttaaacaataaaagtctcactcgaatgtacagatcatcatcacagaagtgaaacaattacgtattttaaaattgaaggttccaagttcctgataatattaaaaatgatggaggtaacaaataagagaataataatgcatttgcagcatcacctacacaacgcaatactctaattatcataaataatataaatatgatagtaaaaagaaaaaccttacgctgcaaaattaattaaaaatatttcacttttttgctttcctgattattatgcaatattcatgcccacgtcttagccatgatttatgctcttacagattagttttcggcttcttagcacctgcaacacgcctcgattctgatcgcatggttacaaattcctcagcagcagaggggtgaattcccacctgtgaaattaatgggaagctcttagtagagattctaaaaaagataagagtatgaacataataataataatggattaccgtgctgtcaaattgttttttggtagcgttacacttgagtgcaataccaatgccctgtgagataaaaaccaagaaccaacaattaaagttcttgcaatggtagaacatattttgaagttgagagttgagaccatggaatataagatggatggagcaagaaactatacctgcataatttcagcagcatccggtccacacatggatgctccaagaactctatcactctcagcatcaacaacaagtttcataactgacttttcttgtcgtctaaaaagaaaagaaaattatggaaaagttaatagttgataaatgcagtaatagaaagattatatatgttgattcaataacacatacagagataaaaggtatatgttggtaattccaataacaaagttgtcaaaacaattatcaaccaatgccaactatcagacacaacttactttttattattattattagttaagaaaaaaaaatgatctttacaagtatagctaagctatagtttcatcatgtattacgagaacattttaagaaaaagcaattggggttggattggtataagaaattgtagcctgagaattgagatataaaaagggtcacttttcggttacgatgaattggtaacttaagtaataccggtagatttgtgttaccttatttaattcaaagcaagggtcatagatagaagaaaagagaaaaaggaaaaaaggaaagagatgtgcatgtgcttattataaaccaatatcattgtcataatttatgaaaatatttaaagcaatacgatatcaagttaccccgaaattgtgttcttcataggattgaagtttgatgagaaaaccaaaatatcaccctctgcctgctcgattgcttcctcttcagtgaggcctacggttgcaagaggcggaatgctgcaaataagcagatcacagatgctcatcattcacaaaaaatgtccagaacacttttggaaatctcaaacatgggaataaaaacggagcattactacggaccatcaggtcaatgtcaacgtaaaaaaaaaaaacggggggggggggggggggggtacggtaactaacaacgacgtact

SEQ ID NO: 218376 - DNA, 8155 bp, Cannabis indica
taaaaatgtagttaattgtagaaaatgggtgagaggttattcaattcaatgtatttttatttcacacgctatctatgagtatatctgaggttgatgatgcagaatgatctgcagcagtaggtgtgaaattgaatctttgttctctgcaagactctttctcccttctgattcctgcccctactctttcctggtcggaccctttctttcctcacttcttcgccaacgttactcttttaatctcttctcatcgattcattctctttattttattttgttgttattcaatttgcttcttggattcgttcctcaatgatattcatgtttgtttcgttttagggtttgattatctaaattttttatttaatttcttctgttaggtcttcgctttggacgtcacaactaaattttgaggaagcttctacacccaaagctaaatccgaagaaatcattactggttgggttgctttctactctctttacagtatatacgactttcgtaactgagatttttgtgcacttaaatacttgtctgttgatttttttttttttggggtgttttatattaacatgcgtaatttggatatttttgtatgaaaatcgggttactgatcctggagaaatctccgtattatttttctgtcatttgtttcattttggtgtcaaaattggctttttggggcaagcttagttctcaaatcgattcatgatcaaatatatccatataatttgggtctgttgctcttgcgttttggaaggaacaatttttttttcttattgccctgtccattgtgggagctatagttcagtttttcttatatgagtgtgtgtactaatacctccatcaatatgttattaactttcttaactcatcgttgatccttcttgcattgccgagaggagatttcaatatgaattcgtaagagtttccaaggaatttgggatggccaaatttgagaaatattgatgttgttgcttgcttatgggattttagattttccattttgttttgttctttaatcttctcttcctttttctttaatatattcgatgttatttgctgggatttgtgtttggaaaaacaaaactttgatttgtggtgattggtttcaaatctgaaatgatcgtatgttacgctgcaggaaaataatatgagaatgctgttgtttgtccacttcccctgcgttattgcatatttatgttgttctaactactggatattgccatgttgcattattagatcaagaattcattaatagcaataggagtttcatatatttggattggtatgaattgacttgcatattaatacttattttttcctaatccagtccaacgaaactaattatccgtgccaacaaactcagagattattttcagcatggacaacaataattggagatccattcaaggtggggaacccatgatagacaatacagattggagaactcagttgcaacatgattcaagacaacgaattgtcaacaagatgtaagtgtattttgaaacaagagatgccgtgttaatggaaaacattcagttataccttaatcatttacggcttgattggattgaataaataatatgaaaataaaactgttgtttgaaattttaaaagatagcaagcatgtttgaaaatctttatatctatgaaaataaaaatgtcttgttgattttcagttttaaaagactggaaacatgtttggaaatccttattttctatgtatatagtaacatgtatatctcgttttaaaaatcatcccaagtggggtagggtagcttaaatggtaggcatgtggtttgcgggaacaaggtcaggttcgagaccctactgggtacctacatagcaaatattacagtttcctggttcccaaatattgtttgtaaggttagatggggatcctattttaaaaagaaaaaaaatctaacaataaataaataattaataaaaaaagaaacaaaacaaaatgccaaacaagttatcaaattaaactgtcaaagaaaacttccatgttttttcttaatagaaaagcaaaacaaaaatgaatctaatcaagcccttaattgtttgatttttgttttatgaagtttatatcacatcatcagagttcatctttattgtgaaaagtatatgaaaggtcattttcactgacattgtaatctgatttctataattaagaatggatactttgaaaaagcatctccctttctcgggtcaagatggattgcttgaactaaagaaaattgctgaaagatttgaggaaaagatttacagtgctgcaacgagccaggtatttccatatttctgatcacctctgttttccttttccacctaagtcgcctatgtgcatctgatagacctcccataaggtttacttatgtgaggcacaataagaagaataactaagctaagtgttttatttagctgagttgtattagtatgctttgtttatgttagtaagtttgtgctatgttaggagtcttattctgttgagctgtagttagttgaggagtataatatataaatagatggatttgagttgtaataaggcaaagttagattctattagctatcttgaattagctactgttctattctttgtgttgtgttggacttagtctctaattgaggatagggttttagaaatgaagagactttctggtgttttgtgagtgtgcttggctgagattttgagagttctacttctatcagtatcacttgaattgagtgctgacatgatgttatagacagataaaggctgatctattgcttagtctctttaattttgcagaataagattcactgatacacagacatatgctgatattaggttacatgtactatgaaacaaccagtaaaatattcgagcccagactttaggaacgataaaactagtaaactgtttatttaaattacaggcttacaaccctagtaaactatatagtagacatttaattagggctttaaacttgaattcctttatttgaaaaatatcccaacatatgtacttatgtttgcatgttaatgttttgtgtacttgcacattctttgaaagattgttggtgtgttgttccctcctaattgacattttgtttgtgatggttacagtctgattatttacggaaaatttcactgaagatgctgtcaatggagaacaagtctcagaacaacaatgcccccttgccacccaaccccactaatagcagacccacagatccaggtaagacaatacactgttatatgggcaaaccaaaaaaaagtgtttcttaaggttcaaaatgcatacttcagtcaaattctttttgttccatctacttccaaatttcatgcgttactttggcatgtggagtagcccctaggagcttaatttggtagttggaagatcatgactcatttctcttagggccagctatttaatttttctttctctttacatctgcattggttgggatgtaatgggggaacataaaggctggattgtgcttcattatttcaaattgtcctttatagactttttgcttttggacaggatctgctgtcttgccgcctcaagtacacaatcaagggcaatcacttgtaatgccgctgtcgtctaatcagggtcaaaatcgacaacaactactgtctcagaatgttcagaattctgctgctgttcagagttcttcaagcgtatcatctactattcttcctaccccaagcttaagtcaaaatatgactggtaattcacagaacacagcagcatatgctaatgctcacaggcaaatacaaggacggcaacaggtccctcaacaacagcaacaatcccaaaatcagcagcagtatctttaccagcagcagcagcttgtcaagccaaagtttccccagggaaatgtcccccaatcgatcatacagtctcacatccaacagcagcaacagcagcagcaaaatgtattacaatcaacccagctgcaatcatctcagcaagctgttgcgcagacatcgtctgctatgcaacctcccctaatgcagtcatctgtcccaagtcttcagcagaatcagtcgtcatctattcaacagtcatccaaagccatgctccagtcacattcacaatctgttcttaggccacaatcgcatcctcaacaggctgctgttactcaccaacagcaaacacaagtgtcacagcagcagcagcagcagcaacagcagcttataagtcaacagaaaaataccacaaacatgcaacaaagtcacttaattggacaacagaacaatgctggtgatttacagcagcaacagaggctgcttagccagcagaataatctctcaaacctgcaacagcaacagttaatggctccgcaaaataacgtttcaagtttgcatcaacagcaattaggcccccagagtaacgggttacaacagcagctgcatggaactcagactggtaactcaagcatgcaaactaatcagcactctgtgctcatgcgacaacaacaatctaaagttccaatacagcaacaatcacaacatagtggatctaatttgcttccaactcagacacaacaaccacaacagcaaattgcctcacagattccgtcacagccacagatgcagcaacaactaggtttgcaacaacagacaaatccactacaacgtgaaatgagacttcaaccatcaggtcaaaacgtgactgatcagcaaaagcagttatatcaggcgcagagaccacttccagacacatcatcaagtatgttgttggcttgtatagtttcgcattgttttaaaggtttctatctttgtgaagttttgagtttctcatatgatatcgtaaacatccttttgtagcatctgtggattcaactgcaactggacatgcaactggagttgattggcaagaagaggtttaccagaaggtaataggttctttgttttttttttctaatgaatgacttgttcataggttgatttcacctatcaatctaggattcggtagctgttatggaagtaattaagataattgtggatgaccaagagtgtgaaacatacaggcactaattaataagctattatatatgatctgctttggtgaattaaaacacaatcaaggcattatgtgaatggcagaaattatggttattacttttacaagcatgtactacgtagcatgtgaagttacataggaacctaaaagaagttaaagtttaactcttttttttatcatttgtcggcagatcaaaacaatgaaggaactatacctacctgaacttcttgaaatgtatcacaaaattgctggcaaattacagcaggtacgttatcattttcattttctaggatctcttgttaaaaaaatatgtaattaaaataagtcaaacaattagtatcaaaagtagaattgaaaagaaactgaaacttctttagtttaagtgaaccttttttggtgagctatgttagtaagcttacttgggcctttttgtttttctctttttgacagcttgattctctaccacaacaaccaaagtctgagcagctagataagctgaaattatttaagaccactttggaacgcactattcaatttttacaagttccaaaagttaacattattcctgggtataaggagaaactaattcactatgagaaacagataataagttttattaatacaaataggccaaggaagcctgtctctcagttgcaacaagggcacccctcatctcatatgcactccatgcagcagccacaatctcaaattaatcaagtccaatctcatgaaaatcaaataaatcctcaattgcaatcgaagaatgtgcagagctctgtgggaccaatgcaacaaaacagtatgacaagcttccaacaaaattctatgcctgctttgtctgcagtttcaacaacacagcaaaatgtaatgaacacattgcaatccagttccaatgtggattcaggacaaggaaatgcactaaactcattgcagcaaactcctgtgaatgctcaccaacaggcaaacgttaatgccttgtcatcacagaatgggatcaatagccttcagtcaaattctaatatggttcagcatcaacatatgaagcaacagcaggaacaacagatgatgcagtcccaacagatgaaacaacagtatcagcagcgacagatgcaacagcagatgttgcagcagcagaagcaacaaatattacagcaaaaacagcaacagcagcagcagcaacagcaacagcaacaacaaatacagcagcaagcaaaacagcaacttcctgcccagttgcaaccaccccaaaatcaaatgctgcatcatcaaatcaatgatgtaaatgatttgaaggcaagacaaaatatggccgcaaagtcgggggtctttcaacaacatcttccagctggtcaacgtaatgcgtattcccatcaacaacttaaatctaactctcccttttctatttcttcaaatcagctccttcaggcctcatcacctttgcaacattcttctccacaagttgaccagcagaacctgctgccatctcttaccaaaattggaactccattacagtccgttagctcaccttttgttccatctccaccaactcctttggctccatccccaatgcccagtgattctgataaaccccatcacggtgcttcctcacttacaaatgctggaaacgttggccaacaacaaacaagtgttgttgctccagctcaatcccttgccattggcaccccaggaatatcagcttcccctttgcttgcagagtttagtggtcctgatggcactcatggaaacactttggtatctgtttctggcaagtcaagcgttacagaacagccacttgatcgtttaatgaaagcggttagtcaaatggtttttcctttaacttgataaagtatgcattcatttttcatggctccccttttgttgttgtttagtgatatataataatctctggtttcaggtaaaagccatgtcgcctaaggcattgaatgcttctgtcagggacattggctctgttgtcagcatggttgataggtttgcaggatcagctcctggtaatggatctagagctgcagttggcgaggatttagttgctatgacaaactgtcgcttacaagtaagaaatttcatgagccacgacggaacaaatgggacaaggaaaatgaaacgctacacaagtgccatgcccttaaatgttgtgtcatcagctagtagtattaatgattcagaaatatctgaacttgagtcaactgcaacatctggtatcaagaggtctaagttagaggtatttgtcttttgctgaaatggatatttgtatgaataggaaacttggctcaaacttctaggagctggtttttaattcagctcaatcgtagatctggtttagtctattgactgacagtggaaatgatattagtgactttctgatagcataaagatatgcttattgtgagagtgctgtgttgtgaggtcattttatcatacccattcagaaacttatacctgtgaagtgacttgtgttcttgttgcaggctattcatgctcttaaagaagaaattagagaaataaatctgcgtcttattgacactgttattgatattagtgaggagtcaagtgctgtagcagctgctgctaaaggaggtgaagggaccattgtcaagtgctctttcagtgctgtggcactcagtccgaacatgaaattacaatatgcttcagcacagatggtgggctctcaggaatgatgaagggattttattactcatatgtattatcctatgtgtttgcttttcttttcttttttttaatgtcttgcagtctccaatacagcctttaaggttgcttgttcccacaaattatcctaactgctctcctatactgttggacgtatttccggtggaagccaggtaagggaaaaatcacaccccactcctctcaaataacattgaatttatttcagttgatgtggtatctcttgattgtgtccttatcctcctccctcgaaaaactatttgtgatacaacacaaggactttcgtattccaatttggttgaatataaatgaaaatggaacttctccaaggccaatcctttgcatgataatgtattgccgttattatgtttgtaacttattgttaaatacctcatgattcttcaacatggtgtgggtcaaaaccagcatcagtattt

SEQ ID NO: 218377 - DNA, 5243 bp, Cannabis indica
ctttgagaccgacatggatcaggataacagttcagacagggatggggctagtaccatttttgaggaagctgataacatttcagttggtgaggttatgaagagtccgattttcagtgaggacgagtcatccgataattctttctggattgatttgggtcagagtccattcgggtctgatcattctggccagctgatgaaacagaaatcaggggggtcacctttgccaccatcatggttttcttctagcaggagaaaagttaagggcttctctccgaaagcaacaacaaaaatgtttaaaagcccattgtatgatgacaggagagtaaaccggcagcatgaagatcctgttttgtccttcgatgcagctgttttatcagtgtcgcaggaagtggaccgtgttaaggggattcctgaagaagaacagtttgtagaaactgagactgcatctcgggttggggagattgaagaagaatcgaaagtcgggcaacacacaacacccgttcgttctgatggattcagggtaaagaaccagtcttctaatcagcaaagtagtcttggcgcttcttcaacctctgaaatttgccaagaatcaaaaggtgggagtgctataaggagagagacagagggtgagttcagattgttggggaggaggcaaacaaatagattttcaggtggaagatttttcggtgtggaagagaacgatcaacacacaagcatgggtagcaggatatcttttagtatggaagataaccataaaggaattaatttggcacatcctatggagcctggtgaagcatctttcgccaaccttggtgattacgagtcgatgagtgatggtgaatatggtgaagagcaagaatggggaaggagggagcccgagatcatctgtcgccatcttgatcacatcaatttgttgggtctgaacaagactacccttagacttcggtacctaatcaattggcttgtaacctctttacttcaactccggttacctggtttggatgaaggtgccacagtgcctcttgtgcaaatttatggacctaagatcaaatacgaaaggggtgcatcagttgctttcaatgtaaggtacagcaacgggagagggctatttcacccggaagttgtacagaagttggctgaaaaggacaatatatctcttggtgttggcattcttagccatgtacggattgtagatggcccgaaacagcacaatggagtgtgtgaccttcaagatacatctttgtgcaaaccaatggctaatgggcgtcaagatgggaaaggtatgttctttcgagttgaggttgttactgcatcactaggatttttgaccaactttgaagatgtttataagatgtgggcttttgttgctaagtttcttaatccttgttttgttgaactggatggattatctgatgtcccagaagcagattcagaaacataagagtggaaaatttatactgatatgtttttcttatctcatatctttagatttgtctattcttgatcctttctatctatctttggatgtattttttgtactaaggatgtagagtttgcctaaatagtaaagctataaatatatcattttcagacactttttattgtaaattaattactttcctattgtttgattacctaattagttaaaattctccttattgtacttgatacttatatattagatatattttacgttcattctaataccaactcaccttaaaattgaatggagaaaagattaaaattaggagtcttagagaaacattcttgcaaacaagaactacgaaaagaagaacaatgaaaggagagaaaaatgagcatgaaagagagaaagatattgagacaaaagaattatcttattgattaataaagggaaactattacacttatatacattgttataagcaagctagcagatttatggacaacctcaaaagcaggagatatactgccagaactctagcagatttatctcttggtaactgttggaataaagaagcggtgttacagatctttggagaagttttggacaatcgcattgtagggatctcgagattacctgctcctcacaaagagatgcttgtttggaagcataaacatgacggaattttttctgtaaaaagtgcctattgtgttgatcaaagtttcagatttgaatcacaaaaagaagtttggaaatggttgtggcaatcaaacttacgctccgaaattcagatcctagtgtggggattcctcactgatgccttcccaacaaaggaaaggctgcactttctagaatataaggtttgctcactatgtgtttctgcagttgaaagcagcctacatttctttcaagattgtaattttgctaaagctttgtggttctcaagtcttttccctgtaaagattgggaacatccttgaggacaatgtgattcaccttatggaaaatgttgtcttggtgttcactaattttaataggaagaagatttttacctatgttattttagatcaaatttgatctcaaagaaatgacctctgttttgaaaagtatccctattaatctcgacatggctcgaactaaagtaagtagcctatttttagtaataactgtgtggatacaagtgccttcaatcctggagcgcttaacaaattttcagagatggaagtggatcttgaggccacagttgttggttgatcatgttctacgcacagatgcttcctggcacaaaggcacagttggtttggttgttgtcttgattaatcgaacaaatgggacttgggctttcaattcttagctttcaattatttactccgcagtggaaccagaattatgtgcgatccatttagctctttcttgggccattgagaacaattggaaggaaattcatatcctcccggattgttggcaggtaattcatcctttacctaaactttagtgcccccggattggaagacccttagtttgtctatatttatcttagacatagttagccaatttagagtttgtaagttcttctttattaagctcttttgcggatagattagctaaaagtgttagagttgctaaccaacaagctggctcgtttcaaggggagagaattccccttataattctcaactatctttcgtaatcaatgaactcgagttctttcaaaaagaaaaaaaagctaaccaactaacagagtgttagcatcaatagctaagagctatcaatactaattgaagagtaactaacatgatagttagcactaactaactattagagtttatgtcctgaaaaacctataaatgattaaataaaaaaattaaacatttgatgtatctatgaatgttaaattgttaatatttattattgcataatttatattaaatattagaacattctttattcatatatgagaatgtggcttgtagctgtacagagaactaataccacttagttttaaataaaacagtcaacaacatattaaagttataaaatatttaatcaatggttgctagtacgactcaccgatgctcgttcttcggtgcaagtaatcttagtttagattacgaatgtagtcagacatcaaagtgaaggtgttgtatataatagagattatatatgacaaggaccgatatgaataaagttgtctttattaacatatcattatcataaagacctaattcatatcataacgatgatcaatagtagatcgacctaaatcttgagttatcatgaacttatattcatgttattattttctttgattcacttgttaaagtttctcagagaagatgattgttacaacttctgttttgagaatctaataacatggatggctgggaatatgatgtacaattatggaatcacgactttcctaaaagatcgaatgttggttccctttaagtattaattctaaaactggaatgttgtgcacaaatttaactgggatcttgaattatacttctactagtgaattaatggaactaaaggataaagaagtaattagaaaggtaaaacaacattttgaccaaaactatttacgaaccaacacatggagggttaatcactgtaattgattatatcaatggatactacagttaaactcagtaaatataattctataattactaagagtgcaatttcatatttatagtggagtaattatggaattaataaacaatagattatttagttgatgagactcgataaataatatagtttattggagtttcgaattgtaggtccatggtccccgaattgccacttagaaatattatcaagggtaaggataaaaagttgtataaagatattcgaaaagaaaatctactttgaattggcaaaatagtaattatttctttttgtaataaataaatatttttttcaaattaattaaataagaaaaaagataaaaattattaagacaaaatttgtcgagacaagatttgtcaggacaagagacaccaaccttatcctaaacaacaaggtaggcgcgtagcttatgccctgtccctataggattttttttttttggttaattaattattcaattaattcaattaggtaaatatctaatttaaaaagtggttaaagatatttcaaggttgttgagatattctctcaagtgattgagagattctctcataaatatcagtattcgaatttggttataaatatatatttatttaaataattaaataatgatttaattaaaggaatttaactactataaatagaagcctgatttgggaaatcatatgatcacttacactgctaatttcgaaatctatagagagaaaaagcaaattaatttttctctcagttgttcttgctcatgtgttgagaactcaacaataataatgttatacactttatcctaatagtcgacactatttcttgtgtgtggtagattgatttggaagacacttgtgtgagtctaaattgcaaattcctcatcaacaggattaagagatacaacttacgagaagtttcgaagataccctgataggcttcaataggtatactctaaatttataatttttattattttgatttaatgtacacacatctggagatcctaggggctatggtacaatgctaatcatataatacaaaacttttccgttgcagacctgatttaatactataaaaccaacagtaaggacaacagtggtggcaagctcaaaggcaagaagtcacctaaggccatgaagaacaaagctagctgcaagtccaaggataagaagactaaaggcgagtgtttctattgtggcgtaatg

SEQ ID NO: 218378 - DNA, 1526 bp, Cannabis indica
ttttttttttttttgtcttctttgaaataaaaacttgtatgaatattcttgcagggtctttgccttgttgactggggaaggggaatagatctaaccctttttcctgatgatatagaattcagcggtgactgcaggacttctggcttccgttgtatacaaatgcaacagaacaaaccctggaaatttcaggctagtttaagacttctctctcttatatatacactgtagactatataaactaattcgatagtagtcctgtcacttttcaccaggttgacacgtatggcctctgtgttattattcatatgatgctacataattcttatatggagattcaagagaaaccttcaccagatggtggtcacatttatctacccaagtcaccttttaaaaggtattccatccatttctgtacttttggacccttccatactctcgagctctgctaatgttaaagtttagtgtcaattcctaaatattgtcttctcgatctctctctcaattaactttatttatgttctaacttatttgttgcatatccagatattggaatgttgatctctggaagaatctcttcataaaactgctcaataatcctcattgcaacaacgacatgaacttgttaaaagaaataagagagtccttccaggattacatgtgctcaaacccttctctcataaagaaactaaaggaattgctattgaagcaaagagcttcattgtgttctgcttaattcctcatcttctcatgttgattgtatttgtgtttattttaaccaagaatacccataaaagggtaggctttgctgtatagataatgtaacagagttactcccaaaatctttgaactgtggccagctacacaccccttgtgtaagaatgtgctcggaaaacaatgttacaccaggaactaaataatattattgtgtatattatagttaagacttgtattatattaaataacaaatactactatatttgagttagacattgtactatatttattattatattcataaattttaatacaatgagtcatattatttaatacagaataaaagatctgtattagtttgtattataatatttataaagggtttaaatcaaccttagactcggggtttagggtcagggcacgaggtctggggcttgggttcttggcatttttcggggttggggtctaagttcgagtctagattgtggttgggttgggatttgggtctgagtttagaccgtaattggattggcattgagtttattgtaaggaatttataattttacaaaatatattaataggtagatactattttggaccatgtgttttgtaaaagttactaattggatcttttgttttgttaaatgacaaccctatatttttcaaaatggtaaaaatagagtcctgagcccaattttcaacaattttattttttaatataactaactttaagacaatttctaacacgaaaagattcaaaaaatgtaatcaattttgccataatatctctatcagattattattaagtttta

SEQ ID NO: 218379 - DNA, 6685 bp, Cannabis indica
tcctattctccatcctttctaaattccccatctccgctcaccttggctccaacttcttcctttcggctcaattgaagctgatgaaatctaatgattacggccggtagggggggggggggaatggggcaacaggatttcattgattagggtcacgcttttcatcttgataggagtagggcactcttcattcgttcctattctccatcctttctaaactcttcatccatcaagggagtgggactctttccttatctaatgacaggtggcatgagggagcgagtttgttagcttgttagctttgagaagggagataatttagaaaagtgtatttccaatatgattggagaaggggagggtgagggaattagtatgacagaaatggagaatttgctctaggaggttgttacgtttccaaaaacgaatcaaataggaacaaattagcagggattatgaatttttttctagaatcaatgattatatttgaataatgtcagagagattgaaaagggtcattaaatgtatgaatttggatttggagctgttgctcttggggagagttggggtccctcgagtaccaccatttgtgtatagggttctttgtattgcccactggttttgcaattaatttacacgttctattcggtcaacttgtgtactggtaggttgtgtatgaacttatttgggtcttacaggtctatcctaagaacctttgcaatcttctgtaattgctttgcattaataatacagacagactacatatgccctcttcttgtgtacattgttttggtgctgttgtgttagtttttctgataaaatagggatttgataccctccaccttttcacacacaattacacacccagccacttgagctagccccaaatggtgtgctgttgtgtcagtttgggatttgcttgttttgcctttttgttttgagtagtccatcctattgcttggctatccataacacccaaaaaaaaaaaacagtagctgctatcattctcaataacttctgcttgagctgatttcatttaatctgaagcagccatacttcttgacacctagccggaacacaccagggaaacttgaactcctttagaactttataccaaatcctgaaagaaaccggactgtgcattgtttcattttcattttgaccttccttggaagagtccttagtgcacattatatgcatttcaatgcgtttacatttggtgtccccacacacttccttatttccttttttttttttctggaacaacatgttcattgattaagaggaaaagatgggtaccacaggagggggtccctccctttggatataaattgcattaaggctagataacctagcactccttgctaaaccatcggctaaactattacacaatctactaatgaaaataaagttacaaacctcaaactcattaatataactacaaacataactagataggctccaaagagaccaacatggcaatctttgtcttgcagattaagaacccaccatgacctttgcatttgaaaatacaataattttgtttagcttcactgttttagcccactgcagacccaaaatgatcgccttcaccttccatggctgaggcagtcgggctgtgatcaactaagatgctccacttctgtagagagtagttagcccagacaacactaaaaccagcagtaccatccttccacgatgcatcaacaaagagcacatgattttcaacctggtggattggagcagggggaaccagaatgggtaaggcaatctgtttagaatccatcgatggattccctgtggagagaaaatttgagaattttcttgaagtagatgagataatggtttccaccttcacctcagtacccctgtagcaagcacttgtttcttaaatcccaaattttcatgaataagcagccacagtatgtcagcatcttatctctcatatctgattgaaaaggcaagcatagattatagaagaattccctcatagaactaccttggatgctggggctgagcaaagcaaattcaccatcaaactaggcagcacgagctagaggacaatccctaaagatatgcaggcttgtttccaaagattcatagcaaaaaacacatgatttatcatggacaaaacttagtttttccttcgtaggaaggacatccttcaaaactctttaaaggatcatactgatctaggggtggataacaggtctccaacatcattatacctgctcttttgatcttctatacacgccctatttaatagaaaatactcacgagtctttgtttttccaaactacaacatcctcttccatatgattaagccttgggatttgaaggatttttttttcccaattcctcaccaaagaaagggataacaatgacaggattccaatctgtactagcagataactctgcaactgattgcaaaattgggtttctcactgtacatctctccataagatttttgaactccacaaaattcagccaaggaatccaaggttgaaaccaaagatccattgtgttaccatttccaactaaagtatgagaaccttgttgaataatccttcttgattcaaggatgtttttccaagtggttgtttgagtttttctgagtaactgcccaaaaggatgacttcgggcaatattttttttcaggcagatacaccatggcttagttgaattgtttcccagaaaccaagccaatttagctaacaatgctctgttcatgtcttcaaaccttctgaatccccagcctaccacttgcttttagttgacagaaactatcccactttttgagagccaaaaatctatccttttccatgttgccactccaatattttctgattaaagcctccatttctctgcagatggaaaggggagattttctagttgccatgttatacaaagggataaccatggcaactttcttgatcaccatagcttttccagcacacgagaggagtttcatcttccacccttgaagacatctattcattttttcattaagcattatgtagtcttctctcttccttctcttaaaaatgaaaggatttccaaggtgtttttattcacccgaaagctgccttacatcaagagtcttttatagcagagtcctcgaatgtctacgtttcttgagaataggagacttgattttgacttgctacatgattgtctagaccaacactcgtacttctttatacagttcattaatacccgagcctccgcttcattcgctctagcaaaaagaatggtgtcgtcaacaaacatcaagtgagaagaagggagagcatccttacaaatcctaatgccatgaacactccccaactgttcttctttaattaataatttggaaagcacttcttgacaaagcagaaacaagaagggatataagtagtcttcctgccttaagccacgattgggtttgaatttctttagggggcttccattcaagaggatggaaaaggagacacttgtaacacaagacattatgattttgcaggatctttgatcgaagccatttgcctccaaactgtctaaatgaatggccactccattctatcatatgccttgtgcatatccaattttaaggccattaatccccctcttcctctctttttctgaatacagtgaacaatttcttgtgtaagaatagaggattatgcaatccatcttccagggataaaggtcgattgaaagggagaaaccaatcttccataatcggtctgagacggttagatagaatcttcgtgattatcttatacacaattacataagcttattggcctgaaatcttcaacctttgctgggaactctgttttcggaatgaggcaaatatacgagtagttcatttgatggtgcaattcttgataagtaaagaaatcccttataactccggtggcattctcgcctctaatatcccaatattttctatagaaacagcctgacataccattaggtctgggagcttttaaggggtgcatctgccaaacgacttttatgatttcttcacaagtcggaatagcacaaagcatcgcattctcagtcacccccaatttctccacaaatagatcatcaagctcttgcaaaaattgaggggaagaggaactgaataaatcttggaagtacttgttaaaaacacctcccattgctcgtttgctttcctttcaggttcccttgttgtctttaacgaaccaaatctgaatcctttgtctgcgtatcatcgttaaagcatgaaagaatttaaagtttctatccccctgtttcaaccaaatctctcgagagcgttgtcgccacatactttcctttctcctctagcattctaagagtctgtcctggagtgtagctttcttcttagacaattcaatagagatgtcttggttttggaaaactgctatttccccttccagattttttattttttcatcacaattgccaaaaacttctccattccatttttgcagagctctcttagtattgttcaagttttgaaacatatttattgcatggcaagcttcacagtgtctccaagctttagtgatcacttccttacacgaactctctcgtccaagctttaaaaaatctgaaaggtttgaatccttttgaacgagctaagattgtgtctaacattacagctccatgatctgagactgtgatggggaagttctttacccctgctttaggatacgcagtgttctagtgatgggatcgtatggcacgatccaacctctcccttactaaaccactagaaaatcttttgttgtgccatgtgaattttcccccttcgtaacccaaatctattccaccagtgctaaacaaaaaatactccaaaattcacgtatcttttgttctaaccatagaacctccactcttctcatgttgatagagtaaaacatttaaatccccaatcaagatccatggcatatcacagctaagaatcctggatcgaaggaacttccaaaaattctccttttctgtctcgtaaggggtcccatacgccgcaaacaatgtccaaaaccagtcttttagactgtaccaaatcttagcttcaaagttattatgaacaacttttgtaacttgtagtttaaaatcatgtttcgacatcaaacaaaaaccacctcattactaatagcagggacacattccaaattagcaaatcccaacctcctagtttatctcaccataatttccttcttcactttcgtttccataagaaatatacagatcggcctataatttctctcccaagcaagcagagcttgggttgccgggtcccttgttaggccctggcaattccaagaaaggaatctcatttcgagagaggggggcttgataagggctgcctcctcgcccaattaaaaatttggatcaatctcaacacatacctccaccatctggttcatctctaattctaggtttttcttcaaattgtcatcttccataatcctttcgctttgccctttgttcttccctaaggcttttctcgatcgagagctcattttcctcttcttctcctcttttttaattgacggttgtgaacctccactacccattttaaatagggtctcctctggaccaagcaagaacttagggagcatcggggcatcttggtcgaacacttcattgatttcaagatcagggttgaagaaaggggttaaagtcaaaccagcttttcttttcctcggttgggttgacttatgaattaaatcaaaaacatcactggggtcatgaaaaatgacaggggtgagctcatatttatccacttggattgggcccatcagttcctccactaagcccgattgagaggcatcctttggccaaggaaagtaattgggctcgggatgtttaagtggtgctctagatttataaatagaactatgtgggctttcaatagtctgttggtaagtaggcccaatgtgtggtagaattgaagtgataatcctaagagataagttgaggaatacctcttttttgtatctattaatcaaaaatattctcatattatattttattaaaatatacctacttttgtgagtgggttgtccaatataccctcattctccacttaagtatttgaactgaatccagtctcttctgtttctggttatacttagaaagaaaccagtaggaattctatgacaagtatccaattcaacctggaacttcaagaaaccccttctactaatagttttctggtctgccatgtcgtagcccttgtaagttccagctttcgctgccactattggagtatttacaatttttaagtaaggtgtcagcaatcctgtatcttggagccaaaaacagccttactcatgtctacgttataccattccccatcttctggccattcgtggatgataaggagttttccattaatgatccatgttctattctccatgatgttgacgttgtcttcctcatgatcaaataatatcctccatactccttttcgccttgttctgattctccagttccccttcagtttccagattccagagagaatatcctttagtctatttctaggcactccctttccttcaaagaaactcgccaagacccccgttcttgtaatctcttcgttcagctcaaaatctggttctaactctagagtcaaagactccaaaaaatcttgtctaaatgcctccagctcagtgtcatccgtatttttcaaaggagtttcttgactgttttt

SEQ ID NO: 218380 - DNA, 8491 bp, Cannabis indica
cgttttatcagttttggtacatcatctgtaggcaaaacatcccatatcttcaatacttgcatgtatttgatatccttagtgatgtccacagtaatgattacaatcatgccttcggccttaattctcattatctgcaaagaacttcctgattctacatgcagtctcttaggcctccacccactggatagcttaagaagaaggtttaaaattgactttctttttcgaattgatgtcagttttttaaatgacttcaaaaaattatcactgaatagaacctaaaatttggagtgtcacaaggatggaaaaatatattagaatgtaaatgtcagacagaaactcaaagccaccaattataatcaacaagtgtatgacattagtaaagagcaattgagcactaaaaaccataccttccactttgcatttctgaaaagcacactatcagcattaagaagatcatcgaattgatcaagctctttcttgatctctatcatagccttagccaaaccgacatcctcatcagcattgtagacacagtgacgcttttttgcatcaatgacgagcgcctcccaaatagattgacaattagcaagggttctttcattacctagtatccacaaggaatgcctggagagatcaatagaacaggcaaattttactcacacttgataaaaaccatgcaacaacatacttaagaggagaaaaacaaatagtgccatacctagctctagtgagagcaacattgactctctgaggtttggatatgaaatccaatgactggcctatatcagatcttacagtagacaatactataatgtcttcctccccgccctggaacccgtcaattgttttcaccttcacacgaaagccatcaaatttttcatacttcttcccaagtttttcttgtattgctaccacttgggcagagtaaggagacaccacaccaatactaagttcaattttggtctcacgccaagctgtgtaaaaaccaaatgtgacgaaatcacaattaaacaattgaaaatgtatggtttatgttcttcttattcagagaaaataagaagaataaaagaaaaaactgttgtaaattttttttttctctaattagtaaaattctggtattctcagtttatcatcaatatgtcatgaaaaaacacacagcaaaattgatttacaacttccttgcaaattggacttagtaaaaataaaactgaataacaaaatctagttttgacaatttaaatcaagattgagataaactaacacctttgtagatcataaattcataactaagttactaacatcataaattcacaattaatacctttgtagagattgtgcagtattttgatgactagagcagcctcaaccatatttttacgactacggccatcatcatctttctcttttcttccaccaacaacatttatgaaagaataagtaccaaacattgaccctggaagataatgcttttcatagcttttccttttaacattaggagcatccagaatctggttatgatagaagtttgcattcgggaaagaacagattgatggatgcattctgtactgagtatttaggagatgtcttgaatggttcagtgagctcaacctttgaaacaaacttcttccaaaactagcttcctcagaaatctgttgaaagaaaaaaaaaaagcaaatgtagataaggaatgatgcattcaaagtaaggatgaaagaaaaaaaaagaagagagaagtaacaattgaaagtgtatacatactttgcttgtaacagtagctggtaactgccactcgtcaccgaaaagaactgcatgctttatacctggaatttgaagaggtatggttgactcacactctttcagttgtgcagcttcatcaatgaccaagacggtcaatggcttgatattaatacggtgaagcttataagaactcgatgcagtggaaaatatcaatgaagctctttgaaaacagaagtctgttattgcttcttcacatctaaaatttggaaatttaagcattttaagggaaccatgaaggtttctcaagatagaaaggcatttatttctgaccgaggacaaggaagagatattgacaaatgaatcagtctgatcatcaattacttcaccatgagaaaagatcttttttagttcttgagaaaccacagtatcttcaaacagaagtgtttcaaaacgatcaagtaatccagtaagggctatcatgtttagaaaattttgagccatgatgtaactttgaggtaaatgtgtacataagatccaaatgcattttctcaactgctcaacaatggaaacaaatctttttctcacatagtcaagaaatgattcgaacttctctgtgctcccttcctctttaattttactttcagagctttgttcttgttctcttatcaattcattttccagggaaacatggtactgagaaacacaattttcaagaaagttaatcatggaagtgaagcaattgttccaaccaagtggtcctaaacactcagtgagcctttgaactcgattttccaaaaatatatcttcaatatctgacccaactttgagtctctccttattgccaaacagaagaatatctcctaatgaacagaacatggctttagattctgtaactatcttcagtactcgagaagccacttcagttatcgcaacatttgttggtgcacaaacaagagttctatagttcatcttcaagagagaaacaagaagggtagcattggttttcgtcttcccagtcccaggcggaccccatataagctcaaaagcatctctgttctcgcaatgcatcatgtgaagacaggcaagaactgcaccaatctgagattcattcatattagaagatagactcttcaccaacatctcgtcaagtttgctacagttctcctccgaacaggcatcacagttttccctaacctgttaaaatgaaatgaaaaacaaatcatcgtcaatgatattaactgagcaaaatttgcaaatttaaaaacttacccaagaacggttacttagaacataatcaagcatcctcagattgtttgacatgtgcaatgatctccaaactcttttgttggtagttaaattccccaagaaaacaacaaacaactttgtctccatatgcatatctagctcaaacttttttgaagacgtgactttgaaataagtaatagaagtactatcatccctgctctcatcctctgtggtagaactactactattatccctgttctcattctctgtgatataagagactgataaaaaggaccatgatctgcctgtcctctctaagtcagaaaacgtttctggtatagcattgactaaaatcaacatgtctccaggcaaagttttgtaagactccttgctcctatcactgaatctgttcttccagttatcaactctaacttgataaatgttttgtcggtatggcttcgtttcattgaaagcaactacctcagcaaaaggtaatctatacagttcctccatacttgagtataactgcgctcgagtttcttccaatagagggtagacaaaagatcccaaataatgctgaattgattggaatgattcgggaatcgttttcacctggaaaaaaatgaaggtttggttaggtaaggaaacttgcaacttctatacaaactgaatggaaaagctcaactggtttgtgtttaaactttaaactatagtgttatggtcaatactcagttgccaccaaaaatatagttacactcaaatgatatgctgacatcaaaggtaaatcagaacacatcgtatcacatgatcatgacagaagaactcacaacacacagccaaacataacttcattacattacaaattagtgctaaaaatcacatttgaatcctaaaacatgcaacaattttgactatgaaaaaggctctttatcattgttataatctgatacttggatcaaaagtatgcccacaatatttggatcattgttactaaaatgggtttcccctgttatctcatgctcaaatatttcaggcaagaactttgtcataatggttcaagtatcctaaaaactgaacaatgattctgtaaaaacccaactaataaacagagaagatatataaataaaaaaagaagaaaataaaaccacttgacagaatccaaagtaaaatatgaagattgatgaacaaagttatatgtataggctaaaaaccttatctttatagagattttcattggaaatgtcatgaagagtccaagaaaacacagtttgagtgaactgatcatcagtagagtctttctctcccctatctgaagtttccatcatcatcataatctcctttacctttttccacaggaacttattttctctgcattaaaaaacttagagcaactattctacaacaaacattttccaccacaacccattttagagtaaagtaagtaaaaacagagaacaaaaatatgagtcttattttcagttccaagaaaaatatagttcaattacagggaagaaaaagaagcgtcaaaggaaaaagctaattactttttttacattggaagttgtttaaaaatatttgttgtataaagtacgagtattcctattagacccaaacacagcaaggaaatcagagtctcaaaagaccccaactcaccacactcaccgcagtcaccattttgattactcttctcctcccaccattgctgtcagtgacagctccctcaagtttacccatgttctctacaacctctctcctgctggtgatcctacttactatacatatatatttatttattattattattatgtttaaaaataattaatgtacatatttaatattatatattgttgattgttttatacatgcagaattgtatgaacaagctatcaagtcagagaaaggttcgttcataacgtcaacaggtgcactggccacactgtctggggctaagacaggtcgagctccacgagacaagcgtgttgttaaagatgaaaccactcaaaatgagctgtggtggggaaagggctctcctaatattgaaatggacgagcaaacttttttggtcaatagagaaagagctgtcgattacttgaattctttggacaaggtatagtattagtatacacacaaaatttatatattcgttatatatgtcaatcaatcaacttgtgtcaaaatttggcaattaaaataaggcaagtgagtacgtgttacttaggtgggttttgactagttaaaccccaaatcagcttttgggtatccttatccacttctatattatttatcttattttaaaaaatggaaaattagaagaaaagtaggaaatcctagttttgtgggaaatgcacgtttatggagatcatgctgtttaggcaaatacggcatagactcgctcacaccttgttttttttttaataatcttggtaattatattaaagcttaagaagttagaccttgtagtcattataaattaagttaacgggtataagttaaccggtatagaagatgaatctgccataccagtcagtcacagtatccgtaaaagtctatttagcctcattataaaccgcaaaattacataatctaaaaataaaggaaaaattccaactaactttattttatcgactacgtagcccaattatcctatttgtatttagtcatttactttccatggtgcaacaaatgaatgaatacgtatttgtattccctctccttgttgtaaagtttttagctcttacaaggtggagttttcttggaatcatttctctcaaaaaaaaaaaagacatagatttaatacatgaaaaataaataaataaaaaaaaaagtgtaacaattaagctagagactaatttggagttatattgtgttgataatattttgtgatgaacaattaacgcaggtatttgtaaacgatcaatttctgaattgggatccacaaaacagaatcaaagttcgaattgtatctgccagagcttaccactctctgttcatgcacaacatgtaagtactaagcaactaaggattcacatacattatgagactcgatattaaattataccaatcattaattatcaggtgtattcgtcctaccgaagaagagttggaggattttgggacccctgatttcacaatatacaatgctggtcagttcccatgcaaccgttacactcactacatgacctcttcaactagcatagacctcaatctagctaggagagaaatggtcattttgggcacccaatatgctggtgaaatgaagaaaggactgtttggtgtgatgcactatctcatgccccaacgccaaatcctctcccttcattctggttgtaacatgggcaaagatggtgatgttgccctcttctttggattatcaggtaggtacatctaaaaaagaatattaatacatagaaaggtcttatatatcttaatttattgatatttttggtgttgttaattagggactgggaagacaaccctttccactgatcacaataggtatttgattggagatgatgagcattgttggagtgataatggtgtttcaaacattgaaggaggttgctatgctaagtgcattgatttgtctaaggaaaaggagcctgatatttggaatgctatcaagtttggaactggtttgtacttattactatattctaatttaatcattttttattttatatataatcaataatacttatttaatcattgttttttgggtttgcagtggtggagaatgtggtttttgatgagcatactcgagaagtagattactctgacaaatctgttacaggtaaaaaaaattaatgaatcatccattgctattatttacataagttaatgtgactaattaaattaatctgttaattaattatggtataaatcagagaacactagagctgcatatccaatagagtacattccaaatgctaaaataccctgtgttggtcctcatcctaagaatgtgattctcttggcctgcgacgccttcggggttctcccgcctgtgagcaagctcagcttggcccaaactatgtaccatttcatcagtggttacactgctctggtactttctcatcatcatttgacctgttttgtattcatcatgaaataattggaaagaatagtcatattaattaactaaatgggctatttgtataggtggctggaacagaggagggtgtgaaagagccaagagcaacattctcagcttgctttggtgcagcctttataatgttgcatcccacaaaatatgcaacaatgcttgctgagaagatgcaaaaacacggtgctaccgggtggcttgttaacactggctggtctggcggaaggtatgataaaaatcggtcttagcggtttaacactatttgatattagagttagtcttacattgttaatgtgtggaaataaattttcatatattagatgaatgagctactcctcctattgctaatgggttttgagatgaaactccattcaccttatcctaaattctaacatggtatcagagtcggttgtgatccgttgtaagcccaaagtaccgctagtccaaaacgacgagtcattaaagagtcgtttgtgatccgttgtgagctcaaagtgtcaccagtctaaaaagatgagccaaacttaaaaactttcgttgtctcccctttaacctccatttggaaccttttggccaatgtgtgccagtttctagtgttggagtctttgacctgtttcaaaatccacaaatttcccaatatttgtcacgtttggtcttgtaatctcttaaaagttgttcgttatacccacactttccaaacccaaacgtgaggagtgtgtttgtcatatgtaagatgaatgggatactcttctcattgtcaattgtttctgaaataaaactttattcatcttatcttaaattctaacacgtgttttactagtcctttatctacttagtttcgattttataatgatttgttttgttttgttatgtagatatggatctggtagtcgtatcaagttggcttacacaaggaaaatcattgatgctattcactcaggagctctcttagaggcaaactacaccaaaactgatgtatttggtttggagatcccaactgagattgagggtgtcccatcagaaattcttgaccctataaacactgtaagttagttctttctttcttttctcttcttgaacatttatatgtaatgacacaaataataaatcataatattgtattgtttttccttattgtgattgggtgcagtggtcagacaagcaagcctacaaggatagcttactccatcttggtggtttgtttaagaacaactttgaggtgttcttgaactacaaggttggaaaagacagtaatttgactgaggaaattgttgcggctggtcctaatttttaatcagatatgaaacaaataagaagaaactcttcacaatttttacggatttggagaagaatttggaatcaataatggtggcttgttttcttatgttagaataagaaaaagaaaaa

SEQ ID NO: 218381 - DNA, 2559 bp, Cannabis indica
aagaaagattaaaagaaacactgtttttgcctgtttctttgttcttttcccttcattaactcactgtcttgacaattatcttgttccattccatctgggatttcagacttctacaactggaatagagtaaagcttcgctactgtgatggggcctcatttactggcgacagtgaacataaggtttggacaatatactcaccatttgaggtttttacatgatgtactgcttttcagtttatgttgattgagcaacaaaacttatgtctaatcaaatcaagaatatcaacttcaataatagccattgtttatctcttctgcaattctaggattagtatgctatatatcatcattgtagttcttgattctttctaaacattttgtcatttaaacacattgcttcgttctagggtgcacaattgcaatttagaggagaacgtatatggtgggctgcaatggaagatttaatgtcaaagggaatgcgtaatgctcgtcaggtgcagtatttttaactcctatctagtttcttctacctttttacgtatcagtcaatgcagcaactcgaaatatactaattgatccttttaattttattagactcttctttctggatgctctgctgggggtcttgcatctattttacattgtgatgactttaagagtttgttttccggaaacactaaagtgaagtgcctcagtgatgctggattgtttcttgacgcgtaaatattctatctttcaccgaaaagccttcttctttcgttgttttttcagtttttgttatgcagatttgttgttaggttagttgatgcatctgaactttcattgatatgttcctctctgcaatttcagggtcgatgtttctggtggaagaacactcaggaatctatacagtggcgtagtaggtttgcaggtattgcatttctttcgaggatagtcaacttcttacatttgtgtacagtgttaccttggtcagactttaactgtaatttgagttgaaactttaacatccattttgtcgattttgggttcaaaagaaaaaaaatgttcactgtgttttttttctgcattctttcagggagtgggaaagagtttaccgcggatttgtactaaccatcttgacccaacttcggtaatggtttttactttattagaaaatttggaattaaagtaaaaatttgagcttgtttcttttatcatactactgactttgctattcatctgtcctgtttgtttagtgcttcttccctcaaaatttgattgccagcgttaagaccccgctgtttattctcaatgcagcctacgattcatggcaggtagtttctcggtctacctaatatttgacattgaaatttatgtttcggcttattctcttgaatcaacactaacatattccttctttgagatcagattcaatccagcttagctccaccatcagcagatccccatggcttctggcatgaatgcagattaaaccatgcaaaatgttcttctacacaaattcatttcttacaaggtaatattttcaatttccaagtcctgtatggcaactatttcttttcaagacgttaaatgttgtctacttattctcgaaaacaggattcaggaatcagatgctaaaagtaatcagtcgattctcacgctctcgtcaaaatggtttatttataaactcttgctttgctcattgccaaactgaaaggcaagatacatggtttgccgatgattctcccgtcatcagaaacaaggtaagcctcatgcactagctgtattttgttcacttaaggaatacatatctgaactcttatcactattgaagatagtaaactctcaagtggtggagaaacttgttctagtcactaacactccatgctgatgatcttcttttctgatgatttttcctctgcggtttttgatttgcagccaattgcactcgctgttggagactggtacttcgaccgagcagctgttaaggacatagattgtccctacccttgtgacaacacttgccataatctagttttccgatgattcaaatacatgaaattggctcatccacatgatgaccataattatataatgatgatctagtagagtaatctacaaaattatagtttctgctacattagaaattgaaaacttcacaattcatttggaaagcaatatatatataaaaatatataaagaaaaacaataagtacattatttgaggcttctgagaaatgcagcaaactgctctctcagcaaagcttcctgcattgtatgattgaaacacaaaagtatacaagggtaaaaagaaactcttttatctttaagtgtttccaaaatattttatatattggatatatgtatgccatttgatttatgttttgcctacactttgtaagacttgatatggcaaaggaacaaattttgcttacttagaacacctcaacttagcatgaaaattaaaaaattgtgttaaactaaaaagtgaatttttttttattatttcataatactaataataccaaagctgcaattatatataaaggtggatggttttattttttatttttttgtaca

SEQ ID NO: 218382 - DNA, 7533 bp, Cannabis indica
caaccttcgggcaaccacctagcgaccactttgcaaccatcatttgattcgtctaatggcaaccacgcagcagccaccctgcaaccattgtctaattatgtaagtgatgatagtgtaagtggtattttggtaattaaaataacatataaggtataaatgttttctttaccttatgaaagtatttttctaaataaaatatcaatttatattttctatgtaataattcctaaaatttaatcattaaaccatgtgaatgaatgtgcaagaaaaattaaggtaaaatctaaaaaaaaaacataatatatataaatgaattataataaaaaataagtaaaaggcatcaacaaaaatactccaaggagaaaaagttctggaacactctcttagggtttatccctctttctctagatctttccagtccctcattcgttgtgatgcgtcctattcccatttcaatttcattttcttctaattttctaattaatgaaaaatttctcatcattactctcaacgataggcatttaatgcatttattatggttttgttgtttctataagcatttaatattgcatcagaaaatatttggtttcagttcaccctcttttcatcttctctttcagtctgtcgttgctataggaaaatgagggtttttgtgatcattacctcttctctcgagagatcacgccaggaagtcattaatatggagggagatttggcatctgttcactatctacagaggatctccattctcaggtataccacttatagttctatatatatattccctatctcttaaaatgcgatatcagtttcttctctttgttttgatgtcttatgcttcgttatccacatattcttcgtgtttctctctggttctactgctcttagttttcttgcttccattttcatggctcattctgttcatagctcttctcatcatcttgctctgaatgatgaggaagctttagttcatgattttgatggagtctctttagggtctaatatcattgaggattcttgctaccttgtggttgaaattcttactcaaaaatctctcaaacctgattggcttgacaaggctatgaggaggctttgactcttacatttcctatcaactttactgagtatcattcgggtctttttctagctcattttgggtgtgatggagataggcgtagggtcatagaagggcaaccttggcactttgaccattgccttatggcctttgccaatccaaaagggcttgacattcttcaacctgatcaactctggtttgttcccttctgggttcaaattcactctattccttttggttttaggtctcctcatcttgcccagttcgttgctaaggatataggagatctaattgatattcataaaacaactcttttagaaatctcaggactctttcttcgcatccgtgtcctccttgacatcacgaaaccaatccgtagaggtatgcaagtctttttaaggaaattaagaaccactaagtggcttaactttaagtttgaagggttgcaaaattactgttatttctgtgggagatttgagtatgtcttttctgagtgtgggaggttttttaagtcctgtgatgaaggtcgtatgccttcggctcttccttttaaggataatataagagctttgcctaaatcgttctttataagggacccgtttgatatgtcaaactccatcccttttgaagagatgaatcttagatcctcccagcagaactaggacttgcaagaagctgtcaaccagtttcttccttctggaagcttttctggagctcaaggaaatgtggatactcagcctaggattgatattcctgttactacatcacctattcaaacctctgctgagaactctgttgtctcctcctctctatttagtagcttacaaagccttctctgtgcggtttctcaagttatgatgtctgaagcccctaccattgttcatacagatagaggaaaaggggttcaactccctcctgtttctgtcctgattgcttatgtccctgttattcgacctaggcctcttactattggtggtagttcagagacaaagagatcatacactcgtcaagaagtgtccagtggcactttggtcagaagcattttgaagcgggctcgttcaagtgataatgaagatgttgttcctaatgatgatgaagatcaagttgtaccggtgggtgttgctcagcaatcccgcctagaaaaatgaattttatgtgttggaatgctcgaggtttggggagtcctcgggcattctgaaatctctcccttttgattaagcagcataagccttgttttcttttttttttatggaaactaaactaggagctggttctagttcttttcttaagtctaggcttaattttgagaatgcttttgaggtgcctagaactagtttagggggggtttgttacttttttggaatgctgttgttgatgtaattataaataaatactcctctaatcatataaattgttatgttaatatgaatgataatataagttggcatatttcctgttattatggttctccttacgtttctgaaaaattgcatacttggactcttttaaataggctttatgatgttgcacctttgttgccttggcttatatttggtgacttcaatgattatctttcttttaatgatagatctaatctgaataaccctcctcattatgctatgactaattttcaaaattttattaacacttttaatttaattcctctaccctatttaggtaataaatatacttggaagcatggtacgtcttttgagcgccttgattggtgtattgttaatcagaaatggttaaatccttatcctcaagcgaccttgcatcacttagggttttatggttctgaccatagagctttaaaagtgttgtttaaggatccttcttttagtgtccctagacacaaaaggtttatgtgtgaaaatttttggtttgctgagtctgattttggggatactgtttggttgggttggaaggatgcttcttctcgtattttttctgaccctcttcaatcatttctctctaaatagtcttcttgtgttacctctattaaaaattggagcattaataataataactttaggagagatattaattgtcttcagtgtagtctagatagcatttttttcaagtctcctattttggataaagatattcgggaggctcaacatattcaatctcagattgactctcttctttataaagaggaggttttttggaaacaacgctctagggtaaattggttaaaagctgggaacaagaatactaaatatttcattccaaggcatcctctagaactcgaaacaactttatttgttgtattactcttgataatggtttttctgttgtaagaactgttgatattagtactcaatttctcaacttttataaaaatctttttgagtcccagggtactagcattgaggctattgatcaaattcttagttgtgttagtactcgaattgttgtctcttgttttcagatgcttgaggatccttttactactgatgaagttaaagatgctctctttcaattggttggggataaatccccttgcattgatggtatgaatgttttattttatcaaagaaattggtttgttttgggtcctgatttgtgtgctacagtgctttctgtcttgaataatatgttgatctttcgttaattaatgagactataattgttgttattccaatgaaaaagaatcctaataaattaaagatagagattttaggcctattagtctttgctctactctttataaagttgtgtttacggtcttagctagtaggttgaagagtgtccttaataatattatttctctgaatcaaagtgtttttattcagaatagagtcattttttataatatttttattgctaatgaattggttaatgctatcagtcataggaaatctggtaaagttggttgggctgcaattaaattggatatggaaaaggcttttgatcgtgtggaatggaattttgtgcaggaaattatgctccattttcatttccctgttaattctgtttctctagttattaaatgtatctctactgcttcttttaggttgcttgttaatggtgtgtctaattgttttaagtatagccgaggaattagacaaggagatcctctttctccttatatttttttacttgtttctgaaggtctgtctgctgccattagataccaggagagtattaataattttcatggtatatttatttgttgacctgccccttctatctctcatcttctcattgttgatgatagtttacttttttctacgacctctgctcattcttgtttagctgttaaacatgcttttgatctttatcataaagctactggttagcttgttaatttttccaagtcttctgttcttttttctcctaataccagtcctgttgattctgaattcttttacactaatttgggtctggatgataaaccttttgtgagtaagtacttaagtgttccacaatgttttggtaggtccaaaagttctcagttcagctaccttattcaaaaagtgagttctaaattaaatagttggaatagtcgtctattttctaaggctggaaaagaggttcttcttaaagcagtggtccaagcttttccctcttatgctatgtcttgttttaaaattccggttttagtttgtaggaaaattgaaagtcttatggctcagttttggtgggggtcggttggtggcaaaaggaaaattcattggaaaacttgggggaacctgtgtcagtaaaaattttctggtgggttggaatttcgttcttttattcatcacaatcaagccttgcttgctaaacaagcttggcgtattctcattatgccagactctcttgttgccaggttgtttaaagccaagtattttcggcataattcctctctttatgcctctaaaggtcattgtgcttcttttacttggcaaagtttgcttttgggacgtgatcttcttaagagaggtcttctgtggaaagtaggtaatggcaaatctatctccactgtgcactcttattggattcctggttggagattcatctcttacaaaggtaatgttcaacccccagatccttcagtttcttttttattgatgataatggttgttggcgtaaggattggttattagattttttgatcatgatttaatctctgccattcttgttgttccaattggcgattcttctctagaggatagtcttatttgggagcatcatccctcaggtttctttactgtgaattctacatatcatttagctaattcttcaacttcctttcctgcttcttctgataatcattccttggttcgttggtagaaggttctctggaaccttaagattcctcagaaaattaaacatttcatttggagggctttccatcatactcttcctgttgctctcaatcttttccatcggcaaatcctaacctctcctttttgttctggaagttcagaatctgtgtctcatgctcttttagagtgttctagagcttcctttgagtgtagtgaatctagatttgagaccttttacttaaataataaatgtaatgatatcagtgaatacattcttaggggttttgatgctttgtctaaggatgagttaagaatctttttatgtattctttgggaaatttggaataggggaaacactgttttattttacaagaataagcctatagtttcagcagctgagtttcagattgaagctctgttaaatgactttgatgaagctcatttgggtgagagttcaaagttagcacagaatgaaggccgaagtatagcgaattcagaggatcatacttttgcttcatgtttttttaaattaagtgtagatgctgcagtggacaatagcagaagtaaaagagggatggcggcagcagttaggaattcttgaggtgaggttgtgacagcattctcttctcctttgaatggtaacttatctcctcttttggctgaagcaaaggcgttggttgtagctctcaactcgtgttcaattgttaggtttcctttgtgtattgttgagagtgattataaaattttaataagtaaagttaaaaataagtggaaagataagtctatcagtcaaattgtatcttttctctctaattttcctactgtttctgttcagcatgtcttttggaatcttaatgttgttcctcataagttagttaggacagctttaaaacttgagaaagaggtcatttggaatggtaatgttccaaatcttgatatattgtaacgagtacttatttcttatcttcaagttgtaatatattgttctttttcaataaataaataaataaataaaaataagtaaaggtgaaagtaagttgagaaataagttggggtgattccccctaaaacacaaaatataatacgaattacgatcccaccatttgcttttgaaataaggtgaaaagaaacggcaccgtttaatggttgtgaagtttgagtggtgcgagtgaggctataaatgtaagaagaggacctactttgtaatctccttcctcgagtcgtggcatcttatcctcggaagattcatcatctggtatgtctctcatcttctccttcagaaattcaacaattttctcccatttttagctttttttttcctccaacaatcctacccacttctttataacgatttttgtcaagttttttcgttgtgatttcggttgatttggtcttctcagctgaaaaagtcgttcggatctggcatctatctttctcagaaaacctagttcttatcttcgtctgtcatcccatctgtttctccactttgtaattggaatataattctatttgactaggttttagctgagggttagtgggtgggtgaagggctcatgagtagacctgaaaaagctttattttcctcaagtctgccatagatctgttgtacaaacctttgaatcccgttgttgctctgttttcctacaagtttttgagaagaattcagctttaaatttcttgtaataaatatttcttttgttgggaaaaatctcatcttaatatttcttcttgtaggttaggcgtttttctgcagaatattcttattgcctagaaagatgaaccattttagttttcagcagaacgcctttatggcccgtgaggagatcagaggcggttccggttccacctttgcatctgatccgatggaccctgttgtttgccctaggcctcgccgagttgggattttggctagcaattttgtcaagcccttgagattgcagattaagtaatttcccttcatttattttattattattattattattattattattattattattattattattatttatgaccttgatgtttaaattttgaagatctgttcttatttctaacgcgttttcctcttcttttgggggtcttttgcagcccattatctgagttctgtgattcaaaagctggggcagatcttctggacatgattctcatgaaggtaaatatatctttccttttatttatttatttatttatttcgtc

SEQ ID NO: 218383 - DNA, 1638 bp, Cannabis indica
tggttgccagaagggttcgaagagcgagccaaggggaagaatctgggtttgttggtgcgaaactgggcaccccagttggacattttggcgcataagtctataggtgcgtttctcagtcattgtgggtggaattccgtgcaggagagcttgagccagggggttccgatcatttcgtggccaatagcagctgagcaaagtcataattcgaagatgttggtggaggagaaaggggtgtgtgtggagctgactaaaggagctctggggtccattgttggggatgaagtgaagaaggtaattgatttggtgatggagtctaatggtgaaggagaagagatgaggaaaagggccagtgagattaagttgcagataagagcagccgtaaaagaagaggggggacataaagggtctgctctgaaagccatagatgattttgttgcttttctagcacttagagaagaaaatgtcaagagcaaggatattataatttgatacgattaagaattagcttttctttttatgtcttttgataataaaactggcaaaacccagtgctcaagtttagttggttagtatttacgagaaaactctttataacatgattatatgataaaattctggttttccaatgaaactttttttttttgcaatatgtaacttcattagaaaacacgaacaaacagaaaaatacaaatagtctaagcggttatgctatgagcaaccagagaaagaaaccacgttgaggctattcggagaccagggatcctgttgaaaacagttgccacagacaataaaaggaacggggatcgctctcagcacctagccatctgaaaaagtcctggcaccactccatcccctactctggatcaaagcaatccatggcacacgacaagagtttccacttccacggacgagatatgaactttaacagagaaggcctcaataaattcataatgtttacccaaagccaaaacgacaagaaagcagaacttctaactgcaggagaatccgtaaagagattaacttccgctagctttggggaagcatatgacaatttaagcccacagtaacctcaatctcctcctgcaaatcaagactgtttcaactcggacaaggccacattaaccttctgcaacaccaccaaaggggactctaacacctgctcctgataggcccaatgaaacttgattagggaaaacaaagaaaaattggtgttgcttctgaaaaaacaaaaccatgtcttttgataactctatacaccacctcagattagaagactattgagatatagtcatacattgtactacacaatcgacagacagtagtactataacatgatgcatatcatctttacctgccaacatatatgaacatttgagtatttaggaatagatagaaaagtcaattgaaatactaaagagagccacatagtttgttattatctacatccaggttactatgtgggttataaccttgtattagtgggttgatgaaagacttacaacaaagctcgtgaatctttgaaattatgatgattaagaaagagttgacatttgatgtcgcccaattagttacactacaatcgcggttataaacggactatatgttgtatccacagggaggaaaaatacactcaaaagg

SEQ ID NO: 218384 - DNA, 5441 bp, Cannabis indica
attgccaattatagctcttattttataaaactttacctaatattttacttttttcccctaaaattactattatgtacctaaaataaagctaatgtatataatatataatattttactttggtaattacggaaaaattatcagtcaaaaaacagtcaattcaattgtatgtagatctaatttaattttggtgcaggtatcagcgacaattacaggaaacctaaatttttgaggagagtgatgattgcagttataatgacaaagtaaccatgagtatgacaatgtaacaaaaaaatgtgtcgttattaatctcaacatagagatataaacaggtataaatatttaaacccatacccgccctctctgtctccgaaattcaaaccccgccctctacgggtgttcgcggtgcgggtggtgcggtttttgactattttttcaaaccaatccgcacatgcggtttttccaattttccaaaccgcaccaacaccgcgaaactaaaaatccgcaaaaatcgcaccgcaaaaaatagtgcggtgcggtacgatttttgtagtttatgcagtttggactatcactaaataattaaactattacaaatataacaaactttgagcaaaacttgtcaaaatactataaggcttgaaaataaatataaaaaaaaaattaagtgtcaacaatacaataattagtgaattttgagttgaattagacttaaataaatataaaaatgtttgaaccgcatattagtaattcaaaaccgcaaaccgcactgcaccgcgcggtttagaaaaaattcaaaccgtatttttttttgcgatatggtgaggtgcgggtggtttgaacgatttaggcagtttgatgaacacccctaccgccctcactccattaaagacaggtactcgcatgtacctaaacccgcggctataattgccatccttaaaataaaaatagcattcgttttgtcgtttggtgatttgggagtcgggacccgatcatcccaacttaccaagactctgcaactaaagctccgccatgtcgcacacggaaaactctcagaaaacccaaacccaccaagctcgacttctcaaatctgcaatagcctcaaggctcatccttctcaccttaatcatcttatggcgaagccttctcagcccctacgatacctccgcgcctctaaatccaaattgcttatcaaacgtcacctcgacccatcatgctcaaagggaacatcttctttggccttccatggcgtccgcaatcgaatccagcattgtctgggacggcgtctacttcgtccgcatcgcccagtgtggctatgagtacgagcaatcatacgccttctttccccttcttcccatttgcatctccgccttgtcgaggacaggtctggccgaagatatatgagtcttgattatatccagtttggattttcaacatttatcttcaaaattataagtaatctaacttagttacttattgtaggttagcaatttagttcatttagcctattgcatcagtttcttcaggttatttgaagttttgtcattatgtttaaatgttggattttctgtttcagtgtttgctccattggttccagttatgggtgaaagagctgttttgggtttaacaggctatgtgatcaataacattgcctttgtgtttgcagcgatgtatctatattggtgagctacttagcattaatgaagttcaaatcatatcacaatagaaacattttgttagttggactttgaagtatgtaattcggtagtcatacgtagctttgtttgcttgttctgatagtttttgtttcaacttgtcactcctaataggctttcagttactgttttgaaggatcgcaatgcagcacttagagcttctctcttgttttgcttcaatccagcatcaatattttattcctccatgtaatagttctaacgtttccatgttatattgatgtatgtaaaaagcaagaaagctaatgttttacttggtctgcagatatactgagagtttgtatgctttattttcaattggaggattgtatcacttagtatctgggaacaacaaaattgcagttccttggtttgctctctctggatttgctaggtctaatggcgtgattaatgctggttatatctgtttccaaaccatgcatcaggcatgtgattctatattaagaaagaaggcttttgtaagtattatttgtgtctttttgcttatttgagtggattaactaaacaggattggtgttgcattttctttgtcaaagtggattgtttattgcaatttcagatatgtgcttctattctttggtaatatcctctttgtcagttgttattaaatggattaaagttttggaagtatagaattcttaggggggatatcacattaaatcattaatctcaagtataaatagagtatggtaattatttatttcttctcattaattatttttgctttctttgtcagttgaccatgaagattcttactggtggagccttgcattgtatatttattttcaccccatttcttgcatttcaagtgtacggatacaacaatatttgcgtgggacattctccaaataatatgaggccatggtgcaaagcaaaggtgcctttgttatacaactatattcaaagtcatactggtaatttttccttcttttaattttcattataatatcattttcatttattatcttttatcaccatgcatggctatttttttaagcatttttgtgttcgatggttgaatcgaatagcatagttgaaaactcgattgactgaacataaaaatagaggttctatttaattcactttagtttatatgacataacgaataaactatcttcatttacatgtatagagtttcaattgcacaaccttcttatataaaattggaagattatccaactttgttattgataattaatcttcctctttctcattctgctttgtgttaatgaataacaggggagtaggcttcttgcggtacttccaatttaaacagttgccaaattttctacttgcatccccaattttatctcttgcactttgctcaattgtgaattatgcaaaatcagagcctgagaagtttttctctttgggtttctgtgcttctaccaaagataagaatcatgcagcggttcttttcattcctgaggcaagtctgagagcaaacatcactatagataaaacctcttctaagatacagggtaatcatccgacaaattgttaattttctctgcttgcataatgcccgcatcataactgtattggttgattaagcatgcatatctccatttccttttcagtgacatctcccttgtgaagtaagtaccagttgctttaatgcctttcatagaacttggcatgagtattactccttattgtcttccatattttgttgcattttgctacaacttgatacctattgtttttttccccaattttaaagataaaatcaatcttagaccaaagaagccaaggatgaaagaagattctcctgctctgctctctgaatcctcggataaaataggatatctgtctgtgtttgttcttccgtttattctgcatctgggatttctggcagcaacagcattttttgtcatgcatgtgcaggtttgctctctttgatttgtcaactagtcgttaagagttatgtttagctatgatccacattcttgaccccttatcacagttaggctcaatttgattagggaaaaaagaatgaagtggaatagaatgaaagaaaacaatttttttattattagtattaaacacacaagaataaatgtgaaaatatttttttttgatattttggtggaacaatcattctattgcacaaatattttaaaataaattacttatatctattattaataactccccttattattttcactactcccaaccaaacaaattcttaggtgctgaaagtttttttttagtgtttgaatctcttttattttctatcgtacaatctatgtctccaaacctttttgtcattttttttttctgctgttgaatcaaagtcatatttttgcatatgattgcggttgtttcaatctaaaaaattttgtaagtgtcgaatgaactcatttactctcatttgaaacctccttgttctaataattggctataagtaaggtttcttttagattggtcagcacttgtcaaatggaatgataattctgtagactgaattgatataagatttaaaagatattaaattattaatcgataaaaatgagaaaaaactataccaattaataaaataatgcatttgctaaatatcatagtgtttaaataaaattttgaccccaatgagaatttagttttagctgtatttggggtcatatgttctgactataaacttttgacaggttgctactcgtttcttatcgtctagccctcccctttattggtttgctgcacacataatgaaatctcttggtaaccggagatggggatatctgatctgggcatactctgcatcctacattcttctcggaagtttgctcttttctaatttctacccttttacgtgaactctcacacgttagctccttagagcttctcttttgaagggtcagttagccttactgaagtgaagatctagcttcccttaattgattgcccatggagacccatttggttatgataaatactaaataccttagtgaagatctaacttgtctcgaagaaaaattcttgtaacaatgtcaaccaactcttacatatttcagtgtctttttttttattacttgttagcaaagaatagagtcaactctggcttgtcttgagcaagttgtatttttgagcatacgattgattgatatttttattatatttttttgtgttagaagtagaatttgttgaatataaacatgtattttctagccaaaaaaaaaattatatagatatgtctttttttatctctctctctctaggttttatacaaagttaaaacttgaagcttcagagtgaaataatagatgtaaactagatatattagacaaggattcaaactattctatactaaatgtagtatctacactacattaagtttgttgtagatcaaaaaaaaaaaaaaagacagaagactcaaggttctccattgactaaaaaaatccagacctgacacccaaaacaagtaaaattgtaataattatgacgaccactaccagacttctagtgttcaacaacggcggagagtgatgccgaatgccgacctcaccatcctcatccctcttcctttcgccaaacgcaaacaacgactggaaattataaggatttctatggcatggtttgctcgtttgaaagtcaggagatatatatacctgaatagagtgacaaatggcattgaacaggaatgttctctctctcaaaatatatatacctgcatatttatttcttacgttctcttttttgttgttttaagg

SEQ ID NO: 218385 - DNA, 4464 bp, Cannabis indica
ctcaagaatactcctccatatatagcttagattattcccaataacatcacccaaaaagaaatattagggaaataacttgctttgtatatctttcctacaagagaagcaggattagtcaaaaatctccaccatttttttactaaaaaagccaaactaaaatcgcgcaatctatggaaacttaacccttcatgctttttaggcaagcacattcgctcccaactaatccaagaaatacctttaccatgagaagaagaatatttccaccaaaaatgactcatcaatttctccaaatcatcacacactcccaaaggcaataagaagacactcatacgatagtttggtaaagattgcaaaacagtttgaagtaaaacttctttatcatcccttgacaaaagctgccatcctacccttggattcgtttagcaaatcagtctttgataaaactaagagtagcatttttatttctccccataatagtaaggaggccaagataagttgtattttctactgcttcctcaatacccaacaaagagcacacttgggccagagtttccacaatcatgtttgtactgaagaagatagaagatttttgaaaattaatcttctgacctgaagtctgttcaaaacaacgaaaaagatgaagaacacattgagcttcagaaatcgtagctttacaatacacatagctattgttgacccaaaatttgttaagtgttaattttgggatctctaaatttaacggaaggaagattccaaaatacacttgaaaagtgtatgggcaaaaaaatggggaccaactcgcacaatgagacactgcacgaggagaagagcccccacaaggaggggccaaggcacgggttgaactccccgcaccaagcctgcacgttcctcgctcctcggctcttcagctccccctcgctcgctctttcatccctctttcctcttttctctcttccttctcacccccacatactaatcacccatcaccacttgctcaacacatgggagcaatggtacttagattatatattacaatgggatgaccataaatagagttgaagaatatattcaaaccaagtctaaagtatgagcctcacaccctatgggctcaacacagccaaattctcagttgtttcctcactacgaacatgggctgtagtgggaaagataccaaaggagtgtacaatcaaggacaagcccgttaaagcaagtacacctctgaagatgaggtggttgtacaaaggatatgacatgtacaggtagtagagacaatatttgtcctactccaagtacacattgacatccgaccaccactcctctactactccccctaacacatccacatagtaccatcaggactttagcccctacttttaaaaccaattgtattttagagtcgtgggagctcaagtataaataccccatttaaattcttggaaagggcttggaaaatagccatttgtaagggagcttggagattcaatacaatattattttactccattgacattctaagtttctcttaagcttgtcatctctagcctttaatatttaattttctaactaaagtttagttgacgagttcttaccatcaacaaatatcatctgtaaaaaacatgtgagaaactactgaagcacatttggccacacgacaatcttggatccatcctttggattgtgaatcaacccagataacacctcaacacaaacaatgaatcaccttggcaaattccacatgaagaaacaattagacccatctctataccattgttaataaccatgtatctaaccgtgcccacacattcatgcaccaactgaacccatttctctgcaaactccatacctcaaagaagtagcttctagaaaaagttaatcaatcctatcatacatcttgctcatatccagctttaaagccatgaaaccatccctgtcatctctctttagtttcaagtaatgcatcccttcaaaagacatcatatgatgttattagtgattaatctacttggcacaaaagcactttgaatatcataaattacttgagaaacaccctccttgtacgattagccaaaatattagaagctatattataagaaacattacaaagagcaataagccttcaatcaccttaaacttctacttctagagttttcttcttagggatgaggacaatgttgcttccagctaaccaccttccaacattgaccaaaaaataactttaaaaatactaaggaattgaaagtttagttgcacaagttattaaatttggggattttgtataccaaatatttttaatgtggcgtgcgccaattctttcattaatgttgttgatttacattgtgaaactagtgtgcaaaagtagtattgcgttgcctaaagtaatagtctaataggataggagcacatgaccaaagtttatgaaactgcaaattgagtatattatacaaactatattatactgttcttgttctttaattaatattatataaccccaaatgaaacaacaatcaggttgcttgcaactgctttagaaaatcacaaataatttgcttagtaataacaatattttaattccacaaaattacaaggttatatatataggctctacataaatcctcatctgctattgccataaaacatcttagaaagaagaaaaaaaagcaacctatcattcaagatttgttgaacgagctactctatcaatttccttcatgatcagctctttttcttcttcaagttgttcatcttcagcacctgaaacagcaagatgttcgaacaatgattgagaagattcatcaaattgtagaaactttttttattttaatgagaatcaaagggtagaaacttggttggcttattattaaccttttccagcagatagattttctagcaattgcagcaatttttcatgatttttagccagaatgactttgatttcgcgcggcttgttgggattggcaacaaatacctgcaatgcactcatatttctagtcaaatttaattcgtataagtttctgggcacaaattcaattgttattatcagacattccaatgtattctgataaactcttttgttggaacaatgtcagacttatggtgtacccgagtcaaatttaggaaatcaaagaatcttaatatccattttgtaatagcagttgagtagcagtaacaactagagcatacaagcactaagagaagaaagagagaaaatcaaaccttgaaaatgtggaatgcagagagttggatatttttgcttgaatcctgctcatttagaaaaataaaaaatataagcactagtgaaaaaagttgccatgaattataataaatactgacaatcaaataggccaagcaagtgtattgtaatatttaactcccgaaaagacccaaaaaagcaaaatttagacaaacagataaattactaccatcagcaatgtcatcatgactttcaaataccgaacttctaaaatgtagcgcttcattatgtgggaatttggagactccaaaagaaactccgagagaagctagagtaaaaaaatgatctcatccttaaatattgtatattaatgagaaaaagtaacaccaaaaaaagatacaaaatgaaaattataaggtccaaaactaaccttcaacgattgccttcttgtcacgtaattagaagatgtcaagagtttttcatatgaatcaaagaactgaaggatatttgaaagaaagaaaacttcttattagataagctgaaagattaaatgaacaagtataccatgtaactgcatagatatcttcaccacttgcataatgcaaacgttcaatatcaaggtagtgtagacttgaatttttccagaacacaaatattcagatagttaaaagtcctccaagaagcttcttggccaagcagatctcttaggtttaaaatattgaaacaacatacagatcaagagagttctgaaggaacttgccacagcctaatttgaccacactacatataagaaaacaaggagctggcgaacagcaaacctcatcgtgacgggctgtcaaaaattcagagaccaaattcacatgtttagtaagcagatcctgtaaaaaatttattaaaaggaaacgagagaacataagtcagcatttaaatattgaagttattggaaaaacataacacttaataaaggagcggtcagaccttgaaggtggagaatgcatctgaagcaacatcaaagttcggcaactccacaaacttatagaacaactcaaagcttgcagactccaaaatgtatctgaaaaatcactataaaaatcaagtgtgtgaaaaaaaaaaaaaaaaaaaaaaaaaatacctgacaaagaaaaaggggtaacaattttgcgaacagacaaaacaaaagaataaatacataaatacaccactaaatgaaagagtaacagaaaagacttcttataaagacatactatatgtagaccatctaatgaatatcttac

SEQ ID NO: 218386 - DNA, 2763 bp, Cannabis indica
gtgatgttcgagggttgagagtatgtgcacagctgttgtgttaagaatcacctggggagggtgatttctattcatgcgtcctgattggatttctcggaggctctttgtggagaagcggcggcctgttattgcttggcggtgtctgttgctttagatctgaagtataagtatgttattgtggagagtgactcgagattaacaatcaatgctctcaatgggaaggcatctcattgggctctagagaactatgtttccttttgtactaagtcttctcattatttcatttgttgtaatttttcgaatgttagtaggaactgtaactttgcggcccacaatgtcgctaagtgggctttcacccaccaggtatatggatcgatcccaatcaactctgtaccggagaaaatattgtgtaacgaccatgagatctaattttctttaatatatatctacgcttatttttaaaataaataaataaactatagggcactaaatttgtatacacccgattaatcacttcctacgatcaaatatattatgcttaatcagacatcaatctagctagtgtatttttctaaaagtgtattgatgatggaaatacttgccggtaaccagggttaattaatttatttatattgataaagtttaataattaaatatacatttatgtatcttccagtctatgaaattcattacatacatataattaaataaaaaaattgttaattatgatttttgtcctcgaattttaacgtgtcaaatattgctgggcacaaattataataatacctaaaaagatcctataccggaaaagtaactctttgttgattcagttcttttagctatccattcttgctgggcacaaattatgataatacctaaaaagatcctgtataaagtgaatgctatttgtaggaaattcttatgaaaatgtatggtagactctaatggctcgagaagtgttaaacaaagagtgaaggacgactggaatttaggagtattaatttccaaatggaatgaggctgccattggaaaatatgtttggatggtagcaacgaaacatgacatgctttgggtttggttataagttcatatagtctattttggaacagatgattggtgggcctatacagtcccaaataccagcagttggtactggagacaggttgttatagagtgaaagagaaatacaagaaacttaatattgaggtagatagctcaggcaaagctctctaaatttacgaagtaagttttgcagtggcatctatgggcatgcccaaataaactaattaaagaatctctagctacagttcaagtgttaccaaagagaattaaacaagatgttaaaaaatagagttataggccatgttcttttggtgctgtatagaatgtacataattgtttaagaaaaattttaaaccgtctcaaaagtttagaaaacaaagttcaataaatgtcaagggagcaaaaatatcctaacacaaagaaatcacagcatcttttgatatggatttttcaatggcttttgacgagtaataataggtagaatataatttgcaaatacatacatgcaatttagtgatgacttaattaagttttcctttttcttttttcattttcaaaggtctcgagtgttaatggtggagaatgaatctatatagttttgttgggttgggaagtaggaagaaaaaatgtcaatattctcttgatgctttccttaggttttcattaaaatatttaattggaatcgttgatagtgatcaatatttatatataaatatacaatttttctttagtttattatgccatggctactatacactagtcaattatatatgtcctcaccaatatctttgtacactttgcgtgtactttaaatatttgtgccatcaatttctttttctccatgccaaaaccaaataatattttagaatttataaattttatatttatatattaaagattgagaaaaaaaggtaggcaaagatggaggttaatccaaaccaaaccaaaccctatgcgtatatagcttttactaattgcctagaaaggaagattcattttattttatgatatatatatatatatatatataatatttatatagaagtacttttgactaggtaataactattaatagttctacaaaaaaatatttataaatattaaattattaaattttatttaacgactaataataaaaaaaattaaacttctatacttattaatttaactatgtaattaaaaaaaatatgaaaaaacttacactatatcaaaatatattttatataaaaaatattcaacttaaacttttattaaatatttgagcaacaacctcaaaccagaagttttttttctttttaatagataacaaaattaagcatataaatttaattttttcaaatagtacattaataatacccattaaaagtattatacatattatttatttttatttttattttttttggccaagaattatacatattatttatgttatcgttaaaatacttgatatgtgttttggcttggcatcagcactataagaaaagatcactttataataaaaatctatctcataagtgatatgggatgaaaaagtagatgctacttaaatatgacaacttaaaaaaagaaaacaaaaccaatttgatccacttttgaagcattaataaaggtaaagttaaagtcttttttaatttcctttattatttatttttttgtattagtgaacccttttaatggacctaatttttgcttcttttt

SEQ ID NO: 218387 - DNA, 6575 bp, Cannabis indica
ctctctctctctctctcttaaacacacacaatctccttcttttttccctccctttacaaccatataaataaagctaccaatcccttcataaccaaaaaaactacacaccatttctcaagttttcaccttcaacttgttcttccaactctttttgcaaaaacaagtaagaaaatcatataagaatgatatactcttctagcccacctctacttgatcactatggagctcttttgagacactcaaaaacaacaacaaccaccttgcagaaaactcaagagtgcaataatggccactacttcaataatggagtggtcatggaagaatgccaacttccattgatagacctcaatggcttaaaaagtcatgacatgtgggagcaggcagaatgtgttagagcaatctcaaaagcttcatcagaatggggttttttccaagtagtgaaccatggaataagccctgagttagtgaagaggatgagggaacatcaaatgaaactttttgaagcaccctttgaacacaaagcttcttctaggcttttgaataattcatacaagtgggggacaccaactgctactcgtcctaaccagttttcttggtccgaagctttccacattcctctcactaaaatttcagatgaatcttgctatggagagtttagctccttaaggtaattgcaaaaaggaaaatagtaaaaactacacatacccttttgagcattatgcaatcacatttcatgatatagaattaggagaaagtacctacttgtaatgacacccttttggaatggatgactaactgcattgttttcatttttttttactcagggaagtgacagaagaatttgcatcagccatgtcaaatctagcaaggttgctggctgggattctggtggagaacttgggccaccacagacaagttttggaagacatttgtgaggaaagcacatgctttcttcgcttgaatcactacccggcttgcccagtttcttcagatatttttggtctagtgccacatactgacagtggttttctcacaattctttgtcaagatcaagttggtggacttcagctcatgaaagattccaaatgggtatctgtaaaaccaaaccaagaagctcttattgtcaatattggagatctctttcaggtaaaaactattctatctgactattattataatgcctcttctaagatttgctcattttgttgactcataaagtctaagttgactcaatctggatttcctaataatatggtccatgacatctttaatgtaattaatatcataccatgttaaaacacaattaaataatgagttgttaacaaaaataataggcatggagcaatgatgtgtacaaaagtgtggagcacagagtaatggctagcaagatggaaagattctcagtagcttacttcctctgcccttcatatgattctttgattgggagctgcagagagccttcaatctacagagacttcacttttcgtgagtacagaatgcaagtccaagaagatgttaagaagaccgggcgcaaagtaggcctttcgaggtttcttcttcatgatcaagatcaaagtatgcatactagagtaatgcagaagaggcagctttgatagtcttgacaagtctgttgcgcgcttctattgaaccgcagctgtcctgctgcatcgagttcttcagaacctctcaactcaggctgacctgcttcaagacttagccatggcttcagaaatattttcactggaaaagcaagataattataatactatagcatacattatgtatatttaaaaatcaaagtacgtatatactatatagcttatgaaagagttgttcctgattgtaagagttggatatataataaaataatttattatttcctcattttgcagatgtggatggttaaaactcatataatatggcaaatgtctctattgtattcaccatagaatacaatttaacatctggggtggcaaataccacatctattattaaaataaggtcataatataatttttggtaccataacaaatcagcagcctttcagtgttttacataagtgtctcagaatttagcattataatatatacagaaaaatcaactacatttctgagaattatggtgaccaagattagaagaatacagtacactcccatgggctgaaattcagaatatagtaaaatctaactatttgcacaaatttgagaaatattcaatcaaggaacattgcaaccttgttctttgacaaaaggactacttctctagctatatcgatcttcttactttgtataccaatctatttcatacacttgggaaaattccatatccttaattacaatcatttttcattctccgctataggtttctcaacaaaggacctaaaaacagatttagcatgtcatgagcaggatcccctgttcctccggctttaatgacactttcttctgttgcagatgaactatcgttcgctttgtaagaaccaccaatatcattggttgttgatgtttgaatgaaagagctagtattatcattagtggttgagctttgcttacaatcttctgagtttatactagaagatattgttgttaatggtctacttctcgaatcaaactttcccttcacttcttgctcttcctccttatccttattggctctaacatactgcacacaaatgatccagtcattagatttttatcaattatttttttcttaactacattctgggattcaagaatatcccaagagagatccaactattgactgtcattcattttacagttggtattcagtaggataatgttattcattttaacattgtttaattaagataaatataacaaaacatgtccaaatgaaacaaaaacaatgaaaatgagttatggaagagaaagtaacctctttagcaatggtcaatagatcatcaactgtcagttcaaaatcatcaccctcattcataggctggatatcctctttatgaacatcttcaagcttctttgttttccgccttttctgagaagaaggtttggacaattttctcctagttctattagacttatcatcttgctcatcttcagatatttcagtatcagaataggcatctactttttctgcctctacttttcttttccctgtcctacatttcacaagagcatctgaactatgcaagctcccttttcgcgaacattttgccaaagttcgagatgagagactttcctctggttgctttgtggttgattctgttgttttaccagacttctccactgtttgaacatcagaagaacttcccagcatccattgtggtaagcgccgcccacttccctccacaagagctcctccaaccattttcacagaaaactgtcataaaccaaatctgagtgaaaacaagaaaagagtttgtttaccataaaaagctagctatgaacaccctcattggaattaagcgttgtacataaatggacattactaccaaccattgaaaaaattacaataaccatatccttagtttcatttatagaatgaaatttcaccaactaccaaaatgatgatcagattataaaattgaaaacattgcagacaattcaaaactttaattcatgaaaaaagataaaaactttatatttttaaaattccaaatttgaacgccaagaaagaacaaattcaattgagtttggtaacagtaaaaattacttaggccatagaagagaagtgagaatgaatgaaccctaggtaattgtaattgaaaaaaataaaagaaagataccttgaattggagccggggaattcaacattggattggcgttgacgttgggatcctcttcttccttctcctaattcagccacaaccatttttatatttggaaacaaatcaaaatcaaaatcaaaatagtagaaaaaggtttaattaggtttataccatatttattcaaactatcatattcgatgccaaaaatatgtcatttattttacaaatacacataaaaagttcatttgcgtggtaggtcccaaattttacacggtttgataaattaataaaaaacaaatcatcccaaataccacgtttttcttttttatttattttttttttacaaattttaaccatattaaatcaatctattattatacaactaattaaagttattagtatgaaaaagtgagcgttgtgtgccttaaaaagctctgtggcagttgggtttattttttctttttaactgtcttaactatatttcaaaatttgctcttatgggttctcctatcttcatcaaccataaccgttcccgcctctatgtcaattcaaaaaaattctccaatatcaaacagatttctccataactgatactctgctcttgtgtttttgtccatggaaaatttactttctgaattgaatcgtaccatgaagctatctgatcgagaaagagatgttcaaactctgcctgtgtcatcaacacctgggatcgctgctgcccagaattttagtctttatgctcgagtagttacatctcgagagtttaaccgaaagacttttaaaatcaagatgagtggacattgggagggtcaatacccggttaccatcacggatcaccattcaggactgttcttggttacttttggatgtttggaggatcttaggaaggtattatttatggaaccttgcattttcagaaccatcatattgtcctcagtcctccttttgcacttcaaattgcctctgccgaatcactgcatttatcgccattctgggttcaattacataggcttccattcttgagcaaatcaagagtaatggctgaatgggcgggcaatatcgtaggtacgtacatcgatgttcacgaggactctttaaatgagggttgggggcctttccttcgatttcgtgcttcaatcgacatatctaaaccattgttgaggggaaaaatggttaaattaagagattctcgggatgaattctgggttgaatttcgctatgaaagactcccagaattttgctttgaatgtgggacaattggtcatccttttgagcactgtcatagtttcttggaaaatttgtacaatggtgttgatccctcactgtcatatggacccgaaatgataggctcacctcttcctcaatcgggttataatagatataggactgatttcttcaagggagaagtttggcctctcatgacaagattagccaaaaaatctattactgccgtgttaccacaagtgtcatcaaggcctcaatcttttcctgcagtcttaactattggggaatcatcacaacaaacaactccaggacatagtattcccccaacatcagaatcatctcctacaggctctaatctccactcaaatatcacaactacaccagcaaataacaatgatgcagtcactctccccattccctcttaccttcaaccttcattcccatttgccacttatcccccatcctcatcgaatatcaccattaatcctcctataacacatgtgccaacatcactaaactctacattattcactacccctgctgcaattaccaccttgccaaccaacatagttaatcaaaaccaactcccacgggataatggtaaaggcaaaagcattgtcattgctaatgataataaagagaattgcaatcccaataagatgttcaaacgacaactaaacgctgaatcacttcgatcagtcctcaagcgttgtcgatccaatgatcctaccactcgttcgggtaattcaggcttgaatgagcttactgctcctcatgtttccacttcctcggattcagatgagcttttcactgatattttggcggatgttgctcagcaacaccgccctcaaccatgaattgtataagttggaatgcccggggattggagaaccccagtgcattcagatatctccgcttgcttgttactgagcatgcgccctgtttgctgtttatcattgagtctaaattaaaagctggtagtatcgataaatttcgtcattctcttcgttttccgcatggaattgaggttccacgacaaggccgtggtggaggccttttgttactttggaaatccaatgtctctgtcactcttaacaatttttccaccaatcacattgactgttttattgagaataatgagggaccttcctttcacttcactggtttctatggacatccatgcactactcaaagacatcatacttggaccatgttgaagcgttgtcatgatattgcacccttatctccttggcttgtcctaggagattttaatgagattctttccaatgaagataaagtgggaggttcagttagaaattcttcacagattgatgcttttcgtggtactgttactgcttgtaatctcaacttgctaccttttgatggagatcgtataacttggacaagtcaaggacaaggcaagggtatcattaaagagagattagattatggttttgtcaatgatcactgggactcaacttttcaatcaagtacacttcaacatcttgattattataattccgaccatcgggctttaaaagttctggtgtcagctttgaatgaagaaacacatgaaatcagattcaagtccaggtttcgatttgaaaga

SEQ ID NO: 218388 - DNA, 10493 bp, Cannabis indica
aaatttgagaaaatttcaatgtcggtatttcttaaaattaaatgtaaacatagatgtgaatgtttggacaccacgtagatccacatataccgctactccttaaaataacaactacagttacaagcttgtttttgcagtagtgccattatgggaccaattaagctatataaatgtactagccttcagttcattattcattataattgatcagatcatgcttgcttgcttgctagatatatttgacggttaggatttaaatataaagatggttcaatttactatatgatcactccaatccttgacaagacaatttcgaacttcaatgcctaatttattattaaattaaacctcacgaacgtacaacatgcaaaccaaatccatctcattgtattattttcctaccaaacatgacctaaatgttaaatgattattttctatacagtttcgaaaaaattaatcctatattatttttctcttgtttattaacataaaaaattctgggaattggcgagaaccaccgcaggtaccagtaaaatgaaagtaaaggttttgtcagaggttaaagtaactattcacttatcctcttaaagctattatatattattaccattacaatttactactcattaggaaaactacacgtacggcatgcaatataattagttatatcaataattacgtatcaaacacacttttgccctaggttgttcatgaaaccctaaaaaacccattaagtaattaaaactgtcttataagaaaagaaactaagaaatacccaaagtcatccaaaaaaaaaaacacaattactaaaaagcattattggtgtttagcgttttttttcgattcatattgctattggtataattaaatattaggtcttatataatttgaaaaattaattttcaagatcgctaaccaatcgtaaaacatcacttataaaagatgttaaacatagctagtacctactaaatgctgtaatataatttttagatatgtcattattaacatacataaagaaacacttcttttctgtgcactaagaaagtaaatgagcctctaacccttctaggaaaacccttatcttcccttatttctctttaaattattattcatcttcctctctctctttctatatattctaccctagaagagagaagaagaagaagaagattgttgttgatatatatcaaataataataataataataataataataataaatatgggaaggggtaagattgagattaagaaaatagagaatacaagtaatagagcagtgacttatgctaagagaaaagctggaattttcaagaaggctaaggagattgctattctttgtgatgttaaagtctcactcatcatcgtttctggatctggcaaaatggatgccatgtgtagtcctgataattcgtaataagctttttttctttttagatttaataagaaaataaataaaataaaaattgtatttttttttatttataataagtgaattttgttttgtgtgtttttgaattaaggttgagtaccatatgtgaggaatatcacaaacactccaaagagaagttatggcctgctaagcatgaggtaattaatatatatatatatttgtgattattgtttttttatttgttggtattttgtttgatttaatggaaaaagaatatatgagtgttaattattttccataaagatgttaagaaacatcaagtatggtttctaagaacagatctacaaaaagaaggtgcggctattttatattcttattattatttaattaataacagatctagcacatatatatatatatatatatattataaaatatattattctgtccctcttccctttttattgcaaaatttcagagaaagggttgtgattattatatataatattaattttactattacacagacacatcactaaattaatagttaaatttgttttctttaaaaaatacaagaaaacgctgaagaaaagaacaaagccagaaaaatgcagaaattaattaattaaggagaaaacttttttatattatatttggttaggattatcaatcattacttcggatcaatgtatatctttatatgatcttaatgaggatactcatagagtagatgatgtattaatatcaataaataatcacataaataaatatagtaatattgattaatttcttttggtaattattaattaattaaacacgtacgtatatgcagaacctgcacaatgaaattgaaatggtcaaaaaagaaaatgagaacatggtgatagagctgaggtatatatttatatctttcactatatattattaattccacaaataaataatttatttatttcttagtagctaatagcttaattaatttacatttatattcatgatcccaatattatattatatataggcacctgaatggacaggatatcaatctgaaccactatgaactgatacctattgaggaggcacttgagaatggtcttataagtgttcgtgccagaaaggcaagttaactaataaaaagctccccttcaatttctataaatttggattgaattctctatacatataaattagggtataagtttaatatttatatttagcgttataggtattttaaattgtaatttttctctaattttgtaagtataaattttgttttgaattcgttaaaagaatattagtattatgtctaaactaatgatctagaatcagagtcttatatatattgtgtttaagacaataatagagtttgtattaataaattagagaaaattataatttacaatattaaatttatgccacttacaaatttaaaattttagatatatacttatactgctataaattaatctatatacatatggaatatggctaacacatttttttgtgtgttttctgctctttgttacatatgagtacagtcggagttagttaacattcttaggcaaaatgtaagtgacacaaattagtgagtttttcatttcacaattccttaagttacataaataattcttataaatatatctaaatatatcatatatatatatatataaatgtgtgttatggtggttatagctggaagctaaagaggaagagcataagcgcctcatttgcgagctggtatgttcatcaatcatatcatggtttgctctatcttagttttcttataataatatttaatttctatttatttttgctcagaaaatcaatatatatatatatatatatttatatatatggtacctgttttcttatacgatagatgcatgcttgtctgctgcacacatgcatagagatatatataacgataatgatgagttagtcatgtcaattgtcagcactgaagaaataacacttgattttgatctattataataaattaataggaaaataaacgtgtatatatactatgagcaaatagattatatatttgataagactgatcagtttcttattatttgtcaatttaatatgggcactgcttttagtcactttaaatgtgtcacacagtagtaaaaatatattatttattaaattaaaatatgtaacagtatgtcatcttttgtgttgcttaaagtcttaaggtgtcttttagtatttgagtattgcaattttttggccttatgaagaaacaccactccaactcaggggcaatagttggagttaatttctcttgttaaacttacatttttgtaattaatgaatggattgtgtatgtatgtatatatatgcagcaccaaaagatggaagtagtaggggatcatgggtatcataatcatcatcatcatcatgatcagaggctgaatttgagggactacaataatgcccatatgcctttagccttccgtgtccagcctatgcagccaaatctccaagagagaatttagtataaaatatagtattatatatatatatatatatgatcatcattatatataagagatctcactataattaaagtgattattattacaagcttgttttatcagttaaagtctgtattgctaattaaggactaattaaaagacttcttatatatatgttgtgggagagatatatagtcaatgtgtgtggactgaaattgccttatcccctttcgtggttatcaattaatatataaatgatatattgcaatattattaatgttcaataatgactaatgagttacttttgtaatggaagaggctcatttctgatcatgtattaattcaaggtttctagttaaattttaaaacaaattaagaataaagatggtttatatttttgggctaattaattaaatagcctctgcaaaatcaattagctaaaagaattaattggtagttacataaaaatcttgacaatcaaactggtcttcttgggttgtgtagtgtgtgtatatatatacactgagaattactggtcttaagagagaaaacatgcttgagttcgggatggggaggtttatgttgctaattttaggtatatatgttaactcatcttggagtgttgaagcccattagttagcctggttatatatggactaggcaaatgcaaatgtccaagctgagaagaaataattgaattttacataccatctaatgaatttatgtgtaagtcaatattttacatttttgaggttcatctaataaattttatctcaacacctgatttcgtgaactcttaataatctacaagaattattgatatacgtacaaaaactttatgtattttatttttatacactgtttattttttaattttattcttcagttagcatttgcaacaaaatatctatttcgttaccaatattattattttgtaatcagttaaattaattaataaattagtaattatagaacataaaatttcatcttagaacactaaattctatgataaattgatcatattaatatgtttcttctcatttttagttcatattatgagctttaccatttaaacttgaaacaagaaaaacaagtataattctgctccaaaaaaatgtattcacaagaaaaaaaaattagagattgaaaagcttaaaaattaaaaactaatataacaaatttctaaaaaaaaatcgaaaaaatatatctatctatatattaacaaaaaaagtgaattatatatggtaaaaaagttagaacaagttaagttaattagtgaatctgaatttactaaaaaaaaaaaagcaattatatgttaaaagatgcgaacaagttgatttaattagtggatccgaaatttctccaaaaaaaaaaaaaatcacatagtaaaaaggtatgaacaagttgaatcaaattgtatgagcagcaaatggtagattggattggaccctacgtggttctatgaaagtgaaattacatttttaaataatgcttgaaacaaaccaagttgacccatatgggattatggatggtgacctgccaacaacccacattgtacactcaatactttattattcttaatgaagaaaaaacaaatactattaatgattgattgatgttgttacagatcctagaacaaatgaaaaggtgcatagtttgatttgagtatagttgagaagagggagcacacaaaacaatggcagctcagatttgggattgtaagaaacaagttataccattcatagccatggctgcaatggaatgcattaatgtgggcttaaataccttatacaaagcagcctctaccaaaggattgagctactttgtttttgttacatattcttatgcttttggctcaattactctgttaccccttctcttcatctttccaaggtattctttccttttttcttcttaattttctagcattttacttagttaacataaactttcaagttcaaccatgttgaaaaattgtctatatcattatatatatgcagaagaggaggacttccaccattcacaacttccattttctacagaattgtcctgctttcagttatagggtatgaatgaaatccattttcacttgacaaatctctatgtgtgaagacttttctttttggtgatattttctggcaaaacaggtttggagggaatatgtgtatattacaaaggtatagaatatagttctccaactcttgctacagctatgagctaacctttctccagtctttctacttttgtattggctgtcattttcaggttctaatccttaaagtttcttcctttattgaaattattatgttttgttcttctatgagtatatataataatgtgttatgactcacttaaaggatggaaactctggactttagaagatcaagcactatagctaaaaccataggaactttactttcaatatcaggagctttaatagcaattctctacaagggaaccaaaatattctcttctccatctaaagaaacacctttttcagtatttgactattctctgagaacatcacaacccaattgggttcttggtggtcttttacttgttgccttctgtgtactagtctcaatttggtacattcttcaggtaactcactttcaactacagctcataagaaaaatacggagtgtttttgtttaaaataaacatgttgttgcagacccaactcattaaagaatacccagctgagctaatagtggtggtcctatactccttatgcacagcaattgttggagctgttgtaagcttcatggtaggaacagacataaatgattggacactgaggactgataaagcattagttaccattatactctatgtaagtactaaaaaaactctctttccccacctcagaacactacaagagcggaccaccacgagttgtatagtgtagtgatagggatgtttttgttggcatcttattttttagggtcaagggttcgaattctaacacagcctttcatggaagggtttgtacttgaccttttaggaagctagtttgttgttgaggtgtcatccttaataagatgggaaccttcgagatacataccaatgatgacgaataagtgtcataggactcaaacacgtactattgtgtaatgtgtcatacaccctaaccaatcaaactgtaaatatttgtcatacactttggaaagtgtgagccctaagtacgggcctagcctcctatgcttagggccggccctgcgataacccagttaagaaagaatgagatataagatccttataattggcacctggtctaaaaaaacactagtagagggatttgatttatattttgtctagaaaagaaaagatgtaatttatgtttcatttcagggattcttaggcccaagcttcagtgcagcagttcatacatggggtttgctcttgaaagggccagtctatgtctcaatcttcaagccattttcaattgttattgcagctgttatgggtgttattttccttggtgatgctctctatattgggaggtactacactttttttcatttctttcttttgaagcttaattagaattagtacctattaatattattagaccaaaggaaccaactaactctaattatactgctaatttgcttattttgtaacataaatgttttgtagtgtaattggagcaacaatactgttatttgggttgtatgctgtggtttggggaaaagcaaaagaggaaagcagtaaagattgtgcctcaaaagacttggaaacttcaactgaaaataagacccctttgttgaggagttgagagttcaatatataaatatgtatttatatataataataacaatatgtatttatatataataataacaatatgtattagattatggtagattctgttgtcacattttttgttttttcttttctaaattaagttaacaaataaaatatgcatgtggcatcatatataataattaataaaaaagagaacactagtaaataatagtagaggatggggaatgagaacttaattttcaatatttttggtgatttggtagtacaattttttttccacattattaaaatttttatggggagtttatttgaaaagtaggtgagaaaaatgatgtgctaaaaattaaatataaattgacataaactaaaaatgggagattggaaatctaagaaagaagttgtgccatttgcagctatggctgcagctgagtgtagtatggttggtctacatattctgtataaatcagctactttgaaaggcttcgccttctttgttttcatggcctattcttattctttgggcacccttcttctcttcccactttgcttatttttctcaaggtaataaacatttttaacataccataacttcattcaatcaaaactaacatatttacattattttggtttaacttttgcagaagatcacccctttatttaagtggactattatttacaaactaatcctcctttcacttattgggtatatatttatatgtatgaacttcacaagggaaaaataacccttacaaactattcttcttcttcttctcagttctcaacaagggcccaacaattgtatcatctcaatctgcaccagtaaaatcagtattacaatctcattcccttgatctacaaaaaccactgtcaaattgggctttaggtggttttttagttgctacagagttccttctcaactcaattatttcaaagagagaaaaagttatgaacattaatacattattataaaattggaattttctctttataggcacagatcctgaaaatataccctactgagcttatagtggccttcatgtactgccttggtgtgaccatttttactgtacctataagctttatggtaaaaaggggagtttagtgattgaacactgaaacctgatattaaattaatcacagttatatactctgtaagttatcatgaacacatcattaggctatattttacaaggtgtttgtgatatgtctaactgaaaatgctttcttattatttttagacatttccaggcccagtcttcatagcctctattgtctcttgttgcttgccttcaaaagggcctctttatatctcaattttcaagccattagtcattgttattgctactgctgcaagtttcatattctttagagatggtctccatcttcggaggtacattcaattttctttttgtttttgtttttgtgtgtttggagcaacaatattgtgacttgggttttatgttgtgtgatgggaaaaagctaaggaaaagaattatggtaagttgggagcctcttcatctagtggaaagaagacccctttgttacaaagccaaataatgattgatcattattatgtacattgactttataatggattgataagatccaaaccttatgcaaataatgttctctatatttggttgtcattattgagtcattactagttatcaagatcgaccaattttattttattttcttttatcttatcaaacaaccactttggataaatgagtggggttaaattgatttgacatatacaaagggactcctattaagcgtttgaatccttgtttttatcatataaaaacattgaattttcattttaaggttttcaaggtacaattttacaaatattatggtttttttcattaaaaaaaattaattgtgtgggatttttttttttaaaaaaaaaaagaaaatatacggagaaaacagtatagttatttggttatttcaagaagatgactgataacatttaactatttttcccataaaaaaagttttaaagaacatgaagaacgagttcattttcgaaatatttttcttttctaatattatttttattagagcttcccttattctttttatccagcataacaatgtgaatcgtgctttaatactagaaaaatgtattatttataatctaaaattttaaactattttagttgataaaacttatttttaatagtatttctctattttttacttttttgagctattttaaccgatgggatgtgagtgttctaaagacaatgtaagcagttctatttgggctgaaactaaggcccatacaatcgaagcccatatttatataaaaagccagaactggccattcagacccaagataatcaatatgccaaaaaaaggaaaaaggtgttgtctcgtcaagtgaaaaggatgtttcactcatatcatttcgaaactacatattattatgtcgttgcaccaataattgtacactttccctttgttacatattggttattatataaaatacataaataaaatataacgaaaaccatctcagctacatcacacataattactattaattaattaactatcataaacatataactgaagaagaagctatatatataaatattataataaaccaattgagatccttttcacactatattaaatagtattttgtccccaataataacacacactctcattaaccaaataaataacctccaaaccaggcacaaacaaagtatttctattcttcattttcatcaataaaaaccacgagagaaagggccctttatcagctgacacatcttcctatctctgtcactctctccttaatagttccacccactaattaatattattattattatta

SEQ ID NO: 218389 - DNA, 2825 bp, Cannabis indica
ggcataaaacccaacaattctgtgggaagtggacgtgaatagcagctgcttcagtaaaagttatagtgggttcccctacctgtggtattttttgctttctctcttctacggccaaaattgtttccttttgttcgtgttgtaaggcttgggcataattttcccgagctttgcctaagtctctagctggacgtgggcccccaataatgacttgtaaatgcccgtccactggtgggggcatttatagatcctgattattgtctctttggggacccctttggttctggtcggcattgacgtatttttgcaaatgtgggttgctttttctgatcaagaattcaatatcgcgctttaggttattgcactcattcctgtcatagtcataatatgaatgaaacccacagaacttggacgtgtctcttttacttacgtcgttcttcatgggagcagggtttttgtacgagactgtagattgggttgttgcgtaaattgtctctaggtcgtcagttaggacttacaaagcagtaaactttgaggcattttctttagggttgtgttaggcattgccagtaaactttcccttctttttgctgccttgcctaccaacattgttagaccttttcccgctcgaagttgagctgctaggatattgttgattttgaccaggtgccctatcgaggagatatttggttggcattttcttatgtgcgacagtgtcaacacactgaacagcctcctcgagcttaataaatccatcttcttggttaagaaattctaccatggaccccacggggaaaaatcttttaatgtctttccatagttccccgagcggctcaatgcccccaatatggcagtcaaccttccctcctcggttaaccccttaacctttgtagcctttgtcatggacctacttatatagggtcttaggggttttcctagcacttcttttacttcaactaggccctcaaggttcgaggggagttgatgggaggaagagaactatgcgtggcattctgaggagaaaaccttgcatgaattaagctttcctagagatagcttaaagtgccactgttgggtgacctctgcaagtatagcaaggaatattctacactgcacatcaccccgtacccctgcagatgcatttgcatctcaaaatgtataaggtgtgataaggggtctttttttcgctgtatacatattcaatgtcggcatcttgaatttcaagagtaattcaaggactttgatcttcagggagaatggtgatccgcgtgctgagtccagatcccttctcgtgtttaggtcacccctgaggtcgtgggccgcacctaatttgttaaatactgaggtaccaagggatcttgatgtcagacttctttggccggtcggttggccagaacttttagtctggatgaaggtattaggtgtaactccacccgaagagaggtcacgtaggatctggccgtctactacttggcctacaaattagacctgtgtcctgggattggacgactacccattatgagtttgggcggtatgcctagtagcatattcttctgtaccgctcagtgggatagttgaagcggtagctggttgttgattagcaatatggtggcctgccttgggcgatcatcgatggttgcttactaagccttcaaagtttccatctctctgtccctccactgtataaactggcatctctgctcatcaaacgtgaggtttattgcagcacggagatcctcctgatgatgatgcaaagcgttattatggttgtgcatgattccaagcgttgcacggaggttttggatctcagtatcatccccaaccatcgtctgagcattggtggtggacgggacaccagtattgggtgtggattggtcaactgcagaactggtattcccagtctcttgcacacctggtgtgatcctagctgtaaagaccgcttagcttaaattttgaaatcagcagataattaaggtttaatcatgaaaattatttgttaactctaaataattaatttatagagatttacttgaattcagaatgcattttatatgtcatatatagaaatttcataattttgcatgttcagtgcccggcaacattggaacgcagtgtatggctcagtagaatcacatcctggtatttttcataattttgcatgttcataattttgcatgttcagtgcccggcaacattttaagttgtttttagttgatttgagggcttgtggtgagagttgttcaaagtttgagcttatgagctcaagctttgctctcacatggcgaaactttttctaagcttgtagtagggttttgttgccttgataatgtttattggggcctatatatcaggtctggaaagtttgaattgaattagtgttgttttgattgagttataaaaattttcgtcagtcttacactgaaccgaaattccgggtcaaaggggcctgtaggaatcggaattccggtcggctcccaggaattttcctagaaccggaattccggttggggaacccgtctaccgattggggcaattctgggaacccttgtttttcccatttttgtgttatttagggtattgccatgatattcatcgatagggaaacttttagtttcaagtttaagtccccggaagtgatttagcgtgtcactcacctatgttacgatttatgtgatttaggagcctgtaattcgccgagcagctattccactcaggttggtcgacacacctgaattcagaatcgaggtaagattagtataatgtcatggatatgcttatacatgtttagcgtacatgttagttaccatcaaaaataaacatattagata

SEQ ID NO: 218390 - DNA, 6230 bp, Cannabis indica
tttttttttcatgatcccattattttttaggattgcatgtaaactttcaaaatttcaagtagtttacattatcaaaaataaagtttaaataaattttttacacacatataaaaataatagtcacgagtgcaacaaaatatttgaattaattttttattgtaaactatttagaattttatgaaaatttataagtaattctaggtaactacaacatacaaggtcattgaaaattgactacaaaactcccatgaatgtccaaacaaatagagggtgtactgaaacgcgccctttgagggggtgtgttatataattacactaaaaggttataagaggtgttgacctcgcttctagccaacaacactgagtctaaataaagcgataatataatactatgataatgattaacactccaataatataaacggcacacgaaatttatagaggttcggccccttattgcgataatagtctacttctcttttttgtattgctttaatagaagtatatcaagatcatgaggtccgtcaaggtgattttctcaatattttttgaaaaatgttacaaatattttgagagtgttttcctctccaagtgcgtaaaaaaggtccttgaatagtgaactgacctcactatttaaagggaagaatgaatacatagtttaaattacccacaaaataggagataaatcgagaatggtttaaatgtgaatcctacaattttctccatctattaaatcaaatctcatgaatatagggatactaattggcctattattatggagatagttaaagaatgtatcaggacctatctgcagtgaatgcctctggtcggccattcgtcatcatttgggctggtcagtataatactcgtgtcatactctgcccacggtcaacttcctttgccacatgtcaacttgtcaagtgccatatcattaatgcaaatttttagataacatttgcctccaagtttagtgagaacttctggtcgtacggggactgtctataccttacatgttgcactcctaggtgacacgcgtttgcacccacgtgcctacacggatatgacatcgttctacctaaagcgtgcaaatcttttcatgccctttcaaagctctctgcctctagaattagtctggtcaccctgcctagaggcatgatttcctttcatttccttttgagattggctgttagatttggatttcttttgttgttcagcctaagtagccttcttttaagtttcccctaatttttctttccatttatccttatgacgatcgtaagttccaagatttttaggaacaattttttggtggtgttgtctttttggaaccgtttgtttagttttgtttccaacagtcaatgatgtcattacatcttccattctcgacatattttcaagcattaggatagaaaatttctcttacctcatgtttagtttcttggccataatgaccaaaggatctgactcatttagatcatcctcatttttgcatcaccgtcagtgggcatgtcttagtgatcatcttcaacatcatcaaaattattctctcctaattcatcatctttaaccataggatctttagggataattttcttgctagtatgatctttcttgaggcgattggtcacctcagtcgaatcttctgtacctcccattttagaattaggatcagcatcacccttctcagggtgagtatagtggagactagattgggtttgggtgagtaccataattacagaatgtaatcttggatggtatcattactttcttcaactctcaatgaaagcaacaaaatatttatcgagatttttagaaaatgaattatttaataatagagctaaaggaaatataattaaaagaatcaaataagaagagaacactcagagtttttacgtggttggggcgttaatgagccttagtccacgagtcattattattatctaataggatagaaaagcctaaaggattacaatgaatatgagttaagaattttcaaccctttgcatgaaggattcagtgcatattcatagagtataagggtcatacttagttaccatttccctctaatggggtgtttacagatgatacattactttgggcttatcaagtgaagcccaacccatgaggcagtgactgtatgctgacttggcatgttgatcatggtcacaactgttgttactgtgtcccctgattgtggataattaatgcaatattaattacttaatcttcaattatatagtttcctattctagcttgatatttattctctatccaagatcttatgaaagtgatttctttattctatacgaaatcactaaataggaaactacagctggcttctaggtacactctggagggttctttcgacttcatagagctaggatccttctagatacggactaaccttagtgaaagcttgcctgagtgagaactatgattgctttcccggaaggccaaatcggttttgggctcggccctgttcgtttgggcccactcatggacctttacttctatttgaaatccatgtgtcccttgcccaagacacagataacgaaaacaattttctgaggacgtcgtaccaacatataatgttcttcataatgaagtctaagacttttttggaggttattataccaatagtttggcctctgcccacttggtaaagtagtcaactgccactacagcatattggaccccacctttttcttttggcagttgtctgatcaggttgattccccatattgcatacaaccaggggatttgcattcagatcaactcgttgggcaaagttctagggatctttgcaaatctttgacacttgtcgcatttcttcacatgagtatttgagtcctcaatcatgttcgaccaaaagtgtccttgtcgaagtatctttttggacagactttgcccccaagcgtgatttttataaaaccctttgtggactttagcaagaagtcgagcagtttcctctacttcacacatctcaagagtagtaaagaaaatccacgcatgtacattaatttgtctaatattaaatatcatgcatcttttctcatcatcttctgagcttcatttttgtcactcggcagtgttctagtttcaaggtaagttgaaattgtggtcatccaggtaggagtagtgtctagcatttcaatttcttccaaataggtgatgctagggtccttaaggtattaaatagggaccaagttttcattgtcagataccgaggtgcttgctagtcatgccaaggtaccagctattgcattttcttctcttagaattttctctttggtgtatcctttgaattgtgccaagaggtcttgaatcttacatagataggccatcatcttttcccctcgaatcatgtattccccttgaacacatttaacgacaagttatcaatcactataaatgtacaagtactcaatgtgtatctcccgagcaagtttaagtctagcagtgagagcttcatattcaacttcattatttgaggctgggaacccaaactttatagcttactgcaattgttggcccccatgtgtgataagggaaattcctgcaccgaaaagttgatcagtgacaatccatccacatgtactttccaaattggtccttctttggtcttttgctctggcatgtgctctttttcttgctcttgcttcttctttggctgaacattgtctttagtaatagcttcttcattgtttgtacattcagccacgaagtccactaaagcttggccttttatcgctccccttggctagtagatgatttcataaatgcccatttgagtagccgaccagaagcatctggtttctacaatacttgacaaagtggctagttagtatgtaccatgatgggatgagcttggaagtatggtcttagcttttttgatgcaagtagcaggcaatatatcagtttctcaattggaggataacgactttcaacatcaattaacctcttgatgacatagtagactcgagttgagagccactttcctctctaatcaatacaatgcttactacaaactcggttattgttaggtatatccccaattcttctctgtctagaggcttcaataagagaggaagttgtacgagttatttctttagttcttaaagtttgtttgcactcctcgatccattcaaatttttttcctaaacacacttgtcgatagattttgacttgaatctgctttagatggatatcccactaatgagactttgcacttccttaaatttggttgttgatttcatattcagaagggcttgaattttctctagtttggcttcaatttaccaggccttgactataaagtgtaggaacttgcttgagcctaccccgaatggaaacttaaaagggttgagattcatattgtattttctaagtattttgaagcattcgtccaagtcctctatatgcacccaactctttcggatttgatgagcatggcatccacatatacttccatatattctttaatttattcttgaacattcgattaaccaaccgctagtaggcaacattcttcaatatgaccgacatagctttgtagcagtacagaccaaaatctattcagaaacttctatactcttggtctgttggatgcattttgatttgattataccccgagtaggcatccatgaagcttaggatctcatagccagcggtagcatctaccaactagtcgatctttggaagtggaaaacaatcctttggacataccttattatggttggtgaaataatgcatacttgccatccttgattgggcattggcactaaaatgggattggacaccaagacatgatggaaagcttctacaatgaacttcttgcttgaagcttttccacttcctccttgagtgccagtgccctttctatattcaacagcctttgcttcttttgcacaggttagacattggggttaatattcaaggcatggaaaattactaatggatcaattccaaccatgcgttcatgtagctaggtaaaaacttcaaggtttgctcttagaaatttgatcagagcagattttatttcaggcaataaacatcggcctaatttaattttcttggtcgatagagtgggatcaatctctacttcttctaattcctccattggcccaatacttgtactagggtccccaatgtgaggatcaatttcctcgtcccaccttgggcagattcctattagtcagtaaattattcgacatttgatccttcaccgacatagtcttctttcttcacctttgtcaaggcaatgctatagcattggcacgctgtcctctagtcttctttttaaaggcatccaattccattcctagtcggaaactttaggcatagatggtaaattgatattaccacctttaagtcatatagagttggtcaacctatcatgacgtttaaggctaagtgtacatcaatgactaggaattgagccaaattgtactggtggtcggagcctttctactataagggggagtcagatgtgtcccaataaagtgatgctttatcctgagaagtcgatactagctgacgtagggggataggtctttagagaagaagcccccatctttttcatatttttgctttgaaaaagaatgttggaggaagcccccattatcggtcatggactaagccaccttcatgttagcaatgttcacttcaacgaccagtgggttgttatgagggtagataacatgggcaacgtcttcttcactaaatgatacaattgcttaattttctgtgcgactatttatgcttttcaatcctctacgaccaatacttcttcatcttttctactcatactggatggtctgagctttatctctctctggccttgctcgagtctctagcaatgtgcgaacctccaataatcacttctaaatgtatgtccatagtggaggcactaggtaattttgattattttcctgttggttttggtcaatttttatatacctacatatgtgcgggttatttttcctgatgaggaatttaattccctcctttaggttgttgcactaattggtatcgtggatgaaatcttggtgaaattgacagtatttggtggtatccctcttgctcgtatctttcttaatcagaggaagtctcttgcacggtataaccgactggcttgccatatatatggtctcttgagcgtcagtgagaatagtgaaaacagtgaacttcaaaggttttttgtgggagtttttgttgatcggcattatact

SEQ ID NO: 218391 - DNA, 4312 bp, Cannabis indica
  modified_base (3524)..(3524): a, c, t, g, unknown or other
aaataatttccaacacaaacttcctaaatcacttggtggtagtacacctaattacatgcccccaaaaatgtataagtgacttactctattcttttcttgtttatatttgtatgtaattttgtgctttttcatctagttttacgcttgcaagctactttgaaaatatccaaactattggtcaaaaatatcaattcggcttcgatacgtcttcaatccaccttcttggaagggaaattgcttgaagtctattgcattacgagtttagtttttacgtttttagtcttgggagcagagtcaccgcttggactcaaatacatcttcaaccctccttccagaaggagaaatcgcttgaagtctactacacgtccaacatggttctcgcaaagggcactactagtatatctttaacatgatcctagaaagggaatattggttgagaactattgcagtcgccttagcctagcagccacattgacaagtttcctataaggagtgagagaaaagaagcatgcctagaaacactttgcggtccagcagctctcttatcacaaacttggggaaaagtatgaatgctaagtcaactttgtcactttggatcaagggaagatagtctaaacactagtgcaaatcgagccttgtcttcctaaaaagaacctggcaaggactttgtggcatgcttggtcttccttccctcactaactcgaataacatgagttttctattgtatcctgcttaaggcaattaattgggttaagcatagatgggaggtaagcttcgcgactcctttagcgatccaggaacaaagtttacaatccctctacaaaaggttcatttttcaaaaacctataaaccgtcacgataagaaccttgacaaaagttgacacttaaagattgtgtggttttgcataatttgaaaggtttgataaaacaaatgcaagcttagaagaaccaaatagtatgaatttttgactgttggaacaaaaaaacttcacaaagtcctaaaggaaatccatgaaagtaacgcaagcaaacaagatagtgaacgtggatatagagtaagcatgcatgaataaaaaattgtctcaaaaagttaccacaaacagctccacaattagggcacagataagattgtttttgtaaaaccaaaattaaaacaaaaaaaagagaagagaacttattgagaagcatgtaggccaccttgggaagctctaggaagttttggatcgcaacctcaaagaagtcactgcctcagctgatcgctcaagctttgaatgtccaagtgatgttggatggttgatgggaagcttccctatggatcatatctatagtatccttgcaatggtcactgattatgcagatacctttcaaaacaatagtttatcagtaataattcacctccaaaaactcttttccttttcaagtccacaagctcccctcttaagagcatcattctcaaacaacaccttcctaattttacctttagcaaccatctcagtgttgaccacctcaacagcaatctgagatttgacttccccaagctcaaccaaaaggcccctattaacgacatgcaactattgatttttagcattagcttgctcaagctccgtgaatagggtgcctatagtggccctctctgccatcaaggcctcctaatgcaacaatgaaatgtatgaaaacaatgtataacagcaagaacaagaatgggagagtcaaagctgatgagggcaccaagacaaagatccaagtcaagttccaattagtttggtgatgagggtgtgagccaagagatttaaagagaaacttgacaacctagtccatagagtaataagaggtgaccgtggtcaacattgaaggagaacaaagatttgtactgctaatcagagtagactcaatttaggagctcgatcacatttttgataatatttattggattttggaatctttcctttttaatcacgtttttctttattagccattatttttatttggaaagtctttttatttgtgagtgttagggttttcattatgatgacaaaaaggtctttttcattgctgtaatttcggctatataaggccttcaaaatgctttggaaagacagaatttgatgaataaaatttgagaggttttcttcttgagttcttgaagagactattcaaacttatcaagggtattgcttgtgggattcaatctgacttatcaaatataattccatcaccatttgtagtgtcttccttatactaaggtttgttcttaactaagcattgggtcacagttcaacatcccaaagttgtgagttcctagtggttgccatatttggtgtcaggtttcaccaccttgtgatttggtttgtatcatttggtatcagagctttggaacatctgatttggcgtatccttctttgtgcttttctattaaatttgtgttctatattcatgttctctaattccttgtgaaatccgaaagtattagagccacaaattaaaattgttaattccctttgtttcaaattgtgtccttatttcaatagtttcccttaattgtgtgaaatccaaaaattaaattatagagccacaatttggtattgttgatttctttgtttcaaattgtttctttgtttaaatagtttccttatttgtttcacaaatcttgtttctatggtttccttatttgttttacaaatcttgtttcaatatttcaaaatcaattctatagtcataaatcttatttaatttgtttccttaatttgttgtgtaattcaagactgttatagtgccacaaattagttggtttgtcttctctaaaaaaagtccataaaactctctcaaaaaattttgctttattcttggttcccatggtctagaggcttgtttgccaaaatgccacaaaagtgttccaaaaatcatcatttttgtccatgtttatttactttgtttgattggatttgttgcttgaatttcctacatattactttctaattagtttaaatgagcttaaagaagaatatgagtggaaaaaggtagagatatgagcttatttaaggttaaaagccttcaaatttgagggaaagacgactagatttgagtgaccaattttctttgagtgaaacatgtgaggggtgtggtgatgtcatttctatattagttctaaccttatttttgaagattttcaatcatgtcacaaaatacaagcaatgaaactccaccacctacgggttcaaatctatagattcaaatgttaatgggggagatgaggaggttattgagaggggagtatcaacaaatacatacgagattggatagggtagaagagagcacacaacggaggcctaggaggaataagggcacgaaaaggaggaagagaatgaaagggatttgaaggggtaggtttgatgaagagtttgataggatgtagacgggtaccgattaagaggtatggtaaggatagagaagcgaggaaccgagttagataattctttaggaatatcaagatgaaaattccaatttttcaggggaagagtgatccngaagcatagcttgagtgggagaagaagattgacacaaaccacaccatcgattatggtgaaacccaacataaaatatggcagcaactaagaactcctgttttagaactctatggactaggttgtcaagctcctctttgaatctcttggctcatgccctagtctttggaccaactagaacttgacttggatatttactctttgtgtcctcatcattcccgccccccccccccttcgagaagaatttctcctccaattgtcacctgtatcaaaatggttcaaattagaaatattaaaagtagcactaacattatactcactaggtaaattgagatgatagacattttcattaatcctttcaagcactttaaactgaccatctgctcgaggaagcaatttgaaacccctttgggctgggaaccattctttcctcatgtgtaaccatacccaatcacctggctcaaaatcctgcttgtgattacccttgttggcttgcttaatgtattgttggtccttctctctatgttgagtcgtgtgctctcatggatttgctttacaaattttgcccccttttttccatctaaattcaaatgcttagaaacaagtaaagatgataaatacaaaggagtcaatggattaaaacaatcaatactttcaaatggggaaaatttagtggcagaatgcatggaacaattataagcaaactcaacatgtggtcaacaatctacccaagtcttaatatttttacttatgatagccctcaataaggtggataaagttctattaactac

SEQ ID NO: 218392 - DNA, 3074 bp, Cannabis indica
atagaattaaaactttggaaacgacaacgtttgatagattggtatagagcgattgaaatcaaatctgtaaataagttgatacataactcggctgtgaatagtaaaagactcaacaagaactttcggctgagcagaacagagcaagtacaaccctttgttctctctccggccggcgatcgggaaagaagaaaggcaattcaataatgggtgcagctttcgtggttggcgtctttggagttctaattcttgcacatgccacttattcaacgatccactgtaagctctgaatttcataaattcacatatacatctataagtatttggatccagtgagtattaaaaaagcaaaattagggtttctttttgctatgtaatacttcctttacatttactgacaattgggttgcttttgattactttttaaattggttgtagatcgagagttgttgaagatcatggaggaagaattttcaggacctccaattaatgtaagtttatttatttagaattgcggcggggagggagtggggagaaggggtttgatttaataattttaataaaaatatatgatattcatatatacaaatctgagaattttggggatgcaggtcttgtttgaattgcttctagggtttgtcttgtgtttatgggcagcgcttgctgtgcctgggaagttcctctcaatactccctcactctgaagaaaataggtaaaacatctttgtctcttaaattcttatagattagcgttatgtccacacgaatgaaatttagttggaatgaaatgaaatgaattattgaccactttcataagaatcaagaatgtcaaaaaatttgttttagacactagtttagttgcaatattagaggattgactgtaaagtagctgaacgggatatgtatctccataattgtatttcttctataaattaaggctatgctctgcaaatctgtgacaaattgaagttaaatgagacacgctaaggtaatttatacccagtactggactttggaataatctgaaagtagattgatgacttaaagtgtatgtgttatgtatttaattgtttatttattttttgtgtttttgttttgaatcatcattctatataagtttaaaatataatgtttaatagtgaagttctccgaaagaaaaaaaaaagaattagggaattttcctacataccatgactctataatgcttgaattggaaattcaactcattctagtgaattctaacatcgttgaccttcccataaccattatttttctgaaggctctaagccagcattatgttgcacttaatttcatgttccatgttgcttcagaaagattaacttaatgttccatgttattgaaaaattataataaaatgaactgtaaaaaacaagttagtttatatgctagggttcaattgctcaagtctgcttgttactttcctttgacttaagcattaataattaagcccgcagattgtgatatatttattgcattgtctttcgagtattttagattgataatgatgcaagtcaatttcataccttctgcaaaggttgttgttttagaattcttctttaattgtatatgcgtttatctctttccaaagactcaactaaagtaaatcatcttgtttagatttgaataagctgaatgatctggccatactgcatattccaaaattgagttttcggagcagaacttttataaaataatagctgctttgaaaacaattagtcaccgtctccatcttgtataggagctaagttcaattctgttaaacagtagcaattatgccatatcttctacttctttatttctttctttccttcattttttatttgtcaacagctcaagtatgtaaataacctgatttgtggattctgtaatgcaggatagtttctctaccagaaaatctcgactttatgatcttcaaccaccgtggcaaagtgtttcctacagtaacagatttgaagctgaagcactgagtttgttcaaagaataccttcttggaggtggaagcacgacacagataaattaggtttattcagcaagtcattaatgttgtcttctgtcatattgttgagtaatttttgggttaactcaatgtgttttcaactttatctcatgttttttttctttcttgtaatgcaacttagattttgttggggaactggtaaaactacgaataggatacaatgatattatcaattttttagctataccataatcttgtttgtaatttgaaccaaccaaacactatgaaagtagaaaacactttatgtcttaccatattactttgttaaatcaattacattcaactagtacaacaagttatcccattgtgaaagaagattgaatgttggtaccttgtggaccaatgtacacactccatcaacattaaataataatctcccaatcttttacactgccacaagcttaacaagaacacaattttctctttttatttgtctgcaaaggacacctggcaattttcgtatagcatattttccaatgggagccataaccatattttacataggaacatgctagaaatagcgagcaagtgaaattattaggagtgtgggactattaagtgagcaactacaagccccacatatttacttggggaatctgagctttaatggcgagtgtaaatgtttcttgattaggagagcatggtttcccatttctgtttcactggagactaccaacaggaggagcattcacgcccctatagccattacggaacaaccgtgctcaatcttttttctttctagtagccaatttaatttatttgaattttgagtgtttataaaatatctaatccaatttgcatgatttaattcaatctgcaaagtacggttatctgcaattatgcacattgatgttgattgacatataaaaaataacatatctaatctaatactcatatatttatatataatttaaaaaattatttatacaattaatattttaaatactaattttaaaatgtaatacatatatacaaatatatttttttttttgccatatatacaaatatattttaaatctttagatcaaatatatcatatc

SEQ ID NO: 218393 - DNA, 13729 bp, Cannabis indica
taacagttctacaaatataatttaggtactattactttaaaaataggaaattagcgatataagtactttaaattttcaaagtttttaagttgcataaaatctaatttttcaaaaaaaatagaaaaaaaagtcgcataaaatctaaatgttttattttttagcggcataagtaccaaatatttgtaaaatttataattttttttctaatttcgttaacgcataccctgttattgtcttaaacaaagcatatataaagctcaaattctagatcattggatctagacaaatatatagtattagttactttcaaatgttcttctaataaattcaaaacggattttgtactaatgaaattgaaagaaaattatagttttataaacattgaatacttatactactaaaaataaatatttgatttatgccacttacaaacataaaacttttaagtaatcataagtatcctctattagtaataattaaacttaagtatgccacaaatttgaaaagaaaagaaaagaaaaagttcaattatttatttttattatagaaaaaacaaagggacccacttgcttctccttcctttttataaccaccaaccaattctaattatacaacaatatctttttaagaagagaaaagaaaactcaacccaaaacagaacagaaaagaaagaaactagagaatgaagtgaacaccattatttatatttagcattagagaaaaaagaaagagagaaagaaatgggtgctgttgctgagtctatttggatgcatttacagttgcagcagcaccagcaacaacagcccatatataagaagaaacacacaacaaaaagtttgtgtttcagcccaaaaagtcttattattaataataataataataatggtgggaaaaaagtgttctttcctactaatacttctcttgtgtccttcaacaacaacacttctattagtgttgttgccaagttgagttcttccgccgctgcagaagcagcggcggtgccacctttggaattgggtgttggggagataaagaacaagtgcaagaagtggatgtggaagggtcagttttcgattaattacttggttgaaggagaagaaaatcaagaatcgaaattggaatcgaaatccaatcctcctttgcttcttgttcatggctttggtgcttcaattcctcattggcgcaggtatgttaatttctcatttagcttaaggctatgaataaacattgttacaaacaaacatattctcaaaaaagaaaaaaattgtgttcttaagataaacatattatatcgtattgtattgtacagtattatatgttatactataaaatttaactaccatctaatacagtgatataatgtaccaaatgaacccttagtctttccaaattgaaatgactccaactaagaggatgcacacaagaatcttcacaatatttttgccttatttctaataagtatagaagcttttagtgcttataatcttgaagaagaaacacttttctgaagcacccaattcatcaaactatttgaatgtgataacaaaaatttaaattacatttattttatgctcctaactgaaattaataatatattataacttgattttgagcatgagaagtagtgttggtgactgattttgtttcattctttggactcgtaaaaactttcccagagtgattgatactatcatattttcccttttgaaatgtgacaggaatattagaacattagcccagaatcatactgtttatgcaattgaccttcttgggtttggtgcttctgataagccagaaggttttccatacacaatggaaacatgggctcaggtatgtatgtttttccaatgcaaagattcatagaaataggggcttctcttttaagtttttttttttctttcgggaatatactcgtttagtaccttgcattttattagtatcatgtatttttaatgatgctcaaatggtacatgtttagtactttgaactcaaatttaatcgataaagttttatcaattttatcaaactgctttcacttatatataaaatatagagtagtttggagtaaaaatacttaagtttaattttcggttgtaaataaatacctaagtcataattctgaaatttctgtaggtacctaattgttaagtgctaagtaaattgtacgtgtcaattcctgattggttcaagtcattaaatttttatttttttaaaaaaaaatagttaaaatataccaataagaaaatgagacgtggataatgacgacatttaacggtcagacacctacagagttccaaaattataactttagtaatattaccgccaaaaattaaacttaaatacttatttacaaacaataattaaatttaaatatttactgtaaattactctaaaatatactaaaaatgtataatttcaaaatacaatagcaaatgagtacacactctttctttttattaaattcataattgacttagtattttttgtaaatagttaatattagacttcttggatgaaattgtaaagaagccaactgttctagttggaaactctgttggaagccttgcttgtttaattgctgcctcaggtaggtaatgcttaatccaacctacaacttttttgatccaataatcataaccatttcattttttttttcataactgatgttttttgttccaactagaatctaatcaatcattggttagaggacttgtgttgctaaattgtgctggtggcatgaacaacaaggcagttgttgatgattggagaatcaaactattattacctttgctttggttagttgattttttgttgaagcaaagagcaattgcttcttatattttcgagcgtgttaggcagaggtattctatttcatcagtagtattgagaaaatgtcttgtggatatctaaaggtgctgacatgaatgaatctgattataacaaaaaattccaatgcagagaaaacatcagaaatattttgctatctgtatatggaaataagaaatctgtggatgatgatctagtagaggtactatttgattcttctgcatagccatgctcctcttatttattcatattttttggggaataattatggtataagtgcttaaagttttgagtttataaccggcacaagcttaatcattttttttagtgacattagtatctgaatttttatcagtatagactccgttagtgttttaaatagaacacatattaagtttagattctaaattattggctctggacggaaacatgtagtatcaattatttctaaaaactagatctgattataaatttaagacactaacagaatctgtaataatgaagctagatgaaaattacagttttattaacattggatacaaactcaaaactttgagtatttacgctgttatttacccttttctttttttgtgttcctaaacaattttctttttatcttaaaatgtagatcatcattgaaccgacattcgaccaaggagcattggatgcttttgtttcgattgtgacaggtccaccagggccaaaccctgtgaaattgatgccgaaaatctccatacctgttctgcttttatggggcaatcaagatccatttactcctcttgatggaccagtggggaagtacttcagtgccttacctgctaaggtaccaagcataagcctctttgttttggaaggtgtagggcattgcccccacgacgacgagcctgaattagtccacgaaaagcttcttccatggttggctcagcttcctgctttatcatcatgacagaaaaatctatgcaattatgatcaattgcctccccaccacacttggtgagattatgtagagaaacactctctttctatactgatatgtatatttttcggttaaactactttaaagtttaacagaaataaagaaaaatccaaaatttcttattctgaattgtgtttggaatgaaagggagactatgctgttatgcacaagttttgtagagcttatagcattcacttattcaattatatgacttgttaagataatgattgtgtaaagactaactaagcaaggctatttaaagataataattgaagaaaactcttggcaatttgcaatgttggagcttattgtgagagagagagacttgttatttatagaagagcaatgagtttaagatttatagaagagttgttagaacagaacaaaaacagaatacaactacttttgaaaaaccaaagctaaaactacactactctattatcactggtcaagcaaaaagggatagaagtcactttgagtttgagcttgtactatgtacaaatatgtcaatgactccatagggagaacttcgataaatagagctccttaactataatctgatctccgacaaaatgtaaatttatctcaatatattttgagcaagcatgaaatacaagattggtaatagacaagcttgataatcaacatgtagtgacatgaagatctttgagtaaagaacttagccacttgacttcaactaatgatgcattagcaagtagggttgtatatttagacccgaaaattcagcccactcgctcaattcggcccactcgtacccgaaaaataaaaaaattggattttaaaaattttgggctaagtttaggtaaaacccgaatacactttgggacgggtgcgagtttgttagaaaaaaagaaaaattaccccatgtacgataagttatactttttttattattattttacgtttgagttactacgtggattgttagttgagttgtaacttgagttgcgatctggataacaatttaattaggttacgatttgaattgctgcatgagttgcgattagagcatttactgtaaaataccgtatatttgtaatttataccagttttaagtggatgcctttttagcatttctggtatttattttatgaaaagagttgagtgagaaagttaactaatctaaccaacactaactaccatatttaaactccaacaatccaatacaaatttgacaacacacacgtgtcatattcttataatgacacgtcacacccatcccacaccaattgcatgcatccataggtgtgtttaacactatactatatctcactcactcactcacaccactcacaaaaggcaaaagacataaaaaagcaaccacttcttcacatagactcatataaacttggcacttattcagtggcattttcgtaatattaaaccaattctaaggtcattttttattcctctattgcccccaaactccttttcaccctatcctcacctatctctctccccttccaaatctctctcgttcagattcaatccctaaaattaagaattatcaatttttctacaatttcttttctcagtaattaaaaaaaaaatccaattttgattctgggaatttctcgattaatttttcttttcccttcttgggaataaaaattcgattttgcagtttaagggatttgggggtttgaatgtgatttggtaaaaaaaaaacaatgtcggaatcaaatcaagaggcgtcaatgtatggaagaggagccatggcgaataataacatgcatagtggtggtggtggtcatggggatgaagaagatgacgaggtgaccggtgctgaagagtccattgataaccctcagctccggtatgaagatggtggatgtgttggagccatgaacggcgttcaagatgttccttcaaatgttctctacgtgcccaactctgaatatcctcccgttgccgaaaatggaggctctgatcagcttactctatcgtttcagggcgaggtttacgttttcgatgctgtttcgcctgataaggtaaagattgcttcttctcctttggggttttttataatgtttttgaagtatttttctttaattcacgtaagaaagtttagattttggatatgggttcttatcaatttggcctgttctgtgttcttatttatttattttcatttttaacttcatctttttatggtgtttagtcaattaatgacttgaaaattctctccctaaattgggtttatattagctttttgaggaactcgtggataatgtgtttgtgggaaagaactattgatttagtatcttctatttttaaaatgcattatcaacaagtatatgtagtttgagggcttttaccttgtgttgattattatataagaaactttacactttcaatgtgttgattttcacaggtgcaggcagtattgttacttctgggtggatatgaaatcccttctggtattcctgccatgggtacagcccctcttaatcaacgggtatgtgtgcacatgtcttaaccatttccttctatgtttcattgttttgtacattgaggaaaggaaaaaaaaataaagagagaaaattggtcttcagagtctcttgtttttatggttaattttggagagaaatgcaaaggagagtgtagagatagtaagtatcaagtatgcaaatatttcttttgtgctcagtgtttgtctcataaagtgagaaatttgaagaaatatgaagttttctttgttagttcttatttcaagttcgtgatgttattagtttgtacatacttcttttgagaaggtgcatagttgatctaactgttggcattataatcattcgtctacaggctgtgaatcaatttgtttcaaagccggttcaaccacatagagctgcttctttaaatcggttccgggagaagaggaaagaacgttgttttgataaaaaaatccgttacactgtccgcaaggaagttgctatgaggtaattttttttcacatcccgttttgcttttcaatccaataagtaatggctcaaaaacacatcaggtcctttatatgaaattaaatttagttttgaaagggctgtgctgtattgatacgaaaggatttctcttcttcgtatttaaatgattgtgctgagataagacatagttttgggataaatttataattattattgtaagattttaggttgtattacaatgattgtgctgagataagtcataatttggaataaaatattaatcttattattaaaagattttagattgtattgtcgtaattacaatggcggtgtattcattgttaaatgcttagtatttactgtttagataactactacatccaaataggaatttgagttttaagattgcagcctctacacatttgtggagtgtcattccaggatcgtgcttgtcattcaacttgcgcgggtcaaaatctgtacatacagttttctccatgtttttctaatgccatattctgaactgataataaacgaaatgaagtaaagccaacttgttatatttattccattactatgctcatgtaatttgtgatttttaaatttcaagaatgtgctggcggcagcattctttatttggaaagattcaatacggtatagggacgttcaaatgcttattatattaaggaacagagtaacaaagatggaacttttagtctttaatgttgtctacttatgcttacaaactagttttagtttttagtatggaggctctaataaaatgtcttggataaatggaattcttattccaccaaaatgagtttgattgagctttaattataatcttatgtggctctttcaggatgcagcgtaagaagggtcagtttacatcatctaaggctagttccgatgaggcgggctcagctgtaattgtttggaatggcgcacagggctctggccaagatgagagcatgcaggaaacttcgtgagtctcaattagtttcttcatgttcatgtgaattctgctgaccatcaaatccatttatttttttcattcctcctgtacctgccccagggtgaaatagcccgggtttgaatagaaattgttctaaattttggatattaatctcaatcaccatttttaatgtaatctttaactcttttagttattgatctgtaacacaagcttaagaccttgcattgtaattttttcgtttaacgcactgtgcaggtgtacaaactgcggaactagttcgaagtccacaccaatgatgcgtcgtgggcctgctggtgcaaggactttgtgtaacgcatgtgggcttaagtgggctaataaggtttgtatagtcttgaaatgtgttttcctggttttaggtccttaataataagacatgaagattaaaataaacttgcatgaaaattgtattgattgtgttttgttaccaaagagtttattatcatgttaaactgtatttttcattattattttaaattatgtgagtgtgagatgttgattaatgtacaagtacgtttttaaaccttttattgatgttgtaatatcacgataggttagttcatatggttacgcctataggcttgctcccatgaggtctgagaatcgagtctgtctctagctggttttttggtgtgctacttatcatactatgtatgtcatgtttgtttatcatctatgaccaaattgcttagtaaggctaacttgcttttttggcagggagtcttaagagatcttaaggttccgaacggtggtgtccaggctgcttcaatgaaggaaaccgggcaggtacacctcccatttaatgtaaattctctagatgcttttgaaaatgattttcttcttgttgagccattttaaaataagtgcatttcttaagttcttttgtggatatgttaattacagagcgatggtgatgctaatgattccgaagctgtaaacacaacaaccaacatcgtctcttccaacgggcaccacgaccatatgactactgaaacaggatgactgggttaactggatctaatacattttctgcctcagcaaggatgtgaaatagattcaaaatatgtaacaacttcacattcactttgagcgtaaatagagtttcaatgtactaaactaaaaaattgatgatgatgatgaataagttaactaatttgggactcttttttaacattagcatttgtatattactcccataaaagagactctttgctaaatgaggatgcttttccacactatgtaaggttttgaattttgatcaagtatgtggctaagtggtagttatcttgtatattcttgtgattatgaatcctttgggttttaaattcttcatgacataaaaaccgatatgcatggttcaatataatataagataatgtatatacgtaatataacagtatatgataaaaaaaaaactagtgaaagctatatgccggccgctattcacaggtgggcgaagctcccaacaagacggctaaagctggtttcagtgttggttttaagggatggcttggttttggccacggccatttcgccttggccaaagctatggctatcttgtcaggtattgggttgtgtgttcgcctcggctattctcatgtgtaggtggtgttgaacttcaacactcactcttatttagagtgtattattagagatacttagtttattgtaactattttaatgacacttatttcttttattatgcataggggcttggatacccaaattatgttagtgcattttcataagtctgcttttattgattaatgatattgttttggcactctttttttcttttgaaatttcttccattgagtttactcttgaaattttttttgaaaccagtttttctaaaaaataattaaataatgtaacatcaaagttcaaagaatttgtacatgcacatattagttaaaaagaaacatatgaatttgttaggatatcacattcacatcaacggtttttgactattttttcatcaaagcaccctcaaagccatgcaaaccacaaagtgagatttcttaatatttagtaaagaatttactcttactacaaaaaagtttactaatgaatccagagatggataactgaaaaactatactatataaaagtaatgggctccattaattgtgatacttataaataaataaatatacgagttagggtggaatcaagaatacaatttacataattcctcaatgagaaatataacaagtaaataaagagaaaaattcaaacttgctcgattcgtttatagcccaaaggccactctttgtacacagtcggggcgtcttttggtgggcatacgaatcagccctgtgatctgcatttctgttactgctttgcaaaatcgtgctctttaaaacaaagttaaggaaattcaaaaccaacctatgatgcaattgcaaagcaaagaccaaaacacacctttaacttagtatgcttaaatctaactaattatcaacattgcttaagcttaactacactctttctcactctcatgtcttaacacttggcttcacctatggactctaatcaaatatcttcacctagtatgttctatacatataccttaaattaccaaatcatttagtcaaaaagatgatatagagagttttcttgtatgctaagcatttaagatggcttctcttctcacaccatgcaaaataatgactcgaaaattccctaaagcaaagatgtgcaaaatcaaataagaaaaacaaagcaggatactgtattgacgattcactcttgttttcgttttcatttgtttcttttcttttctttcgaagtggtgactgctgcttccctttgtgtttcactttgatactagggttagtcacgactgatttgaaacattggtaccaatcatgaagactgataagatcgccatgttcctgagctagtgtgtacctagaataatggatgaacgtttaagccaacaatccacaatgcatacttgcaactatagtagaattaattgttttaaagtccaagtgcaaagttgaaagaacatttcaccgtccaaaaataatggcgaataatgcgttggacacatacttacatgattgaggtatcaggcatggatggtattggaacattgccagtcctgttgcagcacttacactgcagaaatttgtggaattctaaaagatcaacttgaatccttcttcttgggtctccattcaaagcctaaaatagtaaaagaacaagaaatattacgagccaaaaaaacgcattgccatactatgttcgtaaaaggcacattcagctgtgggatcttttaatgaagtttgtagtgctttgattttttctacccatctctaaaaatagaatttatccaagacttctaaataatacttcaaaatatcctcaataaacatagatgcctagattatccatcaatcatatcaggaaaacaaaccccttaaaatttaaggacagtcccaagtatattttgtttcaaaatttaccaacactcaagcatagtttcgcaccactttcctcagcagatagcaattggtgaaataaacacatatatgattgacaaactaatatgagaaaaccctcaccatccacttggatgtcaatatccaacaatctaattctaaataaccagaaagttgactaaaaagtatagcagtcagtgcaagaagtgcctagaatgcttaccaattgaagtttttcaacatctttaaagcaaacaacttcatgaaaaggaatgcactcgatgggtttcataaacttgctgtcacacaacaataccagtgataaataaataaccaatatcatctaagaataataataaataactacaatataattatttagaaaacatttaacacgaatctgcacctgcaccttccaacactctggttttatatgtgatatcattaaaataaactaattatttacctaatcatgctagttattaggttagcagctttttcatttcccgtctttgactccttaatataggcagcagtccgagatgtgtgtctcctgtcaaattaacacaaagggtgcataaatacgtacaaatgaacgaaaaaccaaatgcaaactagccttttctaaaaggtatttttgcggaaaaaaaaaagaagcttgtgttatcccggcgacactctacacttgcatgagtagatgtttgtgtgtcaagaaaattaatagttaagttgttcggaagactatttttccaagaaatttttaaatgtgtatgctgcacatgagaagaaaacactttaagaaataagtttctcaaactttaggatcatctatgttctaaactttcaattagtcattggaagtttttattgaggccctcaattatgaaatcttctagaaaattgaattaagaatatgaactcttccaaatgaggacttcaaattatgaattaaacttcaaaaataaaggcaccctacagccaaattcaataaggtaacagtaaaatgtagcatgtcacccattaacatcctatattcaaggaaatcctatgattgttcccacctcaagcaaaaaatggttttcagctccactagattgtatccctagtaagcctacgatagatacagttctttattgtaatgctcgattgaaaatttttatactaaagtatctgacgtgtaaagtaaaaatttaaaaagaggatgtttattttttattttggcctagatatgatagagaataggcatcactctcagcacctacttctaacatttcattcttcttagcatatgattaagacaatgaaagaataaatttaaagaaaacatgagagattattctgatacaaaggaagaaacaagatgaaatattgtattacttggaaaggtctgtaaaatcctgtttcaaactcattccgtcttcaattttaatcatggggtgcagctccttcactttgtcatggatctatgttgagcaagtgagacataacaattaattaatttgggagataaaaattctacttataaatttcttgaaatataaaattggcacagcaatattccttctttacagaagaacctgcagtatcggcataacatcataacaacagccacacagtagtagcaagcatgatatatgtataaatccatacatgcaacatgtgcacttgataatatctgaaccatcatttggtatactgaatctttttataaccttcttggattagttttcatacctcaagaatatccacagtgagattttcccaactcttaagcaactgagatagtgatgctgctggaagatccctgataatttgcatgaagaatcaaggtataatttaaatagaattttatccaatataaacattgcttactgatttttcttttttttttttctgaatacaaaaacatggatcaaagtgaagacatgttcaagagatattgcattcttacaagctacctacctcactttttgaatcacctgagaaataggaccaccctttcgccaatattgttgagccacagattgattgcttgaagaggttatgtcaaaacctttccctgacctagtttgagtaccagaggcgatggcattgtaaatatttggatcaagtgcctcacataataagtctaggagatggactttgttgtactttccagcttcataaaggcactaaagcataaggaatagaatgaaggaaaatcagaataaacaaaataaactaccacaaagagtccaggttcaccaagagatcatcaatctagaatacacataaaactttatactataaagatattgtagtgttccgggtgtaattcctagtttgtagggatcatattattttatgctctctattctaaacgaaagattttggagagtaatgtctacaatcttttaatttcttatattttaatatgctaccaagcagcaaaactttgaatgatatccactcaaattcagtgcattatcatgcttactattttctaaaaacgaaacaaacattaattcacacttctgttagtatg

SEQ ID NO: 218394 - DNA, 4801 bp, Cannabis indica
tgggaactgaactaggggtggaggagattcctcgtaatgtcttggacctacattttccaaaaaggtgtgcctgaaaccttgcctgttggacatgcatcttttgtacttagacatctttctgtagtagaggttgttgtgacagttgcttagtactctaagaaatatccgatcctacctagtactaggcagacatactgccaggcacctccaaccaatcctcatattgtcaaactcatggcaagaggaaaaacccaccatgctgagtaggctgaacgacctgaggtgagccaggctaaagagcttatggctggtccagaagaggatctagaagtcgaataggctaagcctgaaataaggctcagggctgcccagacgcatcctagggactgtaatgtgatctagggtaactaattgggttcgtaaggtcaggctagacaacctctaaatagcacgggtcaaccttttgaggttggagtttaccacattgaggatgaggacgtcgtgccttggattctaaaacatcaggatggagagagatatgggtatccccttcatccacggtatctactgccacacttttcagcattatcgaaagtggacttgttggtgaagtcccctgtattaggcgaacactaagccaccttgctaattgtccttagccaagctagataacaaggtttggtccccatttgcacccatactttaacaatataacaaacttcttcaggctatatccaacccaaattacactgaagggtataaaatacctttcaacactcttcttcttgtacgccgaatcaggttggctacagccttcaccttttgaagtaagctattacgtggaactaaaatctagtccacaccagaatagtacttgatacttttatttttgccatcaagactactaggggttgggtggcaccaatgacgcagccatatcaaaaatcaagggtcatgttaagggttatttcgtggcttatgagataaaaggtgctaaccaattcttccaaagagtccccacttatagctggccaatccccacaatgaagataagggatagggccaaccaaattctgtctttttttgttgagcggtgcaacatttataggttggcttatgaagagaactttagaaagtacggtatgtacctttcctgcaaggatgttaaggctttaggcaatcctcctaaggatccaagcgatgctcttgatgaggagaaggacaagaaagagaggcatgcgactgaaaaggagaaaagtaagttcgatgatgaggttcctctggctgagatttcccgtagagagacgaggagggatcgagcccttcggagttaacttgaacagggtggtatagttggcgatgcctaattttttattaggcctaagggataagagtcagtgagacctgcctagcttgtgccagcaaacaaaggcaaaggtaaggttattgtaaccaaggaaaactctaatgagtcttcttcttaagatgaaaaggcctttagatggttctccttgcgtagattctcttgaggaaactggtggtagtaattctcttacctttacttgctctttgtgtttataaattgtatactgaccttgtcgcttttcctttgtagacatggcctctaggatgcaagaccttttgaagaggaaatctggcagcccctcagttggcaagtcataccccaaggttgtcaaaaccagggctgcctcagatgtgactcaggccactttacgtccaccaccttcaggtccacctcaagtcaaccagccattgattcgagatccttcatctgaggcaacaccttctcctcctccctaggcactgggaaggagaagccaaaaggcatagccgggtagcctcttctagcaaggccgacaaggccaaagatgttgcccaaaaatacatgggaaagtgtgttttaggtgttgatgagcagctccaggagctagatgttgactccttggacaatatgacggccaacaacatgaaagatgaggcatatgtaagttcttttaatactttcctagttctttacttcatccactatgaaaccttattaatttttttcttcactattttaggctttctcgaagcttgtcaataccatgcaagggctaaggactctaaagtagcctttaggagcaagattgaggaaaaagacactgagcttgccaagaaagatacccaaattagagagtagggcatcaagcttaagacacaaggtaatgtactttttattttgttcttgtatagccctaaggtcttttagatttgagctagtgaacgacaaggcactcttcaatcctggcttatcttcttttggctatgaacacatagcttactgggcaacttttaatcccagacctgtacattttatgttcatcttgaatcttgctatttccacttacttagccttccatttcttgcttaaaaatctttaaaaaaaattcttaagtatttttgtgcttgtttgatgttttgcgttgtgggtgctccccaagtgatcgagaaaacttatggtctcttggtcacttacaattaactaagtactatagacctttgcctgggtattttcacacgcatgttgatctataaagaaagttaacattataaagttaacttgttagcaagttatttaaaacaatttgaaaaggaaaacttattttattcattcattggtcttacaaatgtgttgtttctgtgcaacgtgcatatatttggtaataaaatcttacatatctaaattctgcttttagaacataaattttgctacccctgcatgacatgccgtgcaaaggccaccactaaagagtgatggtaatatagctcttaagagtaattgcatcttctcattgtattggctgagtttgtaattacctgtacttgtaatttttgtcacttggtacggtccttcacaattaggtgcaaacactcctactacaggatctttggtatagaggaatactcttcgaagcactaagtctcctacaaagaacttcctttccctgacttatttattgaagtaaggggcaaccatttgttggtacgcatggaactttaagttagcctggtttcttctttcttctatttaatcaagggatttttccagcaaggtgtggtttatttcttagtcataggatatcctcctatggtatggtggttctaattcgattagtagcatcgcttcatagccatatactaacgtaaatggtgtctacccagtggttgtcttctcggtggtcttgtgtgaacaaagtcctctgggaataggttgggccaattgccctttgcctcttctaaatgctttttcattgtatctttgagggtcttgtttacagcttcaacttgctgattttcttgatgatgtgcaattgtggagaagctttgaataatttcatgcctattatagaagtcagtgaacataccactatcaaactgtttcccattgtctgatatgattttatgagggagtctgaatcgacatatgatgttattgaccacaaagttgaggactttctttgaagttatggttgccaatgtttcagcttctctccacttagtaatatagttaattgcaactacaacatattatactcctccttttcttgtaagaagttgctcgattaagtctatcccccatataacaaagagccatggatattgcatttgtgtgagctcgtttggtggagctctcgagatctttagagcctttcgcaattgtcacctttcttgacatagtccattgaatcctcaatcttagtgtggcaaaaatacccttgcgtgagtatctattttgaaaggctttgccaacgtgattgcgacaaaaaccttcatgcactacaaccaacagtcgttcatctttttctttggtaacacatcttggcaatggcattgagaatccacttttgtacataaccctgtctaagatgagatattgggtagctttcatcctcatgtctatttcttctaaattggtgatgcttgggtattcacctaggacatgattaacgaccagctgagagtcactatatatgtctaattagtcaactcgcacctcatgtgctagttttagtccagcaattagagtttcgtattcagcctcattattagaggcttcaaaaccaaactttactgctccatgtagctgttgcccctatgtgtaatgagcaatgcctgcaatggacaagtagtccatacagcttccatcaacacgcagcttccaggttaaattttcttgctcttactctcgcttcttctcttgctctcggtttttctcttactcttgcttattctttgtctcttggttttctcctaaatctttagagatttcagaagatatgcatgtacatttttgccatgaagatatgcatatcagttttaaacttcctaaaaaaattaattttgaataaatatttaagttaaatgtgatatttttttatgttaataattatgtgtttgttatttttttaatgttatgtatattttatttttgttctttgtatgtagatagacaatcattatttattttcttgttcattttttaatgaaatatataggtatgcatttatatttattggcaacgttaatataatattttctatatttgtgatgcatatgtaactattcaatgtttatagtagattttaaaaattttgaataagttaaaatatagtcgctatgcttccgaatctttggtagaattatgagtagaaatggaaaattaaatttggatttaggtaattaatgtaagtcataagttagtaaattaaaaaatattttttaaaaaatagattaaatt

SEQ ID NO: 218395 - DNA, 5009 bp, Cannabis indica
gcgcttccaattgattttttttccattgtctgatctttggcaagggcacacattgcacttcctggtttctaatcttctgtagtctttgcatttttctatacttgtttaatgtcaatgctatggctacaatttacactatgtttggtagagaagataagggagaggagaggaaagaagtttatgagtgaaaagtgggaagaaatagaattataagctgtgcagtaggaataggaaataaaagcaaaaagaattgtatattaataatttaagggtaatattattattttagaagaaaccaaatttatttcagtcttacataccaaacaatttagatagatggaatctatccctcactccaactttatgtatcttatatattttccttgtctcttgttttctttcttgtctaccaaacatagccccattgcttttctaaatcttgtgtcaaatagtttttttttttttatgaaagttaaacagattttttttggaagtaaatagattttttttttgaaagtaaatagatttttttcttatggtttaaaggtctatgagatttactgtttattattttttgttttttcagacctctacaagcgagctttatgagagggtgtgtaaacttcgtggagtagaaaaagaaaaggttaattttgttgtggatgttgttattattgtatggttttaaatttttaactttcaactaatttttttcttcttttaattttggtatttctgtaaaatatcaggtacttatttgggactatttcaataaacggaagcattcaaagatgaacagttccaaccaaactttggaggaggcaaacttgcagatggatcaagaagtgagtaatttgttgaagattattaaaatcattggttcaaaagagaacatttctttgagtattaatgtactcagtgctgtaaatctgacaatcgctgtattatacacgttaatttagttacccaacaaaaaaaaaaagaaatctttatgtagttttaaatatgattgaagacatcctcttgatgaattatttatatgcacagattcttcttgaggtgccagatgtacacaatggttctttgttgggcaaggattctacaggaaacgagttggctttggtatctatagaaccatcaaggtcttcagtgacaattgctggggggcctacaatgtcaaatggtcattcatctggatatagttctaatttatatcagggaaatgctgtaagttcgtcattctcggatattgatgatggatatgatgtttacaagtcaacaaaaggagaaaggggaggtttggcaggattgcagaatctgggaaatacttgctttatgaacagtgccttgcaatgtttagttcacacacctcctctcgttgagtatttcttgcaagattacaaagatgagattaatactgaaaatccattgggaatgcatgtaggtttcagttctttttatctttgttccagttttttgatgtggttaacttcaatattaagtagctttgatgctgttacagtttctaaagtaaattgtagctgtgcagggtgagcttgcaatcgcctttggtgagcttttgaggaagttatggtcctcagggagaactacaattgcaccacgtgttttcaagggaaaattagctcgatttgctccccagttcagtggctataaccagcatgattctcaagtaagtattgtatattaatttataataattttatttaatatatttgtttgtcttgatgtttatatatatcacgtttgtataccttcaatgccaaagattaatactatatataaatataaatgtatgattttactatttttcatgatcactatattgcttcgtcataaaattttctcttcgtaggaactccttgcattcctgttggacggacttcacgaagatttaaatcgggttaaacgaaagccatacatagaagcaaaggattcagatggtcgtccagatgaggaagttgccgttgagtgttggaaaaatcacagggcacggaatgactcgttgattgtggatgtttgccaggttagtggaaattgaagacttctttattggaagctatatttcatctttccttgaaccattaattttcctgttctggtacaaaagtattttcttctcttaacatctttatttgttgatggtcagggccaatataagtcgacactggtttgcccagcatgtgggaagatttcaatcacttttgatcccttcatgtatttgtcattgcctctaccttcgaatgtaactcggcatataacagtgactgtgttttacggtgatggaagtggtcttccaatgccttacactgtgagtttgcttaagcaaggtgtctgtaaggatcttagcgaacaattaagtaatgcttgttgcttgggtgctgatgagattcttctgcttgccgaggtaaatttggtttccaatgatatatgctacaatttatatatttatagtcttatttgtagttccagtggttgagtgtctgtaatttcaatatccaggtttatgatcacaagattttccgatatttggaaaacccctcggagccattggggtcaattaaggaggaagaccatattgttgcttatagactttctaaaaatgttgttggaagatccagagttgaaataattcaccgaccgcatgaaaagtaagattacatcactaatctcttggaattgctaagctaaatagcactggtaaacctgtgaaggtttagccggtcctgttttctaaaaaattgcttaaaataagtgacttgttcattaggaggttgaagttggtaaaaacctatcttttttgataaatcgctcaaaataagtgagacttgttcattaagaagctgatgtcggtaatacttggctatagtatctgcttttgagagatattttttaattttttgtatcgagacattttgtgttgaatcatctatgcagactgcttgttacatttctgctggattttctggtttaaatagtggggttttaatttttcaggtctccatcagacagtgtgaagggttgtttgggaaagcttatcggcaccccttttgttacttatttgaaagagccaatacgtggagccgatgtggaagctgctgttactagattgttgtcacctttgaagagagcgtgcccatcgggtaagctccaaaatggcaaggaaaatggatttgataaagagcatattgaagaaccatcaaacagctatgattctaagaatctgtcaacagactatgcagaagtcgagacaaaatccagtgaagcattgtcctttgaactttttattaccgatgggaacagttcgagctgcatgcctattgagaaggacactttattaaattcaagtagagtcgtaagggtatatttagactggactgaaaaagaacataacttgtatgatatcagctttctcaaggatcttcccgaggttcataaggctgggtttacggtgaagaaaactcgaccggaagctatttctttgtttacatgcttggaggcgtttttgaaggaagaacctttggggcctgatgacatgtggtgagatacctaatccaaactcgtaactcttttatatttttacctttcgaaatatattgccattaatagatgtattgctcattttcttttcaataggtactgccccgggtgcaaggaacatagacaagcgaccaagaaactagatttgtggaagttgcccgagattcttgttttccacttgaaaagattctcgtatagcagatacctaaagaacaagctagacacttacgtgaattttcctattcacgatcttgatttgagcaaatacgtgataagcgaggatggaaaacaccacatgtacgaattgtacgccattagcaaccattacggcggtcttggtggtggtcactacactgcatatgccaaggtgaaacaaaatctattctttttcgcctttctagtaattagttgtttaaactggatgatgatcgcttaattcttctgtcaaattgttcgtgcagttgatcgacgaagacaattggtaccatttcgatgatagtcatgtttctgccgtcaatgaagctgacatcaggacttcggccgcctatgtattattctatagaagagtaaggactgctgaacccaattcaggaacagcaggcgagagcgagacatctcaggctcattcaggcacttgagaacgtaagtcaaagtccatctttgctattttaacgctcccgagttgtttttcttgtctttcgaaagctaacttggtataggcatcatcatcaatcaatcaagagcaaaaaccctactgcattttgaacattatatttcgggtcgggtcgggtattatttcaaccttcaagctgaacaaaaagttggttaaatcggtaaaactactaggagctatatatatattcattgcagcttggagcccctttttttggattggacattctgttattattatattcttttatatttgatctactacttataagaattattattgttgttgttgtttactggctacttagaatttttagtctatttttacttctggtagtattttactattgttatttcaaaattattgagtctgtaatgtaatcaatagtaataatggtcctttaaatagagattataatttgacttaatactattttttgcaatgaccaactgagtttcatgtttaaaagagtcctaggaagttaaagcaatatctgaaatatttattgatgcagtgactaacactgttcactataaaatgaataataacaataataatggtacaaaatacaatcattaatttaagagatgaaaataaagaaaatagcaaatcatctaagctaacactaaattatgaatctgtgatcaatgtctctcttaaccaaaagctcctcagcagcaagaacagctaataatcttaatattattattattattgctattattcctattaagatatcctgcaaaagtaaaaaataatgaacatgttaacattttag

SEQ ID NO: 218396 - DNA, 6441 bp, Cannabis indica
attcttgaacccgagaccaccaaacggtttgggaagacaaaccttatcccaagaagccaaatgaattttacttcggtcacccttaactccccaaagaaaacctctgcaaagcctctcaacctcctttattacactttgcggaaggatgaaaatgctcatccaatagttacgaagaccaaacaacaccgaatgtataaatttgtacttttaattaataataatatgacaaaattgcaataaaaaaataatagcaaaaatgaacataggaaaaacaaatttaactaaaagcgcacgagtttcagaaaaaaaaaaaaaaaaaacaaatgatttgagtgagagttatttgtttgtatttataataatatatatgcagtctcttaatattttataatatgaataaaagaattaattttcaccaaacaaaataaaattgtgttcatttcttcatttttttttcactttttattattgcactgctagctagctacattaaattgatttttgttttcttggtaagatagtggttgagatgtttaggtaggtcatcatattgtagccttggagaggtgatgatcataataatacatactagctagtataaataaatgtctatatatgtatacagtataccttctagaagtctattaaagtagcctcgagctttagcataaataaaacacatggtataaataatgaaacaaaagaatgcctcaaaacccacctcttcaaagtactcaatacatatatataactatttctaatgcggtggctttgattaaacaacttagaataagtgtacgtacatacatgctaatatgaaaaatcatcatgcagctacaaagagctatacgaatcttgctcttttttggcttgaagaatctttcttttcatgttacaagtgtaacatccatccatagtgcaaaatacacgaagaaaaaatatgataagctatataaacataagattagcaaaaatataaaaataaaaataaagacagacatggattggtggagagacactacagataacctaggtctctcaaaatatgtagggaacaaaaacaaatataataacaaagaaagtgaaacaaaagcccgattttctgaagtaggcaacactttttactttctaggagcagattaggtgtaaaagacaaataagaagaggaactagtttaaatcagatatttgaagaaagttttggcctaaatgctaataaaagagaatattctgatatttagaggggcttctctgcaaattaaaactgaaataccgttgtgagaaagaataagtcacgtgagctgcgtgctcttctctctctctcaacagctatggcgttttatctccctccttcgtcctcctctctcccattttagtgttccttctctactctgtaatggttatggaactcagtaagcttttcgacacccattttttcttcctttactcttcttgagccttaaatctttttctatcttactcacttgttccatatgtttcttcttagtaactccatgatcatggggtttaagctttcctttctcgttctcattgtgtctcacctcctctttctttgctccaatgccattattgtagaccgaaacaaagcttactcagagagagaagcccttctttcgttcaaggattctctcgaaaaccttcatcttctttcttcatggaactcatcaaccccatactgtaactgggttggtgtttcttgccaacatggccgggtcgattcactcgctctcccagctctgtccctcaaaggcccactgtctccctccgttttctctctccgcagtcttaccttccttgaccttacctctaatcttttccatggcgaaatcccaccgctgatatccggtttgaaacgcttgaagaagctgttgctcggtgataaccagttcatcggggagattccgagtcagttaagtgagttgactcagttgcaaacactcgtgttgggacacaactcgttcagtgggaaaattcctccggagctggggagtttgcctcagctcataacactcgaccttgctggtaatgctctcaccggcaagattcctccccacattggaaatatgagcaaactcttgtttttggaccttagcagtaatcttctgtcaggttcacttccattacctctctttacaaatctccatgctctatcttcgttggacatatctaacaactcgttttctggcacaatcccacctgagattagaaacatgaagaatctcagtgacctctacattggctataaccatttctctggcgagttgcctcgggaaattggtgacctttcccgcctccaaaacttctttgctcaatcttgttttataacaggtccacttccccaggagttatctaatttgcaatctctaagtagacttgatctttcctacaaccccttgaagtgttcgatcccaaaatccttcgggaagttgcagaacttgagtattctgattttggcttcttccgagctaagcgggtctattcctcctgagctgggaaactgtaagaatttgaggactctgatgctttccttcaatgcactatccgattcgttgcctgaggaactttctgagcttcctgtgctgacattttctgctgaaatgaatcaactttctgggccactgccttcttggctcggaagatggaaccaactggagtcacttttgcttgggagtaacctgttttctggcgaaatcccacctgaaatagggaattgttctctgcttagagaccttcatttgagcaataaccttttgactggtccaataccgaaggagctctgtaatgcgctgtcgctcatggagattgatcttgccatgaattttctcactggtaatattgattacacttttcttaagtgcgctaatcttactcagttgatcttagtggataaccagattgttggtcatatacctgaatacttgtcaaaacttccattgatggtgcttgaccttgattcgaacaatttcacgggtacgattcccatcactatctggaattcaaataatttaatggaattctcggctgcaaataatcagttggggggctatctcccagaggagattggcaatgcagctgcactggagaggcttgttctcagtaataacaggttttttggcaccatacctaaaggggttggaaatcttaccaatctttctgttcttaacttgaactctaattctcttgaaggaactatcccaactgagctgggcatgtgcacagcacttaccacattggaccttggaaacaactttcttcatgagtctatacctcagaatctggcagaattgggtcaattacaatgcctggttctttctcataacaatctctcaggctcaattccgtcaaaggccttgtatttccgccaggttgatatccctgatctgagttttgttcaacaccgtggagtttttgatctgtcctacaatatgttgtcaggcacaatacctgaggagttggggaactgtgtggttgtagtagatcttttgttgagcaataacatgctttcaggggaaattcctagatcactctctcgtctgacaaatcttacaacattggatttatctgggaattttctcactggctcaattcctccagaatttggtgatttgcgtaggctgcaaggattgtatatgggaaataataggctatctggtaccatcccctctgaaagattgggacatttgagcagtttggtaaagcttaatttgaccaataataagctttcaggttcagtaccaacaagttttggaaatttgaaagggctaagtcatttggatttgagttataatgagctaaatggggagctaccctcatctctctcgagcttgctaaaccttgtggggctttatgttcaacaaaacaagctttctggaaaggttgatcaacttttctcaaattccatggcgtggaggattgaaactatgaacttcagcaacaacgcttttgatggggaattgccagtgtctttaggcaatttgtcatatttgacatatttggattttcattcaaatatgtttcagggaggcattccaatggagttgggaaatctgatgcaactccagtatcttgatgtttcaaggaacaggctctccggacagattccagagaaaatatgtgggctggtcaatctgttcttcctgagcttggctgaaaatagcttggaagggcctgttcccacaagtggaatttgccttaagctgtcaaattcttcagttgctgggaacaaaaacctgtgtggaacaattatgggatttgattgcaaaagtaatagctttgaaaagtctgcattgttaagttcctggggacgactagctgctgttgtagtgggaagtattgtcattgtcctttttctagcaattgctcttgctagacatgttacaagaaacaagaggcaaactgttgctgaagaagctgaggaaagcaagctcaacagttttctagatcaaaatttgtatttccttagtagcagcagatcaaaggagcctctgagcatcaacctggccgtgtttgagcagcacctcttgaaattgaccttagtagatattcttcaagcaaccaacaacttctgcaagacaaacataattggagatggaggtttcggaacagtgtacaaagctactctgcctgatgggaaattagctgcagtcaagaagctaagtgaagccaaaacacaaggccaacgagaattcattgctgaaatggaaactctgggaaaagtaaagcaccataatctggtccctttgctcgggtactgctctattggtgaggagaagctccttgtttacgagtacatggtgaatggaagcttagacctctggctgagaaacaggactggagctctagaagtcctaacctgggataaacgtttcaaaattgcaattggcgctgcacgtgggctagcttttcttcatcatggattcattcctcacatcattcacagggacatcaaagctagcaacatcttactcaatgaagactttgaaccaaaggttgctgatttcgggttggccaggttgataagtgcttgtgagactcacattacaaccgaagttgctggaacatttggttacattccacctgagtatggacagagtgggaggtccacaacaagtggtgatgtttatagtttcggtgtgatcttgcttgaactagtgacaggtaaggagccaactggacctgacttcaaagagattgaaggtggaaatttggttgggtgggtttttcagaaaatggagaagggacaagctgctgatgttcttgacccgaccattctcaacgcagactctaagcagatgatgcttcaagtgcttaagattgctttcatttgcttatcagagaatcctgctaacaggcctaccatgcttcaagtgctcaagttccttaaagggttaaaaaatgatcactaaactgcagcttatgtcctcagttagatgttagtcatagcatagcatagctttgctattacattacattagcatacaagtataacaaggacgatgataggactagggcttttactgcaatacaactagttctctaatataatcaaaatcaagagtttagtcttcttgaccttaaccttttccactgttgaacttatttttttatcttgtaattgttgttatcttaacgtacgaagttatgcataaataaataacttacaaatgtatgcagtttactatgagcaaaatatgaccgccaacttattcatcaaattattagtttcttaaagtgacttgttaggccattttaaatggtaaaacttaaatttggtgttaaatcaacactaaaaaactactatttcaacactatttttttttttcctaattccaatcataacattagaaattatacaaaatgccacaaagtgtctaatttgacaagtgttgtatctttgatctaattacagaatagaaaaatattttttttatattgtattattctttatcttttttttttttttgaaacaatataattcttcatattatttatagaaaaattaaaaaaattattatattttatatttcaattataattaagcaacataattttttaatattagtaatttgcggtataaatacctaagtttaattttcagttgcaaataaatacataagtttaatttttggcagtaataatacctaagtaatatttctgaaactctttaggtacctaaccgttaaatgttaagcattatattcatgtgtcattttcttattggtatatttgaatcgatttttttaaaataataaaaatttaatgacttggaccaatcagggattgccacgtggcaatttatttaaccaggtacctacagaagtttcaaaattataatttaggtattattaccgccaaaaattaaacttaggtatttatttgcaattgaggagttaaagttaggttaggggtgttcatccaatcc

SEQ ID NO: 218397 - DNA, 3486 bp, Cannabis indica
agtgacatacatgtatataagaataataaatttgtagggaaagatctaataaaaatatgaagtgggaacgttacaagtcaattataagaaattaccttttgttttattaaagacattattgtcttgagttttggggcttctaggcattcaacttcttactctatttctaggaccaaccttggcatcacctcataatggtggtgttgggcgctagggcattcttggactaagacgagctaaacatgtgtttagaacccatccaatttaggagtaaaaaaaaaaaaacatttaaaagatacacaaaaaaaaaaattagtatttttaacaatttttttttattaaatacatttgtttaggggtgggagtggtggtgtgattttagccctttttagtgtttaattatcattattaaaattaaagaaaaaactaacattaggtgaatgattatagatgatggagtagttttgtggaggatataaaagagtttacctaaaactaattcatggatagaaatattataataataataattgataataataagttaggagaaatatacttatctatttcactaatatataaaaaagtagttgttaactaatagctatataacatcctattctatcttaatgattcacattttgattaaactcttttaactaatactcctaaacctcaaaaagctaatagtgctttgtctaataacttcatttttcaatattacacaaaaatatgttacaagttgctataacaaaatttaagttggtagaaccattttcattataataattaaataaaaaatatcttaaattatttattaagatacattcatttattcttcacttttcctatctcattttaaatttaatatttcttttttgcaaacatgggaagaaggggggactttttcaaacattaataattcatccacaatttagattgagagaaagtagggagcatgtaagtaagggactttaataaaatcttcttatttatttattttccaaaaatatattttaaataaataaaataaaaaaggaaagccaatagtttttatagccacaaacatggctaaacaacaatttaggagtaacattgacattatcattatttaaaataaaaaacaaagattatatattataaaatgaaaatttaattttattttaaattttttatatatatttttataatgttatataaaataacaaaaaaactacataaaataacatctacacaacaacaaaaataatatacaaataacaaaaaaaattataaattaacaaaaatacaacataaaaatacatcaaaagtccgtattttctataaataaaatcataaaaatcgtaaaaatatttaaaattccgtatttttataattttttttttgttaattttgtgtatttgtaaaataatcccttttatgggatttccattgatttatttattaatttaattcaagctcacaatatctaaaaattacaaatggtaataaaaaggctcttacaaatcaaaattaaaattatgaaaagaaaaataaaaaggcactcaaaagtttgtaacaaattagttacattagttacaaattatgacttggtaaatgcatggagtgtttcattgagtgcttttctatcataatcacctgtgaaaacacagttgcctagaggacccttaagaagaatcagtcttagtaatccatcagctactttcttgtcaacctgcgccgaaccgaaaaaaaatgttagtaaacgacaccgaacaacgagcaagaacaaattctcttttgcttaccgccataacggatttgaacatctccacggtcatgatttcgggaggggcaataggtaacttagcttgttctagaatgttacgaactcgctttacaagtgactcgtctatccacccgagtctgtaggacatgtcaacagccataacctaagagtagaataggcaacaaagttagttttgggagatatttggtgaaatgtatatttagtatttgattattaccgtgccggctgcaactgcttccccgtggagccattctccatagcccatcccggtttctattgcctacataagacacgaaaaagacacaatttgaatgagattattaagttcggtttaacaatttcggaaatccattcattcttttcatttttctaactcgccttagttctgttatacgacaaggtcttaagcagaaaaccgattacaggattcccgaactggaaaaaggaaaaggaaaagagaaacgattatggggtaaggtactcacatggccaaatgtatgacccaaattcaatgttgccctcaaaccactttccttctcgtcttgggacacaacctcggccttgttttcacacgaacgcttgatagcgtaactcattgcatttggatccctgcaatgaaaatgtatattgagtattgagtattgattagattcgaatagaacttcgaaaaataaacctagttaattttcttttcttgatatttgtattgtatacctagccagcaatgccttcatgttcttctcctgccactcgaaaaactctgcatccctaatcaaaccgtacttaataacctctgcaagacccgatgccaattccctttcgggcaatgtgttcaatgtgtctgtgtctatgagtacacattgaggttggtaaaatgcgccaattaaattcttccctaaaggatggtttatcccagtttttcccccaaccgaagaatcaacctattcaatgccaataagaacagttgaagcatacatagaaaaacaaaaacaataaaaacacttttgatcggtgacaaacctgtgccatgacagtagtcggtatctgaatgaaattaacaccgcgaaggaaagaagcagcagcatagccacacatatcaccaatcacaccacctccaagagcaacaaatgtacattttcggtccaattgcgactcaatagccttatcaaagactttcatgagagtttcctattaagaaagaccaagtacaattaccacaattgccaaaagagagataattaaaccgaaagccaaataggagacctaccatgttcttatactgttcgccatcaggtaaaatcacactttcaacagtcacattcgggtttcctctggtcaaggcatcaacaactttttccaaatacaatggcgcaaccgtagtgttagtgactacaagaaccttcttcccatgaacatgcctaacatgaaataagaaagcaagaaggtgtcaaaaactctttctgctcgctctaatcacaatactaaaaattacactaaaaagaatattttttattattagattagttttttaataaaatacaatataaaaaagtgttcaaatgtactaaaatgtcattccaatggaatgatcttttcaccattttggtggaatgactattccattttaaaatggaattccaatgcatgatgataaactatttaataagtcttttaccaattttttatacattttaaat

SEQ ID NO: 218398 - DNA, 3152 bp, Cannabis indica
aattctaacttagaccttaagacacagactccaacttcggcctcaatctcggactcgcaccacaatcatcggtccagatacggacctcgacacgaacttaaaataaaaactaaaaaataaaaatagtaaaattacttaaaacaaaaaaaaaatagaaaatagaaaatagaaagttatagaaacattatttttgttttttaatttttaaaaattaaaaaacaaaagtaatcatagatttatttttatttttgaaaataaattttagaaatataatttacttttatttgtatgattcaaaaattaaaaaaataaaaatattactaaatagctacctataaaaaaaatcaaatttgaaaacgttgggaccaaatctgtaataaaagcaaagttagtgaaacatactataataacttaaaagtttgtgggtaaaaatattaaataccgaatcttgtgtgaattagggttagaattgggcacttactcgttagtcagagaaaaaggaaaagaaaagaagaggcgaaggaagtaacagcgggagagatgtcgaagaagaatagcctttctaagcggaaagtacagcacgaatttgaactcaaaagtaaatttttctctgcaatctctctatctattcatgtatctatatgttgtttctgaatatttactcatattaatcattctatactgaacacaggggagaaggaagaaaaagaaaggaaggcaaagaagcttcatgctaagaagaacaagatgaaagtgagtccccatcgatcgattgcaataggaatgagttcttttttgttttagaagttacattcttcgtggtcgaattccaacaagagtatctgctaactgaagttttttatttaatttttccattatcaaatgcaattgtcttgggtaattagattgggtgggtggttataaatttataaaatttgatgaatagtaatgtgtttgattttgattcttttgcacaaatttttatgttaaaatttatgtgttgggtgttttggaattcactgagaggagttttcattgggtaattgtgtaaaacaggttgatggtggtaataagaaaaagaagggctcaggtgggtttcaggtagggaagaggaaagtaaagaccaaattgtcagcattggccaaagctaaagctgaacaggctatggaagttgacaactaaggttcgattccaaaagctttcattatactaattaggaagaggataatagtggttctaaaatttgtaatttagatgggaaatgtttcgtatttttattctattgttttcatttgtcctgaaatgttcacttttcttctaatgaaaaatattgagtgaaagttaaagatttctggcaatgctccattttaatatatgctgctaaaggcgaagttaatatatatgttcgtagaagcctgttggtgataaattgtaggagataatatggaaataaatgttacaaacttaggacatggattttgatacccagattctgtggagtatatgtatatcagtatatgtatacaaattacaaagcaaaaaggaactatcttttttattcaaaaaggtttactgaagagagaaaaaaatcatatttccaaataaatactagagactctagtgtttcaaaagcagtcactagagtgaaggagatggagagagagattgtgtgggatgaaaataaaaagtatatataaatattagagactgcagcatttcaaaaataaaaatggtcacacatcttcctttggtaccaaccgagatcttctcagatggtattagaaggttgtgtatgaaaatgggtatctggttctacttatttttcgtagccatgaccatgataaagggttgcgtgctgcgtgtgacattttatgggtttgatttttaatgttttattaaaatttatattatataatataatataatgttgttctggatccctgaatagattgacattcaagagctatcaccaaagtgggatatcattacgaatgctttgcaaataagtagtggattttcatcataattattaaataaaatgtaagacttaattgggatataatatgttatgatgttgtggattttgggtgccttatagcatattttaaaacttatatttctttgaacgacaaagattagtgatcattaggtccaccatgtaaaaaaggaaaagaaaaaagttaaatgagttagatatcattggcagtaaatagtcagcaacatgataatttagattactttaacgtgatttaagtctttagggaaaaaatgaggatctagggtcatatacctgcaatgtcaaatggattgaggtacatagctttgttgtcagcttcaaaattaattgactgaatccccaaaaaacttatattgaaaataaaaccctgtagtttgattatcatttttctttgtcatccccaaaagtgagaaagtatatttgggggtttcaattatttaagcggtaaagttagtggaaatttaagacattatccccacatgatgattagaatagcaagataaatgcatgcctttggacaaaatgatggtatgtttgtttgtttgttttttccctttacttttggtgatattcttctcactactacatcatattacaacaaaatttcgagagtattatacatctcttttcgttgataggcatcattatctgtattattattattattaatttctcgaagtgaccaaatgcgaaaagtgcatttctagaaagggatgtatttcgtttaaatttagttccagtcacattatatcattcacattgagtcattgattaatatgtcccattacatgttgaagcttttgtattgagattcagattccacgtaagaaatatgcttacaggttaaggagaaaataacagagttatcgagttcgtagcctagccaattcaatatgtgctacaatttgcatcaataaaaagcaaaacaaaatatttgttacaattaattgagtagctgtattattttggaaactgagaacatattaaaatattgaacaacctttaaaagataacaaactaaagattccttggcaaaaatcaaagaaataaaatacgtagtgggcgaaatgggcttaggcccatcaaagccctcccaaaccgagtctgtaaaagtcagttgaaaaatacctctttt

SEQ ID NO: 218399 - DNA, 2824 bp, Cannabis indica
tttatgaggcatcaagaacagtttgtcttaataggcaaataattgtcatgtaatgcttgattatgtgttgtataagcatttatttgtgaatgatggaattgtatgccatgcattgttatattatcttgtgttatttactgtttgtgattacttgctttcttatgagtttttgtgactcacgggtgcttcgcggtcaggtaagggaagggaaaagtggatcagtcatgagtcagaggtctctcagagatgtacatatcaatcacgatgtcttggcttctagtggacagaatctactcttttgattatgtttggaaatgtaaccctattttttacactgattttgaaactagttgtaaaaatttataaacaggggatccccatattcagcaatattttgtataaaagttatgtttttagtttaatctgaaatttttaattaaggcacacttttcttaaactaatagattaactataaattaatttgtaaaagcacacacatgtggtgtccctatggttcaaggcgttacaagcttcaccaagcatgtccttgacttttaggactactagtttttcactaccagattcccattgaagagggttccaactttgtccctggacttctccaaccctggtaagaattccatacttcgcatttctctcattcacttttttatgtgtcgtccttatatttctaatagagatgacctctggtttgcagccaatactgaataaaaattatcctcaatttttacattaaaggaaatgcaatactggaagatcctttctgatgtcctgaaggtagctagtttagttactacagataacctccgcagttgttgactcattgttgagatttaaagcattaagcctatcaacaactatggatgtcgcgatcccctagatgtttgacaggagatcgctgctatggtggcatcagtgatgaaggaggtagttaaacttgacaagatgtggaggcctaattgggaacagacccatccaaaactactaagtgaagaggtcaagcttgcagagctgtttgcggtcgtggccaaaaacgaaggcaccccggggccagcacttttgagagaggtaaaaaatcctttcgtctcacttatgctccgcatctcgatgagatggctcacatcgaccagggaggctttgatgattatttcttaagtgtagaccctcgtaggtgtccagtaaatgaataccttgataagtagatgaaattgtgaggagtctggaacacttcaggcagccatctcactcttatagaatagatcccctccttttcatgccatgtccaagttttgaggaatatggtagtttctttgatcaggaggacatagctttatttgctcagggaaaaccaaaatataacaaagtcaacggttgctaccgaacttgaatcttgttattgattttgattaccttaaagttagcttggttcaatcatttgtatatgtttctaactctttttgatgtcctctattttgtagaaaatccacaaaaactccaaaatgggtgctttggacaacatccttggaaaaaattaacaagggtgccaccaaaattagggcccaggttgcatctcatttattgaccggagctgccaaaggtaaagggaaggctaagttccaaagcccaattctttcatttgatgcttctaatcctccgtctaagaagaaggagtcaattttcagaaggtccttagtcatccagccccctcagaacattcttccccatccgggtctactcctgccaagcaagttgtcgtaaatcctgttgctaaggttgcagaggttcctattctgatagatgacgatggggaaggctttgtattctcggtgaaggatattctatccttaaaatagtatgatcctcctttggccgtagagaaagaggtcaaaaaggcacaaaaggaggatacctccaattctgctcaagttccgagcacagcggtcaagacagagaccagagaagggtaggaaaaacattttcctgccagaagcgaggcccaaaacttgcaagtgagttcaaggcctccgtcttccaaagcacaaggttgtcagtagcttccaactgctctttgtcgattcccaatgtcaaccttgcacggtccatccggttcctcacgccgcttcccactaaggtccaaaagaagaccaaaggagttgaaaactggatctaaaagcatatagaactagagcagatctttgcacaaaagaaggctaacatcctctccgccagaaggaaggttgagatagcaaataagggtaaaggtaaaaggtctgactagaccgtttggctttatctaagtatctcaaacctagggtcaggagtgatacttcctattttgttgtggagatgatagacttattagccgacagcatctgcgacttgacccataaaaagtgagttatatcgtcaagcaccgatctcgtcttgttggcccacgccaccaaatagcaggctaccggtgtaagacttgatttaaacccttggtacttatctctattttctatttgcatccatttgctctgacatttttcttttctttataagttgagtagtttctttcatgagatgacttataattttattattgaaggaggggtgagttcattattgatccacctctagcttgggtggatgtatctgaagatatgaaatatacgcctgtgaaagtgtctgagccaacaaaagcccatgaaaaggccttaatgtcatcttttagagatggtaaaaaagatcatcagttaattaaagcccttacacaagagataatgtgtaagggcttaaacaaaattaaaggctttttttt

SEQ ID NO: 218400 - DNA, 1835 bp, Cannabis indica
taacagaacttgaatttagggagggagttttaccacaaaaattttagaattgagggttagttgtaaaaacttccctactttagggggttttgccgcaaataaccctatattttatgtatatatagtattattatttagaaatagagtatgaatagcaatatacttgaaaataattccttcttttcataatccttaaaacatggaagcagtatgtacaatcattgaccttgttattttaatatttaattatattggtacattatttaactaatcaataatatttgtaattgtttaattattatttggtattgctggaaaactgtagagagaaaaataaactttgctagctagttgaatgatgtccaattctttaggaagttcaaactcagatttattatttttaaaaaatgcataaacttattgctgtggctggattgggaaagtgctaatcatataatttaaaatgcaaaagaactttcccaagcttaattagaatatttttccatcatatcaactataatctaattgttaatctatatatatatatacagatcataataaaaaaaatatatattcctacacatgcatttttttacgtttattatatagttcagccataaaatatatacttcaattaaataattaacaaatttacttgcactaattttaataatcagaataaaaaagaaagaaaaaaaaagcactattaattaactaattttttcactacactataagtacataagatgttattatattttttttttctttttccagcggatcaaaaaataatattaatatgtagtggttgaatttaatataaataaatataagagttgcataaattaaagatccaaatttccaaacccacttttatgtaaagcaagaattccattatatataaagtagagctgctcaaggttgcattcattggtgtaattaattaattaataactattcacactacagttgaataatagctaggaagaagttttattatttctttttttaaaaagaaaaagaagttttattattaaaattgtctacttaattgcgtggcgtactgtcttgcatatttatatactacttctagattaattattaacaatatttttatcccaaaataaaaaataataaaaaatcagaaaatttggtttgctaacaactctgccaaattttgtctttaattaattttccaaaaaagaaaaaaaaaaagtcttttttaccaacttctgattttaaaaataaataataaattaaatgttgattgttgaacatagtgatcataatcatgatgaagacataatataattgattgatcttatctaatgaggctaactaacttcaagtaattaaatctaaatcatatatatatagaaggaaatacatatttaatgataagtattaatgaagtaaaaaaaaaaattaacgattttgaaattatactgataatttttttagcagtgtatatatatactaataatttagtattaattggtcattttgtttatattttagcactaaaaaagaaagccagggttttgtggtgcagtgtataatataaacatatatatatatatataattatatgatattataaaactcttgcaaaatattcagcataagccaactaaatttttggtggagttcttgactatttttttataaacaaattaaatccagctagcatgtaaaatgaggaaattaaacatatgttcaacaattaatttattaacttaattataataatcagagtgattattgattagatcgataacaaatttcacataaaagaaaagaaagaataatagttgttaattgagacgtgttgtact

SEQ ID NO: 218401 - DNA, 4484 bp, Cannabis indica
gtgaattccaaatattaccttagggcccatcagtgggcctaaatgacgtaaactaggcaaaaaccatgatccattttgcctcataggataacaataacatagtcacccatgttaggttccatcaagtctagtcagcatctagaaggtccatctccatatatctagaagaggtcctcaatttgtatctgtaagacggttatagttaactgttttcttctgaatcgcacaagatcaggaattactttcctaaaatctcagacatagaataatacattgctaaaaacgaaaactagacaattggaaatcaagtaattattatgtcattaaatgcccatgaatttaggacacaatatgaataagtaacttcgtgataaggcctccacgtcagcatacacaaggtgcctcatgggctagacttcactagataagcccaaagtcaatatatttgtaaaactccccattagaggaaaaaaggtaactagtatgacctgtagaacattataaacacacattaaatccttcatgcaaagggttagaaattcttggcatacttgctcaggcaaagaacaaagtgctcaaacttattataatccttgaaggtttttcaaccaaagtacttaataatattgactagtggactaaggctcataatgactaaaccacttaaaagacacagagtgtcttcttcatatatttctctctaaattatattttctttagcttttatttctaataattagttttccaaattactcgttgatgattttggagctttcattgagagattaagaaaaaagtgatacaatctaatagtacatttagtatttatggtactcacctaagcaaaatctaaacttcattgccaagttatgctaatccaaattccataactgggctcaacgatgatcagaccaaggcaactagacaacaaaaagggaaagatcagcatgattagaaaagccttcatgatgatcctattgatgaaggagaagaagaagaggagtctaaggactcagatcctatggatccaaaagacaatgatgtcaataagggagatgagcgccctgattcagatcctaaatttgttaggatggaaaaaaaatagaagaaactgaataataattggcagcacaaaaggaattttcttgaatgatgttggaaatactactgggaaaacaaatcctaaagattccgacccccgtaatcctcatatggattaaaggagtggaaaaatatgagaaacctcaaaaaaagctgctcctagtgatcaacaaaacagatctaattctgctagtctacttaaataagaaaaagaaaagaaccaatgcttcagggctaggtcaccagactgattcttggggcagaactgcagataaggaaatgtttcatgcacaagcacaaaattcttccgccaggaaagataaaaattatcatgacaattccactagctggagtgatgatgtggaggaagttcatccaatatcagatgatagaagtgaaagtctctcaaaaaacgatctccgggcacgagtgaatgtcaagagggaaaaggctagaatgagaaatcaaaacctcgtggagatgacttgagaaatcacatcaatgaccaaatttgtaaaagatagcctcaagatgctgccactcagcgtctagaacgtaagattgaagagctaaataagatcacatattgcatatccaggaagaaaaaatggaactatgttttacttgagagacaaaggacacgaaaccatatgtgaaaaagaattatagaagcacaacatttgacacacttcagaatgtcacaaatggagttgcatgaaggaagaacggaccccacagaccatttatccaaataaactcgggttatgcaagtggcaaagtcaagtgatgatgcaaaatgcctttatttctccttaactctatccaactctgtggaagactagtggaaaatattatctccaacatatattcataactggaaggatctctagataatgttcaaaaaataatttatagcatcaaaggatttccacctagaggttagttcttcaataaatatcaagcaagagcaaggagaaagccttaagaagtaaaatcaatgtatgatggatactactgcaaaggcaaaggttactcatgatatgaagatggtggctttaacatcaggaataaccactggatctttactatggggagaaattcaatggaaaagattagattctttatctaattttctatttggagcctagggtttcatcagtctagaagacgcttatgctcaagcatatggtgtacttccatcaccaaccacgaatactacaacaactcaaaatccttagttgtctacacccattatcatcctccggcaataactccaacaatatatatattaggtgcttctagacaaccagttgcacaaacgagtttcttcgactttgcagtggcacaaatctaaaatagtgttgctcccaaacagacaaaccaacaagcagaaattccaggatcgaatgtgagtcattctcagagcaatagaggctccaaagctccaagttgaaatgaatcttcaaagaaaaggataactcaagaatctagataccagcgtggtccatgcttgaaagaatgtgtataaagctactggtaatatggtccactaccaaaagcctctaccaatgtacaagggtggaagacacaaaatggacccaaataaaaagtgcaaataccatggtgatattgggcatacaaaaaatgaatgtgattattgaaggacgaaatcgaggatttttcaagaatggtcatcttcccaattcggtgaggataccagttatgtatctacgacaaggagtagctcattgacaattttttattcctggacaacccagagcaataaatcctccgcaagaagtaggtcatccacaagctctaagaatacaagatcaagctctacaggctccttagggggtacaaaatgtcccatcgacaagacttgttattgctcccagacctgcaaacccatatccacctggaattgctccactagcactagatggccacatggtaataatatctggaggataacatattgccaaaagcacgagaaacgcacaaaagagatacctaaatgagctggaaaaagatgaaacttgcagtcgtgtacaaacaccttctcaacatcctcagatgatgaatctgccaataaattttataaagaatgatactaagcatgtgcatttcccacataacaaccgattggtgatagaagctcatattgcaaataagagaatatctagaattctcgtagataatgggattcatgttaacattctcttcaaaggtgcttttcaagctataggtctggtggaatctaatctaagatcttgtccagttcaactcaaaggctttaatggagatacattgcttcaatggaaagatacaaattccaatgacaatacatggataattttttggaagtaacatagtatcaacgttcgaacactgtacctttgtagtagttgaatgtcccactccctacaatgttatcctaagacgacatgttctagaagactttggagctgtaacttctacttgcctgttgaatatgaagtttccatgtaatagcaaaagcattggaacaaccaggggtaattagaaaatatgcaggaaactgctacaatttctcaataaaaattgtccttatggtttcggaagagaatccaattgaacccagagcacccgcccaactggcactaggggtagctcaagaagaagatgagttagatccatgcgtgggggtggagagaatcatcataccaatggaagaggtagaagaagtgtgcttcaatgatgaagattttacaaaagtcaatcaagtagggaagaatttgcctccggctgtaaaagagaaaatcgtatcaacaatgaagaagaaaagtgatgtgttggcatggagtgttaggctatttttagcctacgttttgggtcactttttatagttgtttttcttctttgctattgtttttggaatagaattatgcttttgttctttggtttcaggtttcacacttggaatgtataaattgatcaaatatcgaaaaacaacaatctatagaatagagaaaattctgcaagaaaataaagctacaacttcaagcctaaatttgactatgttttgatcagatttttgaaaaagtcaaaacatagaagttttagatttcttttacttctttcaaatgcatcttgtataaactcatttggagtttgtatgtgaaagttatgcatattttactgaaagatgttgaagttgtcaaatttgtttcagtagtcgcaaccactattttctattgtcgcgactaggaggccacgcagcgagcttattttttgaatttttccaatggtcgtgactgggctttatgtagtcgtgaccaggggaaaaagacgagatttttgggtagtttttgactttcaccattcaaaggtagcaaccctaa

SEQ ID NO: 218402 - DNA, 7992 bp, Cannabis indica
ccattgttaccctccatcgccatcttccatagattcgcatccccttcttcaagttattgcttcacatgttctacactctactactgcttctgctcaacagcaacaactctactctcactacccaaaatcacgaacccagaaccggaaaatccatgaccagtctcgacactcaaagcagcgattgagtcaacaagagccagagccagaggagacccatctcttgatctcttctcttctttcccgtattgaagccctcgaaacctctcttcaccgtttctcttctgatcgttctcattactctcttcgagatgtggccgctcgcgtgatccaactccagttcagagcctttcttgttcgcagatcacgagcacttagggagctcaaagatcttgctctcgttaagtcggccttcacatctctcaaatcatcaatttctgacgagacccattttgatattcacagtgtctcttctaaagccatggatttgcttgttaagctcgagtctattcaggtaaaacattttatatctattaaatttgttgattcattatgttttcgttcacggacatttctttatatggtttttcgttttagggtgatgattccatggttagagatgggaaaaggtctatcagtagagatttggttcagtttatggatttcattgatggggttgccttgaaaaggcgtgagctttctattaaagccaggaagaatgcgaggtttagtcgaaacagtgacccgcctaaagttaatgtgagcaaaaatggcttggatagagatcagagggaagtgattagaaaattaagagaaagagttgaaaagattcgtgggtatacaatggttcctcaggatgatgatgagtatgttgagtttgaaggatttcaacatgttagtgatgaagataatgaggctgagaaccctatagttgttattagtggaaagaagggtccaattagaaatggggttttggcaaacagatcaggggatcagcctagagtgaaaaagagtgtgagctttgcagagaatgataatttgttcaaagtttttagcaattcaaacgaggctagttcaaatgaggaagatagtacttctactaattctagtgatggtcatggagatgatggggagaacaatggggctgatgttgaagaacttaagggcttttctctgggcactgaggatgatgaggaggaggaaggagatgttgtcagtgtaggatcttcacagaccagtaatgagggaaggaatcctaaaaccgaaagcgttacaaaaggtgaagttaactataaaattaaagggcataatgaagagtttgtattctctgctcctttgccagttcagatggatgacaaagctgatttgatgaagaggagaaatgaggtgaaaattttgaggtaagaactaataagaagacattagcagcggtcagagttgagacattatgtggctagtgaatagtaattaggttctagttctgttatttgtatcttccacaatttcattctaattattcagattaatttgtcagagctgacaggcattaatattgtggggctttattagatttgttggtcttttcccacaattccattgacttaaatatgccaattatttggtctcagagatttaatgttcatggaatgagtggtttggctgttatatttcccacctcaatgttgtaatgttttaggacacaggagttgaatgtatttgtatcattcattgctacttccattatgattggccccattttgcagcggaaggaggttagtattagacagatgggtgatttgtggttcaagagatttgtctgcacaatgctaactattgtcttgtttaaactagtcaccatttaatcaatccagagtttaaccttttcctgctttggattctattatttttaaggaaaaaaggaagaagataaagtctgcaagattaacattctattagcattcagctagaaactgaaaaaaaaaaaggatatgattaagaggtaaaaaaaatgtcttgaaagttaatcaccgtcaaagacaatttctgttcttggggttcatattaattttgagaaagggtaccattaacaaaagtttcaagaaatagcctgaatttcattcttacaactttttctctggcaaagcttaattgctgagataagtaaggcccttttagtctcagcttcaagtggtgaaccagcttagagttcagaggaaaacaacagctgctgaacccttccatttgcatcgtataataaacttattggtagagaaggagctaaatatgagacattgactattttcatgatgaaatatgggcataactaagttctcaactcattattcaattttatgatttcttctttctaggattgttgttctatacaattaagaaaattttcatatataattctcaaccatattatgaaatatagaaatcaagataggatatgcacagaaaaaaaaatgggggcgtgaaagtgatagtttttttttttttgctcgaactgattagcatacatcaaaagccattaatttgctccatcaaaagccattaattgtcaattgtgtaaaactaaaacatcaaagaaccctacacaacatgaccaaaagtttaggcctaaatatgaattgattaaagaattcggtaaatttatgttagtaaaaattacaagttttcatacaatttgtgtaaaaatatagtttttttttctcaaaaaagttgttttatgggaaaatttcaaaataaataaataaaattaaaaatatgagaaaatagcatgaagtaatggggaaggaactggttaccttaaactattcttatatatatatatatattttttttttccacaaaataagttcatgcaactcattatccacactagctccacaatgaatcaatttatttgaaaaaatatacatcttctcaaaaatttgggaccaatattctttacaacatatacagttatggtataagagataataacaataccattgatatgtttaaactgaatccttaaaagttttaatgatcagtgcacttacaatgtgaaaattgctctcccacatatttggagatactaaggtttatgctgaaatttctttgttggcttgacattatctttctctttttcatcagatgaaactgttttatctgactgtaatcttggtattattatcgtcttgcttacttgggctgctgaccattgtttctagttttggggtgtgaatggcatttttcttggccccaacaattttaatcctagcttcccttaaggcgtttaatgccaacttgaaaatatggtcagaagccataccttcctctgcacatttaatggcttcctgatacaaaatattgtactgcaaattcttgcctttatgagaactactctgattgccaaaccttgaaaattcatccgaaacagcctcatctttggcacttcttgtccacctcttcaagatataatgctgtggaagcataaacacatttgttgttttgaatactgcaagaacatgtctgcatatgatcccttcaaactcaaacatcttgcaatcacaagtggcaatttgcttgttaactctgaattcgacaacataaactttatgtctttcatcaaatctagctacctcgtatctggcggttccttcctcgtctccatataatttcacagcaagcacaagagactcgaaaacttcatcctgaaacatggagaaaatttttcttgtgtacagttctgctgcttgtttttccactggcaatggggttttcaaaactggtttagtataaaatgtttcaaactctgcctttgcttctttctcatattggtcatttagagccttttcatattgttctgcaaaatcttgtaaggtagtccctgcatttacgtagccatgaaaaagtgaattgacactcccacttctctgagcaccatacatgcctgcaaagaatgtgtcccttacaaggatgggaacccatagtttgcggtcgatgtaaagcgattgaagccaatcatttcccctaagattgtatttgtcaagaagcccttgccaagttgattcaaattcatcaggtgactcattcttattaacacacgtctcaaactccatttgaaatgtccttgggagtgcaccataaaccagtcccatttctttggggaattttctcatgatatgccacttgcaataccggtgttttgagtgtgggaaaacttgttgtactgctctaccaatagtcgagtcatagtcagtaataatcaaacccggttggcgtccagacattgcttcaagccaagtagtgaagagccaaatgaaagtggattcagtctcatcagcaagcaaagcacaaccaaacaacatagactgtttgtgatgatttacccctgtaaaaggagcaaagggcattttatattgatttacttgataagttgtatcaaaggctacaacatcagagaagcaactataagcaattctagatcttgtgtcaacccagaacacactgcttagcctatcctcttcatcaacctgaatggcataataaaatgaagaatcattagcttgcataatcttaaaaaacccaagtagactttgggcatctataccaaaagagctcagccttcctcttccaatgtagttaacattggaaaatgacattttcccaaaactgttaccatcctcatcagccaaaccattcaaagaactacttatactcaatgtaggagacccaatagagtcacttaagctcttgttctgatcacattcaagcttatgcgaccttagaaattgcctcattgttggagtgactagctcatggttatgctctttctctaattttgccacaaaccatttcccatcatctcgttttctcacagtcatcagtgccctgcaaccttccctagtgataggcctacaacgcctccttttaacaccattacaaactgtatccaaatccgaacccgaacccttcctcttcgctcttctatctcgacgaaaaccttctttagaacaacaaaactcccgggatatgattgaattatcctttttttgaccgataatatgagttgacacggacactaaaacctatctccttagcataggcattgtaaaagtttctagcatcatcttcagagctaaactccatacccaaagtgggtaaacgtaatggagcttcaacaacatccgcaacacaatactcattgagtacttcttcaatgcccacataagaatccgccatttctttagattgttcctctacctcttccatttatgttgtttatgttcaaaacctttgacattgtaacaaaaccaaaatgtaatctttagttcagaaatattattaaaatccaaaactaatgaataccctttaaagctttttgcatattgattatgtttgtttactctaatgttcgaaaaatgcacacagtataattacaaactatgatttgtagtctatacaaaccatacacatatgaagagttatgtgttatttttcattttaaataaagaacaatattagagaaatatgaaaaggaatacgccataacctgaagaaggatgaggcaggccgccacggacgataggctgtgagaggacgataataacgctctgctatctcttaagactcttatggattagaagcgttaaataataaatactagcggttgatgagttttactgtaccagaggatctaacggctatagtttcaatatctatgtaaatcattttagttgccttttttttttttattttatgtcattgagtaatatttagcaaaaaataaaaaaattatcttcaaataagttgctctccatgtaagagcacacccaatagatgttttaaatttggttcttctctaaaattaagaagagaatatataaatttatcaaaaatatgacatacaacataaattttttggtaattgaataaatattatgtttcaatgttttgtgattttatcaaaaaaaaaatatttttatcttatgttgctcgtgtgtgagtaatttatggtatttatattacacttaaggtatcaaactataaacccataataagattttgataattagataaatgttatgtttattatgattttatcccaacaaaatagatgctttttttttacataaatttacaactttacatcaatgaataatcctactctacatgtaaagtaacactattcattattctaaatttattttattagtttctttagttttaaattaatttttatatgtgtgcatttaacgagatttttaaaaattaagtacgaaagtaaacaagcttaagaaagaaataaattagagataaagagactagatttttacgtggtttgagtattaacgaactctagtctactaatcattgtgattaagctagaaaagctcaaaggtatttcttacaagagtttatgctctagttgaagaatcttaattcttaatacttcttccctaaaattaattttccttcttcgcatgaaggagtaatgctctatttatagagaagaatcgggtatgggcatacccaaacccaatagggtttaagagcaaattcgagaaaaaatgagcaagaagaattaattaaattaagttttattgctagagcaccaagaaaataatccaaaaaataaattcaaaaaattcggtacgattggagcttctaatgttaaagaattgaaaagtgtagagtagcgactcaacattaaaattcaacgtcagggctctgaaaggtaaaaactttgacagcaaggtcgtgttcagcttgtttagaggcaggcttaacattgggatccaatgttaaggcattggaacccttaaatcctcgttgtccgacattgggcttcaagcaccgcgacactacaaaggtagtgtcacgacgcacttgtggctgaatgacacatgtcgtaacacaagagaatgtcgcgacttgcctcttttaaaatgtgaaaattaggatttttatttttttaaaatgctatataaaggatccttttcagcactttttacgggaatattttaggagtacgaaaattaaaagcgaaaagtggctctgaagactttcaacatttatttttcgaagagttcttctattttctttatttttcttatgtttttaattgctatcggatgttttcaatgattatgagtagttagactttttattagagtgttaatggagattgtttgacactttattttggttttaatatgatttggttctttcctaatatctatgtgcatatttttcattcgtacataattacttttaattgcttgatcactttaaatattttataatttcaatgcaaaatttgagaagtaagtgttgattatgtacgtgaaatagacataaattttgatataggacgagagtacatatatggtttatgtagcatttaggatttttatgcttaatgcctcctatgtgtttaaatttatcacaagagtaaaaaatagattgagatttatatgtcctaaccgaatataaatctttttagtaatttctctataacatgaaaaattagaatttgagaattaaattataatggcaagtttgttgagaaatcaattttcaaacttaaagactaataatatctaaaactaatttaaattaattaaaaaattattgtaaattaattttaatctgataattagattttaattagaaaaataagattctacactctaccaaaatttgaattttatttcattgacaaactatttttaaaagtttaacaaatggcaaaattaggcaacacaggggagtacgcattgcatactcccctgcgcgttaggggggaaacctgttgaagggagaggctgcaatgcatcctacttgaccgaggaaacttggtcacgaggtgcttcaaacaaccccgtgtccaagaattctcggacatgcactgtttgactccgcgtgaatggcgagtcacacccctcgtctgcgcgcgtccacctacaacctagcctagatattttttcaacttcaaaaaatcataac

SEQ ID NO: 218403 - DNA, 5150 bp, Cannabis indica
ctgatgcgatcatcttcaatgtgaaatgtatcagaactctcataatcctggaaaaaagcacaactattaagtccataattgataattgagaaccattaatatacgagcaatgacatgaattataaccaaaagggcattaggtagaccttgaaaaacttgatgctgtgaacaaggagtgaaggcatgagaagagaaaaacccaattaataatagaaaattattagaaatgaaaagagttacataattggattattctcaggtacctttgcaaagggttatcagttccacgagtcaaatcaattttaacattgcttacagcaacatcttcttctgttaatgaagtgtggccagatttctgattgaaaaaacctactcattagcataccacatacacgctaattgttccaaattggaacataacgtctaataaaaaataaaagaaattggacctgggaacagattatatcttttggggtgatggctttgaagtagtcaatttcctcctttgggacagaaaattcgttgcagaactgaaaatcagatgaaatggtaagaatgtgaacaaaacttggcaatagatttctctaccgcggtgataaatagctaccttatattcttggtaatatttatcataccttgtacaaatctctccgccgaattcgagttatcaaatctttcgcctcctttaactctggctcagaagatgtttcaattgctttcaaaattgagtcatccaactatatttgaagataaacactcaatcccataaacattaaaatctagttatcattagagtaatagcaggtgatgtttctcaccttccagaattcggatggtctaaacgcccttgacacaatttggtaactgctatcagcttttctgagagcatctacaaccatgagttctattgcctgagaaaaagattggacccaagttacacaacagttagaaagtcaatttacatagaataaataagcttttgattttcccagatagaaaaagtaggcaaacttctaataccttcactttggcatgggtatagactgtcctatgcaagtcagcacgagtggcaaataacttgtggatggtcaaatctgttcaaaagcagaaaatataaggaaaaatgtgggaaacaactcattgttccaaaatgataatggaatattcaagatttacatacaatccttagcacgataacatatttggttatccattactcgcatagattccatcaacctgcaattcgaaaacataatcatatattggtcaacagccccaatcaatacatagtttctgtgtgatgaccaataatcacacaaattttgagttaacttgaaattattataaactacaggcgctaagggtttccgaagaaggcaaaacctttcaaattgaaaattgcagccaaggccgcaagcacgagagtcacgtacaatgtaatcaaatctgtttaacaaatagtattctttcaattaaggaatctcaaataccaaatgatccaatcaaatgacattttaagtaaaaatcaacgttaatttctggtggcttacttgtcaacatctattcctgttcgaccattagcaacaatatcatacaggaaggactttggcttcagactctatattttaagaaaaatggcaaaaaagagaaatggatgaggatataatacgaagatgcatgttaaaggtaattatattatgccatgagaacaattttaaaaagtattgccaaaaaaaaacacattattgagaactggagtgcaaaaacttatgcgacttacagtgagtaaaacatctttaggacaacaagtgatcatatcctgttcatcagaaaagtttatgagcattacgtgagagtataaaacatttaaaagtttaatcttagtacccgaaaattgcaaaccaaaaataagagaacaccaaaaatgagacaatggaatatgtctgaaagcattcatatcagaaagaaatccttttcaaatgagatgtgggaaaagctgatcttagtaaccaaaattgcaaaccataagagaacatcaacagtgagacagtgatatatgtctgaaagtgtacatagcagaaaaaatcctttccaaatgagatttaacacaaccaatactaaattaatatgtttcgatcaataaagatacagtagcataactaaccttcactctcttgagtgtttccggatcaatatcaatgttgttttcatcaaccatgtactctatcatttttacagacatgttttcgtgagacctgaaaacatttcaattcttagcagaaaattagatgagtttctcaaatgaataataattactggtcacaaccaggtaaaaaaacgggttcaagctattgtgaaggcccttcacagcttctataatgtataaagtttattatttttattttatgcttcataaacatgccccgaagacaaaaaaattcaacagattttgtgtacaattcaaacgactaaagttgcgtgaaccaaatgattagtgatgcgtagattacatcttgtttcaactattttatgcaaaatatagcctaaatagattgaataatgtgagtcaccatatattgccaccaggtcccatggacatgacctcacgctcaaataagtgactgaatggtccatgcccgacatcatgtaataagcctaaatatattcaatagaagattggtcaaattagtttgcttaagctaaagtatatactgtgtgactggaaaagttggcatacctgcaagttttactgtctttatatcatcatgttcaatttcgagctccaatccctgtaaggatggcatgtgaaggaggacatattttcattcctatgctcaataataaatgttaagcataagatggaacaatagttacagcaaagtcctacttggtaagctgtaattttattaatagcctctccagcaagccagtacaccccaagtgaatgctcaaatcgagaatgtacagcaccaggatacaccatgtgtgtcagacctggataaaagtgaaaaaaaatgataaagtcaaagatgaacaaagtatttcaataggagggaaacaatgccacattaagttgcctctgaaaccagtttaatataggaataccagattgcctcacatattaactatgggttaagaattttattacagctatcataaatggattccgacatcttaatttattgaagggcaaccaatcagggttcctccagctagctaaaagaaaacaaaaccaaaactcgcctcactcttccaattactgtagtacaaactacaaagacggcattcccttggaatagattccatcaaattttgaatgttgctttttttgtgaaacacaattcaaaacttcattacaatcacaattagtcagccttgaaagtaatttaacttaattttggattatcaaacattacttattcacaaaataccattttgtaattgttaaatgtctctttataatttttattttgctgacaccagtgaaagaaagacacatgtttttagtaatggtcaactcaccaagctgcttcaaatcccgcagcctgcagtttgtagttgtgtcatcagaaagaagtggcaatggctaaataagaaaatgttctcaaaagaaaaatgttgttgttgctggaaattcaatcaaacttacctctgaaactgtggtgtatcaatgaacttcatgaacagctagaaagaacagaaacaaaaattagaatatatataatcttcaaatatatacatatataactataactctataaaaatactaagttccaagtttgcctaatttagtgcttctccctccataatcaatattttgttagtcgaattaattaattatgaagattcttccagttattcttcgatattttgtttattaaattgaaaactaatattctcttctaagaaaggaacagttcataaaccaattttcatagcaaggctttcgtgattagcattttcaaatattaaagctcaaagaatattcaagcacagagttaaaatattttttatatcttttgagttctaatcttccgtagaaactggcgaatggttacttcatcatcatataaactcttatcgcaattcagattatagccagaaaacggagccattaaaaaagaagtaatcaattatttttaggaaaaatatttattacagagaaaaaacgacgattagagcggaaaaatagtcaataattacttctgtaattaaatattataaataaatataagtgaatcaaattcaaattcaacgaaattattcacacaccggaaatagtaaatgcataaaatgtaagaaataaatataaatattgtaaacagttatcttaacaaacagtatcgaataaatacagcatctatttagtatataagaacatcaatcgattatacaatccttaaaatcaaaatatacatcaaaaagacttccaagcgtcgtattataaataactaattgaaagaaattgttaaacaacagaataaaccagtgaggaaagaaaaattaacaaaaaaaatctaataaatactattttcaatattattactcacggaagaaaaatcgaaacacacttcagcagatataccagaggcacttaaagctttttcaaaccaaaagcgatttaagtaaattatttaaatgataatacgaaagaacaaaatcaaaaacgaaaactaagattcgaagctatggaaacgaaagttgatagtaccggttcgagatagatgtttccatgcacgttgtcatgaacatgcttcagagagcggcgatccttagagatgagctcccacacatcggagcaaggaggagtttccatttgtactgaatagagcaaaatgcacaagcgaagaatggagaagtagagaaccgaagaacaaggaatttggaaatattggctagagagagaaagagaaaagaagagagagaaagagaagtatggataaaagagtagtagagaggtggttactgagtggggactataaaaataagagggacaaacgacgacgagaccaaattaggagagaagagaatgttgttattaattaactaattaaattaaaaaaaactgaaggaagttatgttaattaattgttatttacctgataataatgcgggtaaaattgaacattttgtaataactaacggtgttt

SEQ ID NO: 218404 - DNA, 4908 bp, Cannabis indica
gaaatttagttgtaattataatcttttttaggggggaaaaaattagcgagtggattttaatttattgaaagaatttttatctttttcagtaattattttatttttaaaagaaagaattcttatgtgatattggcatatataggtgggccatgcatagcagcccactcatagttttaatggtcaggttacaaatgaagaaggttaaaacttaagtattagtataatttaatgtcaagttagtcagtagtttgtttatccttaattaatttattgtgtgaatttcgaatctatgatgattgatgaatgttaaaactcaaagtattagtataatttaatgtcaagtttcacctattttatttaatttgtaacagaacatgtaatcaagacttgttactcaattttaccaattaagatgtgatgcaattgagtactgttagagtatagtacaagtgtaagaatattgaacaatttataagagtgtgactaactctactcatcactatagtaggttagatatagcctcataattcttgtgataatattgtattcaatcactaaccaaattgtgtgcacgaaaaaaaatagtagaaagttgcacgagatctctcatagtgcctagatcaaaacaaaataagcgagcaagtgtctcacatgtaaccgctataaatatatatatataaaacaagcaataatatagttccatttattagagtatgagatagaatctcataattattgtcaagcaccataagtgacttattgcagtgctctatttaggattgtatactgctatatataagtaatgtatactacacattacttaatattaatatggttttacacaataataatatttatttaattttagtaaataaggaatataattataaaccaatttataaattgcgtttcaaatggattattcatgtggtatatatactttcataatcacattataattttttaaaaaattaatacaattattatatgcgtgcgtgtataaataataataataatctgaacctctatacgtacttctaattaattgtaattttcttataaagccactttattatttcccatttgtgtcgttatcttatttctttgaactattttaatattaattaaaaaacttatatatttatatatttagttctgttctacctagctaatatatatatacgtagatctctcacaaaccatcctcactactacatatactactactctttctctcttctattcttctacatttctctcacatttatttatatatatacatcgatcttttatttatatatatacatcgatctatttgaaaagaaaaaaatgagtagtttattatctaagaaagcagcatgcaatgctcatggtcaagattcttcctacttcttaggatgggaagaatacgagagaaattcttatgatagaattaccaacccggaagggattatccaaatgggtcttgcagaaaaccaggttaattattatatatatagattatagaaaaatgtattatatatgaattaaaattttcttacaattctttgtttttggacagctttgttaccaccttctagagtcatggcttgctaataatccacatgcacttgggtttaaaagtcaaggtcaatacattttcagaaaacttgctctgttccaagattatcatggactccccgaattcaagaaggtaattatcattagatattctataaaaattaatatattaaattataggaagaatactaaacattattatttttcttttccaaattcaatgtgcatatatataataaaatttggttacagcaggcaatggttgaattcatgtccgaaataagtggaaacaaagtgagatttgagccgcaaagtctagtgctcatcgcaggtgcaacctcagccaacgaggccctcatattttgcctagctgatcccaacgatgccttccttctcccaactccatactaccctgggtacgtaacctaattaattaactttagttacccttattattaatttcattaattattctatcactacttttcactttaattagctaaacgtacgtacgttagtcgtagtaaagtcactaataatgccacagctagctttcactgggtcccacttccttcgtgcatacgtgattcgggttctacatcaatcatcataggatattataatatcttgtttcttattcattttagtatagataaaaattgtttagcctattttttttaaaagatggtataccttatatgacttagttaattttaaaattatttataaattttttaaaaaaattaatttttttaaattttaaatattctgaataatttatagtattgtaaattatttaaaattttctaaaaatttacaaataatcttaaataattatgtacttagtttttgcagatttgatagggatcttaagtggcgaactgaagtggtaatagtgcctattcattgcaaaagctcaaatggctttcaaatcacggaagagggattggaacaagcctatgaagatgccacaaaccgtaatctaagagttaaaggtgttttgattaccaacccatctaatccatgtggcaccacaatgacagtggatgagttgaatctcctccttaacttcattgaacttaagaaaatccatctcatcagtgatgaaatctattcaggaacagttttcaacaaaccagactttaaaagtgtcatagaagttctcaacgagagaaacaataacaacaataatagtactaatcaaatcatgattcgggaacaagttcatgtcgtttatagcctttccaaagatctaggactccctggatttcgtgttggagcaatatattcaaatcacaagatggttttagatgcagccacaaaaatgtcgagtttcggtttggtatcttctcaaactcaattcttactctcggttatgttatcagacaaatattttacgaaaacatacataaaagaaaaccaaaagagacttaagagaaggcataaaatgcttgttgggggtcttaagaaagcaggaataagttgtcttaagagtaatgctggattattttgttgggttgatatgagacaccttcttaagtcgaatactttcaatgctgaaattgagctatggaaaaagatcatttacgatgtgaaactcaatatatcacctggttcatcgtgtcattgtaacgaaccaggttggtttagagtttgttttgcaaacatgtccgggagaacattgaagctcgcaataaaaaggttgaaagactttgttgctgatcatgatgagtttaattaccacactaaatatcaccaacctactacgtaataggcttttccacctatcatttcacatccaccaatgctatcagctccccatattgtaagtacagtttatatatatatatatattctcttctcttatatatacgtataaatgaattattacacatgcatatacatcaataaactagtatcatcatcaatccaatcgctcggtagtttttttcaaaaaaaagagaaaaaaacgttaatatgatcattttggaccggtattaattaaaatgcatggtacaacatgttatactgaactcaattttcgattaattttttcttttaatacatatataatcaacttcaaaacaatttctaacacgaacaaatataaaaattgtaacaagtcttgttgtaacacttttatattgggttatttttaaagtttattttaactaaaaatcaattctaggcattactttgtacaaatctagaaaatacaatgtcaaatttattatttaataaactatttaattagtaatttttataaaatacagaatttaaaatagtatttattagattgttaatattattaagaagttatttgtgactaaaaatattattaacatagaaatctgtaattaaatgtgtagttgaggcaaaacttaaaactaaattagtaatgaattgtatctaaatactagcattttaaaaataatatttagttaaaaaattatattataattaaaaatttgttactaaacaaaaactgtttttgcagtgtgattgaatcgtctttgcctctgaattaatggtttttacctagctagcgaaattccccaattacaactaactgttaaaattatgttatatctgtttattttttaacgatttgatggatcagaactgtctaaaaagtaggcagaaagcaaaccaacatatatatgttttttaatggttgttataattgttattaggaacaatttttgtcagctaaaaaaaataatttacggtataaatatctaagtttaattttacgattgtaaataaatatttaaatttaatttttaatcgtaataatacttaatttatatttttaaaatttttgtaagtacctagtctttaactgttaaattattattcaaatgttatttttttattagtatatttaaagtaagttttaaataaaaaatacatatatttaatgacttagaccaattagagatttaacttgacatttaaaggtaaggtatttagaaaaattttaaaattataacttaattgctctaaaaaattaaacttaactattcatgtataaattactactaaaaaaaactttaacataagctataagagaaaacaaatcattgctttgtcaaaaacaaaaattaaaagacactaatagttctaacactacttaaaatgttaaatcactattaataatattaaatgttaagtcatatataatttaatataatattttttttttttgaaatatggctataaatattaatttattaatcttccttggttccatgcataagtactgtatctaattaaagaaaataattattttgtgcccacgtgttgtatgcatatataaattatggaagtttttttttttttgaaaaa

SEQ ID NO: 218405 - DNA, 3894 bp, Cannabis indica
atattggtaccctatttggctattactgtcatgcatgtttcttaaaattttattggatttaactaaatacattttagtatttgccatatggaacaattcttgaagacatttctttcttcacaagtaagtgatggcatgaacatggttcttaggcttacatgtctctcaatcaacaaagcaataaatcaagcatttcaagataggagtttctaaggaaaggaaaaggaattttttttaaaatagacttgtgtgatatatatatgttcagatattaatttatattgctgttcactttgtaattaaattacaatgtaacatatttatattaaatttgttttaaaatattgtgataagtagtttaaaaagtaataattaataacaaaattgacacatggaccatttaatggatgacatgtggcctaatacaagtatgacacatggacaaatatgaatatgctacatggctgccacataggatgacgtgtcactgtacacgtcactagcttagtcatcatcatctaatcagataagtagggcccaacatatacttcacctacaaatatcaatacttgtagttgtaggtggacagggttttagctacaaataaacattattattattatttgtagcgactgcgattggaagggcttcgttggtatgttttggtttgttgcctaattaaatatcctacacatgtgtactttgattgtatctctaattcatcctcacttcacatcatagtctcatatcttccaacttacctctctgattttcttttccagaaagcttgtaaaatcattctcacccttcatctggaaaaatctctctttctcattgttaaaacatgtgaatggtaatctatcaatcaaatttgaatagaattatatgttccttatatgtttctcattgataagagaaataaacttcttgttacacttattatattatatataaaagtatgattaaaaaaatagaccttttaatataaagggtcttgtacaataatatataagctgctcaaactcataagagcaatttcattttcttcttctccagtatgatcaagttgccatataataaatagaacagatgaaagaatcaaatatgccgagtcacttgggtaaagttgttggattaaaaatcctactcgtgggcattgggcatagggcatattaatgtatatactattataaatggtgatggatgtaaaattaagttataaatatcaaaaggtattaaattattataaaaataatgtatgaatatcataagttaatttataattttatgagggactaaattataaatactgaaaactaattctataatcagtttataaatatatagtagtcctccaaaacactaaggttcttgtattttatcatttcttattagaaaaaaattagtatattcttagaagattaaaattttatgtgcaatctttgtcaataactttaagttagtgtttcttctcatctcatattcatattcatgttcttttttaatttaacaaagtttctatataaatatgattttaggatttttaatatttaatacttttaggagcatgcataattaaatttaagattatatgtatttttgagtatttataaattgagtcactcatatgaggaccatatgagttgtctcgtaatttatggaatcattttttaataaaaataagagttctaaagaaactctcttttacacttttttttatactcttctcaattgagtgaccagtgtaatcttttaaatcatgtttcaatataattactattatacttttattatcgaatttatttaattgtagttaaaataatattagtgctagtttcatataattattaattttaataaatacttagttgtaataaatatgatatttattattgtaatataagtcaattttaattagtaacaaacagtaaattttaatactatgtactattcggggttctgagtgttcagagaccgaagacgcacacctgatttgcctaccctcaagactggtctgtgcactattttattgtaatatagttactaattattatatgttttaaatataatatgtataatgttagttattaataaaaggataaatattattttgaattctgtgttttacaaaagttaccaattagattatttattttgttaaataataaaattgactttatattttttaaaatggtaaaaataggatcttgagctcaattttcaataattttatttttttaatataaccagataatttctaacatgaacatatattaaatgtaatcaattttcttataatatttttaaattggattattattaagttttattttaataaaaaatcagctcgaaatcctatttgtatataattttaaaaaatacagaatctattttgttatttaataaagtagatgttccaaaatagtatttacctataataaaaattacttattttacagtacaaatattgttacaattatgattaaataaattaatgtgacgattgttgccatatcttaatagtttatgtaatatatattggatatgattcatgttttattgtagcacaataacatattaatccattgaaacatgttgtagggcatgcatgtttttaattaatatataatgagtacgttgtttacacatagttgttcccgagagtgggggaaaagaatgattgatgagagtgagataataagagagaaaatgaggtgagcactgagcatatatatacaaagaggagtgtttaattacatatatatgaatatgtatatatgatgatggtgatgatgataatgatgatgatgacaaaagagagataaaaccatgcaaatgggcaaatgggcgtgtaaatattagggaattgatatagagagatctatcatatatatatatgtgtgtgtgagtagtgagtgtgtcctctgtaaaaataggtgaggggtcagtagtagggtgagtcagaaatcagaggagtgacgtaagaaaagaaaaggcgtgcatggaagcgtgtgaaggagattttggaattgaatgggaaaaaccccaaaaattaagtgaggagtgagaagaagaggaggagtagagtactatttttcttcacaacccacgtctctctctaaatcacaccacattgtcttatatatggcggcacagactgagagagagaaaatatataaatatatataagcttacatcagcatcagtaccagagctgtcaatcggtttctgagaccttcgtaccaatatcgtctctatatatatatgatatatggaagaaagagaggtcagagccccatcattgtctcaattatcactctagtacaactaaacactctcctaaattctcccatcaatataataacccaatctctttaatattatattgttattggtaggattaaatgttaattattaaataatttaataaaataatttttattctctagttgggttattgaaaactatgtctcttcagttttcttgtaacggtcgttcttccttattctctgattgtattttctctaatattaagaggacttgtaattatgtagcccataatgtagctaagtgggcatttacccacaagatttttggtaatatcccgttatccaccatctcttcaaacattttatgtaatgaccgagatgtctaatttattcttaatctaagacgcctttattcaaaaaaaaaataataataaaataattcttataaaatatcactaatcaatataaaattttacttttaaaaaatattaaacaccaagatattaaatagcaatactcatatatttatatgtatacactttcaatgggcaagactatggtaggacctaacaaaagttcccaaccgtagggaacttttttttaaccattgattttagatcatgtg

SEQ ID NO: 218406 - DNA, 2397 bp, Cannabis indica
gccaagatagacccaaaagtaatgcaatttgatccttgcttagtgtctccaaacctgctaagtaaaaaagtttaatgtcaaaattttgattggtgagatagaactctttaattgaagactttttccaggcagactttgttagagggtattggaggatggcatgggaaacggtatcaatttggcttttacagttttgacagtaaggatggggaagggattttttgttatgtaaattgagggagcaaggaaggaggttgttaaaggctttcccaatgaaatattttattttgggtaagatttttgcattccaaatagctttccaccaatgtttataacaatgaggattagaggaagaagctgctgaaggagaaaggtcggagtttgcaagatgataagccaaattgatagtgaaatcccagagtgatgatgaccctatatgagagtgtcgttatgggtagggtcaataggaattttgagtatttcgtgaatttgataagagggtaagcagtgttgcaaggttaaaacatcacaatttccatcatgatctggaaacctggaaataatctgattagtggaatcgaaatcatttaggaaagatagagagtgaaggttcgggatccaattatggtgagttaaagaaatcattttaccatcacccaccttctagaggagaccctttttgagaagctctctaccccaaaggagacttttccaagtgtgagaaggattgtgacctttaggagcatcaagaaaattattgtttttgaaatatcttactttgacaagggagtgaagaagggaagaaggattagtccaaattctccaagcttgcttggctataagggcttggttatggtggatgagggatctgaaaccaagacccccatagaactttgaagtgtaaatactcgaccagttcttccagtggattttcctgtcattgttacaagatccccaccaaaatttagatataagactctgtaaggagtggcaagtcgctttggggagcttaaaagaagacatagcaaaagatgaaatagcttgaacaaccgcttttatgagggtttccttgccagctttagaaaaaaaaaattacgttctaaacatgcattttatagaggcaaccttttggagtaagtaatggaatttatcactggtcatttcgcaaacgcaatttgggaccccaaggtagttggcaacaaaccccccattacataaacgaagggagttcttgaagttatattttgctacagggatggtattgggggagaacatgatgggagatttttcaaggttaaccgtttgacctgtagttttgtgataaaggcaaaggatgttattgatggtgttactggagtgattagaaacaggtgtaaacagaatgctgtcatcagcaaaatgtggtgggatatttatagaaatgtgaatattcatagtgaaataagggatgttgatgtggtcatggatagccatggggatgatagccaaaaaaacttatttggggcgggttctggtttccaggcctgccaagcattatgaatgtcttgagctggaattgtcgtgggcttggaaagcaacagacaattcaattccttaaagaacttgttgctcaaaagaaacccaactttattttcttatgtgaaaccaagtgtaataaaaaaagggttgagtgggtgggtcaacaattggactttaaaggttccttctgtgtcgaggccaaatgtgtgggaggaggtttagtgttgtattggaaagagaaagaagatggtgtcttgttgggcttctccaacaatcacattgatgttagggtggacaaagttggttatcccagttggaggctcatcggtttctatggtgaaccaaacagaaatcgcagagctcaatcatggaacctccttcgcacgctctcttcctcttcatctctcccgtggtgtataattggggatattaataatgtgctcagccaagaacacaagaaaggaggccaaccgtacctcgtgtggctgttggagggcttctaaaaagccattgccgactgtcatttgctggacttggacctcacaggatacccattcacttgggaaatgagtaaaggctcgatgttatgggtcgaaattcgcctagacagagctcttgtaaccgaagcttggtctcaattatttcaaggtgcaaagctatttaatcttgaaacttctccttctgatcatcactctccaatatttcttgaaccaataattgttgatcaaacaacaaagagacaccgtttttgatttgaaaatgcatggttaaaagaatccatgtgcttccaaattgttgaagactgctggaatagggatggtgtggggggaattttgaattaattgaataaatgtgctgattctttagcctagtggggca

SEQ ID NO: 218407 - DNA, 3296 bp, Cannabis indica
gtttttgggcaccttcccaaaaacactatatttaagacaactcttacctattctttaaatgtgtgacttgagtttatacctcaacaagtagtgatgtgagaactgtagagttatttatcatataattatattagttcaaggcatcctcacttgggcaaaacactataaatatggggcaagcacaatttgaaagaattattcctctttcattcaatactgttctttggaatttttaaatattcattacttaaatattctcctactaacttaagtattagagaatttttatccagatgtctttaagttttcgcacaacattgatgatgatcgatgtaatttttttatagaaatcaaggaataaagacagatttagcaaaacatctttatagtggatttgttactattgatgattctacaccgagcgatttttttgacattaacattaagaccatctcgttaatgataatctattgaaataattaagttagttttttgaataataagtatatagttaaacattaaatttattataatatatattcctaagaaaatatataatacttgaagatttttatcaaataattaaatataaaattgcaatttgcaacatagaattcacactacattagatttctaaatggaggatatgccatttttacttgggaaagaaatctttatactttattcgtcatggaagagtactcactttaatgtgattttatcaaatttagaataaaaatttatttgttatatgttcgatggtttctaataaaagaaaatattgttacggtggggttacttatttatttatttattttaattaaatatataatttagggacataactttgcaataaattaagctaacaaaatgagttattttttgtggtttcatccattactaataataataatgctagtcattataccaaacgtaggaattaggaaatgtaaattgaaactcaaataaatctcaacatcaaaaaaaaaaaaaaataatgagaatctgttaaaagggcccctgagtgagtctaacatcttcagttcactccacaagtgtaaattgtgtaatgtaatcaaaaccagacatgttattaattattacattatatctacaacaacaacaacaacaacattaatttaatacatatccctctttattattcttccaaaaaacgacatccaatcctcagtcgtaggtacaagacctcttcttgaatttgatgggtttggtcttagtggaatcgattacaacagggcaagaaatgagccttttgtgctttgttctaactagcttccccactacattccctcgtgatctgatctcaaactttattatcaaaggaaccactgcaccattttgtgaaacaattaaagttgagccagctccataaagaggaaccttacttcctcttaagtttacctccacacttcttctgctcttccttggttgataatactttttcaactttaataaaaaacaaataacttgttagaaaatgattcccctcataatactaataataacaataattggcttatatttgtaatgaaatttttacctgaccggttgctatagtgatctcattataaattagattgattggagttgagctaacatggataccaaatatggtagctgggttatatacacttagtcttaatgatccatttactgttagcatctttgttgggacaccagaaaagtctgaaccagacccaatatacgttattcactgccaagctctgcatacacacatacacatacatatatattagaaataattaggtacatatatttaaattaacaatttttatagaatacctttagcaatttgacaccactagtgacaatgtttaatattgttctccaattattgctatatttatttcttttttacttaaccagaaagggactaatattagcaatgctctatatattaatactattactccattaactgagtacttattcaaatacttttcttctctacaatattgtcattttccttactttaccctctaataatattacaagtcaactttatgtataataatatataatttctcaccaactaataataagaagaagaagataacattagttttaagaaaaaaaattaaatctttagcaaaattagagaaaaatttggtaccataccttgacagtaatctctgctttgaaaggcttactagcaccccaaatgatcaaacaaaagacagtgaagagaacaaagaaactaaagagagcaattaaggcttgaattcttcttgagtagtttttatcaatatcatcataagctccttcttccaatatcacattacactcaggccaacccttgtcattatttttatgctgctggtgtttcctgctaccgccttttcgacccgaagaggaccgaaaaatccctgaaaatcggctggcggaggaatttcttgagtggcggccgaaggaggagtgagaaggtgagtcagtaggggtgttgttgtagattggtgtggcctgcattgatgatgacttgtctccatcgtgagaatcccttgaagggctttgtacgtagtaaactggtctctttggagaccttgatggtgaagatggagctaagcttgtgatatcggaatctgattttgctgaaagcatcttttttgtatatgcttctaatttcttggatttatgacccttctcctgtaaagataagaaaaacacagtttggataagaaaatgaaactaaatatatacacccttttgattaattttcaagaaagtttgagacttttttgctcttaccaaggattgaatgaaaaacacaatatgggtttttgtggttctctctgttttgattgtagagagacagagagattggtatagagagacagcgagaaacccttctctgttttatgctcaccaatagagaagagagaagaggctgttaaaagaagccacacgtaagaaaaaaaaaaccaaatataaagaaaagctaaagagataatatataaatataaatataaataagaaataaaaaaattgatggagtaatttttttatccttattttttttctaggtgtatatgtagtaattatttaaaatatttagtaaaattttgagattttttaagaaatttaacacaccgaaaataaaattcaactagtcagttgtaacgtgcttttattttatatgcgtgtgaaatagaatatttgaacactgctttttatattgtaaattattttgatatttttaaaatttcgcaagatgtcttaaataattataacataaacgattatataaaaattagact

SEQ ID NO: 218408 - DNA, 4015 bp, Cannabis indica
aaaaaaaaataaacatgagagactacccagaccgagagactcgaagctttagttttcccgagaaaataaccaattagtgcgacgccgttcaacggcgttctctcctcttcatggttgacgattgcttttcttcaatggtttttgtttctctaatctagggtttcaaatctgaattaaggcctgctccgatttctccttctctttgttttctgcgatttggggttgaagcctttcgctgcttaggtcaaggacacgccagagttggacgacttggttcaacgaggttctgtgttagagaggagtaaaggtatttctaacacatctcaaattgattttctttatgtgaagaatctgagattgttttgtttcgatttttcctatggtttgaatgtataaatctttattataggattgttgagtttggttttggcttgccctaatttttgagttcaatagtttgaacatgaacaatcaatatattttacgtatgaattttattaatatggaacgttagaactttggaaattcatctaagtataggaaagtgtttagtatctctgtttctgtgtttcgtttctttagtgtagtgtgcttgtgagtcttgtgttgtggtataccatggcatcgcccgggtgggatagaggaactgtagaggaggatattttgaggtttcagattgaagaggaggatctcgaggcagtagcggtggttacagggggaggcgatgatggaatagatgataggtggtgtttggttggacggttcttgtctaatcgggttattgattttgagaagatacagaatatgttggcttcattgtggcagccaggtatgggaatgtttgttaaacagttagagcattatagtttttccaattttatcatgaagtggatattgaaagagttattaaagggagtccttggacatatgatagaatgcaattaattatagaaagattgaaggttggtggggacccgaaggctttggctttgaatactctagatatttgggttcaactccatgacatggagcctggctgtatgtcggaagttacagttgcaaaggttggtaatacgatggggaaatatgtagtccgatccgaaaaactttataggcgtttggagggattttcttcgtattagagtcaccttgaatatagataaaccactgcgtaggagaatgaagctaacaaaagaggatggacagtggttctggatcaattttaagtatgaaagggctcctacgttctgctacatttgtggtataattggacattcggagcggttttgtcaccggttatttcaccagtggattgaccaaattgtgaaaccttatggtgatttcatgaaggctcttccctagcggtctcatcagaatattggctctcgttggctttgttccagggggtggaatccgccgatggcagctggtgctggaacttgtggtatggaagatacgggcggctcctctggtgttgctggagctgtgaatagtggagctgcaatggacaattcggtggacagtggagatgcgatgggaaggaggcccgtgcctagtggagctgcattgggaaaaaatcctgtacatggtggagctaccacggggaaaaatccagtgaatcgtggagttgtgctgggaaaatatcccgtgaatggtggtgttacggtggggaattatcccgtgcatggtggaagtgtgatgggaaaaaatcctgtgaagggtggcgtggaggagggaggcttctccgtgaatggtggtgtttcgttggaaggtggtcctaagaatagtggcgctgcagtggtgtgttgtcctgtgaacagtagctctgaattgggaagtaatcccgtaattggtagagatatggtcatttgtcatcaagggggcatggaaggatatgtatcagatttaagtgacaccttggttgttatagataataaaaaaaaggaaagtgcaaagtcaaaataggaaagagagtgatgatgtggcgcatggagctagtgaatttcaaaaaaactcattattggcgggccttggcaatggggctcgccaatcattatgaaaatattgtcttggaactgccgtgggcttgggccaccacggaatgttcagttcctaaaggaaattgtggttcaaaaaaggccgaatgtggtgttttagtgtgagactttaagtaataaaggtaaaatggattgggtgtgtagggctttgggttttgagggatgttttgttatggaggctcaaggtaggagtggggggttagctttactttggaggtatcaggatgatgtcaaaatggattcattttctatgaatcatattgatagtgttgtttcgattggtgggcattgggaatttcggtttactggaattttcggggagcctaatagaagtctaaggaagaatacatgggatctcttaaggacgcttcatggacggtcctcttctccttggtgtttaatgggggattttaataacgttcttagccaagggaagaaactttggggtttaccttaccctgtgtggcttatagagggatttcaagaggcgcttcagcaatgtggattgattgatttagacttgtgtgggcatccttttacttgggagaagagtcgtgacacagcaagttggattgaagcccagttagacagagcaatggtaagcggtgtatggttgaataaatttgtgtcctctaaattatttaatcttgagatttcaccttcggatcactaccctttacttttggatgttctttataatgaggttgttactcgggtaaggccttttaagtttgagaatttctggactagtcaccaagattgtgaattagttgtcagtagcagctggtcttcgggacatgatataatgcaaaaaatacatggttgtgggcgcgcacttcaacaatggggaaaggacacttttggccaattttctacgcgtataaagcagtgtaatcgggagataaaagaatataaaaagagacaagatgaggaaggcaagaggctcttttttgaagctaaaaaagcgctctttgcgattcttaatcagcaataggtgttttaatgacagaggtctaaatagttatggctgcaagcgggatatcagaatagaaattttttccactctaaagcttctactaggagacgcaacaaccaaatcatatgtttgaaagactctacggggaatgagaggcgttgggagaatggccttgaggatgtaatggtggagtattataggaagattttttcagctgagccagtacattggtctgaagtgctggaatatgtgaatcctaatgttcaggatgagcataatgttgaattgcttcggcctatttcggatcaagaagttaaggatgctgtctttcaaatgcatccagataaggctcctggccctgatggtatgaatcctaagtttttccagaaatattggtccattgttggtcacgatgtgatcaataccgtgaagcatttttttgctactgagcaaatggcggagggaatgaataatacgaatattgtgttaatcccgaagaagaagaagcctgatcaaatgagcgagttccggcctatttctctctacaatgttattgttaaagttattaccaaggtgattgcaaatagaatgaaggggtttctctctaagattatatgcaaacatcaaagtgcttttattcctgggcgattaatcacagacaatattatagtctcttttaaaattctccactatctgaagaggaagcaagttggtaaggatggctttatggctttaaagttagacttaagtaaagcctatgacagagtggattggcattttttatgcgcaatgcttactagaatgggttttgctgataaatgggtgtgtctaatttttgggtgcctatcctcggtgcggtatcagattgtgagcagtggacgaacaatgggtcctattgtgccaagtagagggcttaggcaaggtgatcctatatccccttatttgtttcttgtttgtgttgaagctttatctgctattattc

SEQ ID NO: 218409 - DNA, 3810 bp, Cannabis indica
ccacgcctctcaggtttctctctttctctctctagatatacgtatgtatcaaatccatattaatattcgaatgagaatgtagaaagctaagaatctagtttctgagtctccttatcgttctcgttgttgatttcatttataaatgtatatataatgattttgacgagcaatttgataatgtagtgagtaaatatgagagatttttagcttaagttagttcaactggtgaccaatttggtgattaatatgatattgatcttggaatatgaagacaagatttgaaattattgtgtgctattttgcaggtaattccatggaaatttagtggtacgaaaattgtgaaaattgaattgcaatgttccttgaggtgcataaggacaaattgtagtgttaaatcaagaattagtactggtggtgataatgatgaaggagctttcaaacaaaattttttgcttcagccattgtggagtctcagtaaaagtttttcttttaagtttggtttgtattctttaagctgtagatggatacctaaatggaaaaagtattatagtagtgtccatgaaaagattaactgtttggaagaaaatacaccacaattgtacattccttttgtccgagtagttgttggagtgatgttggttatgtcactttcggttgctattagcaagagtccatcctgtaagtttattttaattcatttttgtttgatgatttaatcaacaaggcttgccaatcataatggttccagcattttcttttcagattctgcaggggctctaactgaggagaatcttctcttcttggaggcatggagaacaatagaccgggcatatgttgacaaatcttttaatggacaaagttggtttcgatacagagaaaatgcacttagaagtgaaccgatgaacacacgagaggaaacatgtattttttttctctttatctttgtcagtgatgtaaactttatgttttgatcttcacatagctattcatcaacatgattcctttttagtagtttttgaacagatacctagtggacatttaccattatattgatgctctatttcctgatttggtatttgaattcagatatggcaataaagaagatgcttgccacacttaatgatcctttcactcgatttttggagccggaaaagtttaagagtttgcaggtattatgctgtttgaacttgtaatattctgtttatcaggtatgttgtacatttgtttgggtgagataaagcctttatttaccatctatataattagcaatatcaaataattttctatctcattagattctctagaagtaatatacctaaaatctgccaatatcttctttgaaggcagtctggatcacaaggttctgttacaggtgttgggctgtccattggctaccctacaaaatttgatggatcccctcctgggcttgttgtaatatcagctgttcctgggggtcctgcaaacaaagctggcatttcgtctggggatattattctgcaaattgatgatacaagtacagaaacaatgggtatatatgatgcagcagacaggttacagtgagtttcttatctcaaccagctgctttactttagaattttcgctcgtatttcttttatctacttggctctactgatgaagaaatagttttctgttcatatttctaagttctaaattttcagcaagagccaattttttggttactcatttatgtttaatttcacctaatctctataacagaggacctgaaggaagtttagtgaaattgaccattcaaagtaggtcagaaataaagcacctggatttaacgtaagttcaatttcaattttttctccagaaatgctgtgcgcttaatatctcgatgctttcttctaacattttgttttaaggggaataattttgtgctccccaaaagtcttatcattttcttttatgatgtatgttattattctcaagtgtaatatgcattttgtatgcggtaatatccaaacaagataagataggagaacaataggactgaatgaacttctgttgataggcaatatcactattacattaaaatcacctaagagttcaagagcctggttctctccctaagctgtaggtcccctaaatcaaccagaacatttagcactagcaaaattacagaaactctccctcagcacacaatctaccttagatttctacaagtcggtatatgatttgccatgttgctataatatactttgctactgctgcttgggttttagcctaacatagggtatctttttttttgaaaaatcctaacatagggtatcttatcagtaatctgagcatcattcttggagatttggttcagtaaaattttcaattttagatgtaatcttccttcattttttaattttttcatcttcttatttatgtatttacttattaattttgaaataatttggattatcttttctatataggcgtgagagagtttcattgaacccggtgaagtcaagactatgcaagttacccagctcagggaaggatgctcctttgattggctatattaaattatcatcattcaatcaaaatgcatcaggtaatatgttacaaaaagttttgtcgatccatttcaatggttgataattgtttctttgatcaactagagagaaaaagagagagagaacctgtgatcttccagatcaattgtgtactccatgaccatcataactatagggaggcacaattcagttttatattgactcacatggaattgctctcaattgttttgacattcagttattaggcctccattacctctggaacttcatttgtcaacttcctctgaaaatttgcatcctatgcaggtgctgtcaaggaagcaattgatactttacgaaaagatggtgttaatgcctttgtgttggaccttcgagataataggtgataggtcatcatccacagttattttcgactttgccatttttgtaagctatctgaaagcctaattttggtgcagcggcggtctttttcctgaaggaattgagattgcaaagatttggtaagctccgccaaagcctcaatgtcaacgagtttcctttattgaatttgtatatctaatatctcaaaatttcacacatcttatttacgaccatttagattgttgtattaacactttccgccattaaagtggtttttctcttattgtattatgcttaacaagttctaataatcaacattttctattcaggttggataaaggtgtaatagtttacatatgtgataaccgtggtgttcgagatatatatgatacggatggaagcaatgcaattgcagcttctgaacccctagttgtgctggtaaaatcttctttttacttgcatgttgtgttctaatttataattatttacagaatctgatgtacttcagttgagctgtgctcgttatccaccatcaacttgtgctaaaagatcagtaacttgaataactgacccaactgagctttctgtaggttaacaagggaaccgctagtgcgagcgagatcttagccggagcattgaaagacaataaacgtgctgtattgttaggagaacctacatttggaaaagggtaatctatttaattatttatgatccaatccaaacagtgcattattgcacaaatcaaatcacatattcctgacacattgcattctatccaacttcccagcaagattcaatctgtttttaagctctctgatggctccggattagctgttacagttgctcgatacgaaactcctgctcacacagatattgacaaggttttacacaaacaccaaaaacatctcttacatataaatgc

SEQ ID NO: 218410 - DNA, 3075 bp, Cannabis indica
tatttttgtcatcataaattattaaattattcaaaaagttgtattatatatctcttaattaatataacaatataaacatttaaaaggctgaagatagattttgatagaagaatattgattgttttgaaattcaaaatacaaaaggacaatttgacacaattgtcaattacatttacatctacttcaaaaagggtccaacatttaattacaaatggacttattctaccatgacttgaatgtcaaaaaagcaatacactcccattcttttgaaccacaacacatttttctaaccataactaaaatatacatacatactatttaacatgccaattgatctctaaaaggagtgatctcttcaaagatgggaagtcttttagatctaaatgggcctctctcattcatcaactgctcaagcccattgacaaaatcatcatcaaggcccaatagatccaatggcgaaggagggtttcttgactcaagatccattaacaattcttgggcccttttacgtgtctttgaatcttcagaacccggaagccttccttgtaatatatcttgtaaaactaaattggcatcactatatcggccttgtttcataaggcataggcccaaattgttggccttatttgagtctggatcaatcatttgggcttttcgataaacaacttcagccatcatatagttcggcttttgcatataggcccagcccaaattcccctgaattagaaaataacattatagttagttagatttcaatttcatttttatatacttgtgctttaaaaaccataaaaatgaaaacttagatttaattatatatatcaaaacaatgagagtatgagtatataataatacttactaataaccttgatgtttcttgcttaacagaaacttggaatttcttgccatgggatcgagctgtcttggtaggtttcccatgaaaaacctctccttgataaatcaacctaagctttcgttttagtaactcaatttgctcctcaactttcccacatttctacacattaacaatattataaatataaatgtacaaactacactattatatattatcaactcaaagtacgtatacgtagagattaatttaattatgcatgcatgcatgtacgtacattaaaatgtatacacacgtatgtatgtatgtatgtaccttgtatagatcgatgaggacattatcaagtgaatcctgtgcttgtttagagcagaggcctctaaaagacaaaacagcttgaatggcttgttcagatcgattgagctgtttcattactacagccatgtcttttagggcactgtctactctatctcctgagtttatggcttcccaaaacaacactaatgccccttctggatccttttcaactagctgtttttaccatatagtatagaaaggaaattgagagtaagagagtatatatagtgcaatcatgtatatgactatatatgtcatattaattaaatgtgctataaaaaaatattataattcaaattttaactcattacacataatttaattaaaacactataaaatatcacgaactaattataaaatattaattatagataatattaaataacctcttgtagaaatgctagtgtatatatatagtcacgcatttttaattaatataatttatatatttataacgacaatattatattattataatgagcattggcgcattaatgtgtaattagttagtaatttattataatatttattaaattataataaataaaaactaatattaaattatacaaataataatattctacttgatatttatatgtatatttagcatttccctcaggaacttttgagaaggtaataaaataatggttgttggaaaatggtcccacatcgtttttcatttcgttacaccattactcttttctatatttagtttacttcctataatatttaatttttaactttataattataaccactacaaaactcatataaacaaaagtaatcatagtttaattttaatatatactaaattgttttgataattttccttttcccttttaatatatactagtaaatataaaagggccatagcgtctataagatataatgtaagttatatatgtatattacatgaatataacaaggtttatatataaatacaaattaattaattatattaaactaattaacaatcatattttttcaaaaaaataaaataaaataaaattaatgaatagttatgaaattgtaaatgaataaagataatatagatacctgagcatgtttggctctaacataaggagtatcaccagaaggaaccttgtgaatcacatgataaagatcatcctttttattagtattattgctcatcatcatcatcatcttctgcatcttcaaataattatttacttccattatatatatatatatatactctcttctaatactcaaagaaaagaaaaagaggagagatttggatttagttaatggtacggcttggttagatgaggaaggttatatatagacgacagctcttatgaggtggtcagtgaatctagactcttatacgtccaaattcactcctcttattaatgtgttcaacaaccaatgtactcttctctagcttgtctgctcgacacgtgccctattttcattcgatgttatgtcatcccttcctcttcttagcttgtacatgattattaataattagtcctatatcctatcaaatgagtcttgattcatttggggaaaaagatattccatattttatttttatgattataattttcattattattttatttatttttagtttttgtcggagactatggaatagttttctattatattatgttggaatagtcttgataatgatcaaaactacatatgtacaataatttgtgaccgattctaaggcaatttaccaaactgccctttgttccctcataattgcatttaagtatagaaagaatattatagaacatacattatatacatatcctttacaatggttattatatatggtaccttcttatctcaacaagctagattaggatcatttgttaatatttagttaatttttttta

SEQ ID NO: 218411 - DNA, 12448 bp, Cannabis indica
gcttagttccttagtatataataaaaacaattacataagataaattattgtactaaaattaataatgttaattattttagtcaaaaatatatatatatatataaatataaatagtatacatataattattaaataaaattaatatacggtatataaataataaaattattaattaaaaaattatataatcaagataatttttaataaattaataaagagtttaaactttcgaattaaaatttttttttaaaaaaataatgagataaaaacgtagggaacctctccagtctcctccagttgagtccagtgtaaaaaagataaaaattgttggcgccagaaacccaagtaagtgatataatcaaggattgggaaacctaatgctgcggcccatcctaaacttaggctgtcactcttaattattattcctcctctccaatggaggaggcctcgcaatcgcaatcgcaatcgcaatctttcatctacgaaaccctaaccactctatccttcccttcctccgaccaatcgtcaccgtccgatcaccgtgaaccctattctgtctaccgaaacgagatttcactatccactattcctttgccatccttcgacgccgaagcagccgccgccgcccctgattacttctccctcgatgctgccgcagatgaacacttctccctcccggttccagaatcccccgctcgctctcgtggagccgagccgaagacaccggctcctgttgaggacgagcggcgccttgagagcagctggtttcgtggcaatagtaaattcaagagccctatgcttcagctccataaaggtactactggttttgaagtagaaagcggttcaattcatgagatactggatgtttaattattatttatttatttatttttgcagaaatagtggatttctgcgaatttctctctccaactccagaagagaaagattcccgtaatgcagctattgaacgtgtttctgatgttatcaagtatatttggcctaactgcgaggtataatctgattctttccctctatttggggcatgagttctgttgtaaactctgtacaacacaggactcaaagcacatcctatattaagatcaaaccgccagtaagaaaaacaatctaaaccagaaaacaggaaaccaaaatatgaatggaaacgctgtaaagaacacaagcaacttatatactaggtcgacccaatagagtggtctacttcctgtcttctcccatggagttccaatttgaattatatgataaaatagttctattacaacctatagcaaccatttcaatctatacaagattcttatcggatgtccccgaagagacaatctatacaagattctccttgaactttgcaaaactgaagcctcaaaactttctttttcaaccccttacaaagccctttcaaaagtgtttcccaattctccccctaaaatgacttaacgtttactagtgattaaggctcaagccttttataagagttaacccaaataaaacccaaagaacaagagggaaagatggttgctaacaaaacttaacaaactttcatttaaattgaaaattcttaactaagagttagttttatgtggattatattaccacaagttccttagaagcttaattatgatgacttctacttgtggcaactttgtaggtagaagtttttgggtcgttcaggacagggctttatcttccaagcagtgacattgatgtaagtatgtcgccctccatcttctttgttatatatgaagttgtggtgctgttgcagtagaccactattaattacttattgttttctcataattattgtgcattttttctaatttttatttgttgccctctttgatgaactagttatgaccactttttctatctttaaactaatgtctcttttgttagttccgtccatgttggggaatagaataaggagtgtttatcatttcaaattagtaatggattttcttacaaaggttgaaacatgtttttgtggcccaacatgattacaccaatcaggaaagaatcaaaataacacttggctaatgagttttatgtccttacaaaataaatttgtttctctagtgtctctatttgataactcacttccatctaacagtatgttacttactgaagcacttcacttcatttacctcggcaagtaatcactggaaagagaattaggtttatttggattccaattttataacagttgaaatgctaaatgtcacacaacaatagatctatgttctctttcccattcctttccaaaatattttcatttacaatttataaaattatagattagtaaccatgctatgaagtctgatttgaagttattttgttggatactgaagtgattttgaagcaataattgatttttggccatgacattttcaagaaattaaataaataatgtgtgtgtgtagtttttttccccctttcatacttattagctaagaattgaagattgctggtgtttttcttaaatgatgatggcccatcatttttttttttccaattaatgcttttcactgattcctgccaatgataggttgtgatcctaggctcaggaatccagaaaccacagcaaggtttgcaagctctttctcgggcattgtcacagaagagcattgcaaaaaagatacaggtgctattttttttttatttataatcatcacttttctgtcaacagagagttttctttcttacttttggctatccattcttcaggtgattgcaaaggctcgtgtgccaattattaaatttatagagaagagaagtggtgttgcatttgatataaggttcgtcaaaaactcttttgcaacagtttaaaatgtttaatgtttgacttggaatcaatcctgatatcgtagatggtttacttttgtattgtttactgtcttaatttttcacaatttagaaatcttttgatgtagtttttgttgtataattaaattttagtaatcatgttttaatctgtgggaccaaagtggatttgcattaagtggaattcttataacaaattagcgaaattaaaccaggtggcaactgttggtcacttgatcattacctaactgtaggttggctgctttatacatgcatcattttattcagttttgtttgctgagctgtagtatagtctttttctcaatgaagcaactgtactttgttcgtcaaaatgaaaattacaaacaaaagagaaggaagattatatttctttcataaaaaagtggaacaaaaaccgtactcaaccagaataaagaacagacataaccccactcaattacaataaaagttctcattaacttacagaaaacaaaaatgaccaaacaattacttgcatttatttcacaggggaacccaaaacttgatccttcctcacaatgtttccagaagacttacattatctaaaaaaatcaataatgtcctctaaccaaactccccacataacagccagcactttacaactcctcactagcctgtacttcagaattccacaaatggctgcaatttttaatgtaaccccccacaaatcttgaactaagaaatcatttatcatataatcagataaccattagtacctgtagagtttttgcaagatgaggttttgcactatttatttctgacaaatagactactgaatttatattttgaacaaggaaattgaaagctagtgtcgaacttttgattttgtgcttagaagccattgcaaaagcattttcatattaagtatgttctgtgtcattagccttggttgatttaatttttgtttttttgtaacagttttgatctacagaatggtccagtagctgctgagtttattaaggtttgttacctcatcttcatataattatatttagaaagaagaaaaagatggtatgcttactttttttttaaaagttgtgaatataataatttgtaataatttgaaatgtgaatgtggatacgcaactttttataagactgatgatgtaaacacacaactttgacttctttatgatggttgaatagaacactggtgtttggtgtcttttgttgctagacaaagatgaccattggttaacgcctctacaggcaagttataaaatttccaaatgtgtaggcgttttattaaaaggtaaaactgctgcgttagaagtcagtgtatcattttgaatagcatacacaactaaaattaaaaactaaagctttcctatctcatatagcagtgaaataaaaatagtagatgtggtaatcttaatgttctattggtcacattgagcaaagacgttcctgtgattgaaaaatcttttggtcaatcatctctttttaactttttgattatgaaaatttgaggcctgtgtttaatggttgtgtgaatttttcgattttatattataattgtctttgcttttactcctttattccaagattgaattggtttgttgtaagatacacactactttgtccactgagtctaattgtgtaagttggagaactcattttacttttatcttgttgctacatcacacatgttacaatttcagaatgcagtttcaagattgcctcctatacggcctttgtgtttgattttaaaagtgtttttgcaacagagggagcttaatgaggtatgttcttatacaccaagttcaatcaaattaatatggcattatttttacctgtaaagtatatcactccagtttcctaattcaatatttgaacatattattaaggtctactctggcggattaggttcttatgctcttctcaccatgctcatggcaatgttgcaggcaagtgattctttataagttcatttaaaagttgatctgtgattgcatatatacgtatagtctgtactctgtaggacctgtgtattccctgcagaacttgttaattgtacaattaagtaagcaaagatgcggaggagaaacatagaatcgttagtataaacaaataaataatctatgggaatatgtgacggatgtggtctatactttgctctcatgaggtttcttcatgaatgagacctacctagtcactagcttatgtttcctacctccccaaaattgtccaagtcagggggaggatccaatgtcaaaactacttaaaatatgaactgtttcttcttttttggtgccactaaacttttccccctcctacactgacaaaagaaaacgtggggaaaaaaaccagtaaccaaaacaagtatattagcttttatcgtggagtatttttataaaatgatagtgtgccttgagttccttcattgttggaaacgccctcataacttgaatctatgctgtcttttttttttttgctttttattttatttaatcttatctgaagtattagaatcttactaccattttataaacgtaataatctactaccacttatctttcaatattctgtggtagtgtatattgtcatagggagaaatgttgtaatttgtttaaagaaaaagcaattctgggacatcttcatattagaatgacaagagtatacctatgacttagaagcttgatgaatcctttgggacaatttgtccttttttgctccctatatggtcaatgtttagcaattgttttcagtacagctgaatacagtgaaaagaaaatacagtcttttacctttactctgtgttatttatatgtatgactggaccacctataagtattatgcagccttttagatctttttggttcttttatgactccatatgataaagttttaagaattggtttttaaagttaaatgcattggagaagacagttctctacatttatgctgatctggttggtgctgtgtcttttatatatgccttgacctcattgtcaacttattttgtgggttttgggaatgaggtagggagactggcccagggatgatggcttttgatacatatcacttatcagtatcatacattagagccaaatccatttacattcttaacttttttttcactaattttgccttagctatcaatctaacacattttcacactgcagagcctacgagaatcagaagctaacttaggaattcttttggtaagtgtttcttaagcaaacgcattaaagctttctttcattgctccattgttttcaaatattaaagtcagttcacatggaatctaactactaggggtgggctgttgttactgctgattttacttcagattgtgctgtagaatgttattgtggtttctatgataaaatttggtgttttgtgagattaaaatttgtctatgtagagaagtttttgtgtacgcatgaatttatatatttgtacttcttttttgttgtggaaaataggtaaacttttttgacttttatggacgtaaattgaacacaccagatgttggtgtatcttgcaatggtggaggcaccttttactcaaagaatgatagagggtaaacagaagcttcttgttccttttcattgttgcttgttatgcatctcagtcatcaatatacttaaatgggttgacttttctgttttgttctctttgatacttaggcatacttgcacctcagtcatcatttgatcaatcttgcaatgaaatttgtcatttttgtagacatctaagatggactgtgtaatctagccacaaaaacttataggatttttgtgggactttttcaatgaagagtgtaatgacatttatgatatcatacatctgtttatttatatgtttctgaagttatttacttgccttttctttcagtttcttaaatagaggacgaccttttcttatatccattgaggatcctcaggtttgttgccataatttgctcgtacttataagttacagctgtattcatcctttgattgaacatgcattttcttgaaacaaaaacttgtatttttatggtaaacaaatacctcttctgaaatgtttgtcacaatttgacaatgattttctgggagagaaaaatcctttggaaacatgcaaagtcgatgattttgttattatttacaaatttgatgtataagtttgtaaggtgtataaacagatcggatagaattaggaaaataaggaagatactttgcctctctaatggtttctgttctatttcttgttactgagcaatgtttctgttttgctgatgatctctaggctccagagaatgacattgggaagagctcatttaactattttcaggtttgtttatcttggctttctttttgcatggctgttggttttgagtacttaatagttcatcattttgcacttgtgatcttacgctgactatcactcctgtttcttcgcttcctggtagcttttttatgacatgtcttttgctacattatgggattggtgactttagggtttctttttttctgtgtgtgtggggtagactttagtatcattaactagagatatatatcttagtatcttcattcattttatgttccacattgaagaaactgcctcactgggtcaacctgctatgaactgctctaccaccattttcattttgaattgttatctataaattctgcagtgtagtaaaaattgacatcattttacatcatttcatgaagcgttgagtgtctaaattatatgtttacagattaggtcagcttttgcaatggccttcacaaccttgacaaatcctaaggtcgtcttgggcctagcctccaacaggagcattctaggtaccataattagaccagatgcagtcttgctagaacgcaagggaggatccaatggacaaatgacttttactagcttgcttccgggagctggggagccattacactcccagtatgatcaccaggagattttgtgcaattggcaattagacgacgaagaacccctgccacggggaggtgatggtgctggtgagttttttgagcattcctctggtaagaagaggaaatcctcttctaagaaggataaacgtgctaagaaagtaaaagagacagatgggggcagttccagacatcgagaaagtggctctagaaaagatttagtcaagaaaaaacgttggagacacaaccaagctgatacgaatggttatggtcgtagcgtttcccaatggagtcactagaattcttgttttataattgctaatatatcttggctgctctgttgtcatcaaaccttgtcgtcctgaatagaatgatgcaatgcctgaacagaagacgtgaaagcagccttcactttctagacaggcgtatgcggtaatgaagtctagtgtatactttccagatggccttaaatttatagaaagtttcggatctgaaaccttaagctcgtctggtatcatgtaacgtatttagctgagcaacaattgttcgtcagttttgacgtagagcgagcatatacagatcattcttatgctgtattctttaacctagttttaggcttcattttttgttttcttttttcaagggacgaataattttcagtggaatgacataatttcttgaaaatattactctacttgagattcagaatgctagattgtggttattgagttatctgtagttttttttttttttttttttttttgtgatatagtgaaatttgcatttagaaaaagaaaatagcacggtatgacgcaaattgtcgttgtaatgcatcctgcctggcaatgttgacaagtaggatattaatattggctttaataacggcgatgtaacttgataccaaccaaatcttgcatgaaagaaaaggtttatactaaatattgaagacgtaaaacagaatagtaaaaaaaaaatggatttcatttttgataaaaaagaaaaacattcgaaagaaattaggatgaacagtgaatagattgcaataaaaaaaaagaaactttgttcccaattcaacatgcgtcaccttttgtctgttccctcccaggatgccagctcaagcttttgcttctgccagctcacgcaccacctgtgattcacttcttcccaccgccaccgcttttcccagccttgtaggcttcgcacgccttcactctcctatctctcgctaaggaaacattcagtgaggtttttctaattttatggtatttcctattgttatattaagaatattattatgaaccgtaattttagttaaaatcttttgctcatactatttcacactcacattggaagaaaacaagactttaatttccttctcgattttcagtgattgacacaacacgccatgtccacacgttcttcttcatccacatcttcttcgtcttcatgtggatcttcggccactaccattgcatggatcggttatggcatagccgccattacagctgcagcaattggagcccgcttctatctgggtcgagctactaagttccgaagccgggtcgttggcattattcccgctcgttttgcttcctcccgctttgagggcaagcctctcgttcagatcctcgggaagcccatgatccaggtacccattattattttttttctttctacgaattgaatttacgagtttgtgtgatttggttaagttattgcagtgttggtctcaaattttaaaggggcttctgtttagcttggcgtaaatagttaccgacaatgcacttttaatttgttagaattattgaagaaaaaactgttctttcttttgaaatttatcatctcacaaagttaattgtttgtgcttacaagtttatgtcagttacatatggatctaataggtagttttttttttggttaagatctcatattcagagcattgtcattttgttttagaaaagtttaattatttattgagttcatcttatgcagagaacttgggaaagggcaaagcttgcgggttcgttggatcatattggtatgttaattaacttcttttcatcttatattatgacattgtgaaaaagcgaagaaagactctcttaggcgatatttctgtctgaaattttagggtcaagttcaatgtgttttaagaattatttcgattcaagtctcagagttattaatgctttagccaacttgtgttagtcgctgagtaccctttcaagattgttttgatacgtactgtagtagaatcaaatctctctttgatttgttctgttattcaagatccattctttgtgtgctggtatcaatcttcgtttcttagagagcgaagtttcttagttgtactaaaatatcccccgcaggaatgaaggacaattgattatcaaagagaattttgtcttgtttgtgtcaaggtttttggcataattattcttaacctttcctttaatcaaccttactgtatctcattgctcaattatctgtctgtctcactcatctagtatcatgttcatctgaagatttgttttttttttctttccggtagttgtggccacagatgatgataagattgcagaatgctgccgagggtttggtgctgatgttgtaatgacttcagtgtcttgtcgaaatggttggtatcttaccatacttgaatgttgatttagatagttttggttagattttgttgacagggtatcgtttaaggtactgagcgttgcaatgaggcacttcagaagcttggtaagaagtatgacatagttgtcaacattcagggcgatgagcctcttcttgaacctgagatcatagatggaattgtaaaagctttgcaggtatgctatcctctttcttttgcagtcttccactttttattcttaatatgcagaggtatctcatttgtggacttctcatattgggttttcaagttttagtctatagggaggaaggcttaaaattggaatttttttgaacttaggtgaagcttgggttgtaatatatcctatagtttacaattgtccatcttttgttaaatctgcatgttcatactggaatttgttttgtctaccaggatgcacccgatgcagtatttagcactgcagttacatctttgaaatcagaagacgcatttgatcctaatagagtgaaatgtgtgatggataatcggggttatgctatctacttttcaagggggttgcttccatataacaagtgagaatatgctccccgtcggcttgtttatcttttataatagcatgtatgaaaaccaatccatgtttacaagtgtttatcataccttgattctgtccaaaattttcaacaggttagggaaagtcaatccacagtttccatattggcttcatctcggaattcaggtaccaaattcaatctttcctgtgttacgcagagtgggtacaatttactttgtatagatgttggttacccatattttttccggtgatgtgtttggcatgtctaccagagctacgattccaagtttctccagatatattctgagcttgaacccactcccttgcaactagaagaagatcttgagcagcttaaagtccttgaaaatggatacaagatgaaggtacaatgagatttttactaagttaatgtcccttgaaattttaaagactagagttttattcactttttttttggccttttcactggaggttgtggagaaaattggaaaaacattctgttgcaatctttatttacttggaccataataaattactggaatttcaaagtagcccttaatataacacttattagtgggatgcatggtgaaggtataatgagattttacaaagataaaagtattttgaaacttaagcctacagtttcttcgttcttttcttgttttcttcactgaaaattgtgaagaaacttggaaacatgctgctgagatctttgttttcttggaacatatcacattaatgagatttcaaaccttatttataatttccttttgctcattacactgttcaggtgattaaggttgaccatgaagctcatggtgttgacattccagaagatgttgagaagatagaatctctcatgcgtcagaataatttgtcttaagtttttttccccctcgttggaagtgaaattttgtcttagtttgtatactacatatcttccttttcttttgaaagggatatactacacatctataattatagaaaacacaatatcaaagtcgtctatgtaaacttattattgtctggttcacttggttaaggagagaataagagtgttaattgagtaaccccatctgatttatttatccttttccagttgtaactcattctatgtaagtccattttttattcattattattatgacagatattgacatcccatttttgaagcaatttccataatttgtgcagtaattgtatgtaatatgtactattcagattgtcaaacacgaggaaaataatgtattatttctttcctagtgttgaagtattttgacatgttaattgctacattctctaaaattgttagagcaattggccttttctaattttaaacatggactcttttgattcgggtaaactttagttgttgagcatatattgactttgtatattttttttaaatgatgtaaaaaaattactaataaattgacaaataaagaaagaaggcggtattagtccaagtccctcggggtagctcagttggtagag

SEQ ID NO: 218412 - DNA, 5153 bp, Cannabis indica
atgtactatgagcaaaataatgcggattgaattgaattcaaaatatgaaatccgcactttgagtaaaatagtgcgtattgaattggataaacacgggtagtggcaagaccatgatgggcaacccctattgccacctgtccggtcgtcgtggagagtcgagtaggataacaaagcccaagtggttttagcgatctagggtttagatttgagtgaggtctctcccgctttcactttcagtctcactcgctcagttcaccccaaacctaacctaaaaccctacaataccattttcatcattcccacaacaatggacatgaatttcttttaaatctccaacttggttctatcctgctactttgaaatcttcttcttcatcttcaccgtttttaaaaacccattattcagctgtctttcaaatcaacttatctgagctatgtacctttacagcctcaccctccagcggccgacgggcatcgtatccgccattaatggaaatttctccggcgggaaggcacaagaaatagtcgttggcagaggcaaagttctcgatcttcttcgacccgatgacagtggtaagatccagactgttctctctgttgaaattttcggtgccattaggtctttagctcaatttagactcactggtgcccaaaaggactatatcgttgttggttcagattcaggtagaattgtaattcttgagtacaataaagagaaaaatgtttttgataaaattcaccaagagacttttggaaaatctggctgtcgtaggatagttccgggccagtatttggccattgatccaaagggtagagctgttatgataggagcttgcgagaagcagaagctggtttatgttttgaatagagatacagcggcaagattgacgatatcatcacctttggaagctcataaatcacatactatagtttattccatttgtggagttgattgcgggtttgataacccaatatttgctgccatcgagttggactactcggaggcggatcaggattctactgggcaggcagctagtgaggcacagaaacatttgaccttttatgaacttgatcttgggctaaatcatgtgtcgagaaagtggtcggagcaggttgataatggggcaaatatgctggtcacggttcctggaggtggtgatggcccaagtggtgtcttagtatgtgctgaaaattttgtcatttataagaatcagggacagtctgatgtcagggctgtgattcctagacgtgctgatttgcctgctgagcgtggagttttgatagtttcagctgctatgcacaagcaaaaatcgatgttcttttttcttttgcagactgagtatggtgatatatttaaggttactttagagcatgacaatgaccgtgtcaccgaattaaaaattaagtattttgatacaattcctgttacaacttcgatgtgtgttcttaagtcagggtttttatttgctgcgtctgaatttgggaatcactcattgtatcagttccaggctataggtgatgatgccgatgtagagtcttcctctgctacattgatggaaactgatgaaggtttccagcctgtgtttttccaacctagacgacttaagaaccttgttaggattgaccaggttgagagtttgatgccaatgatggacatgaaagtccttaatctatttgaggaagaaacacctcaaatattcacactttgtggacggggtccacgttcctctcttaggatactaaggccaggtttggctattagtgagatggctgtgtcggagcttcctggtgtgccaagtgcagtttggacagtgaaaaagaatattaatgatgagtttgatgcatacattgttgtgtcatttgcaaatgctactcttgtgctttcaattggagagacagttgaagaagttagtgatagtgggtttcttgataccaccccttcacttgctgtttctttgataggggatgattctcttatgcaagttcacccaaatggcataaggcatatcagagaagatggacgtatcaatgagtggaggacaccaggaaaaagaacgattgttaaggttggttctaatcgacttcaggttgttattgctctgagtggcggagagcttatatattttgaggtggatatgactggtcaattgatggaggtggagaaatatgaaatgtctggagatgttgcgtgcttggacattgcccaagtacccgaagggagacagagatctcgatttcttgctgttggttcttatgacaatacaattcgtatattgtcactggatcctgatgattgtatgcagattctgagtgtgcaaagtgtgtcttcaactccagaatctcttctttttcttgaggttcaggcatcagttggtggagaggacggtgctgatcatcctgctagccttttcctcaatgctggtttacgcactggtgttttgttcagaaccgtggtagatatggtgaccggtcaactttctgattctcggtcacgcttcttaggtttgagagctccaaaactcttttccattattgttagaggcaaacgggcaatgctttgtttgtcgagtcggccttggcttggttatattcatcaagggcattttctcttaacacccctgtcctatgaaaccctcgaatatgctgcctcattttcatctgatcagtgtgctgaaggtgtggttgctgttgcgggtgatgctctgagggtttttactattgagaggttaggagaaacattcaatgaaactgtaattccactaaggtacactcccagaaagtttgtggttcaacccaagcgtaagttgctggtaatcattgagagtgatcaaggagctttcagtgcagaagagcgtgaagctgcaaaaaaggagtgttttgaggctgctggagctggggaaaatggaaatggtaatgtagagcagatggaaaatggtgatgatgaggacaaggatgatcctctttctgatgaacattatggttatcccaaggcagagtctgatagatgggtttcttgcatcagagttcttgatccaaagacatcaagcacaacttgcctattggaacttcaggagaatgaagctgcattcagcatatgtactgtgaattttcatgataaggagtatggtactcttttagcagttggcacagcaaagggactgcaatttttcccaaaaagaaatgtaactgctggattcattcacatttataggtttttagaggatggaaaaacccttgaacttctgcacaagacacaggtggaaggtgttccgcttgctttgtgccaattccagggaagattacttgctggaataggatcagttctcagactatatgatttggggaagaagaggttgcttagaaagtgtgagaataagctgtttccaaacacaattgtatcaattcaaacatatcgagatcgactttatgtaggtgacattcaggaggtatgttgattcttttatcctttcttaggtgcataattcctgagaatttttagattgaaattgctcactgttttctgcccattttctttcacactaaccaaccaactacatcttgtctcatttcttgcagtcgttccattattgcaagtataggcgggatgagaatcaactgtatatattcgctgatgattgtgtcccaagatggctgactgcatcgcaccacatagacttcgatacaatggcaggtgcagataagttcggtaatgtctattttgtgcgattatcgcaagatgtttcagatgagattgaggaagatccaactggtgggaggataaagtgggagcaagggaagttgaatggagcacccaacaaggtagaggagatagtgcagtaccacattggtgatgtggttacttgcttgcagaaggcttctctgattccaggtggtggggagtgcctcatttatgggacagtaatggggagtttgggggcactgcttacgttcacctctcgtgatgatgttgacttcttttctcatttggagatgcatatgaggcaggaacatccgcccttatgtggaagggatcacatggcttacagatctgcttattttccggttaaggtaaataatcttttccttaaaagttgactgatatgcaatccccttcatgtgggttagctgcagtgctctaagtcaagctataataattttgcaggatgtgattgatggtgatttatgcgagcagtttccgacattacccatggacttgcaaagaaaaattgcagatgagctggacagaactcctggggagattcttaagaagcttgaagaaatcaggaataagatcatatgagaagctgtcataaaacaggtgtgaatttaaatggctttcatagaatcgaaattttaaatggctaatcagatgatgctcgacaatggtatatcgattttggtctgtatttgcagtttatgttagcactgagtaggaaggcaaaatatggtagtgagtggtgaatgatttggtgcggaataatagcttcattgaaagagaaattatgtgttacaaatcccaagtgtattcagaaatcttatggcttcctcgcactttgtaggttgcatttattacattgttgtaattaattagaatagatttttgctggttttccttacaaacttattgaatgattctcgactaatctcttattgaatgtacttttgtttatcaaggatattgtatccatgaagcatgattttgtcaatcttcttgtgcagttatttggtgttttatagaatattttttttattaatatattggtaaaattcagaagggatattggcggtaaatttttttgaattttatattttttaatggcaaaagtacttaaattgcacttctattttggttttgtattgttgatgtgtacatcaatgtataaggtaaaatttaagtggttgatattattttaaaatataaaaataaataaataataaaattacagaaaaagtaaatatttataattcaaaaaagctctaataactttctcttgttctctcgatatctctctttggttttcactatgcctgtgtcgcagccggactgaagccaccatcttcggtcacccctctcaccttaggcaaacattgctctctccatctccctttcactttctttctttcgctcggcctttgttgagataggccattttt

SEQ ID NO: 218413 - DNA, 5117 bp, Cannabis indica
gatatcaaataatttaaatattaactaaaaatcattaaagatccaaaaattaaaatgaaaattcagaatttttaaacttaaataataaaaaaattaatcaagaaagttaaaatataagtttagaaattagattaacattatttttttttttggtttcaagattagatgttatatttttttttttgttaaacttgctttaagttttgtttactttttagaattttaatgatttttacttttataataattattgaattaaatttatttaccaatgtgttattttagtcaaatttaactcaacacttaaaagagggtagaagggtggtagaaaagtattacaaaaggattaaagactgttttaaatcaaatcacattctgagtcaattatatatagtttaagctatatgatgtatcaatgcaacttcaaaaattgtagtttgtgtcagaaacatcattagtagaaagacatataatgaagaaaaaaatacatgcactgaatgaattgttgaccaagatgcatacatatgtggtaagaacaaaaaacttacacactagcatcagtcagtcagtcacacaacacaagctggctaatgaagtggtaaagaggaaattacaagaattcatgcttttactatactacactctacaagatcaccaacattcttttatccatgagcaacatagatatttctagtagttgatctctctaaatggggatcttctgtcagaatttgcttcaagtttcttcactgcaatgggactattcacattctcactctgatagccagagtgttcatcctcagtagagggcattgttgtctccaaaagatccattagttgtttgtctgaactggagatctcactaatcttctcactcaacccctcaatcaatcccaataagttttccctttctgatgataagttagtgacctcttcaagtaagtttcttctctcactcttgagctcttcaatcaaagcatctgactctttcatctttgtcttgaatctaaaactcaagtccttgatttccaactcttttgcctccaattctgcttctacttcgaatgcttgcttcttcaaaacatacatggagttttgctgcagttccaatttctgctctacattatggataccatcctcaagctcagcaaccataagcttcttctcttcaatttctactgcagccataatctgggcagcagttattttctcccacgcttcatgtgccagattaatctctgcctgtttcttggagagctctgaagagaaagaaattaatgagttgtttaatttatcttcaaacgacccaacaagctgcatcaactcatttattctctggttcttctgttgcataagctctttttcatgctcaactgttctttctgcttcaattcttgagagcaaaacttcttcaagttctcttctcaatgattcttgctccagccattcaacttctctctggagctgctctaagatcttatccttctctcttaaacttgctttctctgactccaaggacattgctgtttccatctcagttgagtaggcagcagcttctcttgttttgagattttgctctagtagctggacctggtgctggagattatatattctatcatctttttgttccagcatacattgaagatgatgtttttcttgcttagtgatttccccaacatctacctccgcaagaagagaagcttctaactctttacgtatttcatagttttcttcaagatcaaccaataagcctctggcagctgatctccatatgtatagttcaaattcgatttcattcccttcacagattttctcagccagttcagtgtgtgttctgtcgagttcaatgcatacttccctcagtttattttcaaaacactttccacttgcagaatttgttctcttaagaagatttcacacacagataattccatgatcatctcctcatacctctcaagatcttttgcattgaaagctgctgctgaccaatggcatccaacctctcaactcttcccaacaaagaggccacattctcatgctccttctcaatatccttctgtaatctctcaatggtagaattcttcatctccagctgctgcatcaatagggaagcattccgttgttctctttttcagtctggtctatttgagcctttccatttgcaaacttcatttgcgcctcagaaattgcttcttttaacaccaataacattacagaaatctcctcattctgctgcaagcttaaacagtgacactcttccaagtttgtttcaagctccttcagtcttgcatctttattatttagctgagacctatacttgttaagatctcctgtcatcatttccaattggtacctccattgagcttcttttgcctggaaatttgcaagaaaatctcctttggtctcttccaactccattctcagtgcttttatcattgcatctctaccatctaactcagacctacagttgtttagatcacttgtaacattttccagtagagaattcatttcagcttctttatctctgagactttccaactccattctcagtgcttctatcattgcatctctaccatccaactcagacctacagttgtttagatcacttgtaacattttccagtagagaattcatttcagcttctttatctcggagactttccaactccattctcagtgcttctatcattgcatctctaccatccaactcagacctacagttgtttagatcacttgtaacattttccagtagagaattcatttcagcttctttatctcggagactttgcttctatcattgcatctctaccatctaactcagacctacagttgtttagatcacttgtaacattttccagtagagaattcatttcagcttctttatctctgagacttgcagaacagacttcattcatttgctccacttccatcttcagcttcttaatcttttcatctttactctctaactgagacctacacatgttgagatcctctgccatcatttccagttggcacttccattcagcttcttgagctttgatatttgctgtagagtctccatgaatctgttttatctccatcttgagctcttttatcgttgcatctctacttgccaacacagacctacagttgctcaaatcagttgtaaccttttccagttgagagttgctttcatcctctttaaccttgaggtttgcagtgaagtcttcacgcgtttgctccaactccattcttagctcctttaacatggcatctttattttctagctggttcatccaatcagcttcttgagccttgatatgttctctagagtctccaccgatctgtttcaactccaccctgagctgttttatagtttcatctctactctctaactcagccatacaattgctcaaatcatttatggctttttccagttgagagttccatacaccttctttagtcctgagagttaaagaaaagtcttcacgtacttgctccaattccagtctgagctccttcaccattgtgtctttactttctaactgagaaccacacttttccaattcctgtgtcaatgtctcaagttgggacttcaattcagcttctttagccctcagaattgcagtagattctttgtgcatctgctccgaacatttgagcttgtttcgcagctttgcaacagaaggtgaacctgaagccttttggattagagcttcctgaagttcttttagtgaaaactgtacctcctgcatttcttgctccatttgtcttttctgatattccatctctttaagaagtatctcttttttgtcaagtgcatgtctaagagatgcaatttcttcattcctcttctcagtgaagcattctagttgggattttgcatcctggtaatcattgaaaacattgtcaaatctgctttgaacctcagaaaattgaacttcaagatactttctccggctttcctcatgagccaacgcttgggtacacgtttgcaaccggtcttgaaaatcttctgatattctagtttgagaatctagtcttgtttgcagtgaatcgatctcatcaatcatagaattcttctctagctcccactccttttgacttgccttgaactggtctctcatttttctatgcgcttcttctagatgagtaaactgttcctttttccatttgagctgctcttcaatcttcctcttgtcctcctctagtttgaataacacattctctctttctcctgcttctttggctccctttgcattcttctctacttcaaagcatttcttctgtgaaactgataaactccctttgaagacttcaatttgttctttgtaagaatgaatcagttgctcttgatccacattcttttcatttgccttctctaaagccaagatcagccctttattttcctcttcccatttcctgaacttgtcatcacaatcaactcgaatcttctcattcgcagcatttagacgcctgatgatggactccttttcattcaaactacattgaacatcttcaaacctttgtttcaacacagagagttcctgtgctttgtcattaatttcttcagcctgcttctcaatttttgaacttgctgcctgggcttttttgagttgctcattgtaagacctcttcaagttttcagatacttctgttttgcttttattctccacccggagcttctcaacctcagctttagcttcatccagctcttcataaaccctttcagtattcatttttctatcaacttcaagaaaagaaagaaattacctgttcaagaacgaagcaggcacttagatataattcagcaaaatatgtaaatctacatgtgtttgaacggttgataatatagttctaatgtatgttttctttccagaatacattttaattaaaagagcagacccgacttggtggaatcttcaaaatttctcaatggatttgacagagatttcaaagtatggacgctctgtttggttgcttggaaaatatgagaaaggaaaagaaaacaaagaattcctacattgacaatgttctaagaagcataagctcttcattccactaagcagggtataactttttagtgtttgctcgagtaaaagcaaaatcaactatttcggctgcattatctatttcgtc

SEQ ID NO: 218414 - DNA, 6058 bp, Cannabis indica
aacaggaaagcatatgttttttttgtaacccataaagattaaaataacaaagataacaaaaactacagagttggtgagaaagtttcttttatctaagaaaatttattgtttattctaatggcatctataagccttaacattgaatagaggctgacatgggagaaagatgcccactagacaataaaactttattatcagaaaagataacccccaattcattcaaatacacagtctgaccctccaaagttgagactaaagaaaatgaatctttttccactgaaagtcccacatattgagcccaacgtagacctactagtagagcaactgcttctgcttgaaaaactgaaagagaacctgcaaacgaaatagtttaaaaacaataagtacttttaattttcaaacccaaaaaatattataacataattgtaagtaatatagtcaaccaccaaaaagaaacccctttagtttgactctttacctaatttcttgttgatagtattttaatagtaacaaatagtataaatttaataacccaccacactaaagtggatcatatatctatcttaaaaatattataattattaaaattctttaaaaatttatccagaaaaatacaaacttaaaattatttaattaaactatttaaatttcagtcacacttgttattatttcatctctatgtacgttcataagtaaaattgcaagcataatcttaaaattaaaagaataatttaaatttatatttactatacatatttgggaattgtatgtgttatccaatcatagctataagaataacacaatacatattatactagaatggtttactttgtaatgctttggataaaggcgcctttatttgtttgtctgagaagaaagtaatagctctaaattcaataacattttgaggagttgatatcactgcatccacataaaattaatagctaagaactctgtctctgcattactttgctcactagtgctaattgaacttcctttcttagtttcatttatttttttttttgacatattttatcataataggaagagatccatatcttaatttggtgtgaggttcttatggttcttctgtgtagttttttttatttctttcaaaatattttgtccatgctgaaattaacaatttctcaaaagcttatttttaagtatttttgatgcatacagtagcacttctttaaaatttaaattctcttttgggcttgcgagaaaataaaaactcatttgcttccatatacattaggaaaaggaacatcagaaaattacatgtgcattgatatcgtttctaaaattacatattagacaatttcatgaaaatttctctatctcaaagcacatttttctttggaacttgtattagacgagcatatgttatatctatatgagtaatttgcggtataaatacttaagtttaattttcagttgcaaataattaatttttagcgacaataatatctaagttatatttttagaactttataggtacttagttgttaaatattaaataaattactacgtgacaatttctaattggtccaagtcatgaaatttaatttttattttttaaaaataatttatatgtaccaataaaaaaataacaagtggataaagatacgacatcaatgttcatcaatttcatatacttatagaattttaaaaatataaattaaatattattcctgctaaaaattaaaattaaataaattactatatatttattaaataattaaattaccatttaaaataataataataataataattaaattacagctggaaatgaaagccacggataaattgaatgtgtacaccgaaccaaggcaagagaattgattcggcgtaaggcgaaaggggaaccaggtggaccctaccctatcctataccctaccctaccctcggaagaagagcgtgaaatccactctccaatcagatatttgttttccgtgccacgacagcctggaattgatgccacgtaggccacaccttaattgcctcaaaaaatatcaacagacccacatttaactcattttgtactcgcccacactcccgtgtaagaaaatcacgtcccgcccccccttttttcgctttcctctcgctcctcttgattttagagagagagagagaaataacgcggtactagctactactggattcttcttctctctttgttcataaattttcagacaaggaaaaaattgaagcaagttaggatcaagggattaatatgaagatacagtgcaacgtgtgtgaggcggcggaagcgaacgtgctgtgctgcgccgacgaggcggcgctgtgctgggcgtgcgacgagaaggttcacgccgccaacaaactcgccagtaagcaccagagggttcctctttatacttcttcctctgacatgcccaaatgcgatatctgccaggtaccgattgaaattcacaatttcagctttttcctcttaacaattattgtgactattattgtttttgctgtttgatctgaacgattcaaattctggttagttttcttagttagtgttttcttatttttatccaagttttccatctgaattttgtcaataatatttttttagagattggttgtacgtgatgttccttggtctccggagaaattaggatcatgtgatactgttgggtggcctttccataataagtaataaatcaacggaacgccacttttttttttcaaaacagccagggaaaatcacgattttcctgcatatatatatttatataatattgaatcttaggagaatagttgtagactagtggtattttgtttctgaattcctggagaaattatgatgaaaggatcttcatggtgacctttcaattgaaagaagaaaactacatatcatgaaatatcatatcatttttttttattataacatgaacccgttaggaaagtgcttaaggacactacagtgatgctggtcatcactactaacaagggtgtgagactcacctatgagaatctattttgtttgggagtaatgaaaatattgacatagatttggcaattagaatatgaaccaaaaaaatagaataaaaaatattgcacattgaattgatatttcttcttattttttctaaatagttccaccaaaatagtaaaaatgtcattcctgttggttgacattccattactttacatcaattccagacaaaagaatacaatcaacataaattatttccctctccattccctccatttcacccaacctaacataaatggtgccacctgtattagtacgttccacaagtatctttgagcaacgataatttatgtagttgatgattaaataataatacaatcttatctcttcttagctatatacgagctcctcccgtgcgagtgttgtctaaatgagcttctagtgctgtctcaacaagttcttcctcggagcacctaatatgcaaccacgagctcccaatttgtgtcatctcaaagagctccccctgcatgagtgtagtctcagcaagctcatgaagtgtcaagtgtgtgtcatcttgtttaactcgagtgcaactagaccagatgtcacctcttcttttataagctagacaaatatctaagctattctccctataaataggggcagagcactatttgtaataggatgattcttgttgatctactattactctagagacttttgtgaggtaattgtgttacttggccaagcttgaaccgattcacgttaaaatattagtgctagtgtacgcattttattgtttacttgattagtctagcttaaccaacctgttgacaaagaccttgatcaacgcaggtgggtttaatttaaggatatgtgagactgttaaagacaaatagggttgagatggttcaggagtgagatttctagaattcccatgactgtatgtaattgaaacaaaagaacagttttgtattagactccacttattgtgatgtacatgtacataatgtgccgtatgagatggttttctttctattttaatggagggaactgttctcggtttgttgtattttaaggctggtggtctttggtctactccttatgggccattatgtttttagaaaataagatatagcttaatctttcagattaaggaatacagaagcaattctgcttgtgtgttggaatttgtaaacctcaaggctaggcagctcgaagttccttaacaagtgaggtttaaggattagagacatgcaatccagacaggataggcataataatccttatttaagcctcaagatcttacacttaggcagtctttgggtcatgtttgatgcgatgatgatacattgatatgtcctttcttgtttcaactttctttgcaaatttttaattttgcctttatctaataggccatataatttcttctttatttcttttattcttcttccatttatacaatcagttttgacattcaaagaacatcctttttgtcatgtaaaaaaatagaaaaaaataagaacaaattgtgttaattttctacctttttcatcacttctgtttgtttatacataaaaattatttaacatcaattaaattatgccttttattttggtcaacttaaataaatgagtggattgtcttcgcaggatacagttggatatttcttttgtttagaggaccgagctttactctgcagaaaatgtgatgtggccatacacactgcgaattcctttgtatccggtcaccagaggttcctgctcactggggtgaaagttggtctagaggaaactaaacctgttgagtccaagtcagtttctagggaaaaaggccttgaaaaaaaacattatcctgtatcaaaaagcgaaacccaactcccacctgttggggagtataaggcatcaactgtccatgttggcagtggtgttcaagattttgcagcaccgaagatgtcatttactgggggttccactgctgggagcattccacaatggaacatagatgaatatattggattaaccgacttcaatgagaattacgagttcttgggtaatgggggatcctccaaggtatgcctttaccttttagttataatttaattttgtatacattggacgaatgctaatttggctgcctttaacttgagtgtacctacaggtcattaattagcatcctagagtgtatagggggaaggggatcttgtttgttttttgtggtacatatttctctcttgtatcctctgtttggaaaaatggattataactgtgttacgatgtttcactttgtttgtaaagtccaaatatattctttaagtttgatttattgagggagtgaaaattgccttgttgtccaagaacttcagcctgtttgattattctcctgtattataggcatttttatgtgaatagccaatgcagtctttagttaccctttttgtccacaggcagctattgagacaaaatccctttcatggttcagcactataattgtacactcttctatgacactattaaacattgttaactgcttaaatttttaggacaaggacattttgatttactcataatccaataagaatcgttatatgtttgcactatcatttcagtgaagcatgattacatgcttctcaaccatgttcgtagtgactggacttatagcctttcaagtttaggcaatcatatttgttagttgcagttattttcatttgtctcagtgtttacagttgcaccagtaaataactgtgtatttcttgtgataaactttgtgccaggctgatagtggtaagcttggagagtctgagtccccaattttaagggcaggagaggaggagcttggcgatgatgaatgcttaggtctggtaccagatgcatcctggactgtgccacagatgccatctccacccactgcttcaggattgtgctggcctagaagttatagttcatcagattatgctgcgtctgtccccaatatgagctactcgcggctgcaaaatacatccttttctcaatctaatggcacaatcgcaaagcgtcagaggcaattctgaacattgctaatcgttccttctggtgcagtttggccattgtcttttttact

SEQ ID NO: 218415 - DNA, 2032 bp, Cannabis indica
aaaaatccttaaatccaacaatcccaatagttcaaggggcatttttaacgactttaaaagtttaggggcaagatttggtacatgtcaaagttcagaggacaaaaatcctaagtagcatttttttaataataaagtgtatttaccattttatgaggtagaaatagaactcttacaaaaaaaaaaccctaacataatctctttttctctccctctctctccctaaaaccaaaagttgaaataccaaaagtatcctcataactcataagagtccaaattctctctactctttactctttctttgttttctataataaaaaaacaaagcttgttggtttggttcgttaaagccatcttgcagccaaagcggcagttacggcaaaactcacgagcccaggaaaacaacggctgagatttcatcgatcaataaatgtaaatgaaatattatattcattcaaatattaatattttggagggtaactcataaaaacacctaataatttatatattaaattatttgtatctgtaagtaaatctatgtataaatatagcacatttattccaatcatccttaacgatctctctccctccaaacaataaccaactcccaaacatatagaccttcttcttcctccaacgcacacttttttgtatctccaattttcatgaactgaaaaaataatcattattttttgtttcttctatggctttcaaaggttctgggttttgaaaatatactttagatttatttatatataactagaaaccccagagagcccaaatcatgataatggaaggtaagtttttctttttggttttgtttagaatgattcctatttttgtttgatgcttttcaaagaaaaacgtgatacatatttgtttgattgccgagaaaataagttaccggtgagcaaaattaagaaaggaatacagaggaatattattcaaaatgttttttttctttttagcctccaaacttccaaaatggttttcatcctaagcaacatacataaatgttcgaagaaagcttttcaaaatgtttccttttctttctctttcattttctcattcgtatcccctgtttcccggtaaacccgcaaaagggaaagatttgatatttccgtttgattcatctacgcagagaccggagccgaagacaaagaaaccccagaaatggttttggaatcagaggggaaaaggttgggactttttggaaaaaaagaagaagaagaagaagttgaagaggatgaacaagaagacgaagaagcttctcctagaggtgttttggaaatccctattttgggtagagctgattccgacgatcacagcagtagctccagcgacaaaacgacatcacctttgtcgtcgtcgtcgtcgtcttcttcgacgacgtctcagtggagaagcgttttctatacactaaagaagaaatccatgagacgattctcgaccatgccgttgttggtagcgagctacgagatgtcgaggaagggaaggaagctggctcggattcgcagcgcggacgacgccgtttcggacccctttgatattcctattgccaagccctcgtggaggaactttgaccaatctgagctggcggctgccaccgctaattttagtcctggtaacaacacattttaactccttttatttatttattttgttttaatttttaaagctgaagttttggataaacaaaagcatttatcaaatgtcattaaaaagggtttaaatttccgaaagagaaaaagaaatttatggccaaacataggcgagtgagtgactgttcatgactttggtaattaggtttacggggtcaatggttttggtttctatcatttatggtctttaactacaaaaccagtagtactctgactaagaagttcaaacaagtatttactttttattaataacattgtcatttcattatcgagaatggttttaattcttcgttttgctttgaatagatatatgtatgtacatttattattattgtttggagggggcggtgttggttatttttatttttttttgt

SEQ ID NO: 218416 - DNA, 4997 bp, Cannabis indica
gagagagagagagactgcctaagcttcatctctcactaaagaaacccgaaaaccctacattcttagtaaactcgaaaacaaaacagaaacatcctctcagccctacaatctttcaaagccggagagtcgtatgattatgcaccaatttcaatctctcacaggaaaagctgcttttccattagcacttcttaagtgaacatgcagtttcagtacagaaaaaggattgtgtacagcactgtgagttcaatagcttaaaaaaatagtttcaacattatagaaagcaggtacataaacataagaattaaaaggatcctgaacaaagatgtgcttcaggtacataaacaacatcaaggatgaattaaaacagaagaacaactagcagatctttctttatgggattcactaactagcatctacagaaagtttttagccaggaagtttacagccatatactaagatgaaaagttacctggagctcaggtagtgttggagcaaaatttattagaaccagtttactagcttcaaatattccagttcgcaggccgtggctacaatatgaaaagaaaaccctcagccaaacaaattagaatcaagcagaagataacaggaacactctttattgttctcttttggagatagaagggtgaggcaagcgaaaccttgaaaattgaccaagaattgcaggaattgaacccctatataaccctcgcactccaatctgtggaagctttgaaataatttctggaaaagacagcgttgatgcttgcacacgagtctggaaatcaaaatacaatgtcaatgaagtttcgtataaaaaatcaaaactaagccaaagaacggacggagagaatttgcctttattgtatcaactgggtgtagtaaggagcaagaaagtgcacacgagagtcctcctgccaaagcagattttagtacacttccagcaggtatttgcataggcggagcaacagcaacaacagttgcagcttcaaaccagatattcctgtaatgtgaatcataaagttaccatacataaacaataaactcttgaaaaaaaaactaacagaaattcatatgcaaattaagccagtcattgttcacaagttttagataacttcaacattattcaatacctggacaatcacatcagtaatgatgcatcaattgcaatgaagaaaaatgaattttgaacaatctaaaatctatggaataaacgaaatactcagctgactcagaagtcatagaaatcaaagaatacagaattatatcatcatagaaatcaaagaatacagaattatatcaactttccacagattttgacatccaaataagcctggttgtgggtgcaattttgaaataattttctcaaataagtaattaagtagtatatacatcataccgaggatcatcttgtaatcgatcagaaggaagcagaagcataaaatttcgaaaatgcccataagaaatagattcctcagaatctgcatttagaaatcgcatcatagcaacagcattgtcttcattagctggaagtccagcatttttaagtgaagatagtatttcactcttttgcaatgtcccagatttgctcagacagagagaagtatatagcacgaagaatggttgattccttttgttccattaaggatagaaattgtttccagccaaatgattttgaaaatatatgactccttgtacggcgcatgaactcctgcgcatatctacgaggcaattttcttcttctcattgcaatttcaagatcttcaagagttacttggccgtcaccatctctatccagttcttcaaagaatctccttcctgtattcatgaagcgcttaaataaatctgactttgtttcagattaacaacacaaaaccataatataccacactatggtataaaagataaagaaaatgaccgcttgatgctcatcctattcctatggtctccacattctttttgacatctctgtatgactaatccacagaatctcgcatatatgactaaaagaacaattagagccccttgagctgttcatactcgaaagcagacaatctcaaatggtctttacaaactgacagtaatttcgtgctcatttttcagtgagaatacagaacagttcttgcccattcaggtaatctagttatgtgcaatatatattttgacctgtacataggttatttcttttgaaggtgtaagcaatcatagaagttcaaatagaaacttcattcataaaattaagaaataaatcaaggttctgtaaaatatatatatatatatatataaatatatatataaataaataatttatataccccagttatagaaaataccaataaaatgaaaaactagaactgataatattggaagccaaaaagaaatacagtgaccaacaaagaattcatgagtcttagcattcttccgagagcaacagctctcaaaatacaatcacacgttcatgcccctctaattctcacctctaccatattcatatactactctatcccaattcatcaattacccagctaatccccactttactcacactgtaggtgtttatcaaaaatctctgattgtctagccattttttacatgccaaattgagcagggactgtacaactaaaactaacattagttcaaaacaaatcacctttggcactttgttcagaaaatttattggcattgaactcctccaagtgccataaagttggcattttaggccacattttatttcttctttcttttctatttccatcacttttatgacaaaatgaccagtgtaaatcacatgttctaagttagtgaggaatacatggaaacaaactaaactttggacagttctgggtaagcagaaagacagaataatcatgtactcttgatcgtgctgatgctctcacaagctttcgcaaacatcatacacaagctgaagtatatatagagcagacaatactcaaaaaggttattgtgcccataaacaataaaataagtatgaatttatctaaaatctgcataatgctaacttattatgtcataaggttatgttacttttcatgtattaaattgcaaaacgtgttctttagtaatgtccatgtaacaaaagtttattgacccttttaaaaagaaagatcccctccctcttcacaaaaatattttaactaaaataaactcccatcacaaaaaggaagtatcctctctttcatgacactattattgtgtagaaacaaacagaaaagtaaatttgaaactcagtcagaaaagaagttaccctattgtttgaaagaacataccttcagattctgtgtatctaaagaaatcttggacagagaatagtttctttttgtcgggatagtctttggaagggcggcctatgtgtggcacaagctcaatcagctctgccaatgaaacagtagacaatgtggatctcaaacgctccacattagaaagtggaatactaaatataccactagccaccttctgtggtgaaatgccaccactttcttctccattgtcagcattactgtcatcatcaaccgaagaagtaacccccattacccccgaaggaaccccaccaacttttgcaaacattaaatttcccaagaacccatttacatctgccttccttccatccagaatacctcttactattttgaagtgatcaaattgggtggtaggagaagacggctgctgagaagtatcactatctttgtaaccatcttcttccacaccctgatcgaacttaggaaaattatgagttattttatcaaagacaaaacctataaagcattcaagtggttcacactttacttgtttctcagcaacaccatcaatctgtaccgttgtaacaacttcatctttagacgaccttcgattcaactcacctgaaaccttatccttagtacacaaacacagtttatactcgtcactagttttctgaaaacgcttcttaccagttttgaaaggacctggaaatgcctgaaaaaagttattaacaaacaatgaccaagccaaagcaaactgcaagcaattcgcacaagacacatcttccttggccaaatccatatgttttaacccatttttggacacttgaggtcgatgcccatctcccgagtttggcgaaaactttccaaaaaacgccttaattgggactttaaaagataaccctttctttttatcctcaccggctgggacacactgaccactcctcttcttcgaaccacagatctgaactttaccagccttatcacctccaccgagctgggttcccaattccacactatctttcttatccttagccccaccgtgagcccaccgccactcaaggtccttcgtcgctttatgaaagctcaattcaagaggcgaaagagcttctttcacgacttgaatcgaatttagaagcgattcaatcgggtcattcgcagcagcaaccattactaacagttaaaacctcttaactttactcgaaatcaataccaaccaaaaaaaaaaacaaataattgattcaattctatcacaaatacacacaaaatcgaaaccagtttctatgcagattaaaacaatccaaacaaaacccttaatcaatcaacttgagtacaataacgaggaaccttagcccaggaaaggtaaagcgagggatagatccaaataagaagcgtgtcgaaccgattgaatcctatactcagaaaaaagccaatctctatgcaccaaaaaccagaaatgagccctccatatcaaccggataaagaataatgcatattcaccaatgaccagagcgcttcgtattagttttttttttttttttctagttcttaaaccatttcacaatagcctaacttaattaagcttaatcggcattgaaaaccattagagaaaaacaaagttaaaagagcgattcagagaccaagagatttgagtggcagagaaggaggaagaagaagaagaagagaatgaagaagaaagggttattataatcgtaattttcaaaaatgaaaatataatttgtt

SEQ ID NO: 218417 - DNA, 3836 bp, Cannabis indica
ttagacatatgagaaggaaagactatagaaatttttttgagacttttatgagataagagagatataattaattttgctgctaataaattgttaatattattttacactttcttccttcattaattttctttattttttttaaaaatatatgaaataactgcccacttccacccatctgtctatacacgtactatttagctaataaattacataatatgataatttttttatagtttaattaacactactttaaaaatcaaactcaaattaggtgttaagttcaaccacagcaagaataaattatacaattttttttaaaaaaaaagaaaaagaaaaagaaaaaaccatcatacaaaattaactaaatcacgtttgaatctattattaaaaatctaacattttttctaattgtccaactattattaaatcatacttaatttatatttaataacatttttatgatatgacatttaaataataaatgacattaattctttttataacttcttctaacgacattttgttgtagtgtatgtatataaattattcaccattttttgttgatgagggaataaatctgtatactaattaccatatataaaagatagaagatcatttataggcaagaacataaattggctttactttatattatttgattatctataattattgttatcaaagtgataagatgaatgatgcatttacacttgttattgtaggtgttataaaatgacaaatgtagatccattatcatttctagagtggccatcaattcttgaagctttagacatccaaacaacacttgacaagattggtcccaaagatattttggggaaaatattagaatcaatagagaaatgggatatattctttcgaacttatgcaaggtacacgggttttagtgttcgaaacgaagatgtgaggcgggtggataatattatcacaatgagaaaatgggtgtgctctaaagagggttatcgaagagaaaagttcataaatatgcaagacagacaaagaacagccaagccaataacaagaaatggttgtaaggtagccttaagagcagtgcgtactagggatgaaacctcttacattgcaaaagaatttgtgtcacaacacaatcacgagacagcttccatttcagaaatgaactttctaagatccaatcgagttgtaccggacggtgtagttgctcaagtaatgtctatgaataaggtagggataaagacttctaatatagtctcgcatatggcattacagtctggagggttcaaaaatatccctttccaactaaaggatgtttacaacaaggttggggaacaaagaagattggaaaattcagaaatggattcagaatgggcacttggttactttgacgccgccataaggttagatcccttcttctccgtcgagtatcaagtggatgaagacaatcgattggcaaatatattctgggcagacgggaaatgtaggagagactattctgcattcggcgatgtaattgctttttacactacatacagaaccaacaaatacaacgaacctcttataataataataggggttaacaatcacttcaacagttgtgtttttggttttgggttgctcctccatgagaagggagatacattccattggatgctgacaaaattcattaaatgtatgggcgataaaaaaccttttgttgtcataattgatagcgatcaaggaatgcaacttgcaattaagaatgtcatgccaaatgcatttcatcgcacatgcacatggcatttaagcaataacgtcaccaaaaatttgaaagatccaaattttacccgtgcattcactcgtctaatgtacaagtacatgtctccagaagaatttgaaataaaatagagagacttaatcgatgagtttgatctacatgatgtagaatggtgtgccaaagcttatagctctaaactcatgtggggagaagcctttgtaagaggtcatttttgcgctggaatgagaacaacacaaagaatgaatctatgaatgcaactttgaaaaaatttctcctggcgagctatccccttagagaatttatccaatgtattgatattggtgtcagtaagctacgctacaatgaagcccaacagatgtttaagaataagcacacttctcctcagctaccatcgttaactgatccagtcagaccatactacaagaatgcatctgaaatttacacttataaattgtatattaaagttgcaaacgagataagaaaagaggcagggtatagaattagtcactttgatgactgtggggatcaccttcttctttccctaattcgatttcaacatggagaaataagttataaggtcctatactacaagattaacaatcacttcaagtgtgattgcttgttattcgaaacagaaggttatccttgcaagcacatatgggcatccatgaaacacttcaacataagtcgtttgccaccctcactcattttgaaacgatggatcaaggaggcaacaacatcatcaactccacccgaacaaggtgtctccaataatcaagaacaactgacacaaatggtaaggtatgactctcttacttctgacacaaacatgttaaatttttatgcttcaagaatggattcaaatttcatatttgctaagcaagagatagcacgcatcactgcatactgtaaagatgcctttgaacaaaacttaggctcaccaacaccagtccaagtaccacacatgggacaccaaaacaacccaaatattgtgagagatccagtcattgtaaaaacgaaaggaatgggaaatcatcatggaggtcaaggtgagggacttggtggccttgatggtaagaaaagtagaaaatgtcgtatgtgttctagtgttgaacatgattatcataaatgccctcacaaaccgagacccaaacacaagaggacaaagtgcatcatctagtcaacttgcttccttctttggtcctactacaacaaacaatcatgaaaacactgggtactttgtgaatgattcaacacaagaatcttttcaatcattcccatttatgtagtatcatacaatctaaatttttattttgatgcttattaagtctttttctattaaaaaaaatttaattcattttgcactttataaatgtatttcaaagtaccttcttcggtagtttatttgcatttacttagcaccaatctaatgtgcactcgtttatttaaataggcaattttgtttgtaagtgaagactaaaattgtttaattgcaatggtagtatatgtttgacattaaaatttaaaaaatagttaattacctgtttttttttttttttgtaaagattaattagaacttcttccaatgattataagaaaaaaatattaattaataattttttggaaaaggtggggtcgtggggataacctaattaaccatgttcattatatatggattatgagaaattatatttttttagtaatattaaattttaaataatcattggttgtcttataattagctagggtgttaaataatttttttttattattttgagttcattagtttactagttccatgcatggaaaaataaaatgcatacatcaaaaaagtgattgtatttcttttttttttttttttttttgtagataaaaaagtgattgtatcttaaatatgataacttgtcaaaatttaatgtgcaagtggtctttaaattttgttgtttgttcaccaacatgtgatgttgtcaaatttatgcattgtacaaaaattacaaaatttttaattgtgtgtaaaatacaaacttacccttcattaagtgatttgaaaactccaaaaatactctca

SEQ ID NO: 218418 - DNA, 2806 bp, Cannabis indica
agagagagaagagagagagagatacagagagaaagggagaaaagataatagagaaaagaagagaaagcagggtgggaaaagttatagttgaattgtggacaaaagaagtaaattgggaaggttagaatgttggctgggtgctctagttccacattgttatcgccaaggcatagattgaggagtgaagcaccagcacagttccaagcctgccatttcccaatgagcacacagagattggatttaccatgcagtttttcccggaaagacagttccagggcgcagcctattaggccagttacaagcctttccgtagagaaaccaattgaatcgaagactagcagttgttctttgaagcagagtatcaggttgccgccattggcgacaactgctccagcatcgagtgcagcagggcagacaacattcggtgaaggaaggaaagatatcaaggaggagttttggccgagaggtaagagtttgaagcggtttgcggagcagggatcagtggacgagtctttcattaacagagccaagaggaaaaggggtatcagtgatgacagaggagaaaccaatgaggttgttcttgaagatgaggaggagagattaagtttaggccaattgggtgctgggaatttctggttgcagcctggtttcaacccccatcttcctttctcattgacatgttcgggagatgaagaagaggagaggagggtatgttatgtacctggtggtgaagtgatttccccaccattgccattgtcaaacaatccttggattgattcagttgtgactgagatcactgaccttggcgagaagggtggtgagacaagccgtcatgtgctgccgaggaaggaaggctcggcagctgcttcgagtgcttcatctgggagtcagagccagagcttggtccccaggattaatgaaggtgttcctgattatgatgttggtaacgggtctaggaatcctcattcacatggtggttctgaagtagtagaggttggggaagaggaccttatcaatcaagaagtgagtgaggggtttgaattgctcagtttgctcacatcttgtgtggaggcaattgggtcgaagagcattcatgctattaaccatttcattgccaagttaggggaccttgcttctcctaaagggactcctataagccgggttacagcttattacacagaagctttagctcttagagtgactagactttggccacagatgtttcacattacacctccaagggagttcgagagagttgatgaggattctggctctgcattaaggtttctgaatcaagtcaccccaattcccaagtttcttcacttcacatcgaatgaagtgctaatgagagcttttgaagacaaagacagggttcacattatcgatttcgacatcaggcaaggattacaatggcctagtctgttccaaagcttagcttctaggactaatcctccaagccatgttagaatcaccggtataggcgagtctaagcaagagctaaacgaaacaggcgataggctagctggctttgctgaggctttaaaccttccctttgagtttcacccggttgtggacagactagaagatgtgaggctttggatgcttcatgtgaaggagcatgagagtgtggcagtgaattgcatttttcaacttcacaagaccctttatgacagcagtggaggcgttctcagagatttcttgggactaattcgaagcacgaacccgacagtagttgttatggcagaacaggaagctgaacacaatgaccccaggttggaagcaagggtatgcaactcactgaagttctactcagccattttcgactctattgatgctagcttacttccaatggatagccctgcaaggatcaaagttgaggagatgtttgcaagggaaataaggaacattgttgctggtgaaggcatggacagacttgagagacatgagaactttgagacatggaggaagctgatggagcaaggagggtttcgcagcacgaggattggcgagagggagttgatgcagaaccggatgctactgagaatgtattcttgtgatgaagactacagtgtcaaggaacaaggccgagataatgaagctggtgttggaggagttacactcggatggcaagatcagccattgttcacagtctcagcttggacaccagctgatgttgcaggcagctcatcatctttttctcaactaggttgactggtttggctgctgtgcagggtggtttatactcttcttttcttctcacttaaacatacaccaaccatcacttttcaatttaccttcttgttgcatacagaaacaaacaacaacaacaacaaaaaaagaaaaaaaaaaacaacatacagaattctttgtagttagaaaatcattcagtcattctttcattcgtttctgcagataaaagaaaaaaaaggatcattaagaagtccaatagagttgagtagatagagtcagaagaaccatttattttgtatgaaaaatacagcaagttagtagtttcatttcatcatatgttattttctagattcaggtcacttagtattatttggagtcagttgtgtttgtcattattattcttttattcttttatgtgtatgctgaaattcttttgttatagtaagcaaggtcttcaagtcttgtagtcaaatttatttgttgaaagttaccagtacaatgaaagaattatgaaagttgaaattaatgtcatatatgatatgtagagatggaaattggtcggttaatgtacggggaatgcaatccccgcccccatccccgctacctatttataccc

SEQ ID NO: 218419 - DNA, 4831 bp, Cannabis indica
gggcataaaacccaacaagaggcaccacaacagatgatgcctcaggattctcctcagtaagaggtactacaacagatgatgcctcaggaacatcctcaagattcaccaaggccaagcaaaatcgttgccttcactagacactgaaaaaaaagttaaaagaatgtccaagaagtcagtaccctacatccaaatgacaagtagggtacatggggaagcctcccccagaacagcttggagaggaccccaccggactcatcaccattacaatcgctacaatacaatagcctatatgacaagtcgagaacctcaacgtacaacaagcaacaaaatggcccagattttctttctaaaggcaaagtaaaacaaatgcatataacaaacaaaagaagaagtaagcaaaaggactattaaaaactccaaaaaaatgtcatcctcataatcagggagacctcaagtctcgaacatgcatttctatttgtgtcgcaaacgaaaatacctcttttaaaaccctaaagccagaaatgctcgcctatgtacccaaaaagtgaatctcagacatatataaccctaatccttagaatcatgttctacgcatgcaaggtgatcaattccttcaaatatgagaacgacatttcaattgaaattgaaaaaatagtctgaaagaggaggaacactcacttgtactatgaggaaagagtagggtggtggtagtgcactgggatattgtcgtttgcacaacggcggtggtcctcctaattccaattgtagaacggttgagaagacgacaaatgttagtggaatactatggcaaagtggggaggaaggaggttgagtttagaacaaggaggtatgaaagggttagaatttttttgagcaagaagttcatacaaaaaggggttctctctggttagaaaattgttgatgaagtaaagaaaataacttcaatcgtcgaaaatcccatttatatgggtaacaacgactggaaggattttgaaatgcacgatccttatcaaatggattgaaggctagatcatccaacggtagggaatatgaaagattgatatttaatgcatctaaaaaaagagaataaagcattcattaatcatcatttcattatcgcatccccaatgcacctgaggacaggtgccttttcaaaatcagccatcattttccttcgcaagggtcgcgcctaggataaagagcgtgagcctcaaggctctgctaacccagtttcatgcttcgccaagtcttatgggatatcaccaagaatagttatcatgggctcttcctttagtctcttgataacctttctgcgagacaaaaatacagaaccaaccttcccgatagcaagctcctgacactttcaagtcctgagagcttgggggtaaatgttatccatgttcccagataggttctacgtggagatagcaaaagggtgccacatcagattgtatgagaatatcacgaattccctttccttttaagataggatcaaggaacgcatcaaagtatctaggagagcgtatctgttgaaaaggaggaatcaatccctgaagttgtaacctagtgctaccggtatttggaggcataggccttctgggggttcttaagaataggctattccaggaggtcttgacctccacttcctagaagccccctacaaattaacccagagatacactcgacgtttacaccttgtctgacaccaagtcagatattgtcccctacatcagactgtggttgtgcgcgtacgtgcctctatagtgctaattgtccaacgacttgtctaagatattgctttaaaggagaagccttcgaacgacatgtgtccatatccttacttgacaacctgcatcgattacgcactatacgatggaagagctacctaccaactccagccaattccagatcatgcatcgaataacactgctcataatccttcaactgtcgggaagcataagctacaactctgtcagcttgcatcatcccagaccttgtctggatgcatcacaataaacaacaggcttttcttgttctgatggtaaagctagtactagtttcatgatcagtcgtcgcttcaactcttcaaaactcgtttcacacttgtcagaccatacaaaccatttgttcttcttagtcaattttgtcaatggcattgaaatcttagaaaaaccttctacgaaacattaataataccctgccaactctagaaaactttgaacctcgggaactattcttggccttggctaattttaaactgactcaatctttcccggattaaccataattccatcatttctaacaatatgccctacgaaggatacttttgataacaagaattcacactttttaaactttgcatacaacttatgattctaagccattgtaaaaccatccagagatgttgctcgtgcttcgattctgtctgagagtatacaaggatgtcatcgataaatacaataacacagttatcaaggaaatccttgaacactatattcatgagatccataaaggtcgctagagcatttgtcaattcgaatgtcatcactaaaaattcatagtgaccatacctggtccaaaatgcagtctttgggatgtcttcctcccaaatcctcagttgatgataacctaaatgcaggttgatcttagagaacactgtctgttatacttaaaatttggctacacttcaaaagctgacacgtgtccaatatatggaatatgaatcaattctaaatgatataacgatatcattaaatgcatattgaataacttgttattatttaaaggataaataggtaatattcaaaactcgttggctttataataaaaaatgagagaagaataataaccattgatatgagattcacgagacatatgcatgcctcagaatatacaaacaagaaggggatattcatccgcctgaacaaaatgaatgtatcagcataaactacctcgcattacatatagcgagaagatcacctcacattacaaaagccacatttgattgcccacgtttcatttacagttatatttaaatctatcccaaaaagaataactaccaacctatactcctataaataggggaagattccatgggaaaggggatgacaaatttgagaaagaattattattattcaatattagatattgtattctgtactctaaaaatatcctttataagaaggagttgtggagtatgtagattttaactacaaaatcacgtaaaaatatctggagttattatattttttattatttattaatttctgtagaatatttattattaaaaggctatttaattttggttaacaaaaatctatgttaacagtttggtgctttcatagagagccttagtgataaaactaaaaaaaactctccttacaaacaaaattctaaccatatttaatggctgataacaatcgaaacaatggaaatcaccctaaagaaaccacacatcaccctgtaaaagagccaataggatctcagaggccccataccacttgaacatcatgttcaaggaggaatgatggttgttgtgatcaaaattcagaaagagggaatgaagataccaataattctgccagatacatgcctagaagtgaggatgattacgatccaactaggtatgtaccattagtggaattagaaaatagacaactctgacaacgcttagatgaatctaactgacgaaatgctgagttagaaagagacgctgtggaagccagggtgacacaaggaacaaatccttagaatcaacttgatcctgcgataagaaaaccatgagggagacctcgaggttctagaaccaagagacaggaaacaaatcagggaaatccctaaaacacccaggaaaagaaacttgggggtacaagggatgttctagtggataattaaacaaataattaagagaagtagtgagacgtttttcaaggatcccaataatttatgaaccaagggaacaaacaaaatgatgtaccagaagcttcttgcaggaatgaggacgcaagatagcctcgacttgggaattaggtaatccctcgtgataatgagagaaaccctggaaaccaacccaggacaagtgggctacctccaagacactcttaacgtccttctcaatcagagagggggtacgtatacaagatgaagcaagttctagtttaggacactcaaggtctcaaggacaaagtcgatcgggtaggcaaacacgagagggaagtagacatcgacattatgctaactgagaaagcatgagcaatacacaaagctaccaatatgagagttacttagagacaagatctgtgagtaattatgagcgaagacaacctgatcttcgcgagcacctaaattgaagacagcccgatcttcgcgagcgactaaactagaatgcacctgatttgcgccatcaacttaatgctaatcaacagcaaatagatcccatctaattgtgaataattgaagtagaggataaattcggaaagtatcacgatggagaacatggaaaattgccttgtcatgattcggatgaagagaccgagccgtttcatcttgatattttgaattctgaatttccatagggattcaaaaacccacatgttttgaaatatgatgggactacggatccagtcgctcactttaattactttaatactataatgcgagccagcaatgtctcgaataatttgcattgcatcttattgttgacttccttaagtggagctacgggcacctgattcgacaaatttactcatcattctataacatcttgggaacagttgtccaaggactttaaaaaataatttcaagctgctagagacaggcaacctgaagcatc

SEQ ID NO: 218420 - DNA, 2180 bp, Cannabis indica
ttgttatatattgtgtgtgtatgtatatatatatatatatatatatatatatatatattacattttgagttactaacctcaaaattattattttgatcaggcaagcatgctgttcaagaaactttgtttgaagttggatgctctttctcactttcacttcactccaaaacctgtatgctatgcttaaccagacatcattttcctttattgtgaattacctatttcatttgccatcaatacttgtaatcatatggttttttattttctacggggtactgattaattttatttattgcaaataggttatcgaggatatgtctatacaggcaaatgttcctgctcttgccatggaagaggtatgaactgttaatttcctttttgataaataatctaatcttacaaattacagatcaatatttaacatttgtttccgtggatagattgcacctctggctgtttctgatgcagcaatgttagctcctgaggaagtatttttgggcaaaggtgacattaaagaagatgcagaacttacgcaagaggaaagaaaaaggagacgagcaaacaagaaaaggaaattcaaaggtatggctattttagatggttacactatcattcattgatgcttaaattttccatcttttttgctttcctcgtttatttgactattagaagaattggaagttgtctgattggtttgttaagagattacttgtctaaatcatattccttggttcatgatgtaactcataagcttgaaagggtaaatgttacgcaagtgattttaagttgccctcactatttgtactttattgttggctaaatatctgaaaagaatcgaactcagtgcatccctgatttccgcctaacctggtcttgacccgagcagagatgggatctgtcttaagcaagtccccacagccaacttatctaatctctgtatcactaattacttatttgcgaattgcagctgagacagaaaagaagatggcaaataagccccgggataaaacattggcaaaccctaatgacggtaactagttctcctagtaccccaatcatttgtattattcatttttgttcctgtttgagtaatatgagccaaaaatattacagctgaagcagcaaagaaggcccgagatagtacgtaacttaaccaaaataaaaagtcagatctttgattcttggaccaatctatcatatggcatcttgtcatcattctggaaaattgaaggcaatgaagagttgtgagacatttggatttaccaacttgttgagggttactaagaggaagttgtaagtaaaggggtgaaaaatgaaatattataaaagagttatgtgaagatccacagctatttggtgttgcttgctaattatgatagatggggttaagttacagaagcccccaaaaagggaatatgggaagtagttgaagcatcactgaccgatattttgatttttatttggtgttttagcagatgaaatttcggtagtgtcaacatgattttatgattgatctttcatactgtaataaaacaaaattttgaaattatttctagtctgataatgaaagtggtagttgttataaagtacattacatttgatttttgactccctgagttttatctttgattgcaaagaaaatcactagtacaatgactcaaatcactagtaacgccctatcaattaggcacgctactaacaaccattaatataatctaatcccgctaaattgagattactaaaaaataagagcggaaaacttaaatctttaaatcaagtagagtgaaaatataacttgtaactatttaattaacaactattctaaaaggttacacatatttcgggatctcgtaaattttttacaaaatattacaaatcattttaacatgtcgacctaagtgacaaaatattgagaatacaaaataccagctggtagacccaactcgcgtggtctagtgtggtccgaacatgtacaatccctcgtcaagctctcgaactcaaggctgattacagacagatttatcctttcctgcacagtagagcacccgtgagccaagcctagtaaaacagtataaatattaacatacacaatagaacatatcacatatatcttaatttcattacacttattgcctatttgacatagacccatgtgttacgctcacacgtctaattacaat

SEQ ID NO: 218421 - DNA, 3760 bp, Cannabis indica
attacacagtgtaattacattcaattctcatggggggccatgagaattggagagtgtaattggaacccctcaattacttccaattacacagtttcagtgtaattacatggtcagataaacatgccaaattgtgtaattaccttcaattacacacaaatccaattatattgtggctttccaaacgcaccctaagttttaatttaacaaaaaattaattcagggtcctatttatacaattttggaaaatacagggtcaattttatcatttaacaaaacagaatgtccaattaataacttttacaaaatataaagtccaaaatagtatttatccagttgtgattagttcacgtgcgaagcacgtattatttcactagttattgagagaatttccacaacaattatcagtggcccacttagttaatttcaaatgattttgaaattattgtctatttataaatattctcgattttcactactcgttaaaccatcaaataggaaaatgaacttaaatgttttagatgaccaactctttagttattttaacattttggctcaataaatagttaatcgtctatgaacatttagcgtaagtattatttatcaaaacttactttaaaggttttgtttataacatttttagatatgcaagccgttatttttcttaggtcgcataagtttactgttgttttcaagacttttcttaatggtctcattttacaacaagtgttatttttattcttgctttaaataagacttttatattcaattttttattgttccagaccaattttaaccaaatattctctcttttgtaaaaactttttaaactttgggactttgggatttaatttcgaatcataacatagttctaaaaaagtctagttaactcatatccctatacccctaattaattttaaagttacaactttataattacttgcttaaaaaaaattgtcttgacatttattcaacataactctaaatttacataattttttagaacttaaaattacataaacaaataaattattggtaatatagtcgcaaatgttcgctgttctaagtattttttttttactaacgagccattcaaccaagctaatttataaagttctggtgctaacttctattacatatggaccatcctgatttgggttaaatactcttattgcgagatctcgtgtattggagaatactcgttgcaatactaactctccaattttaaagagtctttctttaactctcttattgaaatgtcttgtgcttctttgttggtatgcatcattttcgcacttttgactcatctctcttttctttgagcaagtccgaagattcttcgagtaactcttagttatcttgatcatagaattctcacctatgggacgagatgttaacttccacgtgaagcattgcttttgagctaaattttagcgaaaagggagtatgaccctttacagttttttttagtggttcgaggggcctaaagcacctgtgacaattcatccaccaatcttccttttagtgcgctgagcttctttttatagcatctttaacgatcttgttgacttcttcgacttgcctatttgcatgtggtcacgagattgatgaaaaacttttgatgattttattcttctcacaaaactcagtgaacaaatcgctattaagttgggtcccattatttgatactatcttaatgggtataccgaatcgacacattataattatgatcacaaagtctaagattttctttgaagtgattataactaatggttcgaccttagtccatttggtgaagaaatcgaccgcaacaactgcatagtttgcacctccttgccccgttggtaatgatctaatcaaatctatcccccaaatagggaatggataaggcgaggtcatcatgcggggttcaagcaggaggactctcgatatatgtgagaatctttgacatttttttccatattttacaaactcatgtgtatccttgttgatcctcttcagtataactttctttcgacaactgtatatctcgatattttgtacataatttttcttgtctcgtttttgtcttatagaagttgaccatttaagagatagttcatgattgatgtcatccatgagggacttacatcaatcatttctatatcttgttcttctatctcgaaaatacttgttcttgcaatttctcaattggaaccaagttgaagttgtcatattcaaatttcgatgccaatttggccaaagagtcaatgttcgaattattttctcttgaaatttgctcaattttataataatcaaatattttcaagttttttaattttttttctaaatatttggtcattttaattcttccaaacacttgattcacaatcaattaggaatcgctaaggcaatgtattgccttggaatttacaatttctgctaatcttaagtttcttaaaaacatttcgtattcggcctcattgtttgaagctagaaactcaaactttaatgcataatgaaatctatagttttcaagagacaccagaattatgcctgctctcaagccattatcatttgacgagccatcaacgaacaatttctactttttaatttgaaatttcttccatattttcttcaatatttattcgtttgatcaaaaaatctaacaaggcgtgccctttgatggccgctcgtgtgtgataagttatgtcaaattgtcccaactcaaacattttatcaaatagagtaaaagcacatgagctcggcattgactgttgactgttgagaaaggctgtcgaatatgaattaacagaatttcagtactactcacgactctctctctctcctctgctttcaaaaaatccctttctctctctaaatactccgaaccttcctttttctcctccttcttcttcttctcttgatcataaacctataatcgttttttatatgatcggtcatcagaccaagggattgtgattttcatttagcttttcagctatgccgttttccgacgatcaagattgtccacctgggtttaggttttatccgaccgacgaggaattagtgctttattatctgaaaggaaaaatttgtggtaagagattgagggtgaatgttattggcgagactgatgtctacaagttcgagccagaagaattaccaggtgtgtgattttttgcaatttgattttttttttatcgattaggtcttcaacggatactttccgattgacttttgtttagatcaaaattgcgacttgattaaacggttatatatttggttgatgggtttttaatttagggtcttgttctgtcgaagggttttaactaaatttctgcaatcagttttgtaagtcccaagttcagttttttttttattattgtttaagaaaacgtatgagagcttcttatttatgatatgttgttttgagttcttgttgggaggtatgtgataggacaatacttgtttaggtctatgaagttattatatgagactttcaacatgttattgataattgtttggtttgtttgttacaattttagattaattgattggtattctgacatgtgagaattcaattgatatgcaggaatgtcaatactgaaaactggagacaggcagtggttctttttcagcccacgagacaggaagcaccctaatggtgcaaggtcaaaccgaggaacgaaacacgggtattggaaagcaacagggaaaaatcgctccataacaagcactactcgatctgttggggtgaagaagactctagtcttttacaaag

SEQ ID NO: 218422 - DNA, 4570 bp, Cannabis indica
ttcaccacaattaaaaaaaaaagaaaatataaataattagttggataagagtattttgataatttaatttaattaaatttttaaattttatttattatattgaaaagatggttgctgctggcgataaagaaaagagatctcaagtaaaaacaaataataataataataataataataataataataataataataataataataataataatgaaggctagaaatacttgaagacctaatgtacatgacaacaaattcattgatccaaccttaaagccacaaagatgctgattctgaaaacattgcacagactatgtataaatatatatatacacttctataattaatttatataaattaatatatatgtatgcacataaaatatatatataaaataataaagtttccactacttgaaaagccgaccaaattacttaaaatattacttctttttagtatatgaatagaaacttcgatgaaccttagtcctcatacaccagatctatgattatgatacacgtaaagtattttgtataccatatcaaatgaaaaaatattgttaaaagattactactatatctacaaacccttttacgtggcaaattaatgtatacatatatgtatatgtatatgtatatactctaaaaagttcattaaccctttttcaattaactataaaaataatctcgtactaaccaaaataataaaaaaggccaaatacttaaaaacagtaaatgtgtaattagtttttaaatatgtacaaaagactattcatacacataacaagcccatgttcaaaaatagaccccaaaggctacaacataccctacactctctaagcttattaggcttaaaattgttaagttttgagtatgctcacaaataattgaatcgaaactattagtaatggcctacatattcataatatagtatatttaattatcttataacaattattattattattattattattattgaaatttgctgaagagaatcaaattaagattgcgtgaaaattcagccaaaaagaaaagaagatgatcgaagaaagaagggattgatgatattggtgtttttctcaaggagagaccgaccaatgaatttggatatggaagatagttgaaaaaacgcagaatacgatcccccattccaaaaaggttacactgtttttccaaggttcaatactgtttgcctacaattttatcttatcacacaaaaatcaaaattaaaataatttaacacttgggaattaatggggaatatacccacaaatatttttcatctaaaattatccaaaatcccattacaacgacagaaactctaaattaaaaagaaaaacattaacaaagctaatattttttttctcttctttttcttaactcatttctcacagtccgagatatatttacgtaaatataagtcaaaatatcaaaaccccagagacagctcgaatatacacacctgtcattttgccagtgacaaaatctggcagggctgactggacacgtggcgcgaatcccgccgttcacatctcagaagtaatcaaacgcagtagatgaatgtttactacaaattccattactgttacggttaatattactattattattactattacaatcaaacggcgtcgttttctgcctcctaagtcccggcactagctccggcggcggcgatgacctaatcaacgccaaattaagacccttaaagaacgggtgcttcttaacttcagccgctccgcgtttcgctccaagacgccgggtcgggtccttgtcaagcaacccggaaatcaaatcccgcgcgtgaagctcaagcggggaagaaggcatcggagttgggaaagcaagtggcgttttgacaatgtttaagagcgtgagttcgttggattgagccgcgaatggtgtacggccgtagatcatttcgtagatgaagacaccgtaggcccaccagtccacggcgttgccgtgggacctaccggaagccacctcgggtgaaacgtactcgtgtgtaccaacgaaggagcatgacctggcagttaccggctcggctacgaagagccggttagccgccgtgagtgtttggactcggcgcgaacggaagagacggttggagaagcaagcaaatggtgagagtgatgatgacgtggaggttgtgctcgtgtgtgagcgggagtaggatggagttgttgatggtgagggaacgtagggtggagatgagtcaggtgattcaacggctgggattgcatctgagcatagagataggtcaaagtcagaaagcataatgtgaccgtccgatctgaccaatacgttttctggttttaaatctctgtatataattcccagcatgtgtagatactctaacgctaccaaaacttcagctgcgtagaatctgttatagtaattaagaagaagaccgagttagagtgagttgaatagagtgagttgaatagagcgagttatgtctcgatcgatctaaattatgcatgaatttaatttaaaaaactggactgtgaatgtgatgatcttttgttgtttgtttctaggtaaaaaacaaagagaaaattccagaaattttctcgagaaaaaaaaagaaacccacagaatattcttactttgcagaagtaaagcagacaatgaaaagaacagttcgatcgcattcgtcgtaatcgagttttactcttttgttaaaaagtaaaactctgaaccaaaagaaaactttgacagaaatttttggagttttgtagtaaatataccttgcagagttgagcgagaagcgtttgtgaggttgtttgtgtcgaagagaatgcaaatcaccgccggaacaatactccattactatgcaagagaaatgtgaagcttcaaactctgcgtaaagagttggcagaaacggatggtcaagcattttcaagatttttttctccatttccgctctgtgaaccttcttcttcatagctaaaatctctttatccacaactttcatggcataataacaagaaagattggaattaacttcgtcattattattattattactcagtctgcataggtatacagtgccgatgtcgccagccccaatttttttgaggatattgaaatcgtgaaacgtgagaccagactctcgtccgaacgtagcggaacggatggcggagtaggcaaagtccgacgatctgtgtggctttagtgagatactgcggttggtgttctcttcttgcgattgtgatgtggaaagctcgattggcgccactgttgcggcggcggcggcggcggcgtcgaaggaatgtctactgaaactactacagctctcgctgctcattgagctttggcttgaattggcagtctccaaactaagctgatcaccgtctgagtcacggccgaaaccaagctctaacatcttagagaagaacccccaaaaacctgaagcctctccagtactactcctcctacctcttccagtgtatatatatatatctatatataatattataaacacgcagtcaaaagcgatgaaaaagcaaagagaatcggattttgtatttgaactgttccttaaaaaaaatgtgggttgaattcgatttacaacagaatctgataccagaaaaatgaagggagaaactaattagctggaaagagttgcataaaaagctttttctgcgagttgtagtggttttatagccaaactgccattaaagcagaagctgtgaatgtaatggtgcagctttttcagggtttttctgacctgaaaatgaaaaagaaaattagggtttccgaagagatattcagttggagagaagaggagactttaatttgggtttcaatgaagtttttagagagagcagaggagagagaaagagagattggaaaaggtagagaggtagttgaggggtatttatagtacgtagtacaatgaggtaataatatgtgtccttttttaaccacggttaaaaactaatagggtgagttggagggaaaaaatgaaaagttcttactcattactttctaggttaatatgacttttttttttaattggaaatttgacttttactttcgtactatgatttcgtagaatttataatttagtccttttaactttatttttttgaattttttcaactcaaatatatattttctttatttatttcaaaatagtttgttgataaaacattggtcacaattaatttataactaaaataaattagtcgtctaatcaaagaaaaaaaattcgaaattaaatatgaaaatattaatttcaaaatacaaatacaaaatttgaaaagtttgtcattgtttatttacacacacaatttaaacaaaaattttatgtgtattttttttaagaatttcgatatgtattattattattttgcctatacgcctagtattacattaaaataacattttagaaaagaacgatattaataaaatatttgcaataaaaaagtaaacgaaataataataataagttttggtttttttctaaaagaaaatgggtaaattgcggcataaatacttaatagtttctagattttattacacttaaatacctaatgtttatttttggtaggtaaaaa

SEQ ID NO: 218423 - DNA, 7230 bp, Cannabis indica
actcaaatggtcttcattgtcttcatgcagctacgaatatataaatatatgtatatatattatcatttaaaaatatcactaagtattattacttgtaacggcattaatgattaatgaacataagtttagaaatataattataattacgcgtacgtaaaataaataaaaacactatatatacatcatcatcaataattaaattagttatatattgtcctaaaaatttggtaaatctgacgattaacactgtttggatgtatatatatttatatgtcatctcattacttaattaaataaataaaaaaaaaaaatcaattttaattaattggaaatattaagagaggtattttattatttataaatatcatcatatgtatagattataatgataattcctacctacaattttatcatttcactttaaatctttctggtttttggaaagtatgagaaggtagaaatcttcttttaatgaaatatgaacaaaaaacaaaacctctcatctctcactttggtcatcttattattatggctctattgtcttttagctaattgggtaatatgaccataaaaataaggtagtgtctaatttagaaatttaaaatttttaaataaaattaaagggataaatacatattttgggcaagtttcaaaaacctacaacaatgctagcaagagggaatatttcttagaaaatgacatttagctaatgtatatatttttccttttatattttaaacttgtaattaagttaattgaaatgagagaagatggaaaattggtgagaaattactttatgtctttatcttcactaaaatatctaaaatatactagaagaaggctaatactaaaagttaagattaaatagtaaatcaattcctatttatatatataacaaagtttatctaacttggccttttgctaactttcttagggggaggacaaagttgaagtcaatgtcaaccatagtgttaagcttttttacacattttttagaagtaattacttgggccaacatgattctttacattattattattttaacaaattcttcaacatatatttcagaaagattaatatacatttttacaccttgtaggttaattattcttttctgttgaaaaaaatgaatataatttaacagttgaataatatttaacaagtttgacaaaaataaagtcgcacaaatctcacataaagataattcaataacggcaccctacactgatagaaagagaaaaactctacaacaatggcccatatgcgaagttacaaagacaagatgattaataccattattacaacaagaaaagaaaaaatcaaaacaaagcaatcacataattaaacccccaaaacaaacacaatcttccaaacaaaatgattaagacaaaaggccatcatacgggaaccacccgaaaaggagacacaacgtcaagagggcgcatagcctagagcaaactcgagccctcccctcaccgattgcaacctccattgggtgcccaaggttggcaaacgcaagcatggaaccccaataaccacagttaaggaagaaatatatctccattgtgcgagttgcaaccaccaccaccaccaccaccaccgtgtaccaaagagcagaagccaccgctacttcacctatgaaaaatgagcacaagacccccaaaggctgccggttacacaactaactttaattgcaatttttttttaaaaaaattatagatttaagttattttaatataacaacaacatgaaaataacaaaaaaaaaaaaaaacaaatacatcactatcattgttaaaaaaaactaaaattgtaaaaaaatatcatttaagattgtaaataattgttatctaattagagtgtctcgtttatatgttgatcatattttttaggagtctaatctcctagttgaagaaactttacaattaaaaaaaccttaaaaaactttaagtccatacttttatagactttttgtcattttttaggttgtttttactaataatattccaataattaaaattcattttcctgatcttttgtttgagcccaactcaagaagtggaacactgatggtcttaaagaaataaagcaaggccgtcccaataattattggtcttgacttgacctctcaaatcttaagtcactaccaattttccatttcatcactatataatttaataaatgaaaaccaaagaacactttgaaaaacaaaaacatcaaaattaacaaatcatgattcaacaacatcaaaaataataaaacatcacccagaaaatcccaagtatccacctaaaagttattttgaatatacacaaataagcaacacaaatgtgtgacttaacataatcgaatcactgtagcaccctctctcttttctttttctctatgatttttttttcttttctttttgttttctcagcaatgttgatccaggaataagcgagatacttctgtacatcagcggtcaaaactaccgaccaaaccaacctcctctttgcggctgcccatctccctcgttcatcagcttatccaacacaatatttaagtcaaccgcctggccattctcagtgagctttctaacggttgccctcacatggtctctcgggaaccccatggtagaaactttatcgatcacatcatcaacaggaaccctgtttccagtcccagaagaacctgaactgttgccaacaccagaagcagcagcaggtgggagaacccgagcagtaggcagttgtggataaccacttccaccacttggagctgaggttgaagtgagttgctgaggtttaaccgcagaaggatttccatattgagagggagaaccaccgtagtgaaactgttcattaagggtgccggttggtgggccatatccagatggaaaacctgaactaggtcgactagattgtgactcgtacatatgagagggtggcgcatagaactgttgagattgaggaggtccacttggtgactgagggagtggctggcggaggttaggtgggtagttttgagaagaaacatatggtagctcttcggaatgatgggccagtgtaggagggagttgagagggattgacaggtggaagagtcgggagctgctgtggaggttgtgttggtggctgagagaactgtggttgaatggcaggttgaaattgttgatggggtggtacagcaggggatggaagttgctgctgattaggcggtatttggtggtactgctggttttgtggttcttgagtttgaccaggaggtggaaaataaggctcgtgctggggaacaggaggagggatctgattctgaggaaattgatgtggatgttgaacttggggtggcaggttctgctgcggatttggctgaggaggagcatttggaggagagaaggaaggttgtgacggaggagcatttggaggagagaaggacggttgtgatgatggaaggttaacaggagtatgaagctgttggtgagattgttgaggagctgatgctgcatgctgcatggaatctacatgcgctgtattctgggcttctgaattctgatctactttggatacttgtagcttcgctagctgtagctgggcctcgagtatttcttgtttatcctttaaaacaaataccccagattggacctgcaatggttgttaacaaaggtaaaagagcacagtatgaatatattgatcacggaaacagcataaaaataaacaaaatctctacacagcaaaagaacccgaaaatttgcttccctatgtaaatgaacaaaaaaaaagacagtaccacagcatctgtttaaatagtcatggtgatgttcttcataaaatacacagatttaactcaacaaatatttatcaccaaggatgaaaagtaaaataatggaaaaaggaaacatgaagaggattccactacatttgctcttacatgatcaatttcaaatctcagaccatccattcacaagtaaaaatcatcagaaagaaaagcttttaagaataaacaagacactcaataataagccaaccaccacttgaaagaaaaaaaaaaaaaaaagccaaattcacatttctgtaaaaattaacaaatgatagagcaagtgagaaagaaaaaacgacaatcgtatcaagctgctatagtttacttttctaaagattgataagcagtttaactgagcatgcatatgataaagtggagggggggatagaaaaaggaaatgacaacttgtgatattgaaactacattatgaaattgatgacgcttaacttattatgcatcactcatcagatgttatgacaatgctactagcataagtaaccacatcaacaagagtatattaaggctgtatgctttagcctcaatcaaatggaacatctattgaaatgcatacctctctcagaatattctccaactgcctcatcttcccatcagtatttccatgattgttcccaactgatgtcttcaaatcatccacagattcctccagatgtcttgttctgctctctagttgtgtcaatcgagcactaacaccttccagaacatgtagcaaattatcggcatgttttttcatggtcttatcaatctcagccacaattgttgagttacatgcactttgatccttctctagaatgaacttagttggttcaagagagtctagagaaccataattctgtaccgaagaatcacaaacaaaattcacattaaattgaacccaaaaacgttgatataacacattgtccaaaacttgcaaatatatcacgaggaaaaagtacaaatataaaaagaatactaaactgtgaaaaatcaaggtcttcagatgatcaatacgcacaacttttaaaattagttcaattttatacttgtagaagcctaacccttatcaaggatactatacttataaaactaataaacacaagtgagattttccagttgctaaagcacattacaatatatattagacccattatcccgttacagtttcaaaacatgataaaacaatccaaaattttacctatcatcccatagatcaaaaaagccaatttcagctgatagctatatttataaagggtgcatagtaattaccctgataggagagccagtttggggcttgaagtcacctgagctccaagcccgagtggttccaccaatactgggtgtagcatcgaaattctgagagtgagaagaagctcctcctcctagtgtgcttccggcaatagggcgaattggctgaaaatcatagcttgggaaaatatcatcgttcttgttaagcccattctcatttccaccatgaccaccaccactgagattttcttctttttcctgaggatggttcatcaggttaataaaatcttttctttgtggagatgatgcctggtgagatagatccattatctgcttgtcaaaatacagtatacacatatcagacaagctgtaaactttaaataatccaacatcatttctaacgttaataatatgtattttaattaaaataaacattagctgttcttctgaaggttcaagtactctggttccaaaatcagtttatagaagaatatgcaaggtaaaggtagaatgtagattgtgggctcagagagtttagtatatttacttgacaagaaaaagttgacaaaactagtgcttatgtacactgtacttgacaacttatacaaagacattttaaatgattttcaattatttctttaatgatcttcttcctcttcaaagttcttcaaggacaaataaaagagtggcacagaagtgaagacaaaaaaaagtaagaagaaatccacatgccaaaacatataagttggaaaaggaacgagaagaaatctaaatgccaatacatataagaaaaaatgaatgaaaagaaatccaaatgccaatatatataaataacaagaaaaaaaaagtgggggtcaaatctttggttgattaatttaaaaacattgcatgatacatgttttaaaatacggcatagttatggtggtcacagctaaagtcatagttcccctataataacatcattgagcaaacatgggggagaaaaccacagcttttgtagtgtgccaagttccaagaacttggtatgtagaaaagatgaagaaattggatagaactatatcaaaggataaatttggactgtaaatgaaatcaaaacacacaagctatataaacaactacattaagtaccacaatgttcaccaaaatgatcacaaaaaggagttcatctcctccccaaattataatgctagaagaacactccaagcattatcacctcaaacaaattccagaataatttcaaaatacttgtcatcgtaaaatcaactgaatcccaaattaagatgaagtaattcagaaggaacccaaacccaatggaagtctcaacgacgcgtttcatatcaaaaatacaatttcatgctctttaaatcaacactgaacgcaagagaaaacatttttgtctctcaattgcaaaattaactgatccaataattgtatgaactgaaaaccctaacagtggagcactgatcgaagataaaacgatcatctatctaggtttcagccattaaagtatgcatcaaaaaacatccaaatacttaaaaaagcaaaattgatcagaataattaccagatttgaggcagccaatgctatcaacaacttggaaaatcggcaccgccaccgaaatccgagggccacgatcgtaataaagaaacaattgagggtactttagcaatgagagatttgtgtctgtttgggagaagagaaaagaagaatatatatagaattttcttttgtcaaaagaagaagaaaaagaatttatagactttgatatttaaaagacttaattcctaatccaactctattcaaaaaaacacaagcaaacaaaaaattttaaattattaagtgataattgcactcatgtttataattggcatagatttaataattttcataagtataaatgtttataaaattatatttttcatttaatttcgtcaatacaaataacggtttgaatttattaaataaaaatttacataaaatactaattttaatcaaaatttacacttttgtattcaaatatatatttcttttatatatattttttacaatattttataaaaataacacgaaaactacatgacaatagtaaaaaataatattaaaataatatacaaataacaaaaattaatagcaaaataacaataatatgcaacataaaaataatatgaaaacatcaaaagactatatttttt

SEQ ID NO: 218424 - DNA, 3636 bp, Cannabis indica
ttttttgtagggaacatcttggcttttgggctgtttgtgtcccctttgtaagttcacccctataagatcaatttattctgcaagacttgtaatattagaaaacagaaaaacagaaggaattgcaattcttctcctcattggtttcttccctttaactttcaggcacacgtttaggcgaattattagaaacagttcaaccgaacagttctcagggttgccatacatttacgccctattgaactgcttgatctgcatgtggtatggaactccaatcgtatctccagagaatactttaattttgacggttaattcagttggtgcagttttccaactagtctacataatcctcttcataatatatggcgataagccaacgaaggtttgcacatgttttatgatcaacttgaagcatattagctttgattttccaaaagccttagttgttctaggtgtaaacttttccctttcattgctaatggcaggtgagaatgcttggtttgctactagcagttcttgtcctatttgctgcagtagtatctggcagcttgcagattgcagacccttggatgcggcgaatggctgttggattgttaagttgtgcctctctcatatcaatgttcgcttctccgttgtttataattgtgagtaagctccataccgttttagttttcccttaaacaaaaggtatattagactattagtaacaatattgattcttcactcttgtttgctcagaatttggtgatccggacaaagagtgttgagtacatgccatttttactctcactttccaccttcttaatgagcacctctttcttactatatggaattttgaattatgatgccttcatatatgtaagcttttgttcaacacatgtctttgctattgcttccatttttaagagttattttcagtcttgagttcaatattgcatcctcttattcgtatccatttacttttccattgtgttgtatatcattttgttgtttgttgttgttgttgttacattttcaggttccaaatgggataggaaccattttgggaattgtacaattgttattgtactcttactacagtaaatcatccagagaagactccacagaaccactgatagtttcatatgcataaaatacatcttcctaaagagtcttacctatacatagtttcaagtgcaatttgctcctgttgttttgatcatatgtttggacagaaattctgtattttttagacttggctatatcgaaattgatagccataaaatctgcatattttcgacgtgtgtatgagacagattcattgggtgcatctggaataagcgatgacaatgcttctgctcaagaacattttggcatttcatccaccacaaatttttgttgtcaaccaaactcttattcttttgtattgtagacttgtaaatttgagagttttaagatttgttatatggttttcccaacatggattgacagtgtccttattcattgttaattggttttgaaatgaaacccaccattcaaaattagtgatcgaacttaatattatacctaagaccatacttccacatggcttaataagtgacattaaattaggaaagctgcaatttattttcatttaaacaacatttttcttagaaatgacatcgtgcaaaaacggcagttgtataagatgtaccgaaaattgatgaatgaaattccgatggatcgttgggttgggtgtatcatgattggccttaattaattaatttgtcgtcattatcattattagatcactactagattagtggctgttgtggtccattagttatttatattttaaaacgtgtccagcataattatcagctgcacctaacaactgggatagccagtcaattcaattggaaaagtgttacagctatatatacagtggggaatttaacgcagaagaaaaactttaaacaacattttccactattgcatccccacaatcctatgcctagctagctatgtaagtcttctctatctcaaacataaattcacagcaagtctctgagtgttgtcctcattacaccagttctttcttcctgcatacacacacaacacttaattattttatttttatttttaaatatatataatccatacaaatgaaacttatctcaattaaagttttacacaatacactaaaaataaaaaaaaaaaaaaatacaaaaataccttatcatggaaaaaatttatttttattgtttgaattttttatttataaaaattaaaaatatgttttacagtaaaaataataaattattcagtatttttttttattattttacagttaattctttcgttatattttgttattataatggttgtgtcttattttttttctaaggaaaaggttcataattttaaaactttagaattatattttagataaaaagtttaagcagtaaaattataaatataacataaaactaatatatttatgaaaaatcccccaattaaaatacagcaacaaatataatgtgcgcataaattcttatgcatttatattattactcataaaaataatactagcatgtgtaatgaatcagattaaagtaattaatgtagatatgctcattttaaaaattaattttagatgaactaataattacataaaagagaatggtataattggtaacattgttacctgaggtagattgaggttgcatgaattgcgagcattgtcacaaagcaagcggccattttcatcgtagagaataaccccactaaaccttggaagctcacacttctctcccatcagaatcggtctctgccacgaccggagaatccttgttaaggctctgccacccaaccccaaccccatactcatcatcatcatcatcatcaaacccctgatttctactcatcaccatcttcttctctagaagcggcaacggcgaattctcaccccagctcccgccgctccccgtctcccccggccactttctcggcccactccacctcaccgagctaatcaacaccctctttactaccgctgccaagccacacgccggctctggtgggggcagttgcggttgcgcttttcgaaactttaactgctttaacagtattgtggtcatggccacgatgagtccaaggacactggcggcggcgaagaggaataggataagtgcttgtttggttgaaagtctcatcactctgtcttctatatttctcagagcagtgtccatggttgttattacttagtctgtttgttggtatagtgagaaataaaatacatatgagaatgagaatgagaataatgagattattatatatgtaaattgaaaaaccttgttaataatgatgatcagaattattaagtgtgtatattcacgtgagttgaaccgctaaatttgggggataaatgtacgatatatatatatatatatatgtttatttatgttttgaagccgttggagaaatttgcagttctcaccgactactaataaagttgttagtaatggctatctcacggagtttccatgctttgtggctaccatcttcaatcactcttcacttcactaattttctactgtttaatagctacctatatttttggaataggataattttatgctagtactagcagtaattgaatttgggagtgtgttataaatt

SEQ ID NO: 218425 - DNA, 1648 bp, Cannabis indica
acacagttcattaccttagagatccaagtctcatcacagccgatgcaagacatcatggtttccaagaaatcccattccaccctatcataagcttttgacatgtcaagcttgagggccattttttttcccattgccaaatctccctttcctcatgcaatgaagactttcgaaaccaagaattgcattgtcatgtatgattcgaccaccaatgaaagcgctttgattagatgagattgcattgttgaggctaggcttcattcggttggcgagacatttcgacaccactttgtacaccacattgcataaactaatgggtcggaattcagacatttttgttggatgtttggtctttgggatgaggcaaataagagtctcattgatgcttctacaatcggcttggttattcagaatatcgagacaggccgcagtaacttccttacccactaagtcccaatgtttttggaagaaaagacccggcaacccgtccttgccaggagctttcaagggatgaatttggaacatggttgattttacatcttgttcatcaaaaggttgaagaagaagtctattctcctcattgctaattcgattgggaacgcaaccaacaaggatatctcttatctcaactccgtgattcgactttgagaaaagctttgtaaaatagttgacagcaatctcagaaattttcttcaagctagactgccattggagccgatcatcataaagcccctcaataagatttttccttcttctttgggaggccttgtaatggaaaaatttggtatttctatccccatgttttagccaaagagcccgactattttgcttccaatacatctcccttttttcttccacacaattgagatcattctccaactttttcatggtaagccaatcggtttgacaagcggatttagacagccattcaatcttatcttttaactcttttcttctcatgttgagatcttgtttttgtcttttattccaaccatgaagcttctccccacaaccttgtaatagagattttagatttgttaggggattggttgaaactgtattactccacactgtttgtatgatctcttgatactctttgttgtccgcccaagcttgttcatagtgaaaccgagagcctcttgaagacctgcccgttagaactaaattactgatttgagccgtgagaaccaaaggtctatgatctgaatttctccaatccagtaatctgaccgagttcattttgaaactatccatccattcagagttgcaaaaaattctatccaacttttcaaacacaaggttagcagctcttccattacaccaagtgaatgttcctccctcagtttgtatttcccgcaaggaacaatcagaattaacttttatgaaattatacataagatattccggtttagtgtttcccccttttttctcagaattccttgtaatctcattgaagtcgccaccacacacccaagcacctttaaacatcggttgtaaccgctttaataatttccaactttcttttctacctcccgggtccggacttccatagaagctagtgaaacgccacgtaaaccccaatacttttccaccaaagcatcgatatgagaaaccgtgaaggatttgatctgaactttgacagaatcagacc

SEQ ID NO: 218426 - DNA, 3041 bp, Cannabis indica
aaaaaaaaaaaaaaaaaaagtgctaggcaatatggggcaattgggtccttggatgtttattttttacaaaattcagttggatactctattgaaataatcagaaaaattaatcttaattaacagagtctccttaaaattctaaagtcttcttctaaacgcacgtataaataagagcagcacagagactgcaaaattatagaacgttgtcattcttttacatttctttctctttggtattaagacaaaaatgtctttggctttaatagattctgtggctggagttctcccattacgaccacaaatctcagggaacaatatcagctaaagatttcgccttgtcattggttgcatctgctgatatcaaccacataaacaaactgcttaatcgggttgacaaaattgaaaccgaaccaagactcgccgacatccgtattacatttgaagaattcaaagaatttgcaaacctgcgcaagcagttgcagtctttctcattggctatcttcagttacggagaagtcaaaagttcattgaccaaaattgattttcagagagctgcatctcaggtaatcacagtaactaggctgataatatgtttaggcaaattataccttccatctcacttttcacaatcagaaaactatgaatttccactactaaaaggatgatttgttcatacaggtatgcggagtctcggtcacaaacaatgtagttgacataatattccatgtgtttgatgcaaattgtgacggacgtttaagtgtaaatgagtttcttacagttctacagagaagggaaggtgacagctctgaaggaggctacaggggattgatatcttgttggttgaactgtgcgacttgctcatcggctaagcttcctttcctaacgaaattagctaacacatgactgtcagttttaagtcacaatagttacacatgatctgatatgtttgggggattggaaaaccactacagagcaggaatctaactcagcctagtctttactactgataactattttgtgccctcactaattaagttgcaggtgactttgtcagcacagtaataagatagtgcatagtctttgtatatgtataaagataatgttgttgttcatgccttgctgcttaatatgtagatagttattttctgttaatatgaacaataatcttgtattcttttaccaagtaaattctgtaggaataaatgaccatgttgatacaaaaattctaataataataaatgggatttactttgttggccttaaatccaacttttcagcagctagagacacaaacatgttatttctttttccctaccctatttttctcttgtaaggacatatcgttgtactagaactttgagcttatggtttgactgttatagtaactatcatactcaacaataaattgaatcatagaaacatttctacattctacatatctacacttgataatcatacattatttgaggtcaaagtgtgatccatccattgaattaaatagaaaatcatagttagccaaaagatagttctctatttacatacatcgacttaaattctacttattaatacattatttaatacatgcagtatgcacatatcttcctaagattccaaccaaaatttttaacaagcaaccatgatagtctgcatcaaaaaaacattcatcttttcaagcatacccggctcaagttcatggcaactgcctctctgattttctgtccactttcgttcatttctccattaaaagcaggaagcttctcctcattttcttcttcttcttcttcttcccttgagttatcaaaatcattttcttcgtcttcaacagtaagctcacgagtcttgattagaaaattgtgaagcaaacaacatgtaacgatcacaaaaggtagaaactcaaggcactcttctttccactgcttggaaagaagctgccactggttccgaactttcccgaaagctagtctgaccaatcgcattgtcctttggtgcgctgagttgaaatttttctccattgaagttaaaccatcttcgtcttccttatttgattttgtgtaaggggtcaacagccatgggagcaggggaaagcaagagtcacccaatacgtactgaggaaccgaatcgccattgctgagctccaaacaaggcccgttcaacaagtctctcgattcttcaacgccaatatagagcttcgtttggtgcaaaatcacttcaggtttcaacgtgctcggccaaccagcagagacgtccaagaacctaccggcggaatcgaccaatgcctgaacatagagcgacccattctcccccaagaccttcccgctatctactctgaactttccgatacccaaaactccacagcaatttggcagcgaaagccacccaaattcacccaaaaccctactaacatcggattgaagctcgaaaaaatgtcccaatttctcgttgatagccttgcagacggtaaagaacgcgagacaagccttctccgaggagccgagcccgaaacgtctcgccaaggccttgtaaccggctccgtgtgccaggcggtaaagcgcagcggcgaggacgaagttgggtggaactgaggaatggaccgcggcggcgttgagatcaggggtgagaagcccgaggaggagggtgaaagagggctcggacatgcggaaggcatgagaccagagaacgctgtgttcacgggtacctgcagaggagagaaatcggcggaaccagcattggtttggctccggcaaattatgaggagcagagtgcagcgttaggggttcgagactcgggcgacggagagagagaagggaagaggagataagcgattctagggctagagtttgagaaggaaggaggaggatgtcgttgtgagagaggaaagaatgagctgcggcagcggcgttggatacgagaattaggagttcttgtttggttaaaagcttgccattttcgttttgtgataaagtcttcatcttcttggcttttcgactggttgagttgcgaccatggaggttgttcaattaaagttcatgcaagcatcaagc

SEQ ID NO: 218427 - DNA, 6580 bp, Cannabis indica
actggtgaatcaattatttgaggggttacaccttgatgatgaagaatccaattttatctttgaataagaaaagagtggtacaaggcaagaaacaattggatttatacttattgcttggttggaaaggtgttgggagcaagacctgccaataaaaaagggattgaaaaagtcacgaatattgtatggaagattagaaatggtttttcaggttgaggaattgagttctaaaaatattgttcgttttttcttttgtattaaggaggatcgacatcaggtttatagtggcggactatggactttcaacaaaaaattaatatgtttcatgaaatcaatggggttaggtgaaatttttttcaaaaatgatgtttgattactcatcattctagatatctattaataatgttccccttgcgtgtatggctgatatttttgctagagaatgggggaaagaaatggcaagcttgaaatattaaaattcagaatgggactgtgaaagtgagagtccgcattaacatcaccaaacctctaaaacaggaacttagggtggctgttgatgagtataggaatgaagtctccatctttttttcaatataagaatttgctagatttttttatgattgtggaattataggtcataagtctctagatttctcactaaagaatttttaaagttggtgaatagtctaatgaacggagtggccaatatggctattggatgtgtgcccaaagttcccctcctcgtgatcacctccttgccaatagaaggggtgttgactcgcatggaaagcgtcctatcatgtcaatgggtgaggtctctctaaatttttagagctagatatttgggaccagctgagaaattagctttgacgtttgcgttggaggctagagaatgggaagaggatgaatgggctcaggcgatgaaaatcggctaggaaaaataataggacagcaactattaaaccagtaatgatggatgagaagatagatgatgagagggctaaggttggcggtgttcacatgttgttggagaaaaacgttaggttaggttgtgaagatcttacaatttaggaggttagtagagatgttagtggaccacttcccatttcaagtacaaaatctattatgagcatgcactgtgactcctattgatttgtgtacatctgttggtgcatgtgatggcttaaaaaatcagcctgaaaaagataaagggatacaaactaatgttgaagtggatgaggtgtcttttaatcacatgttctagtaaacttttgagcctattattaaagcccataccaagaagacttagaagcatacagaaccaataactagttgtgctcttagtggcttcccaaaacttggtttgtctcatattagttatttcatctaatgctagttcatacaactaataaaaaaagtcctcgagttagtgttggaggaaaacgcaaataagatcatgaaaaaatatttgaagtaaataagaaaagcaagtcaacaacatcaatctctgcctctattgtaggggatgaagatctattgacaaagtctatggagttctaatgttgtttaggcagactcgccagacacaatgagtcttttacgttgtagttcttggtgtaatgccccacttgcgggcacgctacagtgtcttttaattattgtgtactcttttgctaatcaaaatgatttctcaaaaacgtgataaattaaaactttaaaagtaacctttaactttaataaatacataactttgcataatttttgggattccgtttaaaagtttacaactgtattcaaaataaatttttcacaaaagtgttgcccaatgactacaaaataaaagcccatgtcgtcccaagaccgaacactctaggtctaaccatctcgatatgtacaatcatcttcaagctctcgactcactactgctcagcttttgcctttcgtttacctacacatgaaacaatatttgtgagtcaacggactcagtaagaagattataaaatatataacatattaccgacttgcaaataggcatacatacacctaccaacaaggcatccgattaattaaaaatcttctcagccgaagtacgatctctgtaccacatgcactaagtactcgtcccatactagtgttggtagagttgaatcgcaccttgagtacaattgagtgttgtacgacacgcactccatactcgtgttgtactagggttggtaatgatgtgttagaccccttaacaatatatactgtatcaatgtacttcgtaccgcaactattagtgttgatgttaactaaatcacataaattagcatgtacattacatacatacacatatacatatgcatatcttatactaatcttatctcattttcaaattcaagtgtgtcggtcaacctgaatggagatatcgctcgctgaacggaagccctatgtcacatttacataaaataggtaaataatctgctaaaaccttatcggtgactaaaaaaaactcaaaaaactagatgttttcctatcgataaatagcgtggcaatactgtaaatatttagaaaatacaaaaattgaggctcccaaaactgccgaaactggtggatcaaatttccaaaacggtaaaccgttttctggggattgtatctgtgaaaacgatttgtcgtttctagaaaaatggtggaccattttttttttgtagaaattccaaaatgtttcgattctcaactcaattctacttcaaactttaaaccaagctctaaaatacctaattacacctcaataaacatatatcaagcaacaacagcagccaaaacccacagaatcagaaataaccattgttgggccaagtttgagttattaaaatcaaactttctcaaaaccacaatcagccctaaaaatcactccaaacaactcaaaacaacctctgaaaacaacctaagacaaacctaggtttggttagaacctcttcccaaaatttgcatgcttacacccattcaaaattaacaaaacaaagggaaaaagaactagggctcttaccacaattctagtcttgcaatcattcctcacgttccaacttaatttcctcaaatattgatgaagaaatgacttggttgtgctatttttcccttgggccgaaaaagagaaggcttttgggagagagacattttctaatttttaatcgttatctattaatccttttttttattcagcaaggataactctaacatattctaagggttacttatattccactaatttcataacataaactcataaggcaaaagactattttaccctttccttcacacttaagttatcttaaggcttaggataaaatagtcatataccataactccgtctaatcccgatatttctaatatcaaataattatatcttgctaaaagaaatgttctaaaccattctcatgtgactctaatggctaaattattgcatttttattgttatcaagcaaaaatcataataatattaaattatacatataacatatataatacacctagagtttaataaaatcttcgaagttataatcctaattaccttttttttttttttttgaaaataggggcacataatcaattattcacatataatcataaatataattagttaatgtaaattttcttattaatctcatattctaagtatgtgatcattacactcgcggactgggggatcctaatgcattaacggccttacgagctgtcgttcaaaagtatccccaagtttagtttttatgttttagattgaactttattatgggtgggcggagggggtgaagagatagattaattttgctaataattttcatgttaactgtcaaaggaaaagtggtggactgttgttattatggaatgatgatgggaagtttttgttaagtcttatactaagggtcatattgatgcctttatcaaatgtctggggttacgagcttctatggtaatcctaaatcatatttgtgtggtgaatcttggcagctattgaaatgacttgagaagatgttacaacttctgtggctttgcagaggtaactttaatgaaattctttcattgaacgagaagaaaggtgatagtgatcgaagccttagtgctatgggggcatgcttttcagaacgttctcgataaattagagaacctttgctatgaaggtgaatgctttacttggatgaataaggggggtgggggagctcatgtccaagagagacttgattgttttgtttgtaattagcaatggtatgttccctatagtcaaagtagttaatagagcattttgtcttttgaaccaccatccttttgtttctatacttaaaaatgtggtttgacaaagtagacaagttggtaagagggggttttattttgaaccacattggttgaaagttgaggaataacaccaaattgtgactaatttgtggcaactaccaagtgcagatttaaacagttaagatagtttaaatgaggcttttcagcagtgtgcttctcaattaatggaatagaataagaataagtttggctcactgcctaaacttgtgactaagatccagaaaaagcctgatgttttgttaagtacaactactcatttggttcaatttttttgtcaagagaagagtgctattggaagtagcgttcaagggatgaatggatatcgttaggagataagaatatgaaatattttcataacaaggcctcctctaagaataaaaggaatgccatcactgagatcatgactgcgagtggccaacagctgagtgtagaggaagatattgtgaaagaaattgagagcaattttaatcatattttttagtctcatcacttcccttctttagggcaagtcctgaagggaattgatgggattaaaactaggttcaatgtatctccttttgctttagaggatatttgtcatgcggttaaagctattggtactactaaagctctagagccaaatgggtttcatgcactatttttcatagatattgggatgtggttggaccttgggtgatggttgtttgtctagtgattctaaacgagggtaaatcgattaagtaatttaataagtcaaatgtggtttttattcctaatgttacaaagtcaaagtttgtgaaagaataccatattagactatgaaatgttatgtagaagattgttactaaagctttgactttgaagatgaaaggtactttgagtccctttatttcatcatttcaaagtgattttgtgtctgaacgtgctattcacgataatttgattgttggttttgtaactgttgcactcattatttaagaagaataatggtagaaagggttttatggcgcttaaacttgacatgaaaaagggttacattagagttgaatggagttttttgagagaaattatgggaaagtgtggcttttttattccactagattgagttgagtatggattgtgtaacaactccaaaatatgttttttttggtaaatgagaggcctagagggtgtgtggtgcctacccgggggttgagacaagagtgtccactttcaccttaatccttattctgtgatgaagctctcttgtcattgatacgacaagctaaagcaaattcaaagtagttggattttggtgttctcggtttggtcctagggtgtctcacttgttctttgcggatgacagtttgattattagtagagtgaatgcaattgatgttgccactatacgaagtgtactgagaacgtatgaactagtatcggggcagtgtgttaatatagagagattgtcaattacattcaatcctaatgtattaccaactaatcgatctggtcttttgagatttttgggattgatcgagttttgtggtttcttatgataaatatatgggactacctacagtggttggcaagaacaagaaaaggatgtttgaaaacatatgtgagaaatattcaaaaatgagtgcaaagttagaagaggagttttttcttaattggtgggaagggaaattcttgttaaatcaattttgtaggcaattccaacgtatttgatgagtattttcaagctcaaagttgcgacttatgataagcttaagtctattatacttcagtcttggtggggttctaatggtgataagaagaagatttcttaggtcaattgggatacaatgtatcaaccaaaggccaaaagtggattggtttttttggattcggttgtttaatcaaactttagttgcaaaatagttctataggttactgtaggaactcaactccttaccacctagagtgctgaaacataaatatttttctacaactttagtttttgatgctaaggagaagaatggcttgtttcacatttggacgagtctgatgtggggattggaacttgtgggcaaatgtttgagattatctattggggatggcaccaatgttgtggcttttcgggatccttgagttccaaggtcgagatcgtttcaacctattacttctaaaccagaggatgctaggttggttagtgagtttactggtgttgatgggagttggaatattcctaaattgtagtaatttttttcttaccttggacattgaggtgatttgaggcatctcattgccaact

SEQ ID NO: 218428 - DNA, 2385 bp, Cannabis indica
tgatagttttatgtgtttaattttccatcgttttagaagttcatatttaggtttttaaatcaacatacttgtgagtagatctaagttcccggtaagataacttccaacatcaagtgcctagcccttttttcctcccatcctcgatgaggggcagtgttggcacgcttcaatgctacaaccactttcaagaacaccaacccttccccagatcttcttagtttgagggaatcataggttccttactttaggtgcaacatctgactgagctatcattttagttgctccactgcttttgcccccaggaatcagttaggtcttaccagtttctttgattctgagtggtggtgttggaggatccactaagtggctgaactttttggccgggacttattttatttacccttattgtcagctgtagcattgaccttctggatagtgctcatcaaatcgcacagcatcctggattcaagcgtatctggaaaaatcaagaaaacattgcaatcaaatcagtcaaagatgcaagaaataacaacttaaaccacacaactttaaataatagtgatgtcatgtgatcacaaccatcgaatgagtaattataaatttcccctcttgcaaataaagttacttcttcccagtcaataaagttgtcatattccctgaaacccgagaagaacatagtaagaaaaggacccactttagtgacattcagggagaattctcagttcgttgggtgctaactatttgatctactctattaaaatagtccttcatgtgatatctacgaggatccaaaattagaatataaggacccccttggtctattagaaacatctgagatatcgttggagtacaaattacgtggaagggcattttacctcttctagaagtacttgttctagaaatgttcgcatctggatatgctgccatgaacctagcctggatttcctcctcctcagtgaggggttccaagtgatgacggtcccatgctgcatcgagaagttccttgtccttagctgcctttgttatcaagatcaacgattccagaacagttttctctttgaggtcgctggaggtttgaggttgacacctgccactcactccgtgaattctttggaatgtggctatgaggccatattggcacaacagtttggtagtcaccaagtcctccaccttcaattcctcgttcgagaaggcttcatagaaggtgattcgttgccacaactcgttggaaagcacagttctagggacggacaatgtaaaagataaacaagaatcagaccaagaaatggagttatctttttaagctgtcagaaaaattgaagaaagatgaatttatacttctaaaggcgataaagaccaatctttatggggtacccttgcataggttgcgacttaagttcgtagaagtatagtatctcttccggggttggagcagtctaaccccgggacctacaaaagacatacaaccttgagagtagtttgtatgctattggaagaagctgcaaaggagcaattcctgattttatgcaaaactaggcaaaatatatcctgaggggaaggtgagttctgcaagagatatgagcccaactccatgctctgaaaccttctgcactctaggagggcaactctcctaggacagacatatagtgccacatgagccctgaaatgttttgaacacctccatcagtggagtatgtctccagcaagccataatttctcaacaaatttgttctttgatctatttcccaaatagaatcattaagtacaagaggagctaggaatgtaacatgggacttgcctttgtctttctgttgtcatttagtctgaacaacttcagaaggcccctcatctgaagttggctctttaggatctacattcacatgaggtacgtctgcgaaagacacttcaagaatctcttcaagattcacaagtgccagctggaagtcactatcttcactagacattgaaaaagtggaaagaaaaatccaagtagttagtatcctacatccaaatgacaaatagggtaccgggggaggcctcccccaatactgcttggagaggtccccactggactcgttactagcaaggtcactatcatgaaataacctgctatggtaacaaatcaggaacccagacacacaattgtggcaaacaacctgaattccctatgtcacaaataaagaaaaatgcatacacataacaaagcaaagacgaattatttgagaagctagtacgaacctgtaacgccctgaaccttaggaacgccacgtgtgtgcttttataatcttattatcaataatctattagtttaggaaaagtgtggtttaattcaaaaaaaatatattatctttaattaaatttaaaaatagaaactttagttcaaaa

SEQ ID NO: 218429 - DNA, 2824 bp, Cannabis indica
atatatatatatatatattggtttttaatttgaaaatgacattatgggatgccttaattcttatctctttcatatgcagaagatatatatgtagtcattcaaaagagaaaggtcatcaatctctctcatctttatatatatatatatatatatatatatttaaaatttgtcacaacttctatcattcaataccctattggctattagtgctttctcctccagtgtgttcttatgtctcagctaggtaaacccccaaaactaccctttcaatctatattttcgttatataatatatatatatataataaatttatactcgatctcttttttctttagatggaaaaggaaaagtggtacaaatccttgcggcttcattcttcggttatgcggcggctagggtggcagccgctcgtttcagccggccaaagttgtctgagcagccaccgttgctcgttgaccaacacttgattcctcgcttagagagaacccagtctggccgtgttcaacaacttgaaaaattctcccatttcgtcggtatatatacatacatatatatatatatataatatatgctttagtttatgatcttcttaataaacattccgattacttgaaatgttttcatttcatataattatgtgtttgtagctaggcagctgggatttgagaatacaaatgagtgtgaagagctatgcagattggctatggagtatttgagaaaaccaaaaggatgtgagcaaagtatatatgagtactttggtaaagaagaggaagtggattctctgtatgtgatgttgctggaagagtttgagagatgtattctctcttattttgcttttcattggtcccaagcttctctcatcattagtcaggtattttctctctaatttacaatttacataataataccggataaactttcttaattttaatctttttcttttttcttactcactttttgacgtatttaatttattgtatatatagttattattattatacttttcaatttgacccatataatatatggcaaagcaaagagcttttaaagttgtctcgatcattcctacttaacacttaacaacttttttccactatgtaaaaggggaataattgattagcagagtggaaaagagaataaatattatccgtagataatgtgttaatttgtacagactaattaatgcttttatataaataataaaaattatttaattgtaattttatgtttttattacagtgttacagtgtagagtccggaacgaaaacaaagctcaaaggcttcgttttggcagcaacgcggtaaattaatttatttattctacttaactttttttcagttaattaagagtgtgacatttaattgacagatatttcaaaatatatattgtgaatagtaatgttagttgggtttaggtaacacaataaaatgagctttagttaagaaaaaaaaaaacctctttattcataatatatagtagactccttaaagtgttcttcgggtacaattgatatttgttaggaaatctagctagtattttacttcagtttttctttagatggtattacatatatattttatagttactaaattattaaaaaaaaataaaaatttcaagtggtcttaagtacaatatgattatgaaaaagttgaattaaagagttattacatgttgaaacaggaataaatgtaataacaaaccaaaggtgtattattatatatgttcttatatattattcatgtacttaaaaaaaaaaaaaaacttatactttaataaattcctatctaatataacatttatgcattattactattttttgttggaaggattattcaattcaccacagtgttaattaacaaaattttatggctacctcactcgaccaaatttttatatgatttgagagttgacaacgaatataaataaaacaaaatatttaattgaaattctcctacaataattttattgttatacaatttttttccctccttgtaataataaaaataagaaatacaattttgccatatttatcacgacaaaaatgacatatcacaccattataatattgtagctagcaaaatatatattacaaaatgtagatttcttacgcatttatttggtcattttattcgcatatggttttttttttttttaaattataagcatttatatattacaaccatattttatttgggactcgaactcagaactttcaacacacatccacctacggcccttgagctagcctcaagtatagtttattcgcacatgggtttagtattatgacaagctgcagtactacgtccatgtgtcatgggtggtgcaattctggttctcaataattgaggcactataatcttagaacatgaaattgtttttcttctttttctatactatacatatgtataatattataaaatatatattattatatataacaaggtgcatggtaaattgaatctaataattagtaatttattgcatattggtaaataggaaacaaaggtttgagagagtaaccagagacctaaaggtaactaggttgttctctacattggtggaagaaatgaaagccattggaggaagccctaggaataaagatggccaatgtacggacatcatggtgcccgctgccctgagcgagcggagtccggtgctcctgctcatggggggcggcatgggagctggcaagagtacagtactcaaagacattctcaaagagtaagtaaattatgtccaactatttatatatgataggaatattttatcaaattaaactaaatataagaaaataatatagaattattattatttttaaaaaa

SEQ ID NO: 218430 - DNA, 4419 bp, Cannabis indica
ttttttcttctcatttttaataaacacttcaaagtaaactactatgttttatttacatatcgttgtacaattaaatatttttctatgttcctagacacttaaaattatttaagagcgtaaagtaaaatattggcacttcgatgagaactatataacatttactttttgctgtgtattacaaaacagaacgccagtaatattacaaaacagagttgctctgttttaaactacggatgctcttaaattgctctgtcagttccaaatacataagctcctgcacaataaaattttactaacaccattacaaatatgcaaatataaaatcaattgaccttggaatggacattaagatatgagtaaatatatgaataagaagagtatttgcttaccaagagtgggcattaagatagacatgactgcaattccaacaatcttaagtggcaagccagtcttgatcatgtctaccatttcgatatggccagttgaaaatccaacgatgttagaaggtgtactggtgggaagcaagtaggagaactgagccccaatagatcccggaatcatgaaaagtaaagggtgaacatgcatgcttttggctatctgaataaggataggtataacaagcgtggtggtggcattattggacatgaactcagtgatgagactacttatgaggcacacagccggggcaatgccccagtaaggagctttctccaaaaagtccaaggctttagataatatctcggcaaggccactggtcttgacaccgtccgcaatagcaaaaccagctcctaataagagtatgatattccaaggaagcttcttgcatttgttccagtccattaacttctcacctggtttcttcttgtttggtattatgaataacaacgttgccatcattacctatatttgagttaaaacgacactttttgagagaatgttggctactaaattaattaaacgacattaattacttgctttaagaaaactataaactcacgctgacagttccatccccagctcgaccgttgaagagtgcaccccaaccgggaatgtcgtctgttaatcttcttgtcatccataaaactactaacatctgcacaaactcaactcaatatattagaaagctaaaccacacatactcatatatttactatgtattaacatttgagctaacgaaaagatttaaatgacttaaaaacgcaccgagaatacagctaacaccaccttctcagcaaaggacatcggacctgtaacataatttaactgaatgtcacaaacagacaaactgccttacgtaatttaatgaattttcttccccttcttatttacataatattacatattatataacataacattttttccaatattttgacccaataataatattagtaaatatcttttgtgcttatccagataatatatatttatcaaattgaaaagtgaaaaaaagggggtaccacgctaatttgccaaacatggaaacagaatatggttacaagtaacaagtaacaaattgtaaaaacctacaaacatagtgatcacttttctaatagttttcagtgttacttatacttacccaacaattggagctctctcttcaaatggtctctgtccaaataagcagaaagggcctggctggaacctctccggatgtacaaacagcaaagtatgacccacaaggcaaagaatattaccagagctaaaggaaaggcaaagaaggaccacgtgttgaaactaatgggattttgttcagggaaatagctcctccacatcccaaccaatataagattgacacctgtaccggtgagggtgctaattcctccaatagcagcagagtatatgactcccagaaccacagctcggcagaatttgttgactaagggagattgtgcggagcccgtcgggaagcgctggaggatgcccgtggccacgggcatcatcagcagggcagctgccacgttgtgcatccacatgctaacgaatgctgtcgtgccacatatgcccagcaacaatagtggtgggtttaccgggtcaccacaaaaaatcagtgttgtctgtccatctcaaccgggtcaccacgtagcatgtttgaataattcacaataagtttttgtactataaaaataaatgacttataataatgctaaggagcgacagtgacaccatatattattgataccgaacaaaaataactaaaactaaaactgaaaacgtatattaaaagaaagactaggtaacttgtcgtcttttaacatatattatacccctgtttgttcatttgtcaaaatcttgatactttagatttggatcaggggaaaaaaatataatgatcgataaaagtaaaaaggtgaatgagttttggttacgtacgttgagtgctaatcttctgtgaatgttataatgctcaactgcaagagctaatatgaaactgccgagaacaagggcgataacatcatccatgtaagagtgtgccacgtcatcagaggagcagattccaaatagagggaaaaggaagagtggcgccattgaggtgattggcatgggaacagcctcggtcatccaccaaacgaagatccacgccagcacagccagcatgtttcggctactagtggggccatctagcttcacgcatagacatatcaccgcgcacaataaaggccccaaaaggatgaacacgtttttgggtgttagaatggattggagactgaattggaagctttctgctgggcgttggatcggatggtcaataatcactggcagaagtgggtttttggggtcatcatgatcaacggtgactggagtacttgccattttttacttcaagtgaggagaaagaaagaaataattaaaaaaaaaactgtatgtgctgttttgtttattttttcattttgtgtagtgttgtaggagagccattaaagggtaatggggaaaatggaggttgtagagaccggtacgctttttattctcgaatttggaaaaggaaaactagtggacaattttcaattttttttatttacattggcattattattttatttttatttttttggatcctatccactatatgttatttggtggtctaagtcgaagaaaataagaaagggaaaaggaaaataagaaatgagggagagagagagagagagagaaaaagaaaagaaaacagtctaatgaataagatgattaagttagttgtaaaatagtataaagttgatatatataataagtggttttactaatccaatcgcatgggcccaatagcttacgagagaaatccacatgtctagcgtctatggataacagatagactcagttgaacagtggatgatgctaggccatacaaactgaataataataattattacataattaataatattgtaattaatcatgaacactaaaatatatatatgagaataatggccttggataactatgtggcttgaggagaatggacatggtgactggtgaatacgaaatcttattggtgatatgaggttatagagaaggataacgaagctgagtcagactcttaagatctatgaatatacaattgaaattattatattttgtacaagtggcattgctcaactcctccgtttaattatagattcttctttttttaatgaattattatatgagtgataacgactatatagcctataggcttacttacatacatgtgatgtgagctacataactaaataatgtttaagaaggatggcctatatcgtaaatcttatctctactttccatttaaaggaataaatttctcatgtatcattattaagagagaaatgataagggagggacactgctaagtaccatgtgacatataaaaatatttaattactcacaaagtactatattagtagtgtcatgtgagacaccttaaagtgcctaatatcacttattaataagtttattacacaacatcatattataagtgtacacactcgccgtaacgaatggattagtgttttttatctctctattttatttttcaggtggaacatttgtttgacatctgataatctacatggacttataaaatcaaaggaaactttttagtttgtaggcaaaaaattgaataatcttatattctatcataatttatcctttttaatataaacctagtactttgttcaaatattttaacaataatattcgaagatctaaatccacaatcctcctaaatcatatatatatataatgtaatttctacaaataaataatattattcccacataatataactgattagcttaaaaagaccaagttcgccttacttttgcaataatccaacctaggcaaatcttccaagatttatggtcgtactattgtaacgtaatattatattaaagagattcgttccctcttttacaaaagttaacaaaaaaaaattagagacttgagttg

SEQ ID NO: 218431 - DNA, 6125 bp, Cannabis indica
aactaaaagggaagtaagtcattattcgctaactaagggggccgaacctctataaaaatccttgtattcatttactttcaagttctaattgtgtaacacgtgacaagtatcagtttaatatgattacgttgtcggttagccaatttttgaggtcaacataggtcaaccgaccgagacattatatttttgccaaagtaatgaactcgtgacattacttaaggtgtattgatacaacttgaggaaacacgataagtgaccattaagtcacttggcggtaagtaattagcagatataaacaaaaaagcaaatgaaaatatagtaaataccattacggaggtgtagcctacctacaaaaaaaatcaaatcaagcaaaataagtcttaaacttagcaaggatgccaaaagcaaagcacaaaaaataataatatatcttgtgcaaagatcaggaccttgagaaaagaaagtaatactaagataaagcccaccaggtcatgttgtctcaaaaattataaaagtataataaataaaagccatggggaaagactatttataacgtccccccataatcaaaaagtggttgcatggccataaaaaagaaataaaaaaatgtgttggttatgaaattggatcaatcactatctcggcgaggatgaaggaggtagccgaggtccgcccattttcgctgccaaagttgccactaacttcttatatttctccacaaagtgtttcaaagtagctttggtatcattcaaaaagtgaagacggggttggaacttgttcattttcctggtcatgaaaacgctatccccatagcactttacgcagtgttggcaagtgaccacagaggggagtcaaataagattcctagtcgagacctcatcgactaacttttttgaatcccagagtagatagagctctttcaattccatagacatgttggaaacaggcttcaaatcagattgatgaagctcctcaagcttagccagacgtttcttaaggctcattctcccgttggactttagataggtttggttccttttgaagataggtctgcttacccgccaacatctgagattgagcctgcatcatcagttcttggctttccttcattgccttctccatttcggctgccattctctggtctcgctctctcagagttttctaagccaggacatcatctttcaaggcctttgcctactcctcaacttgcttcaacttggcatgtacccctggaagcccccaaggaagcattgtcatatccttggccaatcaagattttggacaatcgcccaacctcaacaatagcctaaccaagccgcaaaatagtacaaaagcaagcttgagtaattaagaaataaatgaacatataataatgatgacaaagaagggaaatacaactcatcaaagctagcatcaagcccaagtcttgggcctgaaagattgtatttgtcgatgcacaagctgggaatctcttggtgcaaagcttaagcaagtcatttgccagattgttgacgatctcagaagcaaagggagaaagggaggagccaagataattaccaaaccagtccatcatcagatccaagtttaagtcctgtacttggctagcatactgccttggagggacccatcctagtgctcatccaaccacctctttaaggcctcaatctaagcactcccttttgtatgttcatccacgacaaatttgggcctggcaagtcggagttgcaagtgagcctcatccaaatggactggagttaatggaatggaaggggccctaggaaaaaggatcgcctctaaagggatccctaaattggatgtatccaaaaatggagtgtcattggacttggacctttttaacgacatggatttggaagaggaacgctcctagcacttgcctctctggcctttgggtgggactatctcgccctcctcaagtagaatcacatcttggtcgttttggcttgctgcaactagcccccttggagtaacgatcacctctggtaacgcagtagccggagcaacaccaacccccctcggggtctccatttagtaggtctagcaaagcgaaggtatcctccatgggaaggtttggaaaaatagaggcaaacaaaacttcatgagcatcaaatttaaaggcaccataacattacaaacgggttaatcaagctcaacagaggttatatgaagagggcagttctaccccgacgccctaattcctcaacaaattgataaaccacattactaaagtcatcatccctaaaagaaggaactaacttgagatgatgtaagaggaatgatcctggagaattggaacgggaagacttgaccccatcaaggacctacctaaaaaatctcccaagtgtaaaaaatacgtttctttttccttattgccccaccaggactgaggcatccttaacctacgaagtctcctgtcaaagacaacaggcttgacgctagcgtattcccggacagagggtatataaattaaagatgaaggggacttatggacaccgaatgagctggctctggggatccttgtattcaatatcgagaatgaaggatgtgggcgagaggcctttatatgtttgtccgccttcttagctgccttccagtcaactgcactttgggctgaggccacccagtcatcttcctccatctatctttggaaggcgttgtaatttcgcttagcctcctagacggtcaacatccgagactattcctccattaccttatcccaggcgttaggacagacaaccttcgaaaaattcgcatccttaatggtctgaggagccttaaggagacaaacctacccttcgaacagtttgcagtggtcaccaagtccccgacgttcaactcctccttgttgagtatctaagattcacatccttaatggtctgaagagccttaaggagacctaccctctgatagtttgcaacgtttaccaagtccctgacattcaactcctccttgttgaggatccaaaacaccgcttcgtgatccctaaaaaattgagtaggggtcgagcgatcgaaagcacaaaagtcgaatgaaaagaaaaaacatttcctacaatccttagagttcttttggtgaaaaaaagaaaagacttggtccctactatccgaatgagattgtaggtaataaaacccatccttaagtttatctcccctatcgtgtttcaaataaaatatcaagttttccaaatttttacaattagttacctaatcaaaatcattataatagtttgcattattcatttccaagcttttacataaacataaatcaattggcgaccatcaaacaaaaaatgaaaataagagagccaatttgacaagagatgaggtttcaaatcaccaagatgatgacaagaggctttagccaacagtatcccacaaatttcaacacaatagcatgtccctataacaaatagtccacaagaaaatagttcacttgtagctggcagtttacgtgttgtggctaggcatttgccttcagaactgagacttgtcaaggctgtcaaaataagggtggtccaatgctgctttagctgagattctttccgcagggtcatattttagcattttctgcattgtacaaacagatcaaatttattgatcacatcacattattatttctaaaataaaagaaaactagtagagcaatgatatctgtttaacaataacagactacatgattaaactagtatgtaatactcagcaattcgtcgattgaggaatgtattaagatgtatacattgcttatcaagaaagctgtagttgtagaagtcattagcactcatacacatcttcctaatttagaattcgagtaagatttatcgaatgtattaagatgtatacatttgttatcaaaatagttgtagttgtaaaagtcatttacactcgtacacacatcttcccaatttacaacttgagtaaattaaacaccaaagggctagcagtagctcttatttaattgttggtttatatgacagtattatgttgccatctgcaatagtaaaactgccatggagaaaatatgcactcaattcaattctaactagcgttaatcctagatgacttcacactcactttcctgtttaaaaaaattctttaaattaagtcacatcaaaatgcagttcaaaacaatggaccattcaccaagtgatttttgtagttaattcgtataagtttgctcaactatgaagattatattaccgatagaaggtcaacgccatctgctccaagagaaggaacagcacgtgccaagttttgtggttgccactgtggatacacgtgccagtctcgaaaactagtcaccccccgccattcattctcagtaggagttccaagaagcctacacaaaagatgaaatgtgagaataaaaaaagtagtggaaaataaatctaatatatttcagattaaggcaaaatatcaaacagttaggcaacaataaaccacaacaaaacaaaggttaatgtcgatttcccagatccaattttagtttgtgataccgacagacccatactaaacagacctgaagatgtgaagcagttgctggaattcggaatctccgggaaaaagcgcctgccttcttaccatctcagctgagacatataagtaaaacattcaatcacgaaagaccaagagaagacaaagaaattaaacccaacaacccaagatctagatcaatttaccaaagatgcatccgacggaccacatatcaacagcagtagagtaatgggtggagccaagcaagacctcaggggccctataccacagagtaacaatctcatgagtgtagctcttaagtgggacagtaaatgctcggccgaggccgagatcggcgatctttaggatgccacgttccttgtcaagtaaaagattctgaggtttgagatcacggtgaaggacaccatgcgagtggcaatgggccacccctttacagagctgataaagaaagtttcggatcagagaaggagctaagggcctgggatttgatcccttgcgatgggagtcaatgaatttcttgagatcggtgtcgagatactcgaagacaaggtagagaacaggcttgggcctgccgtccttgcgattgtcaacgtgctcaacagagagcaagcggacaacatagagagactgagaaagcatttgaaggagggagacctcacggagggcagtgggagggacaccctcttcgtccatttcgagcctagtcttcttgagagcaaccaactgaccggtggctttgtctttggctttgtataccttgccgtacgtgccttctccgaccttctctagcttctcgtacttctccatttttcttcgatccaagattcagtactgtttgttcctttttgatcagaagattcagtgttgtttgattgagaggagcgctataaccctaggattttgaatttgagtactgattgatgattggggcgtttcccccctttttctttcttttcttgcgaaatctaaccgttgtctttgagtgacgtgtccacctgataaatttaaaatgaaccaaaggaggaacagtttattaaagagatggatttttttgcggctaaaccctccgaactctcaattcacatgctcttaatcatctaaatttaaattttggtgactaaacctactaaactttagttctgttagtaaatttagttttccatccattttcatttaactaatgaaaatggatggaaaactaaatttgctaacagaactaaagtttggtaggtttagccaccaaaatttgaatttggatggttaaatgcaaatgaattgagagtttcgaaggttttgccacaaaaaactgagaaataccaaatggccatttacctttttgttcagaatatttatacactagtttgcagcataaatacttaaatttaattttcagttataaataatttcttaaatttaatttttggctataataatacttaagttatatttttaaaactttagtaggtacccaagtcattatccacatttcattttcttaggtatatttaaactttttttttagaaaaaataaaaatttaatggctttgagtaatcgattgtcacgtgacaatttacttgacacttaacggccagatacttacaaaagttttaaaaata

SEQ ID NO: 218432 - DNA, 6224 bp, Cannabis indica
aattttattgaatggggattttgttttctcgggactctgcagataggggctctgggcggctggccggtcctaatttggagaacgctggtgcccctgattcgaaaaacttacgcgttaaggtatttgtgggaaataatgctcttatttggtggtttctttatgctctttttagttcttggttggaattgtttactttagcaagcaataaatccacggagtaaatttgagttttgcttattatattattaattaatggcctcaggagatggttttttcaagaatgtaattaactcctcatttgttgttactgctaacagcttgttctattgggtgattctggagttggtaaaagttgtattgttctccgctttgttcgcggtcaatttgatccaacatccaaggtgaggaaaatgtcacttgtcttgttatgctaaggataaatttatatatttgatgagaaattccttttggtgcccaagaagggcgggccatttggcctggcctgtggtttttgctctacaggtataaggtttaactccctttctagatacccactttgttttatttcttgtttcgcaaaagtctatgtcctaaccgtaaaatggaaatgaggaggcgtccccttctgtacaacttgtttacctgacaatctggcattccgtttgtatatgtttgaatgttgtagttaaaattttgaaaaaaattatcatgtttcctcattttgtaatttcaggtgactgttggagcttcatttttgtcacaaacaatagctcttcaagattctacaacagtcaaatttgaaatatgggacactgctggccaagagaggtattctttggcaagattttttttttttttttttttttttaaactatatgctgtttatgtgtattcttgttgcaagaaactactctatattgaaaatgaacgtcctaattatgattcaaattcagatgttttatttctatctgttttccacctcctccctccaatactcttttcttgaaatttcacatttttcaagtgaacttcaattgtgcttatgtttgatccagatatgctgcattggctcccctttactaccgaggtgctgcagttgcagttgttgtatatgatataacaagtccagaatcattctccaaagcacagtattgggtgaaggtaatttagcattagttgactatttgcattttatcttgaagtttgtaggataaaaactctctgtattttcctacatgttttatgaatctatttcctcttagtaatatcatttttagctatgtttaaatggttcagataggaggagagaaactcagtttcttgttagaatcaactactcaaaaaacttaatggttcctttcttttcattcattacacttcttgatatgactgaaaatatagatttgtagtgagtaatttcatgttaaaacattttatgcctttgtttttttgtcatattctttggcttagactttcataggaattactttttgtagaagacaaatgtataatttgataacttttcatgatagtagataaatgaacgatttaattactacaagtcaattaacttctattcaagatcttacatatacatagcttatttgttttttttcaatcttcgacaagtcatttaactcctattcaagatctcacatattgtgatggctacatagcttattgtttttttctttaattaactttgggaccagattacactttttaaagctatacacttttggtgaatgttaagcggtagagtttttgacatggaatggactaagtttgtacgatgctgggtccagtagtgaaacaaatcttaccttttgatagcatctcttgtttcataacctatatgtatataccaggtttactacagtttcacttaattggtgatgcaatatcttagagtaaaaaaatctttcacattcgattctgtagaaactgtaaattgtactaggacatggaatgtttattttttcagtgtggaaatttgaaacttgaagtggcactcagatatatttattttgactcctattaatatatatctatttatgatttcatggaatttatagtcaaataattgataaatttgagttttctgcaggagctgcaaaaacatgggagctctgatattgttatggccttggtaggcaataaagctgatcttcatgagaaacgggaagtatctattgaagtaagagccatactacctaatataatgctagttataaattgctcgttcaaacatgcgggtatttattcagctgataaacaattgttgaattttgaaggatgcaactgactatgctgaaaagaatgggatgttctttattgagacttctgcgaagacagccgataatataaatcagctctttgaggtattcatctatctattgttcaagttaagcttatttctattgtttcctgtggttaaatcatctagcggagaattgtgttatctttgattaactacatataaattgtgagtcttgaccattcaattggtgaagtcaatagtacatccttatatgcttggattggaattcttggataatagatttcgacctcgatagtgcatcatgactggcttgaaataccatttaattcataccatgattctaaacatgtgctattttcatttttgcgtattgcaatggatcttaatctatcacataagacacatcagtggaagagaagattagctgagatatttgtctctaaagtgacaacatattcttcttcatttttctcttaacaggaaattgccaagcgtctgcctcgccctactgctcaatgattgttgaatctttggaagtccattagtaaaatgattcacgtcatggggaacccattaccctctgtaattataagatcttgtatattatgatattagttttctataaacgactgcattttcagattattgggttcttctattgaaaggttgtagtttggaaacaccctttttctcaagtaatgaatatagatattcaagagaagagagatctaaaagattgtttgtttgcagggtaagtaagacaaactcttaccttaaatgattgaatttctttccttataattctccaacttgtatatctgtgttttcatttctatcattgacttgagctggccgaagtttcaatgtagtttttatcagcttattttgtggatgcataaagcagttggatttcgtagttgtgttttaccaaagcaactaatggactttaattaattcaagtttcagtaattaattatagcatctccaaatctccaatgcaagggcaaacatgggatggaatactattagtcatcacatttcttttaagattattttttagttttatgtgttattctttgtttaaaaaaatgaaaagaaaagtaattctaataaaacatagtgggtaattattgaatgatattaatttttttgtagttttttatttattttagatagagaatgttttattacaaaaaaaacacagaattacagatttgtagacccactaaagccaaggtaggtcaaagaaaggatgatattcgggtgtttcctatcgaccggataagccgatgggaaaggatctccccttggaatgagcaaggggagtggaatgaacaaaataagtgtgagttcttggtttaggtatcgattcataagccaaatgcagcgttacatttgacacctaaagaagctttgcctcatcactgtaagagcttctggtaagggaagaattcagtaaaaatacaactactaaaagaagcaactgttgtagtcgccaaagggtttgccaccttattgcgcaccttatttcgaacaatttacaaagaaaggatgttgttgaatggcctgaaaaacattgctcaaatccttaagacaagcagctcctctacagcaaatctttcactatatcttggcactcgtatacattaaaatctgaggttatagtattttcagaaagtaagtataatacgaacacctaaccctaacaaattaaccaactacagtgaactaaattattgtttagagttttaaatacacttgaaatatattgtgaaagatttgaaaagatgttattaaacaatcatgacattttgaattctaagatcaaccttagttttaatgaaattatatacttctaatttatgtactttaataataattttacaaaagtgtaagtctagtccgttgctttggtagaaaagaaaatatatttggtagagaaagaaaatctaaagaagatgaattaatataaatgaattagttattttttctttttttccatctattttttttaaagcgaaaatttctctctcatcaaacacatagcattctcattcaagaactttgttgatgttgatatttcttttgttgtgcattgtaaaaaaattggctaattgtgctcattcattgtcttaaattttaatggagcaaaagtatgacggtctcacttatttagctggtttttttttttgcttttatttctaaaatctttgtgtttttcttttttaccttttcaatgaaataatctttgtagtacacattaatggtgaagtatattcacttaaactaaatttatgtcgaataacttatgcatttgattttataaaaatttagaggtctgagtctagataataaaatattatctttaaatttgaaatattgaaatatttaaactgtttatatatttgaatgtattttttaggtgttttaattatataacattaactaatttattaaatatattttgtatttgtaaaaacatttgaaacatatgtgcatgtgtatgcagtgtcttttaatattttaaaatgtaaaaagtgatgtggaaagaattgaaacccataatctcaccatcaatagaatgtatttgtgctataagattttgatgcaattaattgaattaaatatttatatattataagtttctacatatatatatatattaattttaatttttttaaagccttaaaaattatggggcctgagacctacacggctgtcggctgcccactcttttggccggccctcgtaagattatatattagaagaaatacatcattttaaaaaaaaaaaattaagaatgattgacgtgatgttataatttattttataatattatttatgttttgttattaaatgcataatattatatatattagaagagacatgagatgattgacgtgatgctgcaacaaaataaacgaaaatgtaaagaaaagagacgaaaaagaataaatatgtgtttaaaaaaaattgaagtgcctattataaatctgaccctatatcatattaagactcttattatttattaagtgcaaacaagatgcatccaatactgactaaaaatgatatcaatgtttttcgtttctttcttaacataaaccttaatagagatgtaaagtaacaaaaaccatgcaaggtgaatataatgcttcgtaaattttaagtacataaagtaaattaaaactgccaaagatgtgagatgaaagaatgatggtacgtattggtagctatatatatcttcaaacagagacaatatcgatagaaatctatgcttccatgacaagggatggcttaccattcatccaaacaaataacatatacatacatatatatcataagagaatgataaaccatctgctgtcacggtcaaacagcacaaatttaatcgataatgtctatagcatttgtttaaaattattaccaaactaggcttagtcaatctctgcttatatactattactagctaggagttattatcataatgttaaccttaaactttaatactatattattataatgttaaagtaatgtacaaaggttagggttaagagagaccaggccttggcggcggctgcaattgagttgagagtaacgagtttgaatggtcatgatctttcatagtaaaatttgactaaatgatctgcaccctttatttagacttcgagtagaaaccagggagcttttaacataaaccctaaactcataatggggtttgggcctgaattgcataggcttatggtgttggttaatgttgggctcctcatgtggagatatttgcagtgaagtatttgtattgataatattaattacacttgagtagctaataaattttatctttcgaaggcaaaagtacctaaaattaatttttaatttcacggtttgctgcttcacattttatgaaaaagatatttaggtagcatttaagttttttttttttttt

SEQ ID NO: 218433 - DNA, 4569 bp, Cannabis indica
cattataaataatattaaatatatattcataaaataaattaatatataagttcaattattattattatgagaccgcgcaacgcgcggttatattaatttatcttatatattattatatataattaaacatacagtacactataattccattgccatatgaaatttctctatcatagagttgatagttgaaacttattgtgttacaaatatacgagagtacatggtatatgttttattgcagtatattattcaaaagtattgaataagtcataatagtataaatatatagatatttaataatatttataaggtggaggaaaagtgttcacattcggacaattttttgcttgtgcaaacaaagcagaggaggtgactaattgggtgggtgagttggcgattaattaagtggatgaacaaggtggtggatgtagattaggttaacgaggaggagcagcagtggtgatgaattgaattagggaggtagacgtgaattaggacgacgtgggggaggtggaggtgaacgagggggaggtggaggggaaaaaccgagtggtggaggtgaaggtgaacgaggaggaggtggcggggataaaccaggtgggggaggaggaggataaaccgagtggtggaggtggaggtgaaggtgaacggggaggaggtggcggggataaaccaggtggggaggtgaacggagaggaggaggcgggaataaactaggtgagggaggtagaggtgagcggggaggaggtggcgggaataaactatgtggaggagatggaggtgaatgacgaggatgtggcgggaataaactatgagggggaggtggaggtgaacggcgaggatgcgttggttggggagagaatcttctatgcttagggtgtcgcgggatgtaatggtagtgaggataagtaacatacttaggaggtgctttaacaaataaagcactagcacttgacttagaataatcataaataaggcaatacatgaaagcaaagaatagttgaggccaaagcctcaatatcgtttccctcctcattttccctaatatcccaaatttttaactatatcttaataagctaaaaagtgagatatgcaaaaaggtaagaggaactatcctttatatagtctctatctatatcaatgaatacatagatttaaaattgttacaatttgacttatttcatttttgttagtacgtttgataataaatttcatgaaatcttaaatataggaatctaattctatcttctgttgatgtgttatggtcatttattgcaaattaatttaaatatgttatagattatgggttaaatcttaattgatacaaaagttgacattatagaagaaaggtaaaaggctaacaaacttcaaatataacctccttacaaagttacaacaagttctatttacaaagttgtcatcttctccttaatattattttaaacatagtatatagttgttgtccaatatttcttccaaaaatgagagcactattatttttcctttttttttctttgatatcccaataattgtaatcctaaattttgtataatgatgtctattttttttttgtattattttaaatatctaaaataaaatgagcacatttattaattattagtagtgtcttataatagaatactgtaaaacttaatttagccttaaataattcatgagaattaaacaatagaattatagattagcggaagcgtaccggagttcacggaatcgattttaaatggtatgatcttctaattttttgcatcaaagttttctatttgaaacttgagttttcttgatgatgggaattcaagaataaagatacgatatctgaagcgatgcaaaaaatgaggaccaatatctgtttattaataactgaatgaacagtaaattaatcatttttgactatttctaatttggcccctcatcaaattagaaattgtccaattggtatccacatattaaaatcattacaattattcccttaagtcataaattttattctaaaatagaccacataaatttgacttatttatttgatgacccaacacacattttatatattgtgaccccaataaatttctaacagcttacagtacccatgaggtagcaccttgtgattggttatcaattttttcataatagcttttaaattaaattatgtgagagtcaataattaattgcatcaatatcgatatgacactttataatagtgttaaacaaccccactacaaaaggcacatttaacattggtgaaatgtgtccgttaacgtaattgattgacgcaatagattaccctaagttcgagtcgtgaattgttaatcaatggctataagtactcaatggcatcagttgacataccaatacaaaaatattagagaaaaaattaagaatatatttgaccttaagctaaaacaacgcttacgaccactgcgtcagggacccacagaagcaaataccgtaagcgtctgttctcaactggtgcttacgtcattattacgccaagctgccaatctgctcattgatgctcactttttggtggaggaagctagtcaaattttgagtattcctagatcttcatcgactcaagataggctcatttggcattatcactcttcgggtggctacacagtgaagagtaggtactagaatgctattcgtcttttcggataaggttgtgatgggtcttaatcctggtggaaatatttatggagtttgcacatacccctagagtgaaggtttttatttggaaagcttgttgggattggtttccttccaatgtcaatcttattttccataaagtgcctactaatccgactttcctatgtgcaaccaagaataggagacctcgcttcatgttttatggagttgctctaggcttcggttggtaattaaaattgtagagtttttgttgcatgcttcttctatgttgtgggggaatcttttgtctttcctacgtgctcatgagtatcttcttcgaaacgacgagatggccaagcttctagtacttctgtgcgtacatggaatcgtcaaaatcaatgggttcattattagatatggttggcgtagtggaatgggacttctcttttgcaaaaatgagttcaatcgagacgagtggtctgtctagaagtattacaccgctttcttggtgcttgttgtcatcggttaggtttaaacttaacacagatgctgggttgtgacccttggataggcgaatggagtatggaactgtcattagggatcatgaagggcattgtgttgcttctgcgtcgtatccgacagtgggattgttgtcccctcaagtggcagaggcgatggctatgttggtggggctccgtttgtgtagtcggctaggataccacaacattgatgcggagtcagattgtcaagttgtcacgaagtttttaaatgcgaaagatccttgtttggcaacatttggctcgactttgagtgatatttttttaatttttagaaacatgcctatatttaaggttttacacagtaaccgctttgtgaatgttattgctcatgatctggaaaaactggctctctctctcttgaggaggtgcgggtctggtggtcggcaaggccagccctgtgattgggtgggccttaagagaaaaaaaattattgggcccttcatttaaaaaatatatatgttgtctttttcgaaaactattataaaacatgtataattttgaatgaaaaatatttttttgggcccctaggttgggtgggctctaggcgcaggcctagcccgcgcgccttagcccaagctcaactctggtggtcggggttacttgattttgtataggtctttacttttttttttttacgttgacttaatgatatttatcttttatacaaaagaaatataggaatttataaataaaaaaagtaaaaaatgttgtaagtgatacataagttattattttttttttttaattttgtctaagaaattatagtaatcaacatttatatttatactttagttacgttagctggactgaattaataaattcaataatattagagcaacttgaagagacaattaatattaaagaaattggcaaggaaaagtaaactgaagttggtgatgaaattcaacgataaatgtgtaaaaatttagggacattttgtcatagttatacttaaatattgtaataatatctaataattaataagtatataaatagcatgcatatggatatgtagctgcaattaataccacaaatagttaattcttaggaaataactccttcctatcttaattttctttaataaattattaatcaattttatatacataaaataatctaaatatatattatgaaaaatattacataaccaaaccacttcgcaatctgttagagagtctcacattgctaatgtgtggaaagataatagaatatataagaggaatgagctactcctcctatagccaattggttttgagatgaaacctcattcatcttattcccaaattcctaacatggtatcagagcaaaaacaaacaaacaaaaaaaatctctagcaactattcaacccccaaaaaataaaccgatcgaa

SEQ ID NO: 218434 - DNA, 2646 bp, Cannabis indica
agaggagagagagaagttggagtttgagagagaatagtaggatagagctagaaatttgttgaatttttagagggtaaattgggagagagaacaaaactcttatcttttctcatttcttcttctttcatcatcattcatcattcatatctttttttttatacctacctactacaaaaggagagggggtattgagagaagagaagctttttattttgggaaaaaacgtgtaggagaagaattttataagaatttcatcattagtttttaataaaaaaaaattgtcactattgtcacaagtgacaagacaactcatcacttttatcattagttttaataaaaaaaaaaattgtcacaagagacaagacaacttatcactttcgttattagttttttatataaagaagataaatgggtttagtatggggtaacgggaatttagcatagaagaaaaaaaaagactcaatatcactaatgtgacaactcaagagagtagaaaaattaaagttttaaaataaatatagtaaaaatatataatacatatacaacacaaaagttaattatatcctgtaatattataaaagtaaataaattaataattttaatatgagatataattttcctattatattagcatatattttttaaaaaaaaacaaaaagaaaaaactaatgccgtgttaaactagtcgcaattttttttacaaaaaagtagtagcaaatttgattagtacaagatattgtattatatcaaatatatcacattttcttatttacactttgtgattaattattatttcttatatacaatctattatttagcgtgttagaaaattttcaattatttgtttataacattactcctcttaaaacacatatacaaagagttataaatgtaatgacttgctttgatagcttttcccttttcttcgatgaaggtggcaccaccactttacattgtgaaaataatcactagtaaagaaaccattgagaggaaacatagaaagtggattatttcttttttaacccattttcatgatctactaattttttgcttaaaacttttctctacaacaaaagtccggataatggttattagttacctacatacatttaagtttcattacatttctccttactattttctctgtttcttacgaaagagaaaataataagcctgtgcagtggtcattcactttagagtttagagcgatggaaaagaaaaaagctgtacaagatcacagcatggctgagattacaagggaaaagaaaagaaccatttgtacattaaatggtacaaatacaatgttatgttcaaccaggaaagcttattctcatttctttgtcctcccttttaaccagccaatgacatatacacattacaaatctaactaattttttccatttgaatgaaagtacaaggccgccaaaacatagccacaagaagtgtaattgcctcagtgaaagctgcatccactaactgcattgttcattatatatagtactcatccaaagcctatacttggtgggcttccttctgttttaaaccatctgctggtgaatcctttatttcaattctctctttttctttactacgatcttgtttggtttcccataattttccactcttcgcaattgctagaattagctcaagttgttttcgctgctgctcctgcatatttcagtcagtgcaacaaattcaaatcacacaacaagataacaataaatctacaaacaaactagaactagaaaacattagcaagaaacacaatcatagattaaatctatggaaaaatatatgacaacagtatatatgtagaccaaaactgaagtcagaatcacacaacccactggtgtgtgtttccaaagatattatatcttaaaacccaattgttaaaaaggcctagtagttaagtttattgccataggagatagcttagtctcacctgcatagccagcaaagccttttgcatctcaccaagctccttctccagattatcgtcttggattgctaaagctcgagtagcatctgaatttttatgggccaaagctgcagccttcagacacaaacataaaactttatcagatgagaatatcacaataaagttcctaaaagaaggttaaagcatcctgcttcaaaatcctctatcaaaacttctgtgtgaacactatcgtctaatcttctcaatcttaaagcattttctaggcaaaactacattctaatcctgtcgtggcatgtacggttccatgccttaatcattgaacacaaacacagaattaaaactcactcctaaaaaggatgagaaaaaagaaaggctttagaagaacaacacaaagaatcttaatatacatgcaaaacaaagaacatctgaataggcattaaaatcataatttggcttaatattgtcattaactaaattatatgcaaaaacaaatgtccatcatagaatgcaaccatgtccaatctatttgaaatttcagataataaagatgaaagcttcccttctacctatcggataaatgataattggtttttttaaaataaataaataaataatgatggaattttccatagagtccaaattccttaaaatacacttgcatgaactatcaccaaactcatcattaacttgaaatatatcaatacctc

SEQ ID NO: 218435 - DNA, 3223 bp, Cannabis indica
atacttgtgagtagatctaagttcctggtaaaataacttccaacagctgagcacgtcacacttcagcagtgaatggtgacgctttgtgcaatttgtagacgagttttctttgttgtgcgatcatcctcagagctctcttgatcaacccctccaggtgctacattagtcgctggtgcgaggttagggggaatgaccaagttgttgatgggtgcaacaacattgacaggtacatcaactgtgttggtaggtgtagcaactgcattgacaagtgcagaaattgtgttgacaatattattgattaccgctttaggctgtcccaagggagagatactttcattgtctgttcagggttcatggggctccctgcctgtggtgtttctatggttttcaggtgtgaggattgtgcgaggaaagcttcattcaactgatctcccaaatctcctctgtggacatggtacctgacccctagtcgtgtgaaaattgaacctgaagaagtatatatgttaggagtacgactgtcagatcttaaagaagaggaaatagtgttagtattgcatacttctagtgtccttcgatggtcgagactatgtggatgacgttgttcattgtcgtcatctttatagggtctgtcctctctttgacttctattgacatctcttgggatgcagaatccctgctgatcgtgagaatgcccctccctaaacgccattggttatcatttgggattgtgggtccctttcctcgtgtgggatttcgaggcggtttgttcaaatcgagtcctcctgaattattctcgtatgaacattccctctcataatacctacaacctccacttataataattcttcaccaccatgcctatattagtattattacgtaccttgttattaatgttcctcgtgttgataagttcacgtggtgggggtgcgtttggccgggttacgtgacatgcatgctacctcgatctgtaatgctcgcatttattcctccatggtcgtatattgtgcgaccgatagttgtaccataccctcagcagtgtgcgtgggtgtgatcggtgggtaatgagcaatggttgttgtaggagttgaaatctttccagcagctctaatagtagtatcattgtgatcttcctcaaaatcatagaaattttactggatcctcattttagcgtcaaatattgtcggaggaatttagacgacaccaaaatagagagtattcgagcaaaacaagaatactcacaagcagatacgctcgctagtattcatctaaaatggcagatactcaaaataaagtaacaagtaatagaatataaaacaatgtgtatataaagaaagacagagaattatatataattggtcagtcagagttcgatttgcttagtccacttttaaaagagatttgtgattagttttattcgagttggatcactcctttatatagaaagcaagtgatccctcaaattacatagccggtcagacatgaccgttacatcattaattacattcaatgaagattaaagatgtttataataaattaaaataaatactaagacagtttcaaccattctcaattaatactcaaaatgggtgtgactaacgaggtcgtacatcagccattaatattcttaatcacatgaacttgcgggctccccgatgttactcgcatatatatgaggtctttagactattcagatgcgtataaaacctctaggggttcgtacaaagtagaacacctgcgactatactgattgagatttcatgtactgacaacatagaacttgcgagttctaaacgagttgtcgtgcagattaatcgttcacatcagatgctcgtaaagatgcaatctctacataggacacagaggagaaacatttggtcatcacatataattgatacatgcgcgactatgctaacttctctccatcatgctttctttactattatatgtatagtgcatgactagattttatctcagtcgcatattctcacaagtttcgatcatgctggatagccttattgggactgctactgacacatgaataattccttcaatcagatccaaaatccaacacatagttatatatgtatatgtgtatatatatgtatatgtatgaggtggtggctgtggtgtttaatttcatcctattgtcacaattcattcttccaaatgtatatctgtgactgtatgcatgtatgccctatatcaattattgtgaggattgtataccattcattaaacaaaattaaggattgtcatgagctacacaattacaatatagacatataacgacttcttttaattttttttttttaaaaaaaagaaaggtaaatgagtaataacacaaaactgtaaagaatacaaaaaacacaaactatattatcgatgaatatgtagatctgaactttcccacaaacaaccaaagaattaagtcaaaatcggacaaagacaaaaagccaaagaaccatgagaaagtcaagtggggtgataataaacactgttatatatatagggatataattttattctgttattatactttcacggattgtactctgtgatgtagagctgtcatcggatgagagagttatttgatctgacgactgaaattgatctaagggtaataatgagggttaaaaataaaaacgtaccttgacactcaatgtacgctgacacccatctaatgtaccatggaatacattccgtaaaagtacatcacgggacaaaatcatatccctatatatatacaatatatatacaataatatttaggatggtttgcgagaaaaatcttataattgatgagtttttggtcacggggaagaggacgtacccacccacccaccaccaagtatatgatcaatgcttgtgaatataaatatgagtatgaccacaaacatgtgtgcacaaagagaaggagtgtttgttcagagacagctataagtaatgtcactataatatattcaatgatatatatgttactttttgatgactcactatccctcacataaatgtatacattataaggcttgaaaaaaattcttatcctcatatataatgtatattgatctacatataataccattattaagacgtttgatccttaaaggaagaaaacaaaagaagaaacaaaaaatgtagccataattttgtgtgacgatggatatggatcaacaggccaacatggtgaatatttaagatgagtgttagtatagttgagtcagctt

SEQ ID NO: 218436 - DNA, 5888 bp, Cannabis indica
aagatcctggtaaaataaattcccaacatgtataaggtctcaaagcaaaccacttgagtatcagcccgttgtgtgatgctaactttgatataagttttcctaaaacccaattcttagtttcatctaatgaccattctgtgctgataggcaataaaacttttgaccattgttatgctttttacaataaagtggtttgtcatcaaatactcttggacaaaccaaatccgtggccaacccaagctttaactatcaaaggattgggtgtgtcgttaggctatttttattctaggttttgtgtaatatttagagttatttttagccgcttttaatgtttttaggacagaactatatttgtttatagtattttcaagttttatgtagtttgtataagtctagagcatcaaaatctaataaagaactgaggcgagatgaatcaaagtgaaaaattgatttttagccattcatggctgcaacgagatgcttatggttgccaataaattttggcacaatgaacgatttgtggcctgatctagtggctgcggtgaggcttactgtggccacgactaattcttcaccgtcgcgatgagatgacatggccgcagaaacacttttgtagagaaggcatgatttcatgacggtgatctcgccgttgtgaggctattggtggccgcgacaagagagtgcatataactcgaggccaatttcgtatttttgcaatattttgagtttaaactgattctatttaaagaaactttgagttagaaagtggggactcaaaaaattaaccttagaagcagtaaaggatgacagctagagcgagagtggcaacccgaatccattccacaatcaatttctttcttctccttttatttcttttatgttaatttctatttttagttttattatgggcatgaacacggatatcatgaactaaattcctaatttagtgatatgatgaatgttcgttaatgttttcccgatttagttaatgtgattgttagtttttctttcttggattgtgtgattagttcttatttactttaactaaatgttttagactagccatcttgaatgtgatctatgatcctaatatgaaatctgagaagtgaatattaggaaagctctaatagaacaattataaggttaatgtaaaatgagagtatttacataacttatgtgatatttagattctgtaattaatgcaaaattatatattaatttacttcagggatgaaagtagataatatatgatttatgaccttaataatctgagaagagctagggttattttcataatttgtcatcacttaaagggagaaaattaataatttacattaacaattgggtaactgaaataacaggattcatattcttaatcattcatccatagtcaactacaccttttattgtttatttttagtcttttaattttcaataattaattgctcaactctatttttgattataccaaatagaaacacaaatccaatttagtggtactcaatatcaattccctatagattgacctcacctgcgtgagtatttaactgcaatagattacgtacacttgcgtagactataaaaataagcaacaagtttttttggctccattactggagaattgaataaatattgatattacaataattagattaaattatactttggtaattctttttgcttttagctaaccgatttcttttcaatttttcttactatatttcaggtattggtagtttatgcgacgttaaggacaaagtgtaatagtgtccgttgatcctgaaatagagaagacatgtagaaaaacataagaaataagagtctagaaaggagtgtagtgggggttgaacatgaagtagtcatggctgacaatgccaatgtcggcaacaatggtaaaaatctgggtgtcatagaagactaggttaaaggtcgtaagcctgagagattatgtgctaccaaatatgacagggactagatcctgtataaggccacctgccatcgaagccaacaattttaagatcaagctggtcatactgcaaatggttcaatccacaatccagtttgggggactgccattagaagacccaaacatgtatcttgataactttgaagagttgtgtcagacatttaagatgaatggagttaggggatgatgccatcagactgaggttgttcccattcttattaagagatcgagccaagagttggttggtatctttaccaccaaattctatcaacacttgggagggattggccctgaaattccttttcaagttctttcctcctaccaaggttgccagactgagatctgaaattaacaacttcatccaacaagacagtgagtctctctatgaagcctagaagagattcaaggacttaattagaaagtgccctcaccatgggttaaagaagtggatgcaagtttataacttctacaatgggttaactagcacaaactgcacactaattgatgcagcttctggtagagcttttataaagaagagttctattaaagcctatgagctacttgatgaaatggccatgaaaaaccaacagtggtcgagtgagagaatccaatccaagaaggtagccgatatgcatgaagtagatgtcatcataaagcttacaactcaggtagaagcactgacaaagatgatgacagctcaagtcaagcaagctcaggtagtatgtgaactgtgtggggggcctcacccctatgatacttgtcaagtaaatgttaacaatctactagtagagcaagcccaagccattagaattcttggaattggtgactattcttctattgattgagtccttcagtacattgaagtgcagccaattggccaacctcaactttagcaagggttagttcaatgagaaataggctaccttttcaaaggaatcctcaaaaacctacccaacagccaagaaataatggagggtctaatattcaagtagatctattgctccaattcatgatggagactagatcctctgttaaaactctagagaaccaagtggggtagttggatactcaaatggctaacaagaataaagataaacttgcctagcactaaaaaattcaatccaaaataaaattgtaaggtaattactttgagaagtggaaagaactatatcaagccgagccaagacaagttagaggatgaagatcaggatcaataggcaccagcatcagcaccgccacaagagaagaagactactaaaggtctgtaataaaaagaaacttcaccttcaatcaatattgatcatcatgtgaaaatctcttatcctcaaaggcttcacaagaacagcatggataagaagtttagcaagttccttgaagtatttgaaaagctacatatcaacattccatttgcggaggccttagaacaaatgccaagctaggtcaaatttatgaagaagattctatccaaaaagaggaagatagaagattttgagacagtagctttgacagaggagtgcaatgcaattttacagaagaagctccctcctaaactgaaagacctaaggagctttaccataccatgcactattgggaggctcgagaatattaatgatttgtgtgatttaggggctagtatcaaccttatgcccttgtcagtgtttaagaggctgcagcttggagaggacaaaccaacaactgtagcactacagctagttaatttctccttatcccatccaagaggagcaatcaaaaatgtccttgtcaaggtggacaaatttatatttcctgctaatttaatagtgcttgacatggaagaagataaaaatattgccatcattcttgggagaccttttttggcaacatgcaaagcactaattgatgttcaaaagggagagctaaagcttaaagtctaaggagatgaggtagtattcaatgtactcaaggcgatgacttatcctgaagctagtgacaatttctttttagttgatgtggtggaaaagttggtagagtcaaaggaacaaattgaagacccttttaatctgactttggtacaagaggatgtggttgataatgatggaaaagaagtgatgaagtatgctttgtggtttgattcttatgggccactaaacagaaaatactatgaagatcttagagtgattccaacgaagtcagttccatttattgagaagccacaataacttgaactggaagtcttgccaaatcacttgaggtatgaattctcaggagataataagacacttcttgttattgtgtcagcttcccaaactacagtggagacagaaaagatgttgagggttttgagaaaacacatgagagccattgggtggacattttccaatatcaagaggattagccgctcaactgtgatgcatagaatcctgatggtggaatgggtaaaggcaaccattgatgcgcaatgaaaattgaatccaccaatgaaagaggttgtgagaaaagtagtcctaaagtggttagatgttggggtggcctaccctatttcaaagattaaatgggtgagtcctatccaagtggtgcccaagaaaggaggaatgacgctagtcaagaactaaaagaatgaattgattctaaccagaactgtaactgggtggaggatttgagtaaattatcagaaactcaacaaagctacaagcaaagaccacttccctctcccattcgttgactagatgcttgacaggttggtaggacaagagtactactgttttattgatggttactcaggttaccatcaaatagccattgcaccaaaagaccaagagaatatgacattcacatgtccatatggtacttttgctttctgaagaatgccatttggattgtgtaatgctctagcaacattccaaaggtgtatacttttctaatctaattgagaagtgcatcgaagtgttcatggataacttttcagtatttggttcatcttttgatcaatgtctgagtaatctagaattgttattgatgagatgtgaagactccaatttggtgttgaactgagcgaagtgtcacttcatggtgaaaaaggggatagtactagggcacaaaatttcaaaaagaggcattaaggttgacaaagccaagatgtcaacaattgaaaacttatcccctccagtgtcagttaagggagttcaaagtttcttggggcatgtcggattctatagaagatttatcaaagacttctgcaagattgccaaacccttatctaacttacttgctaatggagtgccttttgagtttgggaaggagtgtcttgaaacctttcaaattcttaaagagaagttagtttcaacacctatttgtcactacaccagattgggagttaccttttgagatcatgtgtggtgtcagtgactatgctattggagcagtattgggacaaggggttgataaggtatttcatactatttactatgcaagtagaaccttgaatgatgttcaactaagttattaaggagatgttggccatagggtttacatgcaacaatttctgaccctacttaattggccatagggtttgcatgtaacaaattccgacacttgtcatgtgttggtaaaatttgtgatttaaccctttaattatgtgaaaaaataaaaatttgtcatccttagacaaattaaatttcttttcacctaataaagtttaaaatccccaagtttcagagaaatcatcaagaagacacactcgactcgcaacgacgacaacttaaatcagtactccaagagaaaacaaaataagcaaaagacaacatgcttattattttcaagttaagaagggtacaataacaaaagtctttcccgaagttctcgacaaacacttttggggggaaaatgttatacccgattttcaaaaaataaaaaaaaagtcaaccttgtgactttgaccaagact

SEQ ID NO: 218437 - DNA, 3330 bp, Cannabis indica
aatcacgtaatacgcctatgctagttagggtgttacaagagtatctaattatggagtgcatacctaggcagcaagcactatgcactacaagaaatgtgacttcttttggcacattattgcaccaaaaaaaggagactaaatgcgctggtaaacttttttggtgcataactacatgcaccggtaaaagctgtctacgaatatcgtaaaagtgcttttgccgatgtaatgcgcttttgcataggcaaaatcggcttgtgccggagctattatttattggtataaacaacttttgttggcgtaatagggcaccgacaaaagttttggctgaatgctttggctcttcattcaacccctttatgctggtgacttttgccaacacatttggctaaatgtgttgacaaaaattacatttcttgtagtgatgccactcaggtatgtagctctaccacctgggtggtatattcttgctttctgagtagtttttagggtgcggttttgttgatatcaaagttgtcttctacaaccaacgatttgagaccttttggaagaagatcaatcataggacttaaactaagtgttttaacaacttgaagattccctccccaggtatacacttgggcgatgtacaaacagagcacgaacgaagaattatctcaactacacatgtaatcccacgaacaacccttggatgtggggtttacttgagttgagagataagaaaatgctttataagaaacaaatgagagaacacaacaccattctgggagcaccgtttggagagtaagctattactgttgaaattggggctgaacccttataaaaatctaatgtcactattattactgttgtctttgctatcatttattatcgtttttttgtcatttacttacaaaccatatatatatttcattttaggttgagactgagcattcttgggtatttttacaaaattactatttttttatctacatataaatgtattatatacaattttttggcattcgacaaaaaaatacaatttttggattgtgggtttgggtggatcctaggcataagcctagctcaccttagtcataggccgacctgaacacgtgcctagtggaaaatggacaataattaggtatttttacagaaaaaaattagatatataagtgcatacaaactcaaaaataataaattttcttctataaaaagaaaacaaaagaaaatttttggcgatgacaatgtgtttttttatatacataatttatttatttttaattattatacttattttattattttgtttaagttcaattttctttctttataacatgatttaattttcatttttggattaaactattttttctactttaaattagtttatattttttattgatcatgttatccatattttttaagaagagacacgtgacgtaaactggaagataatcacctaattaactatcgtctaagcctttccgattgtagaaggccaactgagacctggaacgggcccgggcccggtgaaaactcaaggccctaccttgagacacaatgtcctttcaggacctggaagccttctcagccttctgggactcaaacaggacaaagccctctaagcttacaataagaatgtcagatgcctatcatgatgtggaaattgcatatctcccctgatgtgtttgtctttctaacacataatcagatattgtcccaagtgtcagacgatggtagtccgtgcacctccactgcatacacccattttgtccgacgactcctccgactattttgtctatcaggtgtgatttccacacgataagtgtctagtgccagagtggtctcagttgtacagatgctttgccccacgaaacaatatcttctaataggccaaatggtcatgtctattgtgtatttttccccaatagtgggcatgcttctacgtaaaactcgaatgggttatgggtatgccaagacccaaactctaccctatataaaccccattatccctttatgcaaaggggacaaaagacctaactaaaactctactaaattactctttaaactttcttcttcttcaaggggaaacctagagagattgtcgtatagccagggttagggttttcattgcaaaacttacttgtaatacatttctaaagcctaaaaagccaacatattgactcgtggctaaggataattaatatctgaaccacgtaaatcctacatcacatttaattaaccgttatttaatttcttaagctttcacttatttagtttctaaaaatctcggtaaacagattaaaatatatgttttataatttttttacatttcaaaatcaatataaatggggtttttttttttttgaaaaatttgaccaatcattttgtgttacgtatttgttaagtcatcactcaacatctttgttagaatggatactaactaataccaacgaaaataattattgaatgcttttgttgtgaaaaaaaaatagctactaaatcaataacaatttaaaatattgggtacttttatgaccattttctctaacacttatacaaatctctaatttaaatttagccttaatcaattcatgagaaattaaccaataaataataaaaaattagcgaaagcatactagaattttagaattaattgtataaaggttaagatcttctgaatttccagtcaaattttttgggaaccttagtctcttgatagtgggaattcaaattgtggactatcttctattacattaataactgtctaaatagctacgaatatttattgatgatttctaatttagctcctaagtaaattagaaattatctttatcgtatccacatattaaaatcataacaatatcgttcttaagttataaagtttattaccaaataagtcacataaatttaattcatttatacgatagctcaataccgatttgtatatatatgaccttatatagataaattcctaacaatacgtattacctctattactctattagagtgaatagtaacttatacccaagaagtatacattatatttggtaagtttgtcgtgaaaaagaaaaaaaaaattaggtactaaataggggtgcacatcgggtgggttttaacgggttttgggtttttgagtttgagtttcttgggtttgagttttggactcttgggaccaaacctgcccgtatggagactgagtgtttcaggttttggatccgagtgggtcgggttcgggttgggacaggtttggatggatttcgagttaggctagacttttttttaatatcacttttctaacaaaaagaaaaaaaaactacaaaataatacaattatacaatatattattat

SEQ ID NO: 218438 - DNA, 4125 bp, Cannabis indica
agttgttagttagttctttccttttctgttttgttgcttagatcatttgtgtataaactctattggttctgtaataagattgagattctcttttcttctccattactcttttcttcctttcttctcttttgtttagcttttgttctcatcaatggctaactggtttaacaagaatcttgaatgaggatctccctaacaaggcaagacttccctttttggttgacaaagaatgctttttgtttggtaattcagaggagaattgtctccatttattcaaagattgttgttttgtgaaagctatttggtttattggtgcttttccaagtcatatagacatgatcctgacgattctttgtctcaggtagtaaaatcctttttgcttgttgtcccttccaatttgcgattccaggccctgctttattttggctatgttgctgtagaaatttggcagcagaggaattccatcaggttgtttgggggatctgctaatctgttaacaacttctcgaataatcaatggcctttttgctaagttttcttctttgtatcaacattctttttctatgacagagaagatggagcgattggtatctcctagtagggagggtattgatatagttattttaactaatgcatcttggtctgcttgagctgctggtattgcagctgtcatgaccaactttgctgatggttctcgggctcatttttctctttctactactgcttcttctgctttggaagctaagactcttgctattcgtttggctcttgtttggtcgaggtagaatctctagcttggatgctaatttgtatcaaggggaaggaattttttcaataattctcatcgttcttagttttaatgaactgatgttgtttataaaaaaaaattacaaaaatttaacaaaaataatccaactcaggcagaaaaaccagttttgcttaaaaatatactctaattaataatttaattatattagtcacagatgtccaaaccatactacttctcaaatgcaaatggtagagtacaaaaaaatgttgacccaaaagaaaaataaatgtttccacttcattcattattctctctgaaaataagataacctgaaagtggtcacaataatcaacgaaacaagccgagaaatttacgtccccatctgttgatggcctcccacaaaaaccttatgagaacaggcacagcagccgcgaacagaatataacgaaacttcactgactcattaggcgtcactgcaaataccgccgacccatatgtgaccagcatcgagattgtggctagccacacctcaaaatgaaaaggaaacctgttaaaataaaacaataaacaaataaatatataatttaatggtaaagtactgaattgagttgaaataagagaatttttatgaggtggggtttgtgtggttttacctataagtgaggcaaataatgaccaaaatggatgaggagagagccaaagtgtttgatatgaggaagacatagaaaggaattttgtgtgtggcgtagatggatcttccggctgtgtgaccgctttcgctgtcttgccaaacgccgccaggagggttgacgccggcttggaaggtgacggcggtgatgagagccgccaccactagaagaacattccgggcatccgctggtttgtcatgctctttgtcgtattggaagctcttgaaccatctccaagaccctgcagtgctatttccctttggtggattcgccattaattatgttattgttttctaattttctcttttgattttagctaagttttatcttaaaaatttggttggttactacaatgcacacgcaacatatatataagacaataacataatataatagtgagattataaggagaaattctaatctagttaattttttatgtatagtaatgtattgttgaaaataaaattaaaaaatttatgttgttgaaaataaaattaaaataatcagttccactcaagttagttttttattccaatttatttgaaaagtagtatgatgtattgtataaaattggattataacttttataaaaaatattcatagaattgaataaagtatatatgcatgagtcaggtgaggaaagaacaaggaagaagaagggaaatgtaggagagagtcatcgaagactggtcggctgccacctgttgttggcacgtagtctgaaatcccagaatgtattgtttggacttacaaaaataaattaaaaaatgctttcgtgtagattataatagtaaagaaaaataaaaagttttatttaatcaaaggtaatggtagttggcatattaattttttataataacacaagcttttttatcatacggcacacaacctcaactatagataggtaaattaaagtggaaattataaattttatggatttttatacttttttttgtgtaaaaatatgattttttgaattatttcatgtgaaaattaaataaaaaaaaagttgaaaaatggtaaaatcaagtaagggtaactaggtacctttatggtaatcagagggtaaccaattaccataaaggggtaatcaagtacccgaacttccattttagagttctcaaagtcaacctaggcgcaagattagggacccctcccaggtcgactgctatgacttgggtccactaaattctgtgatgtcatctttctcaccacgtgtcaaacattgatgtctacgtcatcagggaaagtttccaagttaacatttgctcccaagtcaactttacacttgtgtggagttgacttgatgatgtgaacaacccatttctcttaaaactaccagataggcaccaattttgacaatcttagacaattgatcctgtccttcaagcttttccaataaaattaggactttaaaatcccttgctcttgtgtgtggaaattttcaaaaattaagtaacaaagaaaaagaggaaaaacttattattttcacttatcttttatttttcctttgaaaacttgaaatttgaatctaatcctatttttaaatggcgccattcgaaaattagaggaaaaaagaagaagagaaaaagatctttgatcttgctttaaggattagcattaggaatggatattaccttttaaattcacaaatcctattcttatttctataggaatttcgaattttaaagcttaaaggtgaagggaaagatatatttttatctttttcttatcatttaccatttcctctaatgctttgaatttaaaaggctcttaattgctctaggattaggagattgaactcatttataataagagagctttcaatcaaatttctcacaatcaaatcatccacgcccaagcctttagaaaaaccttggattttcatcttcatcaagctatcaagctttcaagtgctcttcatccttcaaggtaggatttttttcgaagaattttcttcttctctcctttgtagagcttgctttaaggattctcaaatcccaaaaacccttgaatttttttcccaagccctccaaaattccaaaaaaactatcccagtgaattgaaaatttcttccttttacatttcttgaacttctcctttttaaaagtcaatacaactttttttgagttgtaagcaacttgaaattttggagttagcgtggctaggatgaaaagaagtagaagattgtttgatgaatatgatacccatatggctcaattcattagagtcaagttaactgtgcccaagtctaagaacttagacaaggcacatggtgggaagataatggcaattgaactccttaaagttgctatcgaaagtgaggaccctagagatcaagcttttagattaagacctctcgtgtttagcactcttactgaacatcaagcttaattattctagaatgattattgtcttcctgaaattgtcttctaaaagccacaatatggtggtcacaatgactcttagaacacttgctgtagtgcctggtcgaggttccatatgaatatgggtgtttactggcccttacatccatgattcatatcaatcgcagatttctttggagtttatccctacaaaattaatctaaatggctattgaattcatgccaccttctacatcttttactgcctgagaattggcctatgtttaacgcccaaaatgtgac

SEQ ID NO: 218439 - DNA, 1092 bp, Cannabis indica
cttgtaagccgctatcttcttcaactcatcttgggttagaattacaggaggaggcaaagaagaagacggcgccaaaatccccttctccatggccgattgctccgacccaataaaatgaatagccattctagtccacaaagattaaattaatataattttggagctattgaaacatgggttttaatagattgagtgtatacaaaaagggttttaggtttttcagggataaaaaaaatcccagaacagtataaatcagaaaaggacaggtctttgcaaagaaacaaataattatcaaaattatataaatatatatataaatgaataagaagaagaagaagataagaggtatgagaagaaagagtgaggatgagacagtaaagatagggtttttggttgaataaatgggagatttgggattgggagtatgcaattggtattggacttttatgcaatccctcattcaatctcaaccatccaaataaaaatagattctcatctgacccttgatagatttagaattagatgcatagggattttaacttttttaaaaagtggcaactggcaactgaagtcaatcaagtcaccaccaccaatacatattaaattatatatatatatatatattttattttgggtggaattggaaatgtctacattttgtggatttcataataataagtgaactcattatattctttccaaaaaaaaaaaaagtgaactcattatatattatcagtacttgtcatttgatgtttatataatgttattaataccaaatagtcaactcaaaactcaacctaactctcggttaattttttgttttaaaaatactcaataaaattcttttatctatagggatttgtaacataatttgttatagtagagagttttaattttattgatttttacccgttcgtttttttttttttaagactcgaaccaagacctctaacacacacgtaccctcctatggccacttgagctaacctcaagtggtttaactgttcgtagaaatagatgaataataatacagaaattaacagtgttgttaatttaatgagatatatttaatattatacttaaaattaattt

SEQ ID NO: 218440 - DNA, 3657 bp, Cannabis indica
tagtatttaaaaaaagtattgtcatattacaaaacgaaatgaactagtctaagataatttaaatactgacccattcaaatctgtcaaatagtaaatttttagaaagaataaaataaaaacttcaaataattaatttttaaatatatgtataataattaatgccgtatatatttttactgaaaagaatattatatatttaatatataaaccacaaagttgaagttagaaggggccatggcccagcatccatcaacatagttccgccaccgtgggattacattgtaatcataattacattatacaagggaatcccattacattagcaaagctatgtaatgaggattacattacaaaagattaaataaagtaaagctaaaatgactctaataccttttttatatatatttaaaaattaaagtaggagataattttgtcaatttatcatttatttcaatattcattccaataacaaaccaaacatcttaatcaatttccattactattcttattccattacattagtattaccattaccattactattacattattttactaaaccaaacatcacctaagtcttaagagacattggtaagaaaagagaaacagacaaaacaatttttgttctcaattttgcttttagtttttgtaatattattattaaaaatcgttttatcaaaacaaaaccaaacttgtttaaatgttttagaagtagaacaaattaatgaaaacacaatgaaaattgttcaaaatcaaataataggattaggaacctctccactccacccatggtgcaaagaaatatgcttttttttttccttcattccatcaaagaatacaatactaataatatgaatttgttccccaaaattatagcaatacctaattttccatttctataaagagaaaaaggtacataattctacacacaaacactcaagctcactcaaataaaacaaacaagtccttattttcttagcctttattccaattttgctatcccaaatttcaccatctcagctttgctgggaaatactgcaagacaatactccaaaatcataatcaaacaacaaataatgtataaaggaaaaaaaaataataatctaaattaagtttccaaaaggaaatggaaattagtagtaagaaaataatggataatttcactccaaaatcttaatcattcccacattttccatgtattaaaagatagccaacaaaagtgacaatattttttttaccttttcaattagagaaagatagtatggcttgactttctcaacatcaatcctaactttgctcttactataaaggtcatatttgctgcacattcaaagatcaaaaccattatatgatacattaatatgtctcactaaaattgttataaacaaaatgtgttgaatttaataagcttacttgaatatttgaagccacttaaattctcaacatcttcttcattcatcaagtgcttataagcccctgccttgtgtaaggctgcagcataatttccaaccatggttagcgccttttcgtcgataaacaacccgagaaaaaaagaaacattaaaagaaaagttggatatattttatgactgaccataaaaggaatggaatctaatgatgaaaagaccagccttaggaagagtagtcttgttctcttttgcaaccttgtaatgacaccaaagaagaaacattaatgttactttgtaaaatgattcttcttttgataatattaaagaaactaaagaatcacttgaaaacacataaaagagattaccaaatacatgtagtcatcatgcccccatgacatgagtacattctccaatccacagccttcagaatatactccatttttagtgttataaatagggttcatatagtcaggattttcctcgaaatactattcaagaaagaatgttcagattagatttcaaagtcatacaagaatgttttttttcctttctattttcaggctaattagcagagtgaaaatttgagcttagataaagaccttgtgatgaacaattgacttgtgaaaggcacatccaacaggaaatgtgtcacctgatgaaaacagttatacaaattaggtaatgttcctatcctatttctaatcctactttccaaacatggccttaaagaagagttacttagatatcgctgataagaaaacgctcaccgacaaccgcccattgaggaagccctccgaaagcagggtgattgagaacctttccaagatctaacattacaacaaaataagacaacttatgttatatttttataagtactgtacgtctacgagcagcaacataagtcatgtgactgtcttctaattagttcaagatagttgttcaagcggaagtatttgttaatttagaataagatgaatgaagtttcatctcaaaaccaattagcaatgaaagaagtaataaattcatcttatgtagaataatttatttccacacgtaaataatatgggactaactctaatatagctagagagatggataagataccatgtataagagcaatcaaatgaagccaatcctcattaggataatccttcctaatggcttcagcagtctgaagtaaatgctcaatttgaggctcatccaaatcaggatcactctcatccacaatttcattcagaagttcacaactttcccatatgctcatttccatcttctcaagcttaccatactcctctctcatacgtttcacctaaaaaacaagaatgcaaccaaatttcattctttttcaagagaacacaaaaaaaaaatgacatttttgaataacttacaaattcatatgtttggttaatgtgattgattcggtagaattcttcaaccccagaatttcttccactttcaacattataatccctggcattatttgcataaaacttactatatgtaagtgaaataagaaaattaagctagtatattctttgtcacactattttttgattgaaaagcaataattacaaacttgactaaattgaacaacacaagtacctaaatgtgttgccaaaagaatttgagatagggacaacaaatccaccaccttccttcacttccttattattattttcctcaatccctaaaagaaaaatatcaacacatacattttctcaatgaactcataatattttaaaaatagaaaaacataccaagttgagggtgagagtggtgatgattatccataaacatagtcatgtaaagaatgaaagaaagacaaaaagtatgataagaaagaagaagggatcatggttagggtttgggaggaagagaagtatatataaaagagtccttgggggaagaattgggagagaaagggagtccttatgaggaagaaaagaaaaagatacagtccttccctgaaaataggaggtccttaaaatgaaataaatactctttgttatgtatgaaatgtcacatcaaaatactcaaattcactttctgcttctcacatttggattggattgaattaaatttggatatacattgatttgattctacagattgcatccatgcattgaataatcatacaaaaatgaaaatataatattaaacgtactaacactaggctatacacgtgtttctaagcacttttatattttggtcttttcttttatgtactttacacttggtggcctgttctg

SEQ ID NO: 218441 - DNA, 2328 bp, Cannabis indica
tcaattcacaacctatatatgaataagaatatattattcatattgaaaaatcttaaatttcattcctggacttatatgatgatcatgaagtcttggtcttcccataaattccaaacttaaaaagtaaactcagctgataaatgacaaaagtatcattatatataggtcctacggatttgaaatatatataatatacatgtttggtattaattaggacagaaatcgtattataaaaaaagtaatattaattacatatttaaacttatagcataatcttatggaaaatatttgactgtacatataattgtaagccaaactaaataaattaattagtcatatattacactaaataatccggcaaatggtagaattgtgtttagtgaaggttgtgaaaaatgttgggatataattaattatcattaattatatatgatcttaagtattttttaagtatacactatattttttgcaattatattaattaatcttttaatgaattaaaaaaattaattagatatagaaaattaggatgattttttgttcaattattttttatctccatatgagaattatatcatttcatggataatattgttccacatgtattaaatgtaaaaatattgagtgttatattaaaattatatgagttactttattcatcaccaattaattttaaaatgaaaatccataattctttccacactctatctgacatgttttttatttttcccaactactttcgatctactttctaattctaatttttttacataacaatttatgtatattgtagttatttaaaataaattttcacaaaattttaaaaaaatataaaaataatttacagtttcaaacaatctttttcaaaaacttattaaaataagtacatgtgtaataaactaattgaaccttatttcgacattatgaattatttcaaatttatcaaaaatttctagaatgtatcttaaatatttattatgatgtagagttgatcataccaaaaatataaaataatatattaatacctgaggggctaatttgtgcacaaattgaacaattgatggttagatactgatggggattctttcaatcaaaaagaaaaatacatcggaaagcttggcaaaatatttgtataccaaattaaaaaggtatgtggtctagaatttagaagatttgtccaatacaatccaactttggttgcaactactacaaaaagtagattttccgtggtcctcgaattagttttttttaagaccgtcgctaataaaaataagtgaatgtataaaattgtcggctatagttgagtatattcccagcaattttaaataatcgtatatggcatccttgacggtttattataattacgagtcaaaaaagtggggttttttaaaggatatccctcacggtttaaaaccgtcgagtatactatgatatcaattatatttaaaactcaatttccatctcattttatttcatgcctcttaagatgtaaatcccaaaaaaatcagatctcattttttttaaaatcactctcccgcttcgttctctcgtccgctctctcctccaccaccacgagcctctctctctccaataaaagcctagcattgatagcggaagtaaatctcatggcagcacacaggtatgcactacattcttggaacaaaacatttttctcaatggtttagaactgtttattttgatttctttctctcttatttcttgttaaaacaaaaaattctcaagtttaaatttttgataatttcactagcaatttcctttgagattttcagtcatctatttccaatagctattatttggtttgttgatcttgatttgtgtatgtgcaatagagattcaatgatcgtcaagtgaaaagcaatctgaagcttgtagatgaaagtttcgaggaggatgaagtggttccatgggatttttttttttggtgtatccactttattagccgacggttttaaactgtcggctatagtatagccaatagttttaagccggcaactatactatagcactagagaaaatatatgtatattgttgccctaaaacaatagaaaatctcccctaatgactattagaggcgacaagtcacctctaaaaagtcgtctctaatattcacgccaaaaaatactgttaggggcaacaaaatgtcatatgtaattaggggtgacaatgtcgcctctaaaaataatctacgaatttctgaacttaactttttggtcgccccttaaagtcttgtcaggaaattttttattgacttttaggggcgataatgtcgcccctagaggttttttaaattatataaaaaatatttaa

SEQ ID NO: 218442 - DNA, 3459 bp, Cannabis indica
cacgttcggtcccgtggtctcttgaaggtcgttcgttatacccacacttttcaggcccaaacgtgaggagggtgtattaagagttagtctcacattactaatgtgtggaaataaattgtgatatataagatgaatgcgctactcctcccattgccaattaattttgagatagaacctcattcatcttatctcaaattctagcacataataatatataatatatttgttactaaattaattttaatattgcataaaatattttatgagtgattataagaattctaacatatatatacacctatacctatgagaatcaaaagaatattgaatctttattacatttcatttcagctaattatttgataactaattaagtattttaattatggcaagatttgatttactaaatattttattaaccagttctattttctaaattaattgttaaatattttaagaattaatgtgaaataaatacagatagaatatagggcactggttctcaagcttactaattatcctgtgaaaaatagtaaatttatctaagagaataaaagagagcttgaaagtctgattacctattttaatgttattttttttggttttgttggcaggtctagaagtttaaatgcataaaatttaaatacatttaattaatttttgtaatatatagtactatactcgtaaatttcataaaactttaagcataaataaaaagtaattaagtgattcatataattttatataattagtgagcaactataatatcctaaagggcgtgtttgaaaagtcacgtgtaaattggaatgggatgtaaatggaagtaattacacagtttggtgtgtttatctagtcatgtataattacacaataactctctaattagaggtaattaggaggcctcaattattctctctaattctcatacccccatgataattagatgtaattacataccaaaagtaattttaatgatttaattaatataataattatttaatatgatttagtccttcatttttattttcttttctcatatacataattttatttttgttctaatgctattttataatattttttagttcgcgcttgtgtgtgtattttttttattatttataaataaaaaactaatatatgaatttatgatatatgaattttttaatattagtttttgagttctcttgtaaattagatatgtaatagatttatttataatttaacataaattttgattgatgaaatacttaaattcatttttttttataattttataatcaaaataggaatgctaaatactcaaacttctaaggttgaaaaaccatacaaaaaatagaataactctgaagttgctaactcacaggcgcaagtttggaaatacgtgaggtataactctgaagttgctaactcacacccctagtcgatgcatgtgagctatccacttgatagagctggtcggatgtcaccagagtgaccatgttcggacatcctactacttatatatgaccttaagcctcataacagtctggacgacctactaagagcaaaatcatccgtccaaattatataacatgttacatgtgtcacccagacagatgtcacatcatattaaagaaataattaggaaaacacaattaataaatacaagaacatggtcttgtatattattcaatattaatttgaccggccctaatctttggataatccttatcgtgaaatttttaaatatttgatgtattttaaatgtgttcatgcatcatatttagattctaaacttgatatttatttttcatttgttacatttgtattgtatttatatcctattacttatatctttcttactttatgttttatttcagtttaataataaaatagaatcccaacaatacaacaatgatccgtacaactttgaaactgaatttgatggtgattttcaatccatttggaaatttgaaattgaacttctactactctatgatgacttgtatgaactagtcactgaagaggaatcttgacataaattacgtgaacactagggtcacgtagttaggaatgcctacgcacaatgacattaatcaaattgtcgtgctaggttttgttagggtttataccttgaaaagcctataaagatatattttgtttataaatataaatttaacatttttatatatacttgaatgttaaattattaatatttaatattgaataatttatataaataaatattagaaaaaaatttattcatacatgaggcatgcagtgacttatattgtacggagaattaagatcactaagccatgaataaaatagttagcaatatattaaaatataaaatctttaatcaatggttgctagtgtgattcactgatattcgttattcagtgcaagtaattttgatttgaattgctgatgtagtataacatctaagtgaatgtgttgtatatataattgattatacattatatttaaaccttattcaattcataataattataaattgaaactataaatataataatttatttatttgacacaaatttatcataattaacaaataagcctatatttctcttatcttctcaatttagcccaacttagtaaaaattttaaaatttgacatagtcaattttagaattctaattgattaaataaatcaattaattgagcctacaagatgatatcatcccaaacaatgtgagaccatattggcctatataatcaagttctcaataagaatattagaaatttatcaagtaaatttcctaacttattaattctttttgattcaacgatagatttagaattacactattgattacacagaatgctctatatatcctatacagatacgctatgaattatccattatttcaataacattaattaatgatcctctataaataatttacattgagtagggacaaaaagttatcgtgttactcttcgatgtattttacccttaaaatacttaactccttgtaaatgatgtttcagtaaactaatgtaattaccgaaatgagtgctctatcatttatctcatttatccacactctaagaaaactatcgtcgtttcacttttatataaacatagaagttataaatattcatatatatgaataatactctcactcaattgcactatcaagttcccaaaatgtaagtatcgggtaggtaagttggtaacgaacaaatcaaagaactcatgcagtacaattatgctaaaacttgaccatctcaagattgagatcaattgatctatggtcaactaagtgacattgacttagaaaagttataacggtaagtttagaatatatttccactgttaatattggctcagtccgatctacaaccaatgtatacgatacaagtttactttggtaatgctggaaaagacattccacttatctaagtgtaagtaaactatatcgttgattatcacgttagtgtaaatttagtgca

SEQ ID NO: 218443 - DNA, 5679 bp, Cannabis indica
actttttgtgcggattgggttctgtatccaacatttggagaggtccttctcaagtgtaaggagatttgttcatgtttttgatggtgatgagaagtcattattatatgtttttgttttcttggccattcagtgtttctaaagtcctttgactctttgttgtttctctggtttgagacaatcgacttcattcttcaatacataccacaaaatctcgattttactttttcctttccatttcattagttgtttttttacttatatattcttgggtaatgtttctttaatatgtaatatacatttgcaggctaatcatgatcattatgtacttattttaatttatgacggttttgcccgttcaaaccatcatgtgcttgataaagtcaatcaactgttcttggtgatcattgcacgtttattaaactttaattagatttagaataatatgaatcggtttaaaatagaaagtaatcagacacaatattttattatgttgtttattaaatttaacaaaattatcattattagaatatataattatttttgtttatagattaaaaaaaaagacatatttgtgtgttctcatttttaattaataaaattaaaataaaaataaattaaaaaggaaaaggaaaaggtattccctgtaaaaatgagggagaatcttttcttttgttttcttcttaatttatgtgagtcttactattttctcttattccaaaatttagtaaataattgtatatgattcaataccatacaatttattcatattcccattaagtaaacatgttagtctgtatggtttactctgattgaatacacatagaaataagttgcatttaggcatgtttactattatgtaatgggaattaatggtaaggtaattatttatttacatttgtttacttacgttattaaaattaagaaaggtagaatttgattaaataaaggagaaaagaaacggagaacttcctctaccaattttataagaaatgtcattaagggtaatgaattttaattatttttattttatttttaatatcaaatatataatgataattttgtactttaaaatatatctcacaaaataagtacattatataggttaactcaaaaggacaatttagtcaatttaagcatttcttacgtttcctaataaagtaaacacgataaatcataattattcaatttttaaaaaaatttaataaacaacatattacaaatattaattccaattatttttcatttattcagttacatttctccattaatttattctgattttgaatattgtatcgtaacagttacagaaataaatgcctaggctagttgttaaatttgaccaccgttttctatatatctaccatggtttactgtgcttgaataaacgtacgttacaaagttttgtttaatgtttttatccattagtctttagaaagtttgttttgccaagcaattgaagattcacataaaaaggttacaatatttgtaagcaaaaataatatttttccgatccaaatttttacttgatctgatttggttcaaagttattgaaacataaattatgaacacttacggaaagtttgattgtttggaaggtgtcctaaaataatattatacaccattatgcaaaaataattgaattttaattcatgtctatacggaaaatactatcatacttacacagtgattaaataatcacatcctaaaatttttgcatatataatgattgagaaaggaacaatgtcatcttgagactggtaagagcagaatagaagtgtctcacaaacatcataaaatatgctgtcatatagttttaacagaattagtaggtactgttatataatgatactaaacttattttttgacttgtactggttacttttcttcagccgcacatcatatatgtttcaaatggacgtactcaaagtctcttttcaccattatttcttcaatataaaattgaaacacaataaaaataaaaggaagaaaaataaactatatctctcaacataccgagcacgaagaaaaatatatatttacatactcatatatattaaatactaatggaatattgctctaacctacgtagggttaattaataatcctacgcaaaaaataaaataagatactataaatgtgcgtgcatgcatatacataatatatattacctttcaataatatatttttcataccatgacttgcagaaacttgtaaagacgtttcatattagatgggtataatatgtaagccaaaacagctacagggcaactcctcttggcaagacatatattatcattgattattaacgactctaatatatatgtttgggaaacttcccatttgatagaatcaaaataatgcttgccacagaggggatgccctatggctggatttgcttagtgaactaacatgtgcttggttttttccatgacttatcaccaactctttttataggcctccatacatattgtacgtacaagctcgaagaaaaaaacgaatggatgagagagtagggtagcatatgctgaacactcttacgaatatccatattcaattatatgatattgctgattttgtttttctgtagatttattcaacatgttcatatacctgggcttgaaaatgatttctcacaaatacgattccccacaatttaaactttttcatagataaaatgaagcgaaagggacacgagtagatgccgaataataaacctaaaggacatgggtaaactatgacgaggcatatcccaagtttatatcttaccctcttatttttatactttattgttacttttagcttttcgttgtctgataagggcaatataacacaacttttcattacagcaatataacgtcatagtgttttcattttctttttctgtttcactttatagtggttttggtgcttcttgtagtctctaaaaatctgatttttcttggtcataacataaagcatatagtggccccaaatagcgcgaagcccaacagcttataatgttgtgttataatacgtgtcgggcgtttttaaggtccttcatttacctttgtatgtagtgggaactaggaggaaacttaattgagattcaaaagaatgacattatcaatagcaatatataccatgtgactgtgagttttcttgagtattgaccatgggacactaattattattaattgagtacacataccattgcgttcgatgagttttgatcatattctggtggtgtaacttgtggaaaagtatgttcagcgtgaaactcaagttgggagttgtattacaaccaaaaaatctaattgaggggtcatcgaaactgaaacggttggtctaaaaatgagagacgtatatatatatgaagttgttgagaacataattgcatgacataaaagtagcatgtctaccagttcatatgtattttagagaaatgctaagggagaggttaaaataggaagcaccaaaagtgacatatatgttggtgttcaacatgggtctcacactatttgattaactaaatattatgcgaaacttctagctatttattgttgaaatattaaacttgatttaacatagtacttaatttttaaaattttcttgttgctactaagttttctagactattcttatatttactaaagtgtctagagtattcttgtttgtataagtactcttgaactttcgagaattatttttcacttctgtgattagtagatagaattatgtagaacaatgtaaaaagctagccatttaataatgtttctagattaatccatagagtcctataaatagagatgtaatcccatcattttgtatcaagtcacaaatcacacaagttgagatataaaatatagcttcttccgttcaagtatgctctccaaaattcttcttattatccaacaaactgataccagagctaagtttgtgaagaaaaatggcaagtggaggaatgatcccattctaaattctaatgctcaccaagagcaactatgacaattggaatatttagatgaaggcgctactaggagctcaagatgtatggaatattgttgagaaaggtcataaggagcaagacgatgttgctctttcctaagttcaacgggatgcgttaagggattgaagaaagagggacagaaaacctctctacctcatctatcaaaaggtggatgaagatgccttcgagaagatctcaaatgcaacatcgaccaaataagcgtgggagaagcttcaagcttacaacaaaggagcggagcaagtgaaaaagaatccgtcttcaagctcttagaggtgattttgaaactttatttaaggaagatactgaatcaatttctgattatttcactagagcattatcaattgccaatgatcagttaagaagaaattgagaagaaattagtgaagtaaaggttatagaaaaaattcttcgtactgtgagtccaacctttgagtacattgctacaatcattgaagagaataaagatttagaatccatgatgttgatcgaagttttcggcaaccaacttaataatttatataaaaagctgtaggaagtttaatgcatgagatttttacgtggttgggacattaatgagccttagtccacgagtcttttttatttatgagagtatttattacagagaatgttcttggtagtttttctctctttagttctcataaacccataattctcgacccctgtcttagtgtgtttggggggtatttatagtgtttttctggggtgatccctagaaccgaactacttgactttctgtgtagtttcagtaggggcacatattcccagcagatacaaaatagaaaatgcacgacctataccctaggtatcttaggggttaggtggatataatcctttatcccttcttgactgatgtgatccctcataaagtagccgtcactaggctgattaatcgtagcgtaatagctgcagcaaaggggttatgtcatcagacctaatgcttatggcagtttcaatacgtccctcccatgcggcattaaatgcgaggtgactgttcaattggggtctggtatctctcggaggtgctcttccatagctctgtcctccgaaagtatgtggagccctcttatcttctccgggaggcattttcttgttgatactcttaattcaaaaagacttagttaatttatctcaaagtcatatttttcagatccacgtgtcgcagtcgcattggtccacgtattttgggcaaatacactagattatctcctactcctcctttaataatatgtttgacattttatttattcatttttatgtactttccatcatctcctcttttttgttctctctctcaaattaaagatgaaaaactatataaaatttagggattcaacacctcaaatacatgtaagccattagatttaattgagatagtatatttttggtatctaaggtggccgggcctaaatcttagatttaattgagatagtatatttttggcatctaaggatgggcctaaatccttgtaaaagaaaaggtacatattttttattaaacttgcaacctttcgaaatttagaattattacatagaaaatacaaattgacactttatttataaaaatacctccataagatgtggagaatatttataccttttatgtacttttaattaccaaaatacttcttacactatcacttacacacacaatca

SEQ ID NO: 218444 - DNA, 7480 bp, Cannabis indica
gcttgaagcggggatgttacatgtactactgttagtgtacgactaatattgtattattgtaacatagtttttatgttgtttcagtatgacagaggagcaatctgtagagccttccagtcctagagatggtgaaaatatttctattactcagggtcgaccaaaggtatgcatcccaatgctactacttttttttgcataaattaaccacttgttggtcacaactatggatttaaaagccgatggcaagtctattatatggtgcctcctactatttgtttttaaggaaaaaatcaaattaatacctactgctatgctttgtctggctcaataatgtgatagtcatcagtagaatttagaagttgccaattgaaacattaatggaaaattagagaaaagaataacactgaaagaatggagggacgccagttcttaattttttcacatactcgtacctaattttcttagttaggtaatttacatgtcaccacggttttcctctgccataagtgaggtttctcaataaatttgggaggggtcagtctaaagacaagtgacctctttctctttttcaaaaatataaaattaataaataaatatcaatacataaacaaattgaaattctagctcattatgctacatgtatctaggttagaaattttcaaagactagctaaagacaacacatcatcatttgacattcattatggttttctatgtatctgatgtggatatatcttgcagacttctgagctcaagttgggtacattgatgggtgtatttgttccttgcctgcaaaacatattgggaattatctactatatccgattttcttggtaactttcttcttccctgttgttttttagattcttatgcagctaattgattacattagccactgggcagggtgtgttacaaactgaattagttggtgttattattctattacatgttttgtcctcatgtttttcaagtagtaattctgaagtctccatcacgtagttattgattattcttagtttattttgattgcaggattgttggtatggccggaatatgggagtctttattggtagtagcattttgtggttcatgtacctttctgactggaatttctttgagtgcaattgcaactaacggtgctatgaaggtataagcaacaattatacaaattctccttgttgaatttttatccactttcctagaaaattccatgacaggttacataacaaaattccagtctctttacctatctgagaaagaaacctattatgaaccaataattcaacacccagtccaactttattccataacctttccaaataacttgcatcttcttcaaaaagtcccctatttctttccagccataaaacccagagaatagccactattgctgtttactgaagcatttgtttgttttttccttcctttcatctgaaacattaaagcttccacactttgtgctggaatacaccaccttaaactcaactccttcaggattttgtactgagaaaggttttacattttcttgctgtaactgatggaattgataatgatggtttgctggtaattactttgattttagggtggggggccttattatctcattggtcgagcccttggtccagaagttggagttagcattggactatgtttctttctcggaaatgcagttgctggatctctgtgagtttgtcttttgttcacaactcctttcttatatatatggctcttgcacatgaggctgatagagtgcccttttttgagtttcctattctataatttatgtctgatttgacatactatgattatagtagtaagcttatgatttcatttgcatgtgattttagctatgttttgggtgctgtagaaacttttttgaaagctgtaccagctgctggaatttttagaggtaaggggtaccatatgctttttacagcaaaagaactttatttcattacacatttctttatgatttatatatagaccaattctttgatttgcaatttctcttgttatccgttaatgtggctgtttccttggtatgtacattttgatgaaggcaactttgcttttgcactagtttccctgttatgaccatgagtctattttttcattttatattgttgggcttgttatggaagaagatttttttccttttttcctgtaatctaatggtcctaccttaacattgtatcccctactaaatgctgcattctttcaatgttgtcagctttagcattgtaagtttttgacgcttaagatgctttatgtgctagtttatgttctgtgtttgtatgccattgaaatctccacagttgatttggttcaataaacgtgttttattgttcaaatttgtattcttttacatgttaattttgatttgtttacttcatcaatgcagagactatcacgagagttaatggcacagtagttccagagccaatacaaagtccaagttcgcatgacttgcaaatttatgggattgttgtgactattcttctttgcttcattgtgtttggtggtgtgaaaatgatcaaccgtgttgcacctgcttttctcatacctgttctattttcactgttctgcatattcatcgggatagctgtggcaaagaaggatcatccttcacgtgagcagtttcttttcttcctattttgatttatatatatatggaagtggtttttcggcttgtttatgtatgtgcgtagaagatataaatctgtgtaacatgtaagtgggggcattgatattaaccaacattgaattgtatgacaatctttgttgatgtgtaaaggaattacagaagaaacggtgaggtatctttataaagataaacagaattatagcaccaaaagaacaatttgtgccattgaattgtaaaagcattcctttttgaagtattcatctagttttgctctaatatagtttttctttctctcactttgtagtacttctcttttttgtgcccttaaataaatttcagaaatatgtgtgtgtgtgcgcgcgtatgtgttgcattagtcaactcgatgatatgtcaccagatggaaattgatataaattttcctttaataacattttggaggtactgaatatgtatatatgtgttggattgttcttgtatgtgctctattcccttgtttccagaccctcgaggcacactgggaaagtttattgatttagcagaggtcttgtcattttattatttatttactctctatttggtggaccgtggaggaattaaagtttattttttgtgtgtgtgtgctacagctggaataacgggtttgagtctgacatcatttaaagaaaactggggtcccgattatcagaatactaataatgctgggattcctgatcctgatggagatgtgtcgtggaatttcaagtaagccttgacatttttttcccttttcaaattgctgtaatttgctcagatttttattgttatgtgggattttgaaacaaatatactgcttatcacaccaggcagataatcagtgtggatatttgttattgaaagtttgtatttaaagattaaaaaataattcacagataattggagaacattagatgagttttctaccattacattttcaagttaatcctaagtagaactttaattgttgttgttgttgttgttgttgttggtgttgctgtcatttgagttggtgaacttattctatatagtatttctctaaacatagaccttagtggcccatttttttttttttatttatctttcttaaattcttcttgtcaaaacttacctttgctcactttctaattgtgcttttcctttaattttcagtgctatggttggtctctttttccctgctgtaactggaattatggcaggttctaatcgatcagcctcactgaaagacactcagcgttcaattcctattggaacacttgctgcaactctcacaactactgcaatgtatgttgtttctgtcttattatttggtgcacttgcgacaagagagaagcttttgactgacaggtaatggattagttttgttgctttgacttttctttttcttttatatattctttctttcctttgtcttagtatgcttttcagtttcaagattttttcgattgtttcatttgttatttgttcaactttgatttgtctatcttctagtaatcaagtggcaactcttgatctttatcttttattgctgagattgcttacagtaagtggttaggagtgatgtctataaatattgtaatctgtagaaagtatagaaggcggtaacttttgtgctactgtgatcttaatatttctattcaatataagtaaaaacatattgtttagcagtggttagttttttatttctccttttgattttgtttgtatctttcctttccttttttgtaggttaattatcatctttcttgctatttttaattattaatcacagtagttttgttcttaatatacatacacacactcgtgcgcgcgcacacatatattattaggctatagtcactgcttgatgtattagcatatatggataagctaatgagtttaaaatgatcttctggtcattcattaatgtatggttagttattggctgctggcacttgtctgttatgcatgaaatacttattgttatatggtgagttttcaaaaaacattagcatgatttttatttaagaactgaattcttttatgcaggctgcttacagctacagttgcctggcctttcccagccattatttacattggaattattctttcgactttaggtgctgcacttcagagcctaacaggtgccccccgcctgcttgcagcaattgccaatgacgatattttacctgtgcttaattacttcaaagttgtagaagggaaagagccttatattgctactctctttactgcatttctctgcattgggtgtgtcgtaattgggaatctggatctcatcacgccgaccattactatgtttttcctgctgtgctatgctggtgtgaacctatcttgcttccttttggatctgttagatgctcccagctggcgccctcggtggaaatttcaccactggagtctctctcttcttggagcttttctttgtattggtaagcttgcatctccttactgtacttgtacatgttctgacattatatgggattttggtgtaggaataaactaatacaagaacagcagcaattaacttatgttactgtaattaacctgtcattgtagattgtatattctgtatcacaatagattctgatgcataatgattggaagtatttatatgttttcattagatgcttttcatgcggcgtcatcactcaggaatattacgttatcatcactttagtttgagtgcatgcttgtgtgtgcgtttatggacactgtctctgtaaactttgattgtcttcagtttatgttacctcctgtttctgttttctttgcagttattatgttcttgatatcttggtcattcaccgtagtgtctcttgcccttgctagccttatatattattatgtgagcattaaaggtaaggctggggattggggtgatggtttcaagagtgcttacttccaattagctctccgcagtcttcgatcacttggaggtaagatttttaatcttcttcaccagcatttggttttacctggttacgtgctgttatgcagtgtcgtgttttttaagctatttgttgtatgtcgttaggtttacttgatcactagtagatattcatagtttagctagtggtctatggtggatatttctattaccattgcctgcccattccagtatgttatatgggtatcgttctgttatatttggctatgtagtgatttgccaatgtcttttctgctcttgatgcttaaattttgaaattcaatttcagccaaccaagtgcacccaaagaactggtacccaatccctctgatattctgtcgtccatgggggaagctgccagaaaatgttccgtgccatccaaaacttgccgactttgcaaactgcatgaagaaaaagggtagaggaatgtccatttttgtgtctatattagatggagactatcacgaatgtgctgaagatgcaaaagaggccactaagcagctagctacctatattgactacaagcgttgtgaaggtgtagctgagatagttgtagcccctaacatgtcggaaggcttccgtggcattgtccagactatgggccttggaaatctcaagccgaatattgtggtgatgcggtacccagaaatatggcgtcgtgagaacttaactgaaatccctgctactttcgttggaatcattagtgattgcattgtagcaaataaggctgttgttatagtcaagggtcttgatgaatggccaaatgagtaccagaggcagtatggaacaattgacttgtattggatagtgagagacggcggtctaatgcttctactttctcaactactacttacgaaagagagctttgaaagctgtaagattcaagtcttctgcattgctgaggaagataatgatgcagaggctctcaaggctgatgtgaagaagtttttgtatgatctacgaatgcaagccgaagtgatcgtcattaacatgaaatcatgggacggacaaacagagggcggtgctcaacaagacgaatctataggagcatataacggtgctcagcagagaattgctacttacatggaggacatgaaatcgagggcagaaaaagaagggacccaacttatggccgatgggaagccagtggtagtggatgaacatcaggtagagaagttcctttacacgacacttaagcttaattcaacgatactcagatactcgagaatggctgctgtcgtgctagtgagtttaccgcctcctccggtcaatcaccccgcgtacctctacatggagtacatggatttgttggtggaaaatgtgcagaggcttctgattataagaggatacaggagagatgttgtaacactattcacatgatttacaacttggaaggtaagaaatacaatttgcattctgttcataatatgattttttcttgccactctaaaatatatctttttcttttttagttaaatgtttaattcattctttttcttttacaaacttgctgaagcagaattttgaatgtatgggtagtcttttttttggtagaatctgaatatttttccctttttgggatctgtattttcaaattataaactctctggtacgccttagaatcaattcaattcaaccctttcatttgataagtttcgcttttaatcattgtgattagcaaaattagtatatattttattatttcggattttaggggattttataattcttttattaggcgcatttcatattcatctttatctatcacatggatgtatatatgtatgtatatgtaaatgtatatattttaatatctaataaattattttaattttgatttgactattgaagatgttgccaaccagaactattttgcacgttacgcacgtctacatt

SEQ ID NO: 218445 - DNA, 6887 bp, Cannabis indica
tgcactattaaaaaggtttttcccttaaagaaaaatgtattgattaattggtctcataaataataaaacagagttgaggatcgattacttacccaagtgggtggcttctcattagataagaactcagtgtcactccaattctcttcgttcatcaccaaacctgtcccatttagttattgattgaaacagcagcagcagatgatgtcaagacgacgcgtttaactgttttcgctttcacacaagatttaagaacgtttagtactccctggactgctggcttgatcatgtcattctattcagaaagaccccccctaaaaaaaaaaatatatagcttttaggttaaaaaaaaaaaacctttaaaaattgaatgtcttgggcaatcaagttagttgcctttacctctgggtcttgggaggcaaagttaacaggtgttgcaacatggaagacaaggtcacaacctgctattggggcatcaaagctcccctcctcagttagatcagcaccaaaaatctttagctcacccaaacttttgagctgcaaaaggtgtgctatctttttctgattttctgcaccatataatatgtacatcatttactattactataccaaattagagtttgatttccaatcactgtgctaagttggtaatagtcttaacactatactatgttcatatcctcatgtgcatgtatacagagactggactaattatgacatgtcaagacgtactaaatcatttctgtccaataataattgccaataaagcgcctctctaacctaaagtcctaatcacaaatcattactattgtcaatagagagggagactaaccagggtctctgacagtggtgtttaccctatagcccttctgaagaagaagcttgaccagcaaagacgccacgaatccactgccgccgaccacacaggctgtcttcttggcaatgtgtttggtgtccatggctgattagattgtgtgagtgattggaagccaataaacttggaaaaaaggtgtctggtagtcagtgttctaggcaggggatacaatattgaccaacaagttcggcttataaatagaagtttttctttggagtttgtagtacttgtcatgatgaagaaggtgagcacgtgtaaggtgaattctccaccaacaaatcaaaccttggtttggacatgtcatgttccatagctaattatagtatgagtattccttaatcaagaaaagagtagaatatacaattataattaattttcctgggatggatatattgggaagaaaataataacaatagtttcatgccactctcttcatagttcataacatgtactactttgggaaaattaggtagaacaaaaacataaatggaatctttaaaaaaagtaaacataaatggaaggaagctgaatgctgtattactgtaaaaccagatcattcattcctttttttttattttcaataaataaataaaaaaaataataattcttgtgcatgattcagtttcacgcatatgcatttaatttactcgatctaattataaggaaataatttctccaatgcactcttgtataaatgttaaaaatggttaaagtataccaattgttatttgtcatatcaactcccatctaattattagtttggacaaaacttttgacaactgaaaaagtttgagaggaataatttaaaagtgatcacaagagataaattaatcttattttttttaattattatgttaatagttatcatattctttttgaatggatagttactgtttcctcttttcccgaaatgggtgaagtaaaccaatgttaaaagacctcgtgcttatcctatttgaaggaatttaaagagcagaagcattacctaatacaaatatttgaagtggaattaaaaaggttaccccaattttatctcctttccactttgtctttttaaacataaaataatagaaaggaaaaaaaaaaaacactccaatcctatcaaccaaatcaatcaaattaatgtaaatttactattgagatattcaggagtagtggccctactacaatcctataatccaaattcatcaacctcacatttaaaataaaagataattgttaaaatgtactaataatacccaacatcatctttcttactggtgtaattaagtaccaacttataaaattgatattacaaaaattattttgaatattttgaatcggtatacaactaaactaagagaaacagcaaaatataatagtaatattgataatttaatattatgtttatccaaattcaatacgaatgcatttgttccaaaagtaaacattctatcaatataaaggaatccattttgggtgttattattctattaaactattgagtgtcttctccaaaatccatagaatttatgttaggtggttgacccattggtgcatatatcacgtgattgatgttaggtgagcgcaaaactgataagagctcaccattttgaagataataatatcaacaaagagcttaatttttttatttttttttaaataccattgtagtaaaagagttcaaaggacattgtcttttacattctcactcaataattattaatgcatatgtgatatgcatggtttttgttattcaactattttatcttgatctttcagattttgcaaatgacaagaaagcaagggagcacagctttaggacttagcacaaacagttcttcagcttccctatttcgaccaactttccaagacaaagaatcgaacccagaatgagaaaatgcttgatcaaacttatggattttcccagcaatgactcggcaaacaaacagagctttcctcctattaaaatgggcttccacgtaagccaaggctctttcactagttgaagtggcaaagataccaacgctgcccacgaaatctttgttggccgaaaacccatttctcagaatgcgacaagctccacacttgtcaagattgcataggcataggccagaagaagaggagcccaatgaacaagcgacgttggtggcgtagaacctcagtagttcgttcccgtcagccaggcaacgcgggtcaactttcttgggatgtttccgggctttgattttgaccatttctctgtagtcctcaaaccaagtcagaatgttttgcatgttgtgaactttcaatatggtctccatcttgatatgttgcttctcatcttgccctgttctacaaattatttcgactatctttctcgatgagtctccttcctgtagtttgctcactaagagacaaaaacgacaataatataccttcatttactggtgaacataaaataaagtacttaacaacatagttatataaaagtggaaaatttgagaaactaccacgaagatttgtaaatgtatttggttaattataatgactgatatcagtattttttattttttgtcatgaaatgaaaataaattattttgcccaaatcaatcattcacggccagaagttctctactaatttaacattttcatttaatgaaaacaacaaaataaaataactgcgcatactatagtatttcaacttcaattgaagaattgttagccaaaaccaaaagtcatgaaaacgtgataatagcatagtactttttagaatttcctaaggttgatgagagaatatatagatacctgtatatctcttggacacaggatttgagtcaatcgcactaatagaagacttctgatgttgctgaccacatatatgacaaaccacactagaattaccaccacagtattcccttgaatgctcaaataatgggatttccatcttaaaacgtgacaccatatgagggccttcagctctaccaccattaccaaccctcttactcttactcttaaccatgcgaccgttactagctttcccttcccttgaaggtccagggttataaaggaccatttcattgccaacaatgtttgttttgggatacctggtactaatttttctttgtacctttgaactgctgtttgattccctttccttgtgccttgtggtggtgcctttgagatttgaaagacatcccacagaagatgatctctctgggtcggatacatccgacggcttagatttgcagggcagtgcttttctgatagcatttaacaaagtaccacactatttttttttttattcttcttcttcttgctaatctcccttccaatgggtctttttatatacacaatttctgttcccaattggtatgaacccatcctgtggacttggaacggccatagcttttaggagaaatctcgtttccattttttaccttcttcttcaggcaaataatttataacactcttgttgttggagcagccacccagacatactatgtatatgtcttacgttattcaatcccaggatatataggaaagaaagttatcaacacctatggtcaaaagttccaaatttggagaccaaaataaagtaatacaaatttattccaacataaataaataaattaatactaattatgtcgagattctattccccttttacgttttaagttaatgtggcatcaaagttagaatgacaaaactcacctagaaaatattagaatatggaatttcaagcaagtcttttaaaaattatttattgtgaaaaataaccttccatacaagatcaaaatgagtgatattatatattattaagaggttaatgtataaagtgaatgagagctatatggtgtgtgatataatgtaattactcataaacttgtaactcatggggagttataaaatttgaatttgaatttgaatttgtaactcaacaatcatatttgattatgctgtgttaatatatgaataattacacaataggttatgggattaatagctatgagtttatagttattggaaaacgttcatatctcatctatatcattaaaataaagattgaaatgtttggtgacaagttggctcgaagaagagtttcaaaactcaaaatttgagttgctgaaattttactagtagggatgtcgtgggttttttagggtttagcgatgatttcttgatgcgtggtttgtgggaaacactccaggaaacatgtcgcctgaaactagttttcatcccatttaatcctatatattcgtctaataacagccacagcgaagtggaatttgaatttcaaattttggtctaacctaaacactataaataagatcctatagtttactcataagacacttttttctcttctgttttttaaaaactaagattagagagtttaaggcttaataattttcaaaaacatttccacaaaatcctaaatgttttgcagaggagaaaaataaactttttcacaaaggtgttgaaacattattcaaactttggtgatccttcatcacttggtttttcttttcatctcttttctctattctattcactatattattctatacacgttatatcatatatatatatatatagtctattatatttatatatataatttcatattgattttacatttatgtgttttgagctgtaattttgttctcatcttttcctcctctttatttgtatttttgtaatacctttatagattagtagttgtaatctttttgcataaagttgtattcttgagctctctattcatcttattgttattctatatctcatatttttataacattacatttcaaagcaaagtttttaacaatttcttaatgcctctcataaggacaacaacattaataagaaaaaaaaaaaaacaaaatccaaccagataacaggttacacatatatacatgtacacaccattttccatgtttgttttattgaaacaaaagttagaagaaattcagaagagaaaatatgaggaaccaaggacggaggaatgattctttcccaagctgcgtccccggaggcactccaaatccatcacatcagagtggtttacaaagagattcacctgcacaaacgggcaaactacaattagttcaagagatgtaatagaatttttcaaatgaaaaaacgatacatgcagaatgtgtgtgagcagcatacccttgggccatactgtttgacaaaccattcagaggttctgggatttgaagcttcaaacattgtcctctctattccaaggcgaccaatgatcttagcaattatgtctgctcttacagcgtccacatgtttacagatgtcatctgaatcaatcattatcatgtccgcccctgcttctaagcatctctcagctcttctgatcaagagatcaacatcctccacaaattctgtggcaaaccaaaacaaaggtgaaggtgatgattctcaatatctatttacaatcttaaggaaagatggttcccattccagttataaatctctaccaggacatgtctcattccctagtagcaatcaaccctgtattttcagggagcaaaacctataagagctcaggcaatttcagaaacaaaaatctttgaccaaaagaaatagctactattacttataaaaacaataatttagttggacattgttgctagatatatttaactgcaagctgcatctaggctatagtagatatatctcaaaggaattggtaatcatccaacagttttagagtatcttaaaagtacttcaaagacacaactataatgaaatcaaggcggtaagatattcctatttgaattcgttatttgaaaataaggaaaccatctgtcacgactcactgacaggcaatcagcaagaacattattaacgacattcaagcacactatggtgatagttatggaacactaatgtcattctgacatacaatgcagtataaattgtgccaccctttagaacccgaggcatgctcaattctttccagaaaagtttagcaacagaggatgtagaaaaagggatttgcggtattttacacaaaggagcttagttaagttttgat

SEQ ID NO: 218446 - DNA, 4068 bp, Cannabis indica
  modified_base (1188)..(1188): a, c, t, g, unknown or other
actatattatacaccatccaataaaaaactaaaattacaattttttttttttgagataaaattacaatttatttaataatttctttttttaaaaaaaaaataatttatatataaatagtaataattaaaaataactacctattgtcatagacataatctaatagtttcacacatttcttcacaaagattaagttttttttttttttgtaaatacaattcattaattcaagaaggaatacaaagaattttgcgaatcccgctgtaaagccaaattcacacaagaggtattaatctcaatccacaaagcattcattttgtttaacaaagcttaatttgctaatacatgaactaccccattagcttcacggtgtacaaaagagatcccaactacagaattatgcagcatcaagtttcgtatattacaaataactctgtcaacatctctacaagcttcctcctttttttagattaattggacgacctcaagacagtcagactctatacaaaacttcttgaacctttgctgaattcccaattgtaacccagcatgtatgagaagcagttcaacagttaaaggagaataatcttgctgcaataacgtggcagtggccactctcacctggcccccagtcactaaccacacaccccaaatcggagccaccctcttctttacgaacactggcatctacattgactttcaatatattccgggtaggaggacacaaagattaggttctaagttcaaattccccacaccaatataagaaaaaataataataataattatcaactatttacttgttacacattttattaaagaataataattgtaactatcacattttttttttgttaggcactaacacatccaaattcaacacattctttagaaacaagtaattaattttaactatgcattaaaatttttaatttaaagtgatgtcatccttatataagagggtaaatatcattgtagactatgtgttttataaaaattatagattagaccttttattttgttaaataacaaaatgaactctatgtttttcaaaatagtacaaataagatcatgaactaatttttgtgaaaataaaacttaataataatatgatctagaggtgttatgataaaactgattcaattttctatatttgttcgtgttaggaattatcttcaagttgattaatnataaaaaaaaaaaaaaattattaaaaattgaactcaaggtcctatttgtacaatttaaaaaaatatgaagtctattttatcatttaacaaatagatgatctaatctatttgcaaaacacatggttaaaagtgaacaatttttgtgtgcgtgtaagattactcttacattaaattctctacacacaactaatattttcatcattaataattgaagagctacttcaactatataatatgcaagtaataaaaaagaaagatgccaatggaaaaaataaaatacaaaacacaacggccactatccaaaaaagtaaaagcaggaaacatccgaccagatatccttcgaatcaaagactcatatacccagaaaattaaagtgagaaagatttatcaaaaggggcagattcttgtaatttaccaaattggatacattttagttttatgcccttcaaattaaatataataataataataataaaagaaaaactttaagttactttttcaattaaaaaattaatagtattaacttactttgattttgtaacaaataatattgaagaaaatccaaagatgaaacacaatatggttttattcatttaaagaactaaaaagttactatatttacacattgtttaacttttgattgtataatattggatacatttaattaacaattaacaatccaatagagagaaagaaaaaaaaccaaaagaaaattaggaagccaaacaagtttcccaaaagagcttgttcttctccatttcattcaaagactcaaactctttcgttgttgaatctacacagacacaagatttttgtttactgttatggttattatggctctcttttgacttaccaatattatttatttctccactactccattttcggtaagctggatccgacgtcgtttcatcttcatcttcatcttcatcttcttctaaataatcaattacaattctcttcgccgaatgaatcatgttcataaccaattgacgcatataatcgatcatcgtcggctgatataccccaactgcacgattcagcatcgtcttcatcgagagaaaccgagctatcttcagaatcgaacttagaacaaaactcggaatcgcccgtgacttcgaatagaaagaaggaagacaaatccacagcatttctattagtaatattcatcacttccatgctttttccaagaaaaaattatatatatatgaacgcagttgcagtagctgattggttacaaggaaaagaaagaagaaaaaaatctcgcaagttttctctgaaaaaaaaaatagtgtaagagagtaagagacgttagatttgacaccttgaaaaggaaaagcgttattattaaaaacaaataaaaaaaagggttggattagaaaaagtagtgggggatgttctagaagggtagaatcaatataatagagaaaaagaatcaatgcaccagataatttttttttgttgctataataaaaattacatatttaaaaattatttggtaggggaatatttttttgggtcaaaaattataactaaattattttattattatgataaaatatactttaaaacaacttattttatatgtgtataaaacaaattttaaaattaactatttttagatttttggcatatatacattgattacaattttattttgtattgatgtccaaaatacataataaattgttttagaacatgttttatatgtgtatgagataaattattttaaaatttatttttagtatctaaattattgaaaatctcatgaaaattagtgagaagttttaaataattgaaaatctcatctacacatttaagctcaaaaaagaaaaagagggcttctttgccgttaaaattgatctcgtaaaaacttataatagactaagttagcagttgattgatcatgtgctccgaaactttgaagctcctaaaatattttgtaactgggtcaggcaatgcatatccacgacctcgtttaatatatgcctgaatagttatcagattattaggctcacccctgaatgcgattaaaggcaaaaaaattctctatctccttatctgttcatataggcagccgagattctatcgcgtattcttgaaagggaactagacaatggaaccataaaaggaatcaagttgagtaggaatggtcctcagatttcccacctattcttcgcgaatgatcttattcttgtgggcagggccacattggaggaggctaagggtatttggaggtgtccgaaaaagttctgtgactagtcgagacaatgtataaataaattgaaaatttccattttctttagtaagaataccagcgaggggatgagacgtaatatcaagaaagaacttggccttaacattgccgctgaaaatttaattatctggggctcccactgtttcgtagtcgaaataaagatgtagtctttaattttattcttaataacctagtctccaagctacatgggtggaagttgaaattgctctctaaagcaggtcgagctactctgatcaaatcagtaggcctctccttaccagtttacatgatgcaaacaacgaagctatctaataggcttgcttctaaaattgatggtatggttagggatttttagtggggttgtgagcaaggaaacatgggtatctacttgaaggcttgggatcatatttgtctgccaaagtccagaggtggtcttggcttcatgaaaactcaagaaatgattcgtgctcttctggaaaaatggggttgggctcttcttactcgggatcagttactgtgtagtaaggtcctaagtgctaagtacctaaagggaggatcgttcttgaattatgcctacaagagctcggactcttggttctggaagaatgtggtaaaaagtaagg

SEQ ID NO: 218447 - DNA, 5240 bp, Cannabis indica
cattcatagtaacctgctaagcaagagaattttaacaatctacatgtcatgcacaatatttcaaatgcacgagtctacatttctttcaccttatatcaaattcttctgacttctggacagcttcttgggcagctttaacagcttgattgttcataccaagattggagcagaatcgcctctgtaacattatcgttacaatttattgtgtcagtgcaagaattggaaatgagaactgaaatagtatataagatatgtttactatacacagagtacaaacccctacttttttctttctttttttttttttttgaaaggcacaaaaagattgcttacctattctaaactttggaaagaaatttaaataaaattcttaccatgaagtccccagcatgtattgtacccatctccactgtctgacccttctccaatcccagctgtttcacaatgtattcttttgctcggccaatttccttctttgttgctccattggcaacagagcaaatttctattcgaaatccacacgttcagcgaagctcatagacaaagcatagattttttaaggaagcatccagatgttaaaagaatcataagctgtaccctttacagttcgtggtttgtcttcttgtcgacaggcgatgtataggcaagccgccaacaatgcatcctgatttcttcccctgctggatttttgatcctctactctcttataaatctcattagctcgatcctacaaaattaaataaaggaacagaacaataaaatcatatggaggattaagagattcaacaacaacaacagcaacaaaaaagtacaactcaactcaactattattgatcaatatatgcaaactgtgcagacagttaataaatgacaatttgtcacattttcatattaatacagcatatattagttactactacaaaatccttcaacattgttttatatccaagtataaaaaataccaataaatggtctacaaatgcaaaacaaggtttggctatggcctttccttcctatcaaacacatgactatacaatgttgtttaaatcatgaataccatacacgtaaaagattacaatgcttctgatacaagcagaacagcacaaaattagaatttagatgtactacatattatctgaaagcatgtatgtagatgcacgaacaatgtaatcctccatatagttgcatatgtaacaaagaccaaagcaaatagcataccttgatggttgctacaaggcccaacctgcaacaagtgttaatacatcagtttctttgtgttgtgcatgctataaaacatcgatgaatcagaaacctatacgccatatgccatgcatataaacatgtgaataatacatttcataagcaactatgtaatgctacgcaaaaataataataaggataataaaatggtgttttcaaatatattgtccttattattttcaagcacactagacccgtttctttcttagctgaattaaggaaaaagaacaggatgtcatcaactccagtaaatcggtttggtattgctgaaactcatactggaacaacccaattctaaacttctaaaccaattcaaactaccacctaaaatttactcaaattatttgaagaacccaagtaaagtcaaatggaatcatcataaggtaataaaaaatggaaaggaaaaataaatttgatggtttaaaacccaagaaaagtgatgctgcaactagctccaaagtccgaccattcaacaaaaaagaaattaaaaatctagaaaatttcccccagcatcttcatacctaacgaacacaaatgcaaattgtagcataagaaacttaacaaaatccaattctagagttcataactaattcaaactggcactaagaattcactcaactagtttgaagaacctcagtagactaaatggtacacttctaatgttcattgtatggaaaagcaaaataaatgcaatgtgttaaagcctaagacaagcatcactacaactagctcccaaatctcaacttctaacatattaactaactgtcccaaaatttctcaccactaccatacataacaaacacaactgcaaaatatagcataagaaacttaccaaaatccaaaccaccacatgactcacatttgctacagcactacactgcactagaatttcaaaatccattacacgggctaaccagcaaaacaaaataacaaaatgacagaattcattcccagttggtttgcttatataatccctattgttcttccaatttgcaacacttagatgtctctgccagggctaactaagaagtgttggatactttatgattatacctcaaatgaccttattcattcaatttaagcatattagaaaatcattcaaattctcagctatcaatatttcaatacgcattggactagacaatcttctgttctaataaacctgctaaacaatgaaaccccacatatccgatccaaactcaaatcataaaatagaaaacccaaaatccaattccaagatttccaccgcctttcacccttcgcacaaacacaattcaaaacctaacttttaacaccaaaccattccaatttcaaatttttacttttgtaatattttctgttcaaaaaccacacacacaacaccgccgccgccttcttacctatcagacatggtagcaatggtcttaaacgcaaggatcaaaccccgatccggattagacccacgattctgccaccgaccaagagacgaagacaagaactcaccgctagcgccgttaggcttagcgatcacagtagacaacccaccatcagcaagaagagggttcgtgggtccaccaacacgtacagggtcgttatctcccgactcattagcgaaagtacgccactcagaggtttcatcaatggagtgagattcaagaacaagtccacactctgaacaaacggtgtccccagccgagtggtcgaaaaccacctctgtctggcgcttgcaatcggagcaaaacgcatcagacatttttttttcttttcccccaaaaaagtaaactttcaagagtgtttggcagaaaagaaaacaagagtataataaactttgtcgagaaaattggattgggaagaataatctttcttcttcttcttcttctcttcttttggggattttggtttggggttttgagaagagagagaagaatgaatgtaaatgtaataacagagtatgagaaggaaaggggtatttatagacaaactctctctctctttttctgactcggtaggaaagtcacggaggttttgtgctttacttgtgtttgtttggatataggctttcttctactcccacctctcataaatatttcggtaaatattattttggactttgtattttataaaaattattaattagactctctcctttgttaaatgacaaaataaattttgtattttctaaaattgtataaataggaccctaaactgattttttatcaaaataaaacttaataataatctgatcgaaagatgttatgacaaaactagttatattttctgtatttatttgagttagaaattgtcttaaagttgattttattaaaaattaaattattgaaaattgagttcagggtcgtatttttaccatttaacaagtccactttgtcattttaaaaacagaaggtccaattggtaacttttgcaaaatacaggatctaaaatagtatttaccctaaatatttctgtcgcattattaggtgtgttcatgtttttttatttttacactttaaagtaatttttttttatttttataaaagttcacatattcttaaatcgtaatccaaattcgcatagtaactcacatagaaactaatcgagtaactcaaaccgtaaaaataaaaaaaaataataaaaaaaataatatataagataatttccatttaatctaatcagcattatttattttaaattttggattcaatgtaattcgtttagattggtttattttttaataatgaatttattttatattgttgttttatgtcttcaacaacaaattaaaataaatataacaaaattaataaattgaaagaagaaaaaataagtgtatgtatataaagaaataattaattttattttagattatatttttcttataaataaaaatagaataaatatttaaattttaaaaatatatttatatcaaatttattgtatttttaaattattattttttatattaaaatattaatgtatatataaattttttttaaaatatatatatatatatgaatatctgcggatgggatgttgattgaaaaatttaaaatctgtacttgtgcaaattgaatattgattaatatgtaaaagtaaccgatctaattcaatcgcactttgcggctagaattagattgtgccgattgaattgtattgggtattttatgaacacccttactcaaaatgatatcccttgaaacttttaggttgtaagtaaaaaaaaaaaaaaaattcttattgatattgttggatttgagagttttttttttccaattatgttcaattttactagtgtgggggtgattgtctaagtattaagttgtgtcctcaaatgttgatatttactaaattgtgtcacctgaactttcatctatgttaaactttagttagtaaaattagacaaaagtcatttattctaactatctcaatagttctgagacaattttcttcttttttttttttacaaaagttctgagataaatttttaataacttaaaaactttaaagtgcataatttggtacggataaaaatttctatcaccttaggtttaatttgtattgtattaattttctcctcttacggaattggagtattgataattatgtattgaattgtaatagtctccctaagtattttttgagttgtaattttatttttattcttagtttttgcaataatgcagttcagctaagtgaatttatgctcaaaatttaactggtacattagatgtgttaactattccatatattattatttgtaagtaatgatcatgaggtctaatcttcttgttgaatgaacactaattttcagaaaaaaaaaaaaattctcctcttatatttttttctacaaaaaattacaatattcttatttattttttttatataactaaaaaagagaatcacgtggtacaaatctattcctcacctcttaggtcatattaacaatctcaaagactaagctatagggcatgatatcaaaattacaatattattaaaaaaaaata

SEQ ID NO: 218448 - DNA, 6928 bp, Cannabis indica
tccgtcccattgagttgatcaccaccctcgaatcattctcaactataataaacttgtgtcccatctccaaggcagtcgaaatcgctaaacagcacgcctcagcttctccgcaaatcacatcagaaaaatccaccctcgccgtctgaacacgtaccactcttccaagatggttcctggcgacgactgcaacacacatattgtcaaaacccacttttacatcacaattcagcttaatccaatcctttgggggaggggaccaaacttccttgagatgagaggtgggactgggtaataaagaagcatgaatatcagtataggtaaaatatatatcatcaacacattttttcacatcaacaaggtaattattgtgaactttatcattccgcaccctccaaatagtatccacaactatggaggcatacaagaaagcatcctccactagaactcctctacggtttagaccccagatgaacttgacccaatcccaaactcggatcccagtatcacaaatgggataaaaaccccaaggagaagaacgccagaggtgaaaggccacgtcacaagagaggaataaatgttccatagtttcttccctagttccacaaagagggcaacaagtatcctcaatgtggaatcttttgttgatcactgatcttgtaggaagcgcattagacagaatacaccaccacaggatcttatgtcgttccaggattttgctattccagagcttgttccagagattcagggcaacctcgcactggggggctctatccaatgcttgaacaagataagcagacttgcacgagaaattaccattgctagtttgagtccatatccatctgtccgtgccatggccagagggttggcccccttttaagatagctgcaacagtttcatgatcaaagctttcattcagcttatccacgttccagtgtccattggatagtaacagatcagacacacggttgagattattcgcacctcccctgattggttttggacaaaaacctttatagtggggaatccagggatcctcccaaatagcagtattctctccattagccactagtttacaagcacctctcttcaaaatagagttagccttcacaacactcttccagaaccaggagtcagagtttttatacttatatttgagaaaatccttcccttttaaatattttgtcgttaaaactctgcagcacaacgattggttaccagtaaggatattccacccccacttagccagaaacgccagattcatttctcttgttttccggaagcccagaccaccaagagatttaggtaggcacaacttgtcccacgcttttaaatggagcccatgatttcctttctcaaaaccccaccagaagtccctaaccaggccatcaattcggttgaccatacgattagagaggttggtggtctgcatagcatacataggcaacgaaaggcccactgattttatcagagttgcacggcccgcctttgacaaagtcttagccttccatccctgaagttttgaagtgagattatctagaataaagttaaagtcagcgtccttttgtcttgaagtgagattaactctaaaaatattaatgcatatatttagaatctaatttgtgtcaaatttttgtatgaactcttaaactgcacatattgactatacacatgaatatgaatttgggcagaattttaataaatgcaaaatctgttacccatatcttccagtctttttattcctatttatgaatcaagatcccttattaaaaactagtgttattgtgttaaattaattaaaaatttgatatatcaactattaaatatgttaataaattttgttgactcaattaaagatttaataaaaattaattgacgtgtcaaattttaattagtgcaacactaatatgagatacaattttttaacaagagatcttttatagacatcacttttggttaccagctctcatatgtgagtgagattatgagttaatgtgtataatggaccacattgtacatatttgagataatataaattacttagccaatatgcatctccatattctccatgtaattgagttgtttaactaattaaattattgttagtcgagataattgttcttcaatataaatatataatcgagctggtcagatgtaattttctcaataatattaaaataccttaatttataaacattactatcattgttggattatactttattaatgtttcggaattatttataaagaaccatgctaaataagttaactatgagatgtgtcaatgtgtcatgctatccaagatgatcatttactacttggtaaattgggtataacattcatgctaaattaatagtatgcaaccaaacttgtgctatattttgaatagattttttaataaaaaataaataaaaggtaaaagtctacaagattcaataatattatgaaaacatacttttaattcttttattaatttaacttacattttggtgagtaaaaatttccatacaagaatgacaatcatggtaacaaaactattaagggaactaatttcattctcatatttattgaatgaatgaataattaaatcaattccttgctcactaaaaataatattctcacaaatgtattcccttcacaattgatgattaataattagaactagttacataattgcatttatgttcttaagaaaataaataaaaaactatgatttagtacatgggagtgagtgtaaagcaaaactatgtactgagagaggagagagatctcattggtcaagataccacgtgtcagcctgttattcgtccactttatgtcattctaaggaaactcaaaagctctgcaactatgattttgattattttccgatttaaatcaaaaatcttctcaatttttaatcttcttcttcttctcatctcccgaacccgccatgaattccttggtaattacagttttgccactgccttctctgtctgtcttttttttttgggtctcttctttgttgaattcatagttgggtttcatttatatttcggtgtcagtaatttttatgtgaattgtttttggttttttgatttttaatttctgtaattttggtgtgactaatggagcagcagagaagtgtatcgggctcatctcagagccctagatctccgtcttcgcagccgttcctttcagtctcggtcactgatccagtcaaattgggcaatggagtccaggcttacatatcctaccgagtcatcaccaaggtattattattgattcagttctgtttctggtttctgtaattggattagggttttgctttttgtttttttggggctagaaaatgcggtgtgcacttttgatcattcgtttttcttgctttggtatgaagactattatgaatagggttaatgggttttgtataatgatctgtctgcctagcattgttaggttttttaagctcagagttgaattagaatgaaatatgaatgatgatggtttaaaaggtgggattttgtttgacagacaaatttacctgaatatcaagggcctgagaagatcgttatcaggcgttatagtgatttcgtttggttgcgtgatcgtctctttgagaagtacaagggagtatttattcctcctcttcctgagaaaagtgctgtaggtagcaacatattccttttcttgtctcgtttttgtaacaaacaatacaatgcattcattatcctttgaaaattgaaaatccatcgattttgatgatatagaatcgtggtttgaagttcaaactacttcaaagtgactaggggactaagactaatttcgctcactctatgcagagaagtttcgtttcagtgctgagtttattgaattgaggcgccaagggttggatatattcatcaatcgaatagcttcacacaatgaacttcagcaaagtgatgatcttagaaccttcttacaggcagatgaagaggtagttaaaaactttgaaaatgcctcatgatttctttcttaaagattaatatcatccatagggtgtatgtgcatctaaccttattaacaagagataatatttctgattttgtaaaagacactgaccaataatttttctgatacatttatgtgattcttatttagacaatggaaaggttgagatctcaagacactgggatctttaagaagaggccagctgatttcttgcaaatcattaaggtactttgaactcattatgatggtctttagcaaatttcgtaaactgcaaaaatgcattaaatattcatggggatagtgttaacttttgtcctagaagtaattttagaaatttctcttatagacattggagtattggactgtactgtacataatgtctgtttactgatacacctcaactacaaaacttagtagctcactgtggtagactaatatgaaatcattcttttggactttcaatttgatgagagaaatttattttcatctggcaggatgtacaaactaaaatgagtgatgtagttcttggaaaggagaagccagtggaagagtcaaatgctgagtatgaaaagttgaaacattatatctttgagcttgaaaatcatgttgccgaagcacagaagcatgcataccgtcttgtaaaaagacatcgaggtactggaaatgtgaaagcattgatttaagcagctgccatcagttcaaactcttaactttctttgtctatgtagagtatgggcaatctctgtcagaattaggaaagtcattcaagcttttgggtgcttgcgaaagtaatgatgttggtaaggcattttgtgatcttggtgcaaaatcagaagcaatatcaatcaagctgcaaaaggaggtaggcttttaaagtgaacttaacaatctgttcatgtgtagtatgtattgtgtctttgttcgtgtattttccctaagggctgggcttatttggattaatgagtttgctttgttggcactgccatttgcattctttctcttgcaggctcaacatctgttaatgaatttcgaagaacccttgaaagattatgttcgtgctgtacaatctattaaggtgaatttggtttctatcttgtttgacatttatggtctacgtagctaactcttgatctagcagaaattgtgttctaatgtaattaactctgaatctaccaaaattattggaaacttcttttccttgttatcacgtaatcatagatacatgcacagtttgggttaattttggatgcataacattgatgcaagtggaagaagtaaagcatatgttactgtggatgatttccaatcactcaactctgcacttctattttactttgttctgttaaacaggccacaattgcagagagagcaaatgccttcaagcaacactgcgaacttgctgaaacaattaggttgaaggagatagctttgtaagtgtccggttacctccaccccttttctcatctctatttacctcttcggtaattttatgctgttaagtggggacaactcattattactgattttcttattggttttcagagacaaactaatgcttacacgatctgagagggttggagaagctgaacatgagtacaaggaggcaagtcagcctatcttatcagtgatttgtttacaaattatatgaatttttatgtgactgaatttggctttgtgatgcagttaaaggctgccagtgaggaagcaacaacaagatacgagacaatcgttcgaagaatgaatgaagagatggtgcggtttcaggatgagaaaacaaacgacatagggatcgctttccatgaattcgccaaaggacaggcacgtctggcgaatgcatttgctgatgcttggcgaagtctccttcccaaacttgacgcatgttcactcgacacctcgtagtcaatgaagaaggaaagttgctacatacatttccgcagttgacaagaatggcaaggcaggctcttgatctgcaaacacttgggcattcaggaatcaggagtattgttatgctattctaatgtagtatgaatgggttttttttctgttcttttatttattttacttgtacaaattcaaattaatttaggtgatagttgagtttatgttttgaaagattatatgtgcggagtaaactgtcaataaaactcaaaacatgtgtatctcacacattaatttttccattttcaatttattgaagtctctttatttttttttttgaaagtcaatttattgaaatcttaactccaccatgttatgcccaagtttattttcaaatttacaatattagaaggattgacattgtttagtaggggccaagaaataaatttgaagagcattactattatgtataatggaacctggttagtgattttctagaatattaaattaaattatatgaaatatgatattaaattacattaatataatatctccttaatttctgttttatagattaatctttcattaagtttgtccttcgcatagttggtatctttgattgatagtcattaataagtgtgattgtttatgtatcttttagttgaaggtgctattaatttttctttattaaatacgggtcaagttttttgacacgagccgagaagacacgaccacgattaggcatgaagaaatatgggtttgggcatgatatggtacaatgttacaaattggcacgatacgacacaagaaacacgaaaaacacatcacgtaagtatgaatagactagcccgaaagacacgacacgcgacaagtctaaaatgtaaaacacgacatattaaaaatcgtataatttattaatttaattaaaataaaaataataataataataatacttaaatataaggagaattaccttataaatatattttttatttttttaaatttacggtttaaattgttccggtggtttctatgtgggttgctatgtgaattttagttactgttaagaatcatggggttccat

SEQ ID NO: 218449 - DNA, 5376 bp, Cannabis indica
agtcattcctatcaatttcttcatggtatcaagagcagaattaattttttttttctttcatattgaattgtacgctcagccatggctggcaacaatgatgctccaccaccttcaaaaatcgaaatcaataaccctttctacctcggtgcccatgataggccgggggatttcatcacacccattagacttaaacttgataactttgatgcttggtctcacgctatttttgttgctctttcctctcgtcgtaaatttggttttcttgatggtacgattatggatgctgtaccacccgcaacaaaggaggattggttcgtggtccattgtatgctcgtgtcttggctcatgaatacgattgatcctgaggtaaagtctatgctttccaattatgataatgcaaaacgcttgtgggatgatttacatgaacgttttggtgttgtgaatggacctcggattcaacaattgaaatcacaaattaataaatgtgagcaatctaaaaccatgtctgttgcgatttattttggaaaattaaaggttttgtgggatgaacttgcaaacttacaacctttaatcaattgtaagtgtggcaaatgtacttgtgatgttggtaagcaacatgaaaaacgtcgtgaggatgatatgttgcaacaatttttacttggtctgtatccggaatattatgcacagataaggtctaacatacttgctcaagaccctttgccatcattgaacaaagcctatcaacaagtctctcaagaagaacttgttcgtggcattgatcgtgtcaaggacgaaccctcaactgccgtggggtttgctgttcgtgcaggaggaggtcgcggtcgtggttatactgataaaccaccctcggataggcctgtttgtactcattgcaagaagccaggtcatttggcttccaactgttattctttgcaagtatgtactaattgcaaaaaacgaggacatgatgtcaatcgctgttttgaaattgttggttatcctgagggatggaccgcgggtgaacgaggaagcaagccacacacagctggtcaaggccgcggggtggcgcgtgcaaatgcagcagccggcagcaacccttcttcaggaaactcagcatcaaactcctccatatctgctcctccttcgtcttcaaatggtcaagtattcacagcagatcaatggaaagttatcatgggattttttggtaatgctaaaataccggaaaatcgtttgagtggtaagtttgataatacttcttagatcattgatacaggtgcaacccatcatgttactggagaaaaatcatggttatttgacattaaacaattacattgtcctatgggtttgccaaatggcgatactgtagttgcatctatggtgggatcagtttgtttatcggatacgttcactctaaatcatgttctttatgttcctgacttacgctgcaatttactttccgtttcgcaacttaatgataatttacagtcaattgtcacatttaagtctgatatgtgtttgatacaggaccaaatgaaggcgctgattggaacgggagttaggcgggatggactatactactttagcaaaccggaggtggtgtctgcagttgaaactacatctgatgtggagttatggcataggcgaatgggacatccttccgagaaagtagttaagttacttcctcatgttagtagatctaggagtactttgaataaaggatgtgaagtctgttttcgttctaaacatcacagggacaagtttcatttaagtgataataattgttctcgaatttttgagaaaattcattgtgatttatggggtccttatagacatgagtcatcgtgtggtgctcgttattttttgacaattgtggatgatttttcgagggcagtctggatttatttattgattgataaaatggaagtttttcatatgtttatggcctttgtagctatggttgctcgacaatttggtcaaaatattaagattgtgcaaagtgataatggcactgaatttaaatgcttgcttgattattttcgtgctaatggaatcatttttcaaacctcttgtgttggtaccccacaacaaaacgggagggttgagaggaaacataaacacattttgagtgtgggaagagctttgcgctttcaagccaatttgccaatttccttttggggtgagtgtgttcttgctgcggcacatttgattaaccgtactcctactcctcttcttcatgataaaacaccatttgaaatccttttcaataaatcacccgcctttgatgctattcgtacctttggatgtctttgttttgctcataatcaaaaaacgaagggtgacaagtttgctagtaaaagtaggaaatgtgtgtttgtggggtatccattcgggcaaaagggttggagattgtatgatttggatacaaaagaattttttgtttctcgagatgttaaatttattgaagatgtttttccgtatgattgccccgatgatgtaactattgggtccgatgtggataatgttggtgaaattcatgaggattttgcggattttggtgtttgtggtgaagaatgtgatgttgagatgcatagttatgctcaaagggggttaggtacgagccgtgaccatgggaacactgctgcgtccagttctgtccaacagccccaacccactgaaaacccatcagcaactggtactagcagcgagcaacatcagccctctactgcctttgacggtcgtgatgacccaaatcaacccgaagaaaatatgggtcgtggatttcgtataaaatatccgtccgttaaacttcgtgatcatgtaactcacactgtttttgctaatagtccatctctcccggcttcgatttctgatcacccttcaggtactccgtatcctctcacacattatataaattgtgataatttttctgtaaattaccgtaagtttgttgcagctgtagtcagtaacaatgatccaaaatcatttaaggaagcgatgaaatatgatggttggagacagtcaatgagggaagaaattcgagcgcttgaaaacaatggcacttggaccttggagccacttcctccaggtaaaagagctcttggtagtcagtgggtttacaggacaaagtttttgtccaacggtgaggttgaaagattgaaatctagattggtagtacttgggaatcatcagcaagcaggtattgattatactgaaacatttgctccagttgctaaaatgactactgttcggacttttttggcaatcgcagcatctaagaactgggaacttcaccagatggatgttcataatgccttcttgcacggtgatcttgatgaagaagtttacatgaagttgcctcccgggtttgagaattctaatcctaatttggtttgtagattgagaaagtctctgtatggcttgaaacaagctcccagatgttggtttgcaaagctagtcacagctttgaaagagtatggctttcttcaatcttattcagattattctttatttacatttactaagacaagcatacaaattaatgtcttagtttatgttgatgatcttattatatccgggaacgattccgctgccttatgcactttcaagtcttatcttagtgattgtttcaaaatgaaggacttgggtcctttgaaatattttctgggaatagaggtagctagaagttctgctggtctgtttttgtgtcaaagaaaatatactctggatattatttctgaagcaggattgttaggagctaagccaagcggatttcctatagagcagaaccataagcttggcttagctagtggagagtcacttaaagatccagaatcatatcgcaggcttgttggtcgattgatatatcttgctgttactcgtccggatttggcttattctgttcacatcttatctcagtttatgcaggagcctagaactgagcattgggaggcggccttaagggtcgtccgatatttgaaagggacaccgggacaaggcattcttttgagtgcagagtgtgatttaactctgcagggatggtgtgactcagattgggcggcatgcccggttactcgtcgttctcttacaggttggcttgtgtttcttggtcattctcctgtgtcttggaagacaaagaaacaacatacagtgtcgcggtcatccgctgaggctgaatacaggtctatggccgccatcacttgtgagttaaagtggttaaaaggtttgttgttgagtttaggtgtgaatcatccaaaagcaattaaattgttttgtgatagtcagtcagccttacatattgcgaagaacccggtttttcatgaacgaacgaagcacatagaagttgattgtcattttgttcgggatgcaattaatgagggtttgatttccccatctcatgtctctacatcttctcaattggcggacatttttactaaggcgcttggtaaaatgcagtttgataatttactctccaagttgggcattcatgatcctcatgctccaacttgagggggggtattacgggaatatatgtttgagaattatcttttgagaatattttgattggaatacaatctttggtaaatatgtggcaatgaggtgtagttggtaattatttccttgattctagtgaggtgtaatctttttccttgattctagtgaggtgtaatcttttccttgattctagagaattgagttggatgtaatgtaatatatatatacgtttgcattgtcaataaagagaggcaagtcattcctatcaatttcttcagattgactaaaaattctatgtacatgtgatgattatattgtgttaaactatttaagttttagattactttttagaattgtttttcttctttgttgttattttttggacgattttatacttgttttcttgatttcaagttttgaggattttaaagtgcaaaatttgtcaaatatcgaaaggatgagatgggttagaaattaaagaaaatcttagttgaaattctggaagctcgttgcggcgagcctttatatctgatcgcgactaattgttgccgcgatgagaaggaatagtggctgcggcaaataaggcttataaaaccatagttttttcgactcaaagctctcgccgcgactagactatctatggtcgcgacaagatgttccatacggcactgaagggcaattttgaatttttaagccaattattcataattttcgtaacaagtttttagtattattggagaatattgtcccacatggattaaatgtgaaagtattgagccatatatatgaaacatgtgctactccactcattgccaattggttttgagttggaaccccatgattctcaacatggtatcagagtcatatccctagcgggcttcgatc

SEQ ID NO: 218450 - DNA, 6735 bp, Cannabis indica
agggcataaaacccaacatgtcgtacatcccggattacaaaccgtgaaagtataataacgggacaaaatcatatccctatatttgtgtagattctgagatcactttggtacttcttttctgttcaaacagagatggagtgttggcacaagacttgtaataaacatcattttacatgctttcctaataaccaaattgagaagtgtaatagtaatactattattaacaataataataataataataataataataggctaattaagaattttttcaattttaatgttttagtgattgtttatgtactaaaccatgcttcctagactttgatatctaccaaatcatgtccctcagactttgatatgtattaaatcatgtcccctgaactttcatccatgttagaatttttttactaaaattaaacaagagtccttaaatctaaccatctcaatagttcagaaaaaaaatttaacggccaaaaaaaatgatgagcttcgaagagatttgctgtgaatgctatttctgaggcatggatgcgttcccttcaaagaaggcatttggggtgttgttaggcgaaaattgagaggggcaactgcgtgtcttaattaatgtagagattttattaaatgtttaaatcatttgaaggaaataattaaccctaaaccctaattaattatttcctccgaaatttttattaatacatactaattaagattttattaaatgtttaaatcatatataggttaaattatttttttaaggaaataattaacaaattagtattgtgtggttggttgtgcatgataacaaaacgtccagtttttccaaaagagaaaattgttttaacattacaatccaaatttattggtttgaaaacaatgacctttttaagttcctggatattacataattattattcataaatgaccaaatcatgtccgaatagaaagttacgaaaataaagcataacatccacacttacaaatcataatgacacaaaccataattttacaatagatatcaataataggcaacaagtagctcaacatcccatctacagtttcatttatagtgtactaacctacattcaatacacacttctaatttcaataatcggtgaaaccaattcaccgagccggggttggacaatcaccaagtaagctcacctccctcttcacaaacgttggcaaggcaaacgcggctctgtgcacctatcaaacagacaaagccttgttttactcaacagtcatctatcgttgaaatcaacaggcgggcggcccctaaattgaaaaattatagcgtctaaggtacaagatataaagagtaacgatttctcacctctgagttatagaacttaagttctcttttatgtttgacagctccttctagcttttcaataggattgactggattcttgaaatcaacgggtggcccctcggtcgagcatattagaaaacctatgacaccactgcataacaagtggtaagaatgcctgaattattttactcaacagtagtataacagattaataatgataattacagagatgactgatgattgaggagattataataaaaggctataccttgggtaggtgggaacacttgtccatgcataatgaactgaacctttaaacatgtcccggcaaacagaaatcatgtcttgaataagatgtgtatgaagccagaaactttccgccatgttgccagagaaccaccaccaggccttaatgctttagctattgtctcaaaaaatggtttctcaacaagctcttgagcaggacctaaaacagaggggatctcaaatcatttagtaactactccattatctttaagaaattaaaactatacagcattgcaagaagctatgacagtgttctactttccttttgtaaatgtagagtaataacaaaagacaatctaggccaagttataagttgatgaatttagaaagaacattcaagttaatgccaaatgaaatggagattacaaatagtacagaacaatagagcataccaacagggtctgatgaatccactataatagcatcatatctcccttcaggtgcatccctcaaaaatttaacagctgtcacaattgtaaaaaaaaaagattagagctctgtaatcatttaaacaaatttcatgtccatgtttaccaatgcttaactaacaaagtatttatcattcatgtattttaatgaacgatcagaaacaagttaaagaaataaaattcgactttgtttcctacctaattgaaaaaaaaatttaaaaaaattgtttacataacaaagtattatgctaatcataccatcatcaatatgaagatggacacgagggtcctcaaatccaacagctagctctggaaaaaactccttagagacctaaaccaagaagaaaccagaataattactattagttgggaggactccaatagacaggagcaaattaatgcatgtaggatgtacttgcatcactactcacatcaataaccatcttatctatctcacatatatcaatgtgttcgacagaactgtgccgacaaatttccctaagaacaccaccatcaccaccaccaacaacaagaacctgcacagtgtaatttaagagcatttaacaaaatatgaaaagttgaaaaattggaaggcattctatcaagtgcaacagagaagtcattaatcgatacacttctcaagtgctattttaagtctaacaaactttcttcagaaatattagagttgtaaataaatatccaaatatattttactcggtatctgtaacaggataggtgaacaaaacgttgctaatggaagagttggcaccaaagctatgattaaagtaaatttaaagcagcatttccaacctaaatccttcagaggtaattcaaccgaagataaaaatgactctattaacctcagatgaagggaaacttaaattgctagataatgatacaaggaaatttattaaacactaatgggagcatactagaatcgactgaagaagaagaagaaaaaaatactctcagcgctcatgcaagttgtcctaatgctgatcttaaaaaacaaatatcttaaaaattaaccaaggacaaacttcagcacttaacataccacatattatagatatagtatttttcttatatggagacacatgaatacctaattccaacatgaaaccattaggtaatgcaaaatgacagagcaatatggaacaaaaataatccaaaacagagctgtagcatataccaatctattattgaaatttgcagaaaattaaaaccattagaatggatgtaattacagttttgggtgaggagatcgaacaaaggggaagatgcgcaatcatctcctggtaggcacattcatctttctcagtgagctggatgatgccatcaagaactagcacttttccatatgctgaagactgaataacaaggaattgacaatcaataatcagaatacaaggtcttaaaaagaagaatgaaatagaggaaacttaagctaaacatagtaacacttcagattgaaaatgccaaacctcaaaaaccagaacctcttgaaactctgactgtcccttgtacaaacacgttctactttcagggaatgagcttctcctgctcaacaagtaaatattaagaaagggtacaaagaataagaatgagaagtattgtgcaacgcacaaacaagatgcatgatagccagtcaaggtggaaagttgaaaacaaaaagaaaagaaagcaaagtgtgcatttggagtagggaaaaatgtaagtgtctagccacatcaaataatcaaaaaagaactatgatttttgaaaaaagaaatacaacaaatattctagctataatatttcaattccattagtaaaaaaatacaatgtcaaaaggaattgatagaatcgatcaaatgagaggatgcaacaacttgtataagtagttcttaccaggccacatcggattgttgaaataaacaactttaccagatttgtctgtaactaagaaacaaaccaagtgggagggtcagttatagcagcatatttagctaaccaagtcgatcaaatgattacatagcacttattgcataagaaaataacaaggttaaattcaaactatcagaacaactaatgatgaaagagataataacaaccagatttagaagctgagaaccacccagagacaactgtggaatggcattttgcttcaagttcaggggctgaagccttagcctttaagcagcaagaaggtatggcctttttcaaaccatttccattactctccttcccatccatagtcttctggcattccaaacctcttcctgcgtcgcccgccataaaatatctttttcttatctggctccagcctctaatatcaaaaaaaaaaaaaaatacatgctaagaatcttcacaatataaagacatcaatactattgtatgttgtaacacagataacacgtttagctagctcatgagaatcatattgcaccaaatagaagacatgatactataatacataactactttctcaagcctcaaaagaaagcaactatataataaacaagagaaaacatgtaaactctataacagaaccaacaacactgaagctctaagccaaaagtctcgaattttaaccacaacagtccaaaaggaaagattattattataacaacatccctgctacagataattttcatataaattacaagaatcagaaatttaactcgtgaagttaaatacccaaaatttattattatttttattttctaaaaaaaaaacaatttctactccttatattgtgaagcacgtttttccagacactagtgaaatcagatttttggattattagcacaaaaaatacaaagttgcacaatcactccagtaaaagagatcatttttcttcttcctgtttggaagaaactgcagtgtaaaaagtaaaataaattccagctaaaaataaatatataaatggcacaaataatattaccactcagcatatacagcataccccaaaaaaatgtataacacaatacattctttgaaattttgttactaagagagcaaagctagtccaaagaataaaatttcaaaaccttcatctgcaacttccattcggtgatcatataaggctagggtttttaaccaaatagtaaaggttcaaaaacagactaagcccatatactcaaacatattacattgcaaatacagaaaacgcagaagaagaaaacgattaaggtaccaaagaaatcacatttatcggttgaacttacagagtcacaaaaatcacgtataaggaagagtatggagacataaatgataaagacctcgcataaacctataaatatataaagaaaaacttgcctggctttaatggcagagcgatgaagatttaggggattcgataagagtaagcgggaaagagaagagtttctttaaagagaaaaaaataataaataggaaagcctttctctgtttaatgcctttcaagcagcttggtttggacgaaaatggcgtccaaaggattatgtatttataagtgaaattatttgtttttctaaaaagaaaacaattaaataaataaatatttatttttttttatttattattattatttattattttttgaataaaagtaaactttcattaaccgagtacaatattacgtaattcaggacttaattgataattctgaaaagtacgacttgggaaaaaacaagagctacacgccaaacaatgagcggttttgttcacaaatcgttcaacaaactgaatagcaacataactcaaagaagataaaataattttgcaatcattaaccagtaaaccaaactcagacgccatatgcaactcactctgaatagcctgaacacagaccagactatcaatttccagcataacattttgccaattatgacgttggatccagcttaagacttccttgatcccgatgatttctgcgatctctggcctaacaattcccctcctgctagtagtgaaggccttgagaacttgaccagcatggttcagggctaagcaacccatcccaaaacggctaacatcattaaatagagcaccgtcaacattgaccttgatctgatcagaaactggtgtagtgcaatgcacacgcgaagacagtcctatcgaactgttagacaacgatgtagtagtacgaatgtctttaccaatcttacctaatctatctcttatgatagggaatatgcttagctttttgaaaggttaatttgttgtgacggtccgacattatttttaatggggtgagaatgagtgccttgatgattttatttcgagcaaaaaaatatttattatttattttttttgagaattttttttagtttgttaaagtaattaatgataaatttattgacatctttttttgcttgggtaaaaggtttgaaattcacctacctcttttgaaagagattaaagaagaaaaattctcctatatactattttttaactttttttaaaaaaaattactatttggattgttccgataatttttatgtaagttgttatataaattttagttataatttaagttgatccgttagttgttatgaaattttcacgtagaatttcataaaaacatatattaaaaaaaaatctattttaaagtataaaaatgaaaaaatctcattaaagaaatgtttggtctttaagggaggtggtgccattcgtgtagtgacaactcttaggtggcgtctagttggagataataaaatggaa

SEQ ID NO: 218451 - DNA, 1689 bp, Cannabis indica
tcttgtcactgtcatttatttatatatcatttaatgaatgtgtaacaatgaattgatctctgtactattatggtagctgggaagatttcacgacgagtatcactcgtacactacccagagcctcatgaattgaaacaagctagttcaagcaaatctatgtatcacaagtcttctagcatttcaatgaccaattcttcccatcaagttggaacacctgcacaaagtagtcggccaagaaacactactggaacttcaactgggcgtggaacctccagtcgaagtagcaaacagaaaagttctttatcagatctcggagagccatcacaaactccaaagagaagccgtgcatctgaatccaccatgtctattgatcagtctgctcaaaattcaagtcgaggtcatagcgctgttactcattcgggatcatcgcagcggtcccatcgagggaaatcgaagaagggaaaacaaaatgaggattaaggtgccttcttcactacttgttcttgtatactttttagaagaaatttttggtagtgaatgaagttatattttactgtctagtgattccagcagttgctttaagcttcacaagcctaaatattttcttgctctatcattctatgttattctgatagaaaagttctgctcagaattcaagttcatgcaatgcataatgcttataatattaccagaaagtcagtagtccaatttttactttggtaaattttctcaggctcaaaattatcacttggccagtggtaatttttcaatttgatgatacaagaagggcaaatcagtcttaataaatttaactaagcctcattaatatggttgtaacaaatattgttggtaacttttttggcatagtaacagtatgtagaccatcaaattttaactcacatctacaaatgattttaaatttcttggtaaccttgtacactctctataagtttattaaaaattcaaaacataattaatgattatatttttgcactacatcgaagttcactatacttataatatgaaattatcaaaagtgtaaagtaccacaattagttctaatctttttattatatttaatcaaaatatacaccagttataatgggatttaacttcttttttttttcttttttcctttttatctgtatatagacttccttaaccattcacaatatctatcaatatcttttcatatttggtccaaaattagaatttttaggctcctcagcatcttcttcttcaagaattctcagtatatcagaatcaacatactctgataatagcttattctgataattggagttgaagccaaaatctaaatttggatgagtcagtgaaagtggtctcaacttcaagtgttagtgtgtgcccattttgaagttagtgacattagaaatttatctctattaatggcaaaggtgcaaaaagttagcaccaatgccaacttatttttcttatcaaaaaatagttttgattggttgttttatgatggtgaatccatttcgtctctcttttttagtgctaccattgttgatactctagttgaatcaatataaaaagatgaaattaaaagaaaccttatgtaactaacaattgtattaggcaatttttacacgcaacataattatattttaaaatttaatcgatcaaatatatattctatttctatatataattttttttcttaca

SEQ ID NO: 218452 - DNA, 5775 bp, Cannabis indica
gaatgggaccagttggctagctggttcgttaacaatgcaatttatagtgataatgcagtatggatgattcaggtaccttattttgtcctttttcatcattttttttggtccaaataatcttctcccccgacccgtaaaaaacaactattgatcatctctacatttgaagaaagctgctatgaccctcctattctctgttctttgcatagattttgatacttcaggctgtgattgtgcattgcaaaaaagtcatgtcagccaatatggtgtttgtttatttgaaaccattacattcatgctaaaacaaactaatcttgtctgcgtcaattttatataagatcgtaactgtagagttatataagcattttcctaataatgggggataaattgctaaatttaaaggccaaagcaggatggtaattactttggttattcaattgacaacggtaattttatgcctcatttatcgaactagtttcttatgctttcattgctctaatacgatcttcatctttcagttaccacggctatacaatatctacaagaatatgggaattgtcacctctttccaaaatattctagataatgtgtttattccgctctttgaagtcacagttgatccgaatactcatcctcaattacatttgttcctgatgcaggttagtactgctccgaaattttataactctgaagtattatttttataattaatgatatgatttgtggttgtattctggctcacatctagagtactcttacattgatgcacaaaaaggcatttgtgctatgagaatataggtgtaagtatattagatatgtttatgttgtaagtgttattcagcaaaaaaataaaaagaaaaaattgtagcatagaagtttattcattaaaactacatcaacgttttacaattatatcctatttggaattttgtctgttaaactgatatctacttgtatcgattgctgactgaaaccatgaaatttgttgtggttaagttacatataaaattttctaatgtgacctctgtcattagaggctgtttagacaagttatcttgaatgtctaccatttaaagcacaaatagttaagtaagcagaatgatgaaaggaaatgaaaaaaaaaacatgggatctctcatctctgtgtgcttacacatactaaaaacttgccctaaaaagagatgggaagaagcttactgggaatattgttaggatcccacattaaccaagtatgagattggttatataactacttggcaccctcctatgagtactctcttaggcagcttttgggagtgagttctacccaagtggttgtatcatagtacaagtttggttttcctacataatttatgatttaagttcttaacatctctaaatattagacttaccaccaatcataggttatgatattactggcaaccagaaatagcttggcatgcatgacaaaaattgtcatttcagttgttgcttctgactaaaaaaccatttgtaagatgagcatgatcatgtgtgtaaattcttgttacaatgaaatatatctatccttggctattctaatgaggttatctgtgaatatacaggttgtgggttttgacattgttgatgatgaaagtaagccagaaagacgtccaattaaacacatgccaactccagctgaatggaccaatgcatttaaccctgcatactcttattatgcttattattgctatgcgaacttgtacactcttaacaaggtttgtgatcttactgttaatggcataatattcaatctttttatatgaaaactaatttctctttcttcattcatcagcttcgtgaatcaaaaggaatgccaacaataaaatttcgtccccattgtggagaggttctttcaatgacccaaatatttgtattgaatcttttatgctgattgagataatattttatgctaattgagatatttcgcttttattatctcttcaggcaggtgatattgaccatttggctgctggatttcttctatgccacaatatttctcacgggatcaatctacgaaaatctcctgttttgcagtatctctattacttggctcaggttagaccttatgagtactcctattgtcaagtatcatacgcttcttttgtttgtttcttttcattgtacttgttttcatttcaaattgcctagtgtatgctaaattttgatcaaatcacaagtgaattctcttatttatccagatcggactgtctatgtctcctttgagtaataattctcttttcttggattatcatcgcaatccctttcccatgttcttccaaagaggccttaatgtctcgctttcaagtgatgatcccttgcaaatccatttaactaaagaagcactggtggaagagtatagtgttgcagcaaaggtttaattttgactcacaattttccatggtcatgtgtattatccagttcactaatcaattttatgcaggtatggaagctcagcgcttgtgacctttgtgaaatagcacgaaactctgtctatcaatcaggatttacacatgcagcaaaggtaagaaactgagtaagcatgttttttgtgtctttttcaaagaatgtaattctacattattaaatagaaagatcacacatacaacatggtgaatttcctggtactcatcttaattgagaactttttagtataactagtttttttattattgctgttgatttgactcaaaagtcatttgtttgcatggttcctcttgcaggtgcattggcatggtagtaaatatttcttgcgaggccctgaaggaaataatattcataagacaaacgtacccggtttgagaattgccttcagacatgaggtgacttcttatttcctgatcaaccattggaaaaattcagtcgttccttcttttgatctagttatccactgatttttttgcagacatggaaggatgagatgcaatatgttttttctggaaaagccaggttcccggaagaagtagacccataaaacaaaaagcagtaaactgctatgatcattcctagcatcatagaaacaaacaacacaattgtaatgtttcatggagagggagattttgtcccgccagcatggccatgcttggcagtaaaataattcttctacaattaatttatatatacattagcttttacagatttgagagaagcattcccaacttttttagagttgtactgctgagattacgaggataaggtgagatgttttgaaaggtgattacattgatcaatgatccaaatatcataattctccttgacttctgagttggatacacgtgttatgatttgtgttcgtaaagctttcattaaaaagtgttcttaaaaatcaagtgaacttattaaactagacatgagtttgattgagtaaaatggtactttgtggcccaagtcatgttgaaaatatgatttggggagattattgtacaactcattctaagcggttttcactttgtatcatattcttttttcctaagggaaatttcatttaatataaataaaaaaaactcttatttcaaaaaatactttcttaaatattttatacaataggagagattttctatgggaggctagttgacaaaaactctcttctctctcctctttttgagaagtgtgcccatgcatacgaggggtttccctggcccttctagccttggaaggcaccagaaccccactggttttgggaagaaacatggccattatcccactggttttggctggaaaaatccttctggtctttatgtggatcagactttccaaaaatattggagttttagaactaaacacaaagtgtttatgataacattgacgcacgatggagggtcggtctgcatttgcgaaagaacaaggctattcggatatgaagttgttgtaactattgatgcagtggactggattatagacactttggaggagctttttcaaaaaacagggacacaaagaaccagcctcaaacgctctttcaagaacagcactaattgttgtttcctggaatgttttgcaaatattaaaggatcttttttgaaaatctcagtgttaagaaacaacaagtttaagatgataattgtaccagaagaagaaaacgagaagggttggtcagaattaaaagaatgcctcaatgggattgtaaaaagaaagatgacaagatttattgagcgaagcagccaaataaaagaacatcagaaggtagggggcctcgaatcatctttcttgggccaatgttgtgaagaaaggggtaagaccagtgatgaaagctcaatacaacagggagaaagctcaagcaatagaagcgacttgtgacagaggtagaattgaatggaaagagctatatccaaaaattaatctcggtttcaaaccgaagaatctctatccggagaagagattcactcagccaaaattctacgaatatatgagatccaaggcattgcctagagactggaatttggcaattatcctcacaaggaataatactcatgcagattggtgtacaatattctacaacctatctagagagttagagaggatgctggtggttagccaactgtttgatgatagatgtatcatatggtgcaagcatgagaaggatagagaggagctcattaagattcatagtttgaaagtccttggggctcagtccttagtaacctttttagcttggagtttggaaaaccagaaggagaatgttaaggtagaatgtagggggtcttggattggggtccaaggtttgcctttgaacaaggaaaactggggaaaggtgcggtggtctattggatgtggacaaggatactgctgaggctagtatgttgtctcacttgtgattataattacagggagacaaatacggtttcattcctcgtaaccatgcgtcacaataacacgagtttcgagctgaaattttttaagcctaacgatttaagctatagattccatggcagttttaatacttgctggtatcaagattttgaccaccggaagatgttcggcgatggggaagcgactgaaggatttgaaaaagaaattgcagaagagaaagtggttgaggaaggattctcagcggaggtgaatacgtcgggaggatcactttcggcgtcggagaagatgggtttttcaaaaacacaaaaggcggcagtggaagtcgtacagcctcgggctttttgcccaaaaaaatctttattgtcctctgttgatggtgcagcggccgagaatgattatcgtcacttcagtatcaattcacgagaaggtatggtgtcaaagttatgcgtacgcgagcaaggaaaggtggtgagtctccataccgtgtttaaccgcctcttgagaagtttgagggtgccacgtgtatgcagaaatcccagtttaaatgttttcttctctcccgataacagttgtcaaataggtgaatatggtttattcaagatgggcatgggtgagttgggccgaattggtagggccccagtgaagctgggcctgcacaatactgggccttttaagcattttcctaataatgatggtgtatcgggctgggagtttattcctgggaatgggctggttaaacactttaatttgagggatttatggaattatcaaaggtgccattttaatattaccttggaccagaattttggtgtccaagatttttttaaaagggcaaagagtatggtgataagtgatcttaatgggcctagaagagaactgaatgttgtggccaagaagatgaacccagaacaaataataaaggagttttttcatggcagacttcgatcg

SEQ ID NO: 218453 - DNA, 2331 bp, Cannabis indica
atgaatcatgatcatcttgctttcttataatgatttcgtaaaatgtaatctaataatttagaatggtggttataaattaaatgaccaactggtcataaaactttatcatttttgtgacgagtttctaaaagacaattctttcaaaacagatatgtgtaacaacaacaacaaagagtcacacacacttacaaataaaattaattaataaatatataaataaatcacctaggcccaatcaaaattttccctggtgatgagatccaatccttaattataatattttcaataactagttacaaaacttgctatacattactagttagtatcctaaatcataagttcataattaacttcatgaaaatcaatcctaaactaattattttagaaagaaaaaaagttagttatatatatttgttgttttaacaaactagtttagtttttctttttaagaaaaaggtagtttaatttttgttactgttaccacatttcgtgaatcctcttattatagtcaaactttgtgtaaagtaacatgatatttcgtagttatatatataaagtatcgtagttaaaagatgcaactaaggagacattacaactaaatttgctggaaacagatttatgagaaaacaagttcctttcctttttattcagattttaaagaaaacaatgtcaatttatatcaatgctgtgtaacagcaaaaatttaacttaaaattgtaaacttcagttaaaaaagaaaaagatctgtacagtgtacggttacaaatttaaaaaaattcgttaacagaaatataaatatcatatttagaattatccctgaatttatgttaaaaaaaaaaaatatccctctgtacacttttgtaatttattctttcgtatttttgatacttttcttcaaagttctaattaggatttttgaaaattctcctaaaataataaaatgatgcatctatagtaagttgaaaaatagatacttcgaacaataattaaacttaactatatacatatatttatttatttctgggtataaatatataatgattctctttgtgtagctatatataaattgtcaaagcttgaaaagagaataaaagaaaggtatggtttggagttaggccatacccataatataaaagaatttcatccttaagctaagggactgggtcacccatatggctgacaataccaaccataccgcctcaattgaatgcaaacatgtgcctttgtagtttctatacgagaaatgttaaagggcaacagtggtacttagcacctttctatgtgttaatatcgctattgattcaactaagtatcgggtctcatataatttaacataatagtttttaaagagtatcgctaattaattgcaacgcgacatgtcgcaaatgtgctaggcaccactagtggctaataacaatgctctttctatatattcaacccaaccttaattcaactcataataaatatttttatttacattccattaccacatacgatgtatttggctccttttcctccattcatattaggcagtttattaataataattaggtatagatgccttatatatgtatttaattataatatatattattattctttctctagatctctctctaaaagaaacaaaagaaaaaagaaaacctcttttacaactattattttttccttagaaaatgatgagaagttagttggtttcttgagtagtcggcaaaaattgcttcaattaattaggcacctttcggtcccctaatccttgcatggcttaagccgcaagactcatttcaacgttacagatatatataagcatgttataacctatgattacttcttctaaatcattactaattagtcttatttaattaattttgaaaagtcaaaactcgatccattcacacaagctgtgcccaccttaatcattatatctaaactattatatatatccaatattacataaatcataattaatcttacacaactatttattatacttatatgtaaatatgtgaatatatttaattaaagggtttaacttataattgtttttttttatataaaatcaaaaaaatgacatttataaaattactaaaatcttataattgattaaataagcttagttatttatcagtgtaacataaataccacaaattactaatatataaataatgtgagacaaaggcgaaatttttcatttctatatttttgataaaatcatacaaaaatataacatttatttaattatttaaaaaccatttttagttctagcttaacttaaaacttagttgttttctatgtttttgtactagtccactaagcattcaaattataaag

SEQ ID NO: 218454 - DNA, 3681 bp, Cannabis indica
aatttcattgaaatcgccaatgacaagccacagactaagaggagctacatccgcaagcctttgaagcaaagtccaagaggctggcctgttattaacatccggagcaccataaaaacatgataaatgaaagttgaaatgtccttcaaaagtcaagttgcaatcaaagaaagtggggccaaagttaatgagagcaatatcaacatcttccttccataaaagcataatatcaccactaagacccgatcttggagactctaaaccattagtgaaattcagataacgacgaacacgagaaatcgaaagaggagtaagtttagtttccataagaaacaaaacatggtgcaattgaacaagcaatcgtagttgtctaaatgcacccgggttccccaaaccccgtgcattccagcttagaattttcatgatgaatggcggggctgcccagcaacctccgctcgtgattcaaaggagtgactagaatcctcaagatcaaaaactagtaactcaacatcattttctcctgacaatttagaagatgatgatccaggggcattacgacattgctttaggaatttcctcatagataaagaatcatttggccgtttagagggtgagtttggagactgattttctttgtcaatggacattatagcaggcgagtaaatgggacatgctcgggtggttgagagattaatggatgagggcacatgtttggtaatcgagagaggggtgatggctggaggataagtggcataaatgtgactggagagggtggggatgtaaatgtgtgagaggtctgtaatggagtgactgggttgtggtggggcaggagagtgaatcatttgtgttgtagaggaagtggtgatatgagtgggggaggccgaatgtgtaatactgggttgagaggtgcaagagaaaaagggttgggaggttaaagttgtttgagaagtggagtgtacagaggagtgtgagtggaagagtgtactgttagtattattattcagattattgtgtgtagcaagaggatgagtatgagaggaattagtggaagaatggatgaaggtggaaggttaaaaagcagtgttgtggccacgattaaaggaaggctgagaagatgtaaaaggcatggttgggtttcgaagagtaagtgtttgattagaacattcaccttcaaaaacagtggatggttggatttgttctctcaatgataaggctggtaaggaggatgtgagtgaggtacgtgccaatcgggttaacaaaggccaagcattacctttaggaaaatccgatcgataacgatcataattactagttagaagtttggcccctttcatccatggcccatattgaaggtcatcatcatttccattatccatacgctccataaaagcaacacatcgctcaaaagggtggcctaatcgaccacactcaaaacagaactcgggtagtctttcatagcgaaaatctatccaaaactcatccttgattctggggagtttaatcatttggccacacaacaatggcttagaaacacagagtttaacacggatacgaagaaaagtttgaaagtagttaactgtggaaagtttgaaaggaggaacaagatgagggtagttaactgtggaaagtagttaaaaatctataactgatacagacccaaaaaagggcacctcatattaaattgagaagtattacatatatgatttaattacacaacttcgttacaaacttaaccactcaatcaagttatttgccgtaatattttaattttttactcttaactccttattttatttttagtggcaaaacttttttgtatttatttttttttataaatttaaagtgtcagttgaaatattaccgttaaatactaattagattattactctattaatttcgaagttttacttttacgtatacacaatgatcattcaatcagtatttaagtgagatatttaacagacaatttaaatttaaaagaatttgctaaaaaaaataaatacataaaaataaaaaaataaaaatcaccatcaattactctaataagataagataagataaaaggaagaatagtagtttaccatcatttgttggcttcacccatggggtggaagccttttttcaaaggtggagtggagtggaggcttttatgctttgtaataggggacttatggttccatttggaccaaagccaaaaaaaaaagaatgtgtatattttacattgaaaatatatacttctatatgcaatgatattgttcattgttaaagagagagagaggaggaggagagttcaaaattaacatgccaaaattattgatgggttaattgattaatttcaattttatatttcctcttaaaagaaaatgccaaatttgtaaatactttgaaagggactgaccaaagtgagaaaaaataggttttagtatttttttttacatatatttttttgggtattgcgtgtatgtataagatgatgacatatatagacgacaatgttgttggatccagccgtatgtattgttatatggtaactatttaatattattaatacaagagaagtgttaaggagattctattttaaactttattttgcactctctatataattaaatgacaaatgtttatgtttttaaaatgatttatttgtaccaatcgtattattatcattattattttattataattatgctatgtaaataaaaataatacactaattatttatttttaaccagaaaacattaaaaaaaaaatatttttgtaaaaaacaataacgaattaaaaaagtacaaattcatcaaaaatatttagggcagtagatatattaacttgcttaaaattagcttagtgtataccaaataaaatatgagtcaaaataacaattatttaccaatttcaattcattcaaattagtaataaaattatctaaaaataaactgataagttcgatatttcatcggcagcgataaaatttaatggtaaaatactttgtaattacccttccattctatttgaaggtagtttttcattattataagtgaatgcatggttcaagacttgtgacaaaagaataactttaagaaaatatataaaattcgtcatatcattgttttattatatagtgagatattcaaaatatatatcatctttcctatatgatttaaagcatgcatattattgtgtagaaatagaaatatggttttgttttttttaattaatgttgttgtaacttgggccaaggccacctttgtagtttttattttccaaaatatttattcactagaaaacaatcgactctcaagttataggattagtgaaatctctatatactgcattatagtcataattaactttacacagaaatttccttgtaatcattatcttaatctacaaaaaaaaaaaatgaacatttaccctagacttctggcagtgtgaaagcttatatcaactcattatttaatttttataagattattttttaatgtattgatttataaataaataaatagtttattatatgtatatggcataattataataaaatgataacaatatggtaaagtattaaatacaaataagctaatctacaaatataatatttataattcaattatggaatggagactgcaaaagagattgtattcacactgtaattccataacaaacttttttttttttatttatttt

SEQ ID NO: 218455 - DNA, 6654 bp, Cannabis indica
taacattggtgctttcattgattcttcatttcaggatgaagaacgaggaattggcagctatgattcaagctctggaatcaaatttccagaaacactcagctgaacagtttgctagattctcagcgagattggacgaacaggttgcaagattggatgagagagtcgaccaattacaatccccttcatccaaacaacaggaaggcaatggaactgcaagcagtgggttgggttcaccatcgagacccaaacagccagcaaatgttgactcaagggatatcaattcacttctcaaggtgctgcgagtcaaggtccatcgtttcgacggctcgaatgtagaggattggatttacaaaattacaaagttctttgatctacacggtgtacggccagaactcagattggctatggtgccatttcatttggaaggaatctcttcaacttggtttcaatggatggagaagggtggcgggtttccagattgggaatcctttctaagagccttacgattacgcttcggagtgtccatttacgatgatccattgggaagaattgcaaagttggttcagacgggcagtgtagcaaattttcggaatgaatttgagacactaatgactcaaatctcaggagtttcggaacaatatttcttgaacttcttcgtgtggggattgaagaacgaaattcgcagagaattgctcttggccagaccggttgacttggcggatgcaatggccaaagctcagttgtttgaagaccgcaatgaggatctgttgggtcgtgcaagaggtgattatggacgttccacatggtctcctcgcttcatgaatccatcttcgccagcttccccaaaagtatcgacacctaattcaattaccactaatacaaccactccatcatattccaaggtgccattacccagttcgccttctttaccagttaaacgcttatctcctgcagaattgaaagacaaaagagaaaagggcttatgtttcacctgtgatgagaaatacaacccgggtcacaaatgtaagaacagggtactcattttgtgtgctcaaggagacgaagaggaggatgatgaaacagtcatgggaggagatattgtgacagaccaggaggagagcctcgctgaagaagtcagccttaattccctgtccaacgccgctaatccgcggatttttcggatcacagcttaccacggtaaggaaccattggaggtattgattgatactggaagtaataataattttatacaagaagccttagctgctcgcttgggtttgaactgtgaagagacaaagagattcaaagtgtacatgggtaatgggaattcattatggtgctctcaagtttgcaaaagggtggaattaattttacagggtcatatttttttggttgatctgtttatactgcctatttggggtttagatgtggttttaggaatgcaatggcttcagaccttagggccttgtattcacgaccataaagcattaacaatggagtttcagtggcaaggagcagtggtgaagttagctgggtcttcgggtaccgcctcgcaccaactctcgtttactcaacttcgttccatggtgagggaaggagacattcgggaaatgtttatgttggcaaccgacccacctgtgacagagaacattgcagtagagatatctgaaatggagagtaaattgccgacagtagccaagggagttctgacttcgtttgtggatgtatttaccgaaccgcggcaactacctccgcaccggggtactgaccatcgcatctgtttaaacccgggatcacagccagttaaagttcgaccttatcgttacccatactttcagaaagacgttattgagaagatggtgcaagaaatgttgagttacggattcatacaacctagtacaagcccttactcatcacctgtactactggtcaagaagaaggatggctcttggagattttgtgtagactttcgggccttgaataacattacaatcaaagatcgttttcccatacccaccatcgacgagttgttggatgaattaggcggggcacaagtgttttcaaagctggatttgagagcagggtaccatcagattcgtatggcacaacaagatattcacaagacagcgtttagaacgcatgagggccactatgagttcacggtgatgccgtttggactaacaaacgcaccatcaaccttccaatctactatgaatcaggtatttaagcctcttctgcgacattgtgtaattatcttttttgatgacattttggtatatagcaaatccttggaggaccatggacagcacctacgggtcgttttgcagctgcttcgcaaacacagattttatgccaaagtttcgaaatgcaaattttttcagtcatcaatcgattatttaggccacttggtatccgctcaaggggtccaagccgatccagccaagatatcagctatgcttgactggcctaaacctgaaacaatcaaacagctacggggttttctgggattaactggttattaccgtcgattcgttgctcaatacgcatccatagcggccccccttactgatctgttaaaaaaggataaatttctgtggaatacaaaagcagaaatagcttttcagcagctcaagaaagcaatgactaacacgccagttctagctctacccgacttttctcagacatttattcttgaaacagatgcgtccagcactggtattggagcggtactcatgcagaatggtcatcctattgcatttttcagcaagaaattagggcctaaatttgctggcacatcggcctattttcgagaaatgcgggcgatagtggaagctgtaaccaaatggcgtcaatatttactgggtcgtcacttcatcattcgtacagaccataaaagccttaaagaattactctctcaagttcttcagactccagatcagcagcagtttttacgaaaattaattggcttcaattttacaatagaatataaggcaggaagggagaactcagctgctgatgccttatctcgtcaacacgagaatgctacttcagtgcgcctcgctgccattacagctgcctgtttcgattttttggaagaattgcgagctgaaaacattacttgtcctgatttgagacaacttcatactcagttacagcagcaagaattgaacacagaagactattatgtacaggaggggctgttatacttcaaacagaaactttatatcagtgctcattccaatttgaagcaacgacttttacaggaattccacacaacaccagtggctggtcatgcgggacccgaacgaacatttttgcggttgagcgctaatttcttttggcagcacatgaaggcggaagttaaaaagtatgtacaatcttgtgtcatctgtcaaactgtgaagtattcaccaacgcctcctcacgggttactccagccattacagattcccgagcgcgtgtgggaggatctagccatggatttcatagttggattacccaattcgggtggagtcactaatattttggtggtagtcgatcgtctgacgaagtatgctcactttggagcgctgccatcacactattctgccactaaagttgctgagttgttctcaaatatggttattcgtttacatggattaccacgatcgattgtgtctgacagggaccccatattcactagtgctttttggcgcaagttgtttgagttcatgggcaccacattgcgaatgagttcttcttaccaccctcaaacggatggccaaaccgaagttaccaatcggtatttagagcagtatttgagggctttctccgctgacaatcctcataaatggagtaaatttctggggtgggcagaatatcactataataccagccatcattcggcaatcggtatgacaccatttcaagcagtttatggtcggcctccacctactattccagcatacactcggggcaacactactattcaggcggttgatgaggatttagtagctcgggatgtcatcctacagcagcttaaacagaatcttttgcaagcgcagaacaggatgaagcaacatgctaataaaggaaggagggacatcaactttaatgtgggtgatttggtcttagttaagctgcaaccttatagacaatcaactgtggcaaaaagacttaatgccaagctttgcagaaggtattttgggccgtttactatccttgccagagcaggtccggtggcttacactcttgagttacccgaacgtagccgcattcatcccactttccatgtctctcaactcaaaccattttatggaccatcaccgctcatatcctatgcccttccggaactcagcgttaacaataaaccattgatgattcctcaagccattttagctacacggctatttggcaacgagcgtacaccacaggtgctcgtacaatggtctttgagcgctccagaagatgccacttgggagaattttcgagacttttgtacgctgtatgatctttccgaccttgaggacaaggtcagtttcgaaggggagggaactgatagcccaggcccaatagctattgacccaatacaagtccacaagagagttggggactggctgaaggaagcagcggctaaacagccgcacgaacagacccaggaagttgtagaaagcaaagacgaagccaacgatgaagccgactcggtaccaatcgaccatggcaaagaagtggtgacacgtgggataaggaagcgcgtgagacctcgctggctccaagaatttgttaggctggagaggagctaagaaggatcggctaacagaatggttggaaatagaaattaagttgttaattgtcatttcttatctctctttctgagtatatttactgttgtattggaacgaacagaggcatgttgattgttcttaagcttttttgagcttttgttgggagttttgtattgactcaaacaatacgtatcaattttagactctaacacatacatattcttttcattttaacaagtcagttccatccatgaaccttcttcagttcctcgttcttgtttcatttaaatatgtgaagatcatcattgaaggcattagcccacaactacacaacaagtcatgatgttacttttcaaaaataaaagtaagaaattgtaactaatattattaaatgtttaatattcgtagatatcattgttatagatacatcatacatctaagactctctgtaaaattgtcagtaaagaaggtaatataatatagcaattaaaaaggaagttcgtgtatcatgcttatagatcatgtagtgaaccttgagaatatacaatggactaaatctctcgactttgaaacatcagtttctggtgcagccaagctgaaatttacgaacattcattctcccattcaaagcaagggctaacacatcatattcctccacgtaccagagctcagaaattgcagcctttatcacattgcacatacgtgtattacaatcagttaagagaaatatagaaattcttctttttcttttttacatataaatgtaaatctcagatgcctaatgagttgtccttgaattaaatattagaccatgggcatgcccaagttcaaagtatccttttttatttgtgtaaagggtccaacgtatcttttaagaatcttaataacacaatgatacagtacaagtaaaccccaattagacagaagagaactccaagactattctatttagtttatttaaatatcttattttcaagtctccttaaataaaagttgaattaacaaacaaaaataaaccgtaaaagtaaattaaaggactaatgaaataaattaaatcctcctacaacacaagcttataactatactactattgacttactctttcttatgctaaattggacagcctaattgagcaaccctaacacaatataatcggattacaaggataataacaactcaccttaaatccacggagttccttgtttaggtgagcaactagctcatggaagaacttgacaagatctgcattatgcatctcctgaacatagtacaaatcacaagagtgtatgaagaacagaagaacacatacactactgtagaacaaaactttgtctacctaaatctagtgttatggttgactttatagtgatttactctttaatttgtcacataaacacatcacagagtaatgaacattatttatttgataagaaacagttaataactacccagttgttaaattaaaccgctggaagttgaacccccagaccttgacacccacttgagctggattctaagtggctgtaattaaaactatacaaataataaaaacttaaagaccgcatttaccgtggctgaagctttgggtggaccaagaagccttgcaaatgatgtgtgaagaattgcagcatcatactatggaagataacgatatgtgtatcaataaaatcacatccaataaaaaatataaatggcagaagatagcataaattagaaaaaaaaaaaaaaaaaaagtctactacataaattcaataaaaactaaaggttatcgtgaggatttccaaattaaggagttcagtttagagggccataacaataatcttagtaagtatattatatatgagcctgagtatgcactattatttagaatactgcgctatgttatacagcc

SEQ ID NO: 218456 - DNA, 5178 bp, Cannabis indica
tgtgtaaaaaaatgaatttgatatggctcgatgggtccgatgggcccgatggtgggcccgatggagcccgattgcatgtgtaaaaaaatagaatttaatatggcccgatgggtccgatgggcacgatgggcccgatggtgggcccgatggttggcccgatagtgggcccgatggggcccgatggtctacagtgtagtgaaagagagaagaaaagagagagggtaatgtaaatggggtattttaggaatattataaaatgtgtcatatcccacaaatatcaaatattatgagtttaaaggaaaaatttcaagaatatgtaagcataaaaaatcaaatttcccaacactaatacattaattatatatgtatacaccatataccatgtatcatataccatgtaccatgtataatattcctctcctatatatgtatgtattatgtaacagcccattgtttagcccacaataacaaaaagtgaaaatatcagataaaagaatgaaaaagaaaatgtaaaaaatcttctaaaataagaataaataggatttatctcctctaaattatgtagattttttcctcttacttttttccatgttacaaaatttttccaataattgcaatctggttatttaattaaataattttttaatataaaactaatctagcccttgtactgcaattatatatattcatataatttatattcacataagtaaattatttttctaaaaaatcaatttaaattgtaaatggggattattagcaataatttgcataatttgggagaattttcacaataaagaaaaaattcaagtgacaaaaattatatatttattcttaaaataaatttcattagttatcatattttcttaatataaataaatattaattagtataatttaatattgagtcacatactatattttattatttttaaagcaacattgtatatggcattagtatcttacaaatagtcaataatacttaatttcaattattaaagtaagatacatagattcaatattaaattgaaccaataatagcaaatttctttttatagtgttgggcaaacttaaaggttttaaattaaaatagttgctaaaaatgcacttgcactacctaatagtgtttccaattttttaatttaataactattatagaagactttaactattcataagatgccttcctatgttgctggatattattgatatctaataatttttaaattaattttaaacaccaaatgaagtgttatattattatatattagtgtaattttattttagttctacatattttaatttaatatgtaattttaaaaaaatgttaatcactcactcataaagtgtcactttatgttgtgttgcttttaaacactataaagaacctaaatatttacactttaaattaaaatatatgagatactatattaacatgcaccaaaatatataccatatatagtgatgcggttttgaacaaatattgacacgtttcagcaatatataacggaaaaatacccttttatcacacatatctaattaaatttatgtataaatagtagcacaaaacagacgagaagagcacactaaaaagagaaatatttggtaaggaaggtgagcgagttggttgtggttgtgtttgcaataatctttggtcggtgagggtgaatcgtattctaacgaggttcaataagattttgaagatggagcagaacaacaagatggtgaaccaagaagctttccttaggaaaaggatcaaagaagtgagcgagcaggtgaaaaagctgaggaaagagaatcgcgagaaggagttaacccaactcatgtactcatatttgtcgggtaaggctaatctcgttggcttatctgttacagatttaaatgatctcgtttgtatcattgacaagaatttggaagaaattaataagaggatagagactattgctgcaaagaataatagcaccaactcgatgactcaaatggtggttgcggctaagactgaggcttctgcaacgaacgagaatttcaatgatgaagttgtgaaagctgatgccgttattgacaataattaaaaactaagtgttaatggcatgattttgcaaaatgggaacaagaataaaactatgttatgatgaggtttaaagtttttataagttttaattaaataaagtcggcatttcaattaatcttctgtcataattatgtttaaaataattttgagtattagattttatggttgttcaataaaaatatcaaaaatttgagtggttctaatatgttttgaggatttttttttttaaatttttacggagtaatattgcaaatttatttttctaaaaaatatcaaataattggatatttcgatagaaaagtgacttataatccacaaaattttaatcagttgagtcccgacatcttatacatttgagaaaatacatttgtaaactctacaagcgatgtttagtattcataagttgttcttatatttttacaatagttttgaacttcttataaattttttattgttacactttaaaatagttttttttcataaaaatccacatagcaactaatagagtaacctaaaatatatacaactaaaattcatatagcaacccacataaaaataaaagaacaacccaaattcataattcctttatttatgacctaaatatacattatatttaaaatttttaaattatttgttgatatcgaaaatattttgactatttccataaatttatagcacctaatatttccattaacattaatattttatttattttgagtgtctcatataataaactttcaaaacaccaattactatagtaaaaaatatattacttttgcaagtaaaaattatgatatatggttaaaaaataaaactagataataataaaaaaaatatatagtaattataactctatacagctatgatacacatgatagtcataataaataataaaaaattataagtaagcaccagctgtattagtcaaatatagtcatatatataataattaataataaatattagtatatatttaggaaagtatttagccaaataattaatgatttatttttatgtagatatctcttcttatatattaaatattcataaagatatcatgtaaattttattcctcttgtaactgataatataatgcaataaaaatagccaaaaaagataataaagttaggatttttttctatttgtggaccaattccattgtacacattaattttatttgatttttttctatttgtggaccaattccattgtacacattaattttatttgatttttttatatttgacttttttttttctctcctttttctttttttgcttctccaagatttcaatttatttttcatatttattatgtaacgttacacaaatatttcctattattcttctctaaaaaacaattaaccattaatgtcttattatgctaaattttgaaacatatgttctaattagttctaaccgtccttgtatacaatgtgtaacccacaaataataaaaaagaaatttaattagttaccatatatgattgttaacatttatttcctcattgaagccctaataccaccttctctatgtaatttgtgaataaatagttccacaagtgaactaaggaagagcacaaagtattatttggatatgttgtctcccatttcggtacactagctagtttttttctttagctcttgtttgttttctttcttcgactcaacaagtcaaaaccatgaccagaaaaaaggtgaagttggcttacatcaacaacgacgcctctcgaaaagccacttacaagaaaagaaagaaaggtctgataaaaaaggtgagcgaactgagtacattgtgtggtgtagatgtgtgtgcaatcatctatagcccatataacactcagcctgaggtgtacccttctccaagaggagtacaccgtatagtgaaaaacttcaagacaatgcccgagatcgagcaaagcaagaagatgatgaaccaagaagttttcctgaagcaaaaaattggaaaggtgagcgagcaaatgaagaggctgaagaaagagaatcgcgacaaagagctgaatcgactcttgtatggcaatctctctggtaagatgaaccttcaaggtttgactgttacagatttgaatgatcttacctcgcttattgacctaaatttgaaagatattaataaaagaatggaagaaatagccaaggaaactaagaatgctcgaacagcggcatctgctgcagcaaaagtgcctccactcatgaatagggaagtgattgctgcttttgctactacttctacagtgtataagaatgatcgtgccagaggcatgagtggacacttaaacactaaaaatcaaacaaaagaaagaattcgatgaagtttgggggaagagacgtgatttttccaatggagaacaacaacaatataaactttaactaaatattatttagtcatggcgaatatttgtgctagtttggtattttattatattctcttgttgttgtagtcggtcaaaatcattgttaatttattttatgtagttttaattaagtaatatgagtgttattgatgtcattattatgtagttttcatttcaatgaagtttttattttagttatttattgtcttatgttgttgcttaggaataataataaaggaaatttgtaacataaataatgttttaatttatacacttaaatactatattttttttttcgacggactaaatatcttatgttatatttttgttacttccgttactacttatatgttaaatataccagaatttaatttatatctgttgatcaattattggtccatataattattgttaattcaatatttaaactaataaaaataataatataaataataataattgtctctctcctttcgatccccttctctgtttaccaaacattcactcaaaacacttcaacttgacgcaataatcaaacaaatcatacaatcaatttcttcaaaactcaatgattaagcaaataataaaaactaaaatttcacacttgatgcaaaaaaaaaaaaaaaatcttaactttactaataaaattatatattaatccataaacaagaacacaaaaaatatgatagtgggagatctagagcttgtttggatgtacagtttaaaaactgttttctg

SEQ ID NO: 218457 - DNA, 5538 bp, Cannabis indica
tgctgtgaaaaaaccctgctttctctccatttttacagctctgcctctcacttcccccttgtctcaaaattaaacaccaacaataataaaaacaatggtagaaagctcgaatagtgtctcgtgttcctctcagagaaaagatacaaaaggtcttaactgaaacgctgttcaaccaattagacgaagacgatgactagaagagtgacaactacactcagaaaaagtgactgaaagtaggcagaagagagagagagtccgagacgaagaaggaaaacgggtatttgatatttcacttccactgctaaatttcgattaaacaaatgcgatatattacctcggcacagaccacactgtagcacagtaaacagtttgttacctcctatcctgcgctgcgcctctctctttctcactcttccttgtaagaaatgctaaaaggactggtgcccggcacaacacgaagtgtgtgatgtaattgtaattgattactaaattttatatattttaatttaaaaattattctagaaaaatattaactgtgcctaatagcaaatattctcttaaaaaataataatggaataccaatttcacacacacaaatgaggtgatggactcttttaagaaaatgaagtggagaaaaggctatgtagggattaaactcgacatgtcaaaagcgtatgatcggattgagtggagctttcttgaccaaaccatggaggccttcggattctatgcccaatttcgacagttgatggctaaatgtgtgtcttcggtttctttctctgtccttctaaatgggggccccttgaaacaattccgccctgagagagggctcaaacaaggcgaccccctctccccatctttgttaattatgtgcaatgagatcttatctcggatgttgattaaagctgaaaatgatggtttgattggtggctttaaagcttcttggcatggcccttccatatctcatctcatatatgcatatgacacacattttttgtgaagtagccctcgagaagattctaacgacccaagagtgcttggatcgcttctgtttggctttgggacagcgtattaatgtgcacaagtcagctttaatcttctctgttactgttgattaaagtctcaaagtggatgtcaaggaggccttaggataccgggatatgaatggaaatgatagattccttggcaaccccattctcttctctggtagcaaggtgaaagactttaacttccttgttgagaaaatggctaggcggatcgaagggtggaaatctaaattactttcacaggcgggacgtttgactttgatccaatctgtggcttcaagtactctggtttacactatgtccacctttttgctccgaagtccatctgtcttgatcttgataaattgtgccgtagtttttggtggacgggagaggcagataagttgcattttctttcccttgcaagttgggactctatttgcttgtcgaaagagtggggtggcctaaatttgaagaaatttaaagatcttaatatgaccttaattgctaagctcggttggcggcttgttgcgggttttgagtcgccttggtgctccctgttttgtgttaaatacttcagacaaaatcattccttctggtttggcctatcccgaagcaatatgtcttttggagcaagaggcatcatgacttctagggatctcattcgtaatgaggcttgctttcttgttggttgcggtcgggatgtggatatttgacactccccttgggtgtcgtgactctcttaggagaagtatgtagcttccttcaatccaaggattcaggaatgtggtatcccggtcaactcgcttctctcatcggatacttcttcttggaggccggagatggtgagaagattgttttgcccggccctgagtgatatggtgtggtctttcccaagactattccccaatttacccaatgagttgatttggaaggcctctaaggatggttctttttcgttcaaggaggcttacttagctctcgttcgaggctggtgtggcgaggaagatgacatgtggaggcttatttggaagagtaaggttcatgaaagagccaaatgctttatgtggaaaattgcctgagatatactcctgtttggcagtagacttcaacagatttttggtaatgactccacctgcaccctttgcctctcggatgaggactccccccaccacttattcttcaattgcgaagttgccaagaagatttggagatctggcccttggggaatttgttctgatgctttggttttttctgacaacaaggctattatacgatggctcttatctccggcaaacattcctcttgctaatgcagaggacaggtcggggttcatcttgtatgctattatggtgtgctttcatctttggaggtataggaatctggctttccacgaaggcaccaagcggccgatccacaaattccaataagacatccttgatgattcttgctctcttactgatctaggagttgtggaggataatcggtcacatactcctgctggtgtggacttggtttctggttctaacactaggcagcacacttggaatgacatcaacctttttatggatgctgctgttcggggtcggtcggggattatgactttgattgcttttgattctgcaggataggtattggaggcacttaccaaacggcacgaggtaagttcagccttagaggttgagttggtggccatccaggaggcgtgtattttgattgctcatcgtggattcataaatacctcggtgttctcggattgtcaagtggttattgctggtctgactgctagaagatccccggattggaaggctaggcagtgtttcgatcagtcattgcaggccttctccgatgtccctaactcttgcctggtgtggatccctcgcagattaaatgtggcaggccatgatctagctgcttaggcgacttctaactgttgttttaaggtttttggttggggaagtggcaccctttgttgccactatgaactttgttctctgagtttgtttttcttcaataaagaactctttcataaaaaaaaaaaataaagcataatttccttttctcttttagggttttatctctttctctctaactgctagccacaagttccttcttttattttatgatgagggctctgccaaccctccttgcgactttgttgtggctctagtcaggtgagagtgtttgtgttagtgtgcacaagagcctcttggtcctttctcgggttacagtggatttttctcctcttttttgttttaactatttgtggactctctttgataggttgtgtgactaactctatggaggattcgacgatctttctgaggttttgtgtgctttaaattaggggtggcagtgtcagattcagggtcgtggtgtgaattcctgcaatgcgaggtcaacaacggtgtagtcctatttggatttggagtaggctcttgtattaggtcttctcagggttggtgtgatttaatcacccccatgtggccttgccttttcacttttatacttcttgtacttcgcgtctaatcaccgtcaagggtctgtagtggactagctatcctcaaaatgtcctatggtcatccttccatcctgattgacaaaattgctagggtggttccttccccctttaggcttagctactctcgtactttgccactttggcatggctttgcctctaggatcagaagggcatccatgcttgaaagcactagtggccttcagcatcctcgagggctggctgactagattcatgtctttttgaggaggttaggagcaaactttcgtggggtttatctacctttactttacttttatccttacaaggatttgaggttttgaattatgtttgtttgtgagcacgctcttcggccattatctccaccgaagggtcattgtcggactctgctaagtctttgaacttgttttgaatgtgttccatcattcttttcattttttgagtgagcttcctttgttctactaactccaattgagtagcttctagctccttggtcacctgcagcaagtttgggtcgtggtcatagtaataaccatctttgtaatagcctttcacacagtcattgttgtcgtcctcctcttccctatcttcaggattcttgtcatcgttgaggccatcaaacacattctcaacatcctccctttggttctcagcattggttttaccttcttctcttacaccgtctggctggaggccagaggaaagggagtctgcttcctccataacagtgtccaatggagttttcttgcttacattcttttgtgtattcaccatggttgaggtggcacgaccactagtaaactttcctcagcttgcaatgaaagcaccaaaatatttaccgagatttttagaaaccaattagttagagcttaagaaagatataaaacgttaaataataaacaagtaagttgtacgtggtttgagcattaataattcttagtccacgagtccattatattagccttgctgacaagtttttagtattacaagtgtttacaacataaatattaactttgtattcctgttgtatctctctctctcgaagaaagctaataggaattttggcaaaggttctgtaagtataaaaattgttcaccctttgcacatgaaaagtaagggtatctatatgcacgtgtgtgggtgagggcatacccttcactcacctagggtttcgtactcaacatgttgtaatggctagtgttacaacatggcaatctgatcgttggttagtaggaagtcttcccatcgtgtggtgtacagctgctgcaaggtaattcgtgggactaacgacatgtgtcgcccaaaggtttcaccgtgcaaagttattgtctagacaagctgttgaatgaaatggagctttagaggcgcgaacgtgcactaccaaggtctgacataggggacgagatctgatttggtgtcagaagatatataatcatcgccttgagctctaggtaagatatagccaaataggttccaagaccatctaaccttagccttctcggattagactatcctgctaccctccttgaatactcatagcttatgatctttcttaatagcagaccaatagtgggagtttcggaatcttttctaccctcactgatagagaaaaacatcaagtaactcctagagtataacatgttctaaaagttgatcctattgctacgtttactgcctagattgctttgtttactaagaagatgcaacaataatactcactgtcagtgcaagcaatgcaattacaagctacatcatgagatgtgtgggaggcctcactcttatgcacaatgtacttccgccaataataattatttagttgatgttgttcctttagagaaagtccaagttattgaaaattattcaatataacctattaataatccttactcaaacacttatactcatgcttagagaaatcacccaaatctatctgttaggctatttttagcctacgttttgggtcactttttatagttattttccttctttgttatt

SEQ ID NO: 218458 - DNA, 2822 bp, Cannabis indica
tttagggttttcagaaattcgactgcctgagttggtccatacgattcgactcggtcatgtacagtggttccagcgatggcgaaggccatgaggcggtgcataggaagatccctccagcttcttccatgccttgggtcaggaacctccgacgattcatcggagatggacggggtctcggatctgaggctctaatgggtacttgcaactctctaattttgttgaagttttctcgtttaaatttcatttcttttggtatggatgtagtgttgttaattaacctgcattggtgcgttctttagcaaagttggtgtgctttgtgcttgaaatctaattggtagctgagataatgtactgaaagatccttcctttaaatttagtatttttataaagtatgcggtggtttcctaacgaaatgagatgagaatatatagttaagtgtgctatcttaaattctttatatgttcaatgagttcattgttatctaatttattagctaccttgtgattttagttagtgttggagaggatcacttgtccaatttcattgtacattttactgttagcctaatgaaagatcatcctcatcaatttgaaatttcattgttttttgaatttgtataattgtggtcgactgcacatgaggtttggattcttcttcaagtaagatacatttatcatttatgcaagcgagcccattactacagttaaagtgtgagagcatcataagttcataaccatgcttatagtttccatattgtgatttggtacagttatctcttctacaacatagatttcgagtgacattattgcttgcatagaagtgaattgtgtatgtgttgtgatgttcggatggtctcgacacgtttatgtgactatgcattttcttgtggtgtacaatttatcttaatctttcttttgtgtattttttctctttgtagagcttgaaacaaagaaaatcttgcttgatattttcaaagagaagcaacaaaaaagtgctgaagctggcacaattccgagtttctataagaaggcatgtgctgtaattttatattgcaaggagaacttgaaatgctaaattactaagacacgaccatgagttacatataatacaactgcatctacgctttaaaagttttgtataattcatagtttatattattttgttctgtcattgtgtcctccatatactttcctttttcctaaattattgttttattttgtttcagaaacctgaggaaggatccatcagtaatagggtccaaaggctggcgaaatatcggtttttaaaggtagtgtatgggtcgttttctttttaaaatctatattgttgtgtgtttatctgctaaatcgttggcgctttcctttagacattcttcccttaattgttgcagaagcaatcagatcttttgctaaatgccgatgatctggatgcaatgtggacatgcttaagagaaaattgtgtggttgatgatgcaactggagctgaaaaggttagtaatatattattttcatatcttaatctttatgacacttgaccaatgagatttcagaagttaagctgaaatgacaaatgttaatctctgatatgatttttaaagacattagtcaatctataagcatacttatttatagatctaatgtctcagtttttcttccaaattatctgtaatgtgattcatttgtaaattttggattttgagtttttcaaaagaaaaaaaaatttccaagatccgcttctcaatgtatgatgttttatattactattcttttcatttctgtctcactttgaaataggcattctgcagtgattctaataaggccttcttttcatattctagatgaattatgaagatttttgccatattgcctctgtatgtactgaacaaataggccccaaatgtcggcgtttcttcagcccttcaaattttatgaagtttgagaaagatgaacaaggaagaattgcaattttgcccttttacctttatgtgatgcgaacggtaggcctctaaaaaaacactaatgtatctgtgttttgatttttctttctttttgatcaagagtgtatttgtgatacttaatgtacttttttactttcattcgaaatctgctatcaggagtacttaccgtgatttgctattcaggtttcacttacacaggccagaattgatatgagtgagctcgatggggattctgatggattccttcaacagcatgtataaacttttttagaataatcattacttctgcttttcagtcttcactgtttatgctgtaatcaatactttttctatccctttatcaggagatgcagggctatataaatggtcttatacctaatctggcacaattacgagatatgccttccggctttattgacacgtactgtaaaatagcggcacacaagttctttttcttttgtgaccctcatagacgaggttggttgttattcaacttattttagattgttcatacatatgcccattttaagtatgttcttaaaataataataatgatgtgtagattatttttgttatataatctctaatttccctcttaaaaaactgaggcatgtgctttaatttttattggtttatgattgtattagattttgtttttaaagagctcccgccttggccttttgtgtacaattttttctttttctcatttgctcccctcacatcttaagtttattcatgaatttaccttttctaagggcagtaggattttaaggatggttattgtttcaatcagtgcttgcattgatttgttattcacagtttactatgtctaaacaggaaaggcctgtataaagaaggtgttgtt

SEQ ID NO: 218459 - DNA, 4193 bp, Cannabis indica
acagaaacagggaatgcaaaaagaacacgaaacaaaaacattctcaaatgcagtttcatgtcctgactacatgattagttatcatttttagttttgatagacctatcatcaccatttgcaagcacaaaacaatagctcactgaaagaatgagaatcacacacgtatggaacataagaaatcgaaatcagtggatcccagtgtaacagggaatttctgtcatagaaggatgccaaccttccaattggcgtggggtgacatcaaactcctgccaccaaaccttctcaccatctgatgggagctttactttgaggaacttggcagcaagaaaaatcgcaccagcagcaatgtggtgtggtttaaattgcaagcacagtgatgtccgaagtctgcataccacattcagtttcatgacatgaccaacagtgggcactgggcagtaaaaataaactaagataagcatacccatcattgacaaaattccatgcaacttgagcaagggcattttgagctactttgaacttctttattgcctcaacgaggggcttataaggatgctgcacattgagatcaaaaccaagagtagcaagcacgactctctctccaagtaaaattaattctttctgttgttcatatacttcctgtatgatagaagcaaatacacgaataaactaaatagaagctaaaaaacaataatgaaacaacaaaccaatgtttaaaaactgggtttgaagtacaaggcgtttcgtgttggtaaggctcaagcattcaattaacaaagtactcctaaatacctaaaaacaccaagcaataataatcaaacttaataaatcatcaacaacacaaaagtggaaattgtggtcatataggcatactctaatggcatcacacttctcacaaagaggagactccaaattcgaattctccctccccctatgtcaaaaaaatagtggaagagtaaaatttgcaattacaacatggcataaaatgtctcaccaactgtcaacttagcaagacagctaaagggaaagacaaaattgtaggctacattagtgaatctttggcctgggcgggcaatattgctttaaaatgacttctaagcctgcttgtaaaaatgatcccaaaaggttcatttaagagtcaattggtaggaatggaaatcttataacactgccttgtattgtatgtcacaagtttttaacttttatcaaacacaagggattcattctatcaaccacgacagtaacattataaacccaattaaaataggtgagtgttagattccctacatttataaatttgggggacccacagaagtaattaaataaaaatgacaaattatacatcttgtgtgcaactaaatctattttcatgcataactgaacactattttaatattctacatgatctaaaccagtacattaccctctttctattattctacatgattctaaacaagtacattaccctctttctataaattaaaaaacatctaactccttgtaccaaacggcaatttagtgaaggagaagcttacacctcgcgtaatgcagtgaggcaccatagaaggggcacctcacctcggagagaaacgtacagaaagaatataaatgtaaaatacattattaggtttcttaaactgcttcatgagatcaggcacacctcaagtggaagatttatgaaaaggttagctcaggcatgcctctagtggaaagtttaaaaaaaaaaggtttagctcaagttgctattatgcaaattttcttggtgagttggtgcaagagaataaaactatttttgggcataagccttaccttgaataacaaaagaataaaaaggacagtcaaaaatttgaaatccaaaatcataaacatgtaaaggatataattaaaaaaaaaatatagcaaaacaattggcattcaccagccgaaaccttagtttcttgtgttttcattccttttaattaggcatttcagaccattaaatacacttatctccttattcattttggctttagttcaaacaatgttcttggactttcttcgaatactgttaatctcttacaaaccaaggctccaagactaaattcgtacaccatttcaacgagtgatttaaaaagtctatacaattcaaacattatgtagcctcatcttatggaatgcatcaagaatacctatccaaggcattctttaatgatcctctttgagtttgtttagcatgaaaccaacaaactttcttctacaccaacaaaacctaaagccatgattttctcagctagtttatacaatacaaacacacatataaatcagtttgaaaacttgtattgtatatctcagttttaacctttagtatacccaatgtggttttcagattcttttctaggttaaagactacattaaattacttgaaactattccttttctggtcaacaattaagcccacaacaactaacccacaaaaaagtcttgagctaaattcagaacttccctgaaatttagggctacatcagctatccacgtaattgctaaacatgaccaatgttcaacaagacagggataaatttgttttgcagcagtcaagaatttttggttaatggaatagaatacactcaatgaaaacggtatcacaaaagttcttatataaaaacaaattcacatataacaaagtttagcctgtacaaggcgtgctaaatttaccctgtcttaaagtgggtatagaacacctatcaagcatatgcttgttccatccccttgtctcatgtttgcaccaaaaattgttcaacttacttctacacttccaaaacctaaataccatgattttctcaacgtgtattgtacatatacatgttaacatatataaattagttcttaaacttttgcatcatgcgcccagcgtaattcaaatagcagttctaataaacaaaatctcctgatctgatgtttatccattttcaatcaaacaaacataaatttttgaacagcagcagctaccccaaaaatatacttcagaaaaaacttcaaagcttccctaacttttcagcatacaacagctatccactaaaataacaagtaggctacaaataaagttgttcaagacaatttgggtagttcttacctaaaagaaatatcataaatttaaaaataacagaatgatttgaaagttaaaacaagaattacagcagtaaaagataccttttgtttaatcctttgggctgctgtggggtcctttttattaatgatctcgtatgaaacaagaataacatcttttagagggcgaggcgtctcttctaccttcccagcaaggaacatacaaactgttgcaatggtctgtggaagaattacaacaccaattaggcactaaaatagataaatgccctatgtcaatacaaattccaacttaatcctttctaacagttgtccctgaaccactacacatttcagaagttgccaaacagcatggaatgataaatcttctataaccacctattggggttatagaacagtccagcattggcttaccctcctatcattctttgcatgagattgacgaaggaagaatcggtgacagaaaattatggctgttgcaattgttacttggggtctgcattatacaacacttacaatcatcattatcttcaatcaatgatcataacaccacagattttttaaatgaaagaagataaatatgaaagacttctttcaacatcagtgctatataataactaaatgtcatatatcttcactgaaaaaagcatgcctggaccgactttttgttatcatttaacctaaacctattaatatggaaggagactaaaataatgtttgacctcatcacaacaccaggcattcaacttaacagtgagaagtacatcaatttaatgatttacgtataataaattagaagtaacaaagcttacactttaagtctcatccccaagtcctggagaaatgtacagtacgacttgcgtagataagtctcctttttcaaatccactccatcgcccctagatggggaattttcttcaatttccttccgagaaaagtaccatcgacctccatcctcaggcgtttcttgagaatgtctattagaaccaccttcatatgttccatgatgagagccatcaccagccatatgtatctcctttcaccaattgtaaattaatactatcagtctatcatagacgtatgttcttatttgc

SEQ ID NO: 218460 - DNA, 5906 bp, Cannabis indica
cttcgcacctattttgtttccatagtttaaaaaaaaaaaaaaaaaacctagaaactaaattagatctaaacttaaaaaatgagtttgggcttcatcacttcaagccatgccctaacaatatgtaaaactcacagaaaacttaaatcttagaaatcaatattttccttttcatatttttaatttaaattaaataatcacaggagtaaaaaaaaacccagactcaaattcatcatcggacatcacataaaaaaatacaaattttacctgtgaagcatatctctattcgcaacagtcaaattgccaccagccgttcgctacccaaacaaatgccaagacggaatctttaggctctcgaaaccccaaaacctcaagacttgagaccctcccgttcccttcctttctatctcttgtttctctcaaatttgtcgttgccttccatggcaaatctgttagaattaaatctaaaatatatatgaatcataaacttatgtcagattatcaagattactctagaaatcaataagatggagaacatacttgattccatgctattgaatattaataagaatatgagaatggttgaaggtctatagtctaccacaaactaatcttctatcaatgtgttctcacttaattaatgggaatagaggagaagagtggttaaagattagccttggggaccaaacctaaatattctttatatagcaaactaattagagccccataaattttaattaggtttattgttgggtattacacattacaaagcccatacataataatatatttattgggctcatttaatagattatttatttgctccaatttagaatattagctcaaataaattatcttaatttgtaatcccacatgttgaattattaaaaataatttaacaagatctaaccagcaagagcttctgtgtgaccaccaagtgcacgaagtagtcaaaaataatagggctctgatatttcatcacccagtttccaccatctctagcaagaatttgtttttcgtttagagttttttttttttttgaatgggcattcagagactctttgctcgctgcttttatttattaaatatttaaattgtaaatatcttttaaaaattttaacatttttttaattaagtgaatttatttttatatacttatttaacatatggtccaataataggttgccacgtgtctcctagttggaacaaaacaaacttagatggtatttaacaactaaaatggcacgacctcaaaaattttatttattaaatatttaaattgtagatatcttttaagaatttaacatttttttaattaagtgaatttatttttatatacttatttgacatgtggtccaataatagattgccacgtgtctcctaaatggaacgaaacaaacttagatgatatttaacaaccaaaatagtacgacttcaacaaaatcgtaatggaagggactattgtgagccacttcttttttattggagtcatatatgtaataatttcaaatattaaggtcgttattaaactaatctttatagcaaataaaatggtaatatttataataaatgaaagggctaagaattgcacccctaactttgagttaccaggtcaagaggtccatcactacattaaatgtgtgttatggctacctaacttaaatatatttgtaaaatttgtgcaactattaatacacttttaacctttgtttttaattataagataccttgataaaattccttgatatttcttcttcgttcgatctcttttctctttctcctctcagcctcccattgaagccccactttcccaacaagtaacatgacatttagaattgatgaacaatagttctaaatttctaatattacatactttttttttaatttttattagtatctgtataaatataaacaatgtccttcattgttaggacaattaattagagtagatagttgagcaatagttataactaataattaactatttagttagttagttgtccaagtatgcttagatgtattagttaagtttgttaaatatgattctgttattcaatttagtgtgtataaatatgttgtagcattcattctcgatcaataactaaatacattctttaattcagtatttctctccctctctttctgtgtgtttccagtttctcttcaacaatgtcaaatagatttaacatggcatcagagcattttatgccgtttatagcaaatgttttcgctggaactatgaacaattgacgaacataattggagctcaataaaacaagaacaagtacggtgtagaatcatcaaatgtctacttcaatgacaatttttccatcaagctcaaagaccaaaattatcttctgtggaaacaaaaattcttagctacagtcagaggaaattgattgataaacttcatctctagagctgcaccaccaccaaaatatctctctctgatgtcgatcaagctttgaacacgctcaatcctgcctttatcgattgagatgttcaagatcagctcttgttgtcatggtttctctcattgatatcaaagagcttacccactcaagtgatggtatgtgaaactatatgcaagatttggagaaccttggaacactacttcaccttacaagtcctagcaaagatcttggagtttggaattaagctttaaaatcttaagaaaggatctccgccactcaacaattatctactcaatggcaagcaacatgtggatcttcttgcatcagctgaagagttactaagtgttggttttgtggtactaaatcaggcacacgacaaaagaatttataacaattatcatcataccacaccttaggatctccatatgtacatacattaaatttgaaataaaagattaaaggatatatttacctcttgaagtgaatcagaatatcctcgaatcttttcgtaagttgtatccctaagatggtgatgacaaacttacactttgatcttctagatttaccaccataaacaaggattagtgtgggctaattaggataaaattgtattgttatcccaatttttgttttattactaaaaggctatttatttttagttaacgaaaatttacgttaacagtttggtgctttcattgaaagccttagtgataaaactcagaaacatccctccttacaaatagaaatctatccatattcaatggctgataccaatcaaaaagatggaaattgccctgaagaaacaactcgtcgccctggaaaagaaccaatgggatctcaaaaaccccacaccactgaaacatcacgttcaaggagaggaacgatggtggtggtgatcacattcctggaagaagtaatgaagatgctaataattctgccaaatacgtgcttaggagcgaggatgcttatgacccaactagatatgtgcaattggtggagttagagaatagacaactttgacaacgcttagccgagtctaaccgatggaatgctgagttggaaagagaggctacagcggctagggcagcacatggaaaaaatccttagaattaaccagatcctgcagtgagaagaccacgaggacgatctcaaggctctagaaccaggagacaagaaacgaaccaacggaatccccaaaacggccacgaagaacaacctaagggtataagggatgttccaatggataatcaaacaaacaattaagagcaacgacgagatgttcctcaaggttcccaatgatttacaaaccaagggaacgaacgaaatgatgcaccagaagcgtcttgcaagaatgaggatgcaagacaacctcaactaggtaaccaaggaatccctcgtggtaacgagaaaagccgtggaaatcaaccatggtcaagtggactacctccaagacaccctcaacgtccttctcaattagagagagaggatgtatacacatacttgaatagaggatgtgtatctaacctcttttgaaggaggacgtccttctcaaattgatgtttacaatacattcctccatgggaatcttcttgaagaagtttacatgaaaattcctcctgaatataatgcacccccaaacacagcttgcaagttaaacaaaagtatatatggcctcaagcaagctttgacgcaatggtatgccaagttatgctcagcactgctgaaagatggtttcactcagtccttttccgacaactctctttttaccaaaaagaaaccaaccacttttatggctatactcatatatgttgatgacatgatcattgctagcaatagtgagttagtaatcttagagttcacacagagccttgataccaagttcaaactcaaagatatgggcaaacttcattttttctaggccttgaaatcggcagaaacactcaaggcatatccatttctcaatggccttttacattgcaattactcaaagacacaggctatctaggtgttaaacctgcctccacacctatggaactaaacctcaaactcagtaaagacaaaggaaaacccctccctgatccaactgtctatcgtagtttgattggcaaactcatttacctcactataaccagactcgacatcacatatgttgtaaatcatctcagccaattcttatcatgccctcgggttccacacatgcaggccaccaataagatacttcaatatctcaaacaaacccctggccagggccttttctttccatctgatgcaacacccaatctacatgcctatgctgaaaccagtatgtccaaggacaatgttcaggtctctttctttgctgatgcagactggggtagttgccaagacactcgtcgatcaatctccggctactgcatttttcttggcaagtcactggtatcctagaaatccaagaaacaacaagtggtatctcgttcctcagccgaagctgaataccgcgcaatggctaatgcaacctctaaattgacatggctccttgctctcctcaatgactttggcgtctcccacagcaaacctgctaacctctactgtgataacaccgctgcaatccacatcagtgaaaaccctgtctatcacgaacgaacaaagcatatggaaatcgatcgccactttattcgagagaaaattcagcaatgttcaatccaacttctacatgtctcttctcaacaaaacttgacagatatatttaccaaaccattactaccatctcctttttccaatattgtttccaagatgggtgtaactaacatttacactccatcttgaagggggttgttaggattggtttgtccaactgtatataattagttagttattactccaactatattggagtttgttatttctgttatgttatattttactgcaagttgtcaagtggttagtcattgtaatattacctatataaggacctttgttttagcttcacattcaataagaagagataaacactttcactctgttttagctctgaacttctcgtattttctatacctattcgtgttagaaattgtcttaaggttggatctatgaaaaaaaaattgttgaaaattgaactcatggtcttattttttaccatttttgaaaatataaggctcattttgttatttaacaaaaaagagagtctaattggtaatttttacaaaatacaaggtccaaaatggtatttatccttttctgaatggtaataagaacgagtagtacattaataaaaatattcttactatagagggcaaatactcttttggaccctgtattttgtaggcttaccaatttgaccttctattttgttaaatgacaaaatagaccctatattttttaaaattgtacaaataggaccgtgaactgattttagtcaaataaaacttaataataatatgatctagagatgttatgacaaaactagtttcattttctgtatctgttcgtgttagaaattgtcttaaagtcagttat

SEQ ID NO: 218461 - DNA, 6760 bp, Cannabis indica
acgataatttacaaatggatcaacaataaagttccaaaaagaatcttacttcacatagatgtttaacagataaacttggccgacagcaaaggtgagactgctgcaaacttggtgtactctgtttgtccaaagaaataagcacgagatgtacatctaactgcgcagtaataataactttttattaaggttgaaattagcaagggaaagtagtattagcactatcagattcccataatgctactggacaaaaatcatagtttatcatgatttattgagaagctacagaacagattatagaaattcatcagcatctttatacctcatcactgttttcctctaagctatgaaggtaatcaaccaatttggttaaacgagtgtttcgagaacttttattgttgcaaccaccagcatttccatgccgggtgttactacgggcaccacccctgccccaagcaagcatttcagagttccatgcaataacaggagaaattccccgtctctctccattcacctcaaagtcattttcagtgtttccatctgaattggccactgatgacgaaggctgagaagaccgagtacctgctcgtctcttgcgtcgtctatgtctggtttctatatgattctcatcatttgaagattcacctttccctatattgttatcatttctttcctcattgtcttcagattcttgaagctcaacagctcggctatttcttctccttgaataagaattccgatggttgcgctgtgtccttgctgtatatgtatccggtgtgtctttcccaagtgtgcgtctcttaattaaagcttcagattgtctttgaaatatttgggcaattgatgcttgaatctacataaccaaacatttaaacagaacaagagcacacaggtgagaaggcaaattatgagcccataccaaaatgtaaaatccctttcagaattctctggcataggaattgaaattgaattattatgttcaaaaatttcaaaagacatgaaaatttttattatttgtgtgtgtgtgtgtgtttccaaaagtgatatcatctcaaaaacataaacaaatacagaacattccaaatagtgacaggttaaaagtaggcaattgtccatgataaaaaaacacaaccagggttgtcacaagaaaaaggagcaaatctgtatttaaaaagtagagtcatatttgcaagtataacatattaagacaacagcagaaagtaatgggcgtcaagaataatgcctataaatgtccacatttataatgaagtcacatggaaatcattctcctcagaataatagtctttaatgagtgatatatgtgaggatactgcacacaagcaatgaactagactttttacgcaaacaaccagaaaagaagtatccctgaaacttacctgcttatttctagtcctctcgtcttcgtgaaatgctaattcctgaggaaactgaaagtgaataatgctttctttggaaaaaacatcatcaaaaaaacatacataagaaagtaaataacaataaacaaagaagctaatccaattctacctcctcctcatacttctcaatatctggatataaaatagcaataagggcatcatagtttgggtcatctctcagggaacgtcgactggcacaatgtgtccggcaagcagggcactcattgttcctggttatgcatcaaacgtcaaaattaaatcagataaaattttctactacaattttataactttattcttttttctgatattctcacaattaataaaagccaaatataataacaatcaggacagtaatacaaaagaaagccacaaaaaagataaactgttatagttcaagactacataccccattcgcattgatttgtcaatgcattccctgcaaaacctgtgtaggcattccattacagtacgtgttttcttaatgatacctgtccgaaccaaatagaagtttgttactttctctccatgaacacaatcaagacaatacaaactgtcaatactatgacttgacaaactcaagatgtcgtaaaggaaaaagtcacaacaatgcataaaacaagtatggcatccatgcttgaaaaattgatatagcttcaactgctgatcttttcagtaatctaaggttagttgtactggctaactagtttcttcagtgattaaattgctgatcttttccataattttattttgacattttttatatatgattatctcatgatatcaaaatatgaattagagacggattatatgaaaaaaattcatgaaagaaaatcaccaagacaaatcgggcattgcacatctttacgtatttctggcagttctacagagacaaatctgcaaagagaaacaaaaagtaaatgcgcgaaaaacaatatagaaattcataaatataacagggacatctaaaatggtcattaatggcactgaaaccataaccaagaactgtaaacaataacgtacgatcccaagaaatatgattaagataagatagtaacatgactgtgctgtgcagaaagagttcagagattgccattgtgggaaataaaccacatggatactggctagaatcataagcgaaaacatggcctaaatcctagcatgcaacactctccactcatcaactaattgataatataataaacaaaaacagtactgaaatgcataaacgattatgcaaactacgaaacctctataattgaaacacattatcctcttctaagaaaacaaggtaaacccattaatatcgacaaaatgaaacttccaaatataatcgataatggtcgttaagaaaaattcaaaaccagctagtacccagaaaagatggcataaaaaaaaacaaacacgaaaatgggtagtaagaagacagggcagagtaagagaaagtactctggtttcagctgagagctcgaagatggagttccctcggaatctgcaaatataaaaaaagaaagatagaaaaaacggaaaaacctcagcaaatcggagaaaacgaaactcgacccaggtaacaaaaatcgatcacaacccaatgatacacatcgaatataagaaagaaaagaacaaaaagtcacgtaaccctcttcatcttcatcctcatcatcgtcttcgtcgtcgtcgtccgacgcttgttgtttcacttgttcttctccttctgcatcttcttcttcagtttcctcatcaagtgactcttcttgctcttcatggcgctgtaaaataagttccgggtcgtccttagggtgggctccggaccgagattgcttgggcctgggatgaagcgcgggctctgcatcgtcgtcatcttcgtggtcgtggggtttttccggggaacaacgcttctgagcaggcattgtcggaagcgtagaggaagagaagattctgtggtagttgatatggggatatgggattatcgggttttgagatggagagaagaaaaggaagaagtaacacaagtaggagtagaaggagaagaagaagaagaaagcgaagacgatgtgagattttggctgcttttatttatttatttttttaataaaatattcaattttaatttaatttaaagaaataaaatgaagatttatgagagaaagaggttacggcaaaggaaagtagcactacatgtcgcctaggtggacgcccgcctgtccccgccccagggtgttttagtcttttcactgccctttaattatctttgctaatgactatggaggaataattattagggtaaacatgttactacttaagcaatgtcattaaaccatattggaatattttgatgtaaggtagtatgaatttttaggctttcaacagtgtctcaaataaatatgtgctgggtttcatgagttttattactatttcaatatgttgcaactagtaattgaagataattgcaagttttagttatgaaaaatactaaaagactagtagtgtttagtacttttttagttcttatgtctcaatattgtcattagtccaactaaatattgaattaatataataatttttagaaaatatcactagtcaattgcaagtcaacatgtttagaggtattattggtacccaatagcaatgttctttaattgtactcggacccaacccgtgaaatgattcgagttcgggggtttcgtgctcgcgcgtttgcgggttcgttaatttatttatttttataaaaaaatcaattttatgtgatttttttatatattaaattaagtatatgagttataaacttacaacgtcacaatctatattcattagattaaaataaaataaaaaatgcattaatttcaaatctaaaatacaaaattcaaattccaaactatatataatactaggtggatgttacgtgtcgacccacgtattgttagttttattaaggttttggttttttaagattttgataactaaagtagtatgattatttaaacgatttgttttataaaaataaactgtgtttaatctgtttgtctaatcttttaagcacactaaaaatattacatcaatccttcctccagaagtacttggcctaatagtgttcttcaacttcgtaatcagaggggggaagaaacccatttaaatcatcttgtccttccaaaaacagagctttagtctctcctagcagtttcaacctttcacatctatatcatcattgtgaatcaaaatagcttgtaaattaagatttcttggtaaaatattagagagaaaaataaataaacaaaaaagaattgcatctttagagagtgacaagaggatcaacaaaaccactctgatttgccatgcttccgtgcctagaaacaagtccaagtgcactctgtcctgtgacaggtttggcaatccatgagcgaccttgatcaggtccatataacttgatttgatccttctcatcaggatggatccaccttgtcagtaagctcattggctgaaccaattatgtattcctctatagatgtgtcacttccaactccaagacccttaaccaacaaagtcatctcacctattcatctcacaaaatttagtacaatgtaacaacatatgagtatgagatttaaacttgcaaaatcatatacaacaaaagaaacatatcagaatcttaacctgcaacatcctctattcctcttagcctctgaagaactttcttaacctcaatcatctgacctttacttacaagccaatgaagagactcagacaagaaaaataaggtcgaaaagaaataaataacagatggaattgaaagaactccaagcatcaagctctagtttggtttggcataagggacatggaaaacccatacaataagagagaaacattccaccagaaccagtaaactgtgggagggtattaaatgatcctctaatcttgggtagagttgtcttagatatataaactaggctaaagtaacagctataccaataccaaaaccatcccaaagccttgccaacagaaaaatatagatattaggtgaccataacattacaattccactaacaaagtaaagcatagatgagataatcaggaaggaacgacgacttagagaatcagctatggctcctgaatcagcaagggcaaacacctaaaagcgattggaatatgttaatgcttaaaactttttatttaaatcttttaaattatgtatagaaagacaaacttgattgactcatcatcatcatcatcatcatcatcaacatgagaaacaacttgttcttcctgttcatccgattaggagtatgattctgctcctctgtttgttgatgtcgttggcggtggtggtcgtcgtcaccccaaacttgccatcgctgggagtctcagagccttggtcgttgtcgtttgggaataagaggattttggggaatcgaatccagatttggggtagtcgaacctggtcttcattctccttggcttagattgttcatttcggtgtatattttttttgaaaaaaaaaataatgaagctctcgtcacgcatggttggaataatctttttccggatgcaaggttagaaaatttagaaatttctgcttctaataattgtcctattttgttgaatcttaatttatttagaaaagtggtcaatttaaagaaatttcggtttgaaaatgcttgggtgtgtgagcctatgtatcgccaaattgagcatgataatatggatgttcatgagtcgaattctttgagctcaaaaatcaaatattgtagtactgctttagccgaatgggggaaggatatcactggtaatttcaagcacagaataaatagttgtcataaaatcctgaagcttttgaaaaatagaagggatgttgattctgttaacaggtacaaggaggttcaaaatcgtttgttcgaagtcctcgcccagaaggaggtcttctggaagcagagatccaaataattgtggctgcaatctggtgaccaaaacactaagtactttcatgcttgtgcgagtactaggtagaaaaacaatcagatttgggaaaatggcttaccgagtgtcgttgaagattattttagagagttgttcacaacttcggagaatgattggggtagggtcacggcttgtgtgcataatcgggtgtcgactgctaggaatgagtcttttactatttcggttgacgctgaggaggttcagaaagcactctttcaaatgtatcctgataaatctcctggtcctgatggctttaatccttgattttatcagaagttctgggatatcgttagtaaggatatcattcggttagttcaacactctttacttttggtgaatttcctaatcatttaaaa

SEQ ID NO: 218462 - DNA, 4451 bp, Cannabis indica
gcataaaacccaacagatgggaccccattcccgatgttccgaccttggttatcggctgcatcaaagcttcatgatgttttttctagtgcccgtgacaagcttttggaggatgttatctctggttctccgttgaggctctccggtcgatcgtcatccgtggcagggaacggagtgggaaaaccggtgagttgtccttggacgtctgagtctcgtggctcgagacgcttcaagaaagtgacctctcagacacgtcgggggcagggtcagcgaaggcttcttgcttggaagcccaagagagtacctgaggagggtggtgagacctttgctattaatggtaatggggttacttctggtttgaattttggagaaaagtctcctgctctttttccttctttagaggctgcaattcaggttgaggattctttatatccgttggtttctaataaaccatgtgataatgaagctgagttgggctttgggccagatttaattgtgactaatggtgagggggctgggccagtttcaaggccgtgtagtgcttctgggccttaacatgctgggccgatttatgaaggcctttctttgggtggtcaggcggcgggaggcccactccctaataatctaaatgcatgtgatcttagtgtggctattgggccgaacgtgtggaaagacaaggagcctatggaattctcttctcatgggcaggaggcccatctcagccaagatgaagacaaggctttagctcagttttttccaaggtcaagaaacaactttacaagagttaaaaaagtttggaagccttgacttgtatgaaattagaagtctgggtggtgatattggagtctcgacagcttcagaaattaatgcaagatctaccccgtttaaaaagaggaaatttgaagcctctttctctgtgtgttcaagaccctataagtttcttcgaagacacccgggagtaatccgtgacttcccttgggatggaaaggagcaagataatgcgtctaaggttgttttggaggacccttcgaaagacccgtctgatactgcgagctgctcagatggcgtgaaggaaaatcattttattggctcctttgtgattgacgactctgtttctggttcggctgctcgctcttatacccctgtggaggagaatgtcaaatctcctccacaggagccatgagaggcttagcttggaactgtagagggttagggcagacctctacagttcttgaactgaagtccctagtgagattgcggtccccggattttgtttttatctcagaactcaaagtggatgctgctccactaatacgtattcttcattctcttcacttttactttcatatttatgtgtcggggagtgggactgctggtggaattatattagcttggaaacttggattctcttttgagtgtattacctgcacccgtaataatattagtgggattgtttattcggatcccccgacccacccgtggcttctctcctgtgtttatggcccgccgtatttccacgccaagaagactttttgggcggagttagtcaagttgggtgataagtttggtggcgcttggttaattatgggtgatacgaattttgttctccgtgagtcggatcgggaaggctcaatcagtaaagatcagtttattccgtttatcacgggactggtggaatcccgaggtcttgttgacatgcctattcaaggagataggatgacgtgggataatcataggtcggggttaaaccatgtaaaatcggcgctagataaatgtctagttgatgaagagtggctctgcttattcccaaaagctgctatctgctcctcccaaaccagtaattctgatcatagaccgctgtgtctttttactgaggggctgggacgtaaattcaagagaagcttcaagttcgaggaaggttggacgcgcgatgaaagaagtaagtttgtggtggcccacgcctggcggtctgtagcgcatccgtgggccccggctcgggtgttcaaaaagattggggcaactagaattgctttgagtcagtggcatagagctcaatatggttgtttggactctcgtattaaaaatctagaaaacaacctgaatttattgcagagtctcccggcgggagatcgagattggaatactgaatgcagtatccggagagaattgaatgaggcgagggaaaggaaatctctttattggaagcaaagggctagaatctcttggataaaggaaggggataaatgttcgaagttctttttcctgtctgctactattagaggaaggcggaatgccatcgaaagtatcatggataaagacaataattggattacttccagggagttaattgggcgggaattcattgaatcgttccgcagtacctttgttggatcgggtgatgtgcattcacttaattgcaatcttttgatccatgagaatatttctgaggaggagaagaaggacctcattttggtgcccaacaatgaggagattaggattactcttttctccatgaatagtcacaaagccctgggccctgatggaatgtctgtcctgtttttcaaacactactgggatgcggtgggagatgatttttgtaagactgttacggatttctttgcgactagcaaaatgcataaaggagtcaatgcaacaaatattgtcctaatccctaaactctagaacccaaagagaaccaaccactttcggcctatctctctttgtaatgtcttgtataaggtcatttccaagatcattgcaaatagaattaaacctatccttccgaagcttatttgccctactcaggccgcctttgtgcccggaaggaacattcaagataacaatgttataattcaggaaataatccattcttttaatcggaaacgaggaaaagagggtttctttgctattaaaattgaccttatgaaagcctatgataggctaaactggggagctattgatcaagtgttgtcttgttttggtattcccttgaaatttcgcaattggatatcccagtgcgtctccaccactactctcaacatctgcctcaatggggggcaagtgggatcgattaacccttcctgtggcctccgccaaggggatcctctgtctccttacttgttcatttggacggctgagattctatctagactcctaaattgtgccctagataggaacagtattaaaggtataagactgagtagaggaggtccggttctaacccatatattctttgctgatgacttaatcttagtggggagagctaacttggatgaagtcagaggttattggcagtgtctggagagtttttgctcttggtctgggcaacaggttaataaactcaaaacctccatcttctttagtaagaatacgccaaggggcctgagacaggagattaaagagatgttgggtattggatccccggatggaaacgttaaataccttggattacccctcttcagatctcgtcaaaaggatgccgacttcaactttattctggataacctctctacaaaacttcaagggtggaaagctaaaaccctctccaaagccggccgggcgactctcattaagtcggtaggcctgtctatgccgatgtatgccatacaaactactaagctatctaatagaatggcatccagaattgatagtatggtgcgtgacttctggtggggttttgagaaggacaaccacgggctctatcttaaagcgtgtgacaagttatgtcttccaaaatctttgggaggtctggggtttaggaaatcgagagaaatgaatcaagcttttattgccatgtgggggtggaatatcttgaataaaagccaatctctgtgttgcagagtgcttactgctaaatatctgagaggaaaagagtttctgacttgtgattccaagagttctgattcctggttttggaaaaacgtcattaaaactaggaacattataaggaaaggtgcctgcaagatggtgggagatggaagggatactcgaatctgggaggacccttggattccccacttaaaggatttcagaccaaagcctcgctctttaaatgctggagattacacttatgtggctgatctgatctcagatcgccgatgggatgttcataaacttaatagcctgtttgatcatgtgactgtgtcggctattttgagaggaggagttccgagtggtttagggcaggacaagtgggtttggactcttgaaaaggatggacatttctcctgcaaatctgcctatctctctcaagcattggggagagctccccagtgtgtagtggctccttctttgtggaacaaactctggaatagtaaagtgatggaacgatacaaggttctctggtggtgcatcctctccaatgctctccctcttagatctgttattaacaagcgatttcatattgaggaggtgaggtgccctctttgtggggggaggaagaaactgtggaacat

SEQ ID NO: 218463 - DNA, 11676 bp, Cannabis indica
ctgggggagaagtcatgcatgctttgtgatatgaagctcgagactgctttgcatatctttgggtagtgtccacgtgctcgagccatatggtttagcagctccttcccagttatcggtggtgtgggatgggaattcaatgaaggaattattgattgggtaattttgatcttacctggggagcttactttccaatttcttgctttcctgggttgtttgtttgaaggcatttggaaagctaggaatgatctcctcttcaagggatgttctgctgacatttcatcagtgaggaaatacatcatgggcaggttttcggagtctacatcgctactggatacaaagttgggtgataagcggagtgctatgaggggcattccgtctgtttacagaatcccaaattctactaatttgatctgccttccgaacgcctcatgtaaaaagggtgatgcggggattgctgtgggaatgctcgacaaagagaaaaatcactcgttatggtttgctaaaaattgtagggcctcctcggcagctgaagcggagctcatggcaatcttctaagcactgcaactgggtagggaggcagattacaggtcaattgcaattgcttgtgatgcgcttgtggtggtcaaggctttggacaagagcaggtgcccaccgatttgggatgttaggcctttggcaatgaaggttataaaattttgtaagaagtttgatatttgtaattttagtcatatttctcgtgtagacaattttgttactgattccttagccaagagggctagagtggagggtcattgtaatggaatcattgatagggaggggacccctgttatgatacccgattatttggtgcaatgaacttcctttgttctttaaaaaaaaaaagacaaaacaacagatgaactttttttttttaacagaactaacatatgaacttgaaagcatatttggagtttgtggccgtataaattaaagagaattatttgtagaatgacgaatataccagtgacaagttctagtaacaagaaaaaggcaggtgttacgtgatgaggaaaggccgagttattgattctcagaaactattctcgatacattctcctcaacaggtagtacgttcagcagctttgaggttttcaatttgaggtgaatattggagacaaattatatttaaaggccacctgtactagctttgggacctttactagactgttcatctaaagttattatagactcatcaagtatattgaatatcttgtcaccagaagtctttacacgagcagagaccatctttgaaatggtgaaagcggtttctgtccctcaccacaatttctcgatgataaatcttagagatgaacttagtagcagaatgacaatcactacagactctcaagttcttaactatccgaataggagttcctggtggtgtattcaggagggcaaaagcaatagccagcttttcactgtgtctgttcaaagcatcttccttgtcttcttcatcaatatctagcattacctctgatgtactaggaacatgaccagctctcttcatctccctcctcatctcctccaccatctcataaatttctttgtactgtttatgtgacttgtcgccagccacaaactcataaatttcactatctagctcaatcatggtgctaccagggatctttttcatccctttcatgtccatcatttctcttaccttggttttcttctcccagtgtgacattttcgcataaatgttggaaagtaacacatagttggactcctgcatcggttcattcgaaatcaagcttctgctgatgttctctcccagcttgagctccccatgagcacggcaagcattgaccagagttcgcaagattattgaattgggctcgaagggcattttctgaatgaactccactgcttcgttgacaagtccagccctgcataacatgtccaccatacaaccatagtgttctatctttggagcaatatcatagtcttctgtcattaaactgaaataccctcttcctttatcaactaaaccagaatgactacaagcagaaagcaacccaataaaggcaacgttatcaggagtcatcccactttctatcatttcctcaaacaaagaaactgcctctaaaccccggccatgcattgccaaaccaacaattacagaagtccaagaaactattgttctttccctcattcttctaaataatttcaaagctttatcaacatcaccacacttggcaaacatgtcaatgagtgcattacaaagctccacgcttctctgaatcccttctttatcaacataagactcaacccacttcccaagctcaagcgcacctaaatccgtacatgctgaaagaactgataccattgtaatctcatccggtcggactccagcaatctgcattttcctaaacacatcaacggcatccgtagataagcccagacgcacgtaccctccaatcatggcactccacgaaacagaatcacacttgtgcatttcatcaaacagattccgtgcatcctcaatagcactgccacaacagcaatacatgtgaatcatggtatttcgaacatgaacgtcgtcgtcaaatccaaactttaccgttgacccatgaaccgcttttcctaaacccaaatttccaagacccgcacacgccttgagaacaaaagggtacgtaaatttattaggcgaaattccatatccaaacatagaattgtaaacaaacaaagctttctcctttagattgctagtatgagcataagctctaatgaacgtattgaaaaggaaagcgtcgtagagacttgaatcggcatccatggagaacacgaaggaagaagcatagtcaattacaccaagttccgaagacacggcggcgaacttagtgagaaccagtgggttgtttcgcaaacccaacttgattattcgagcaaggagttgagaaaatctaggaagactgttacaggcttcgatcagcgataagcaactctgttccgccgatctcttgctaccggcatcggcaccgacgattgactcggtaactgtacggacaactctactcttaacattttggaattgcatttaacgaaaaataatttcacagaaatgtctgttgaatctttagaagtttctaaccacttaaggccattttcagtgtctgtgattttcttggagaattgttattgtatatattttttctatttcacacgacgtataaaataaaatagtacactgtttgaaaataaaataatctattttcggcaagttaaatttttcttaaatttcaggatgtcttaaataactataatgtacaagaccataagaaaaaattagactaaaaaattattttaagggtgtgcatagtaaaattttcttatattttttttatatttaagtaaaaataaaaatggaaaacgtgggagctagttaactggtcgtttttaactacccaaaaaaaacaaaatacgattcacttttgccacgtggatggtcaatttatagccacgtcacttatcttcaacctcagaatatgtataaaagacttttcggaattctgatttctgaaacttctttttcattttttgagtgactctgaaacctgaaagctccaaaaacgtgatcaagcttacgtatagaaacaatgagaagagttttttcaatctcagggtttcgatctctagggcttgttcgaagcccaaaatctcattattctcccgtcattgcgcttcgctcatattgtcagccactccatctttctcaatcaagctcttcaggttcttatttctttctctgtatgtgtatatacacacaagaaaattatttaaattttctctctgagattatgatacggattttctcgaccagggccgctttcgcaatataggagtctggttgaacaagggaagctacaacatgatccgaatcaggaaagagttgctttggaattggagaatttgcttgggagattggagcggtatgaaagagaaatggaggaatatcatgtacaattctaccttctttatgttacaacaatgcgtaaagcctcactcgctttgtcttataatgtaagtttttgtgttttttttttcttctgtattttcaggagaaactagcaaagtgggaggatagcagggagaatgagcggcgcaggattttaatggaggaagctgaacttaagcagcaggactcatggacatcagtaaccaggcaccaaagtagactttttgggagatggatgtttaggtaacaactatcatcccaattatgaccagtagtttatatgaaataggacgtgttctctaactaagtggacacaatcaaggtttctcatgatatcaaaaagtttgcattcttcaacttaatttcgttatttattatatctggttcagtagtgatactagctatagcttttatgccttgtgttctgttaaattttattttcgtgtctgatgtgagatggttatggctcctgtctcagtatgtgtctcgttcagtgttttgcacaaaatgtttttctcctttttaatttaatcaatggaattttgctttactcaggaggaaacctgataatgtagaaccaggagtgggcaaatgggtttcatacctgaatcgagagaggaagttggattcgcttgttggctctcgtccaactgctcctccggctccaaaaggactatatatatggggcaatgtcggaagtggtattttcttaatgaaactttctagaatcaatacttaatccctcgtcaattatatattgtactaatagacctttgaatgttcaaatcacactggactgcattagggtcacccttttagctcatcatattcattgaagctactcatatagtcactaactaaattaacttatgggtgtatcagggaagaccatgcttatggatatgttttataatgccactcaaggaattgttaaacatagacgaagatatcactttaatgaggtaagctgtcgtaggaacaagtgatatgcaaaaaacaaaaatcagtttatattgatgatagcccaaggctctagaactacccaagtacaatgatagatattcgaaagatctgctagctaaccccttgagcaaagatgctccactgcttagaaaagttgttggatatcattctcatgcccatcccttttaatccttttctcctcttttgaaaatataaaaatacagcacaaacagaaaaaagcacctgcatggaaagcaaggtggctaacagaaagtctctcacaaaaataccccacccaaagctgacttacctagatgtactgagttatgctggcttgtctatcttgtttttgtgactcattctctctactctatcctttgtttttatgcctcatgtacatgaagtattatgtggtctatcaatgtggcatttcaagtttgcagtacacataataagtattcatttttttgttgtccacttatgttccttatcaatctcgtatatgcatactgaaagttggttatggaaactattctttgtttatatggtttaaagtttagctgcagtttccagaaaatataaaacatacacacaaagaaaattatgtgtaaccatctctatctgcaggctatgctgaaaattaatgagcagatgcataagatatggaagaaccaagtggagggagattcattacagtcaaatgtttctaattggattagaaaccttccctttgattcaaaagtaaaggagtggttggctgcagaagaaagatacaaacaggatgttcagatgaaaaacattcttccagatgtagcagataagcttttcattagtcagcaggttgatcttaaaggagctagcattctctgctttgatgaaattcaggtcaggctaaacgtttcctatataagctagcatagatgcagctttattaggtggagtttcatattaagttttacctttggttccaagttgtttgcctgtatttttcttcacgtgcacatgattctacaatctcagtttacggcattcacattctatttttgactttaatttgtcgtgctttcctttcagactgttgatgtatttgctattgtggcattgtctgggattctaggcagattactaagtacaggaactgttcttgtggcaactagtaatcgtgccccaaaggacttgaatcaggtcagtgttgagaaagatgattgtgatgaattgtatttcattgattgagaaaatagttacagagtagtatttataagttacattagttagtagattagttataatattaattgttcaggaagctcaaatacagctggattaactaacaaatcagtgctaaactaactctaactctaactacttcctaacatcttccctcaaacttagggtggaagaatcttctactctaagtttggattgaagaagggagaatctggagcaagaaaatgcctttgtttggatatctgcacttgatcacaagatggcatatgcttcacaatgagctgcttggagatgaccttctctctcacaaaatagagatcattctctatgtgtttggttcgggcatgcaacacaggatcggcagacatgtgaactgtgctataggaggtcgatattgagctacacgaatgactgaaggaagggactgaagccaagtgacttcagcagctaagtgagcaagacttcagtaccctgcctcagtattcgatcgagaaactatttgcggcttcttggattgccaatttgccatgagaccaagtttggaccaagaaacacacacagaccagaagtggattgcctatcatcagggtttgaagcccaattagcatcacaatatcctgtcaaatctaagtttgaagctctcttcaaatgaagcccataatcaattgtaccctttagatatctaagtaaccttttaactgttttccagtgtgactccaagggattttgcatgaattgactaactttattgacagcataagcaatcactggtcgtgtgatggtaacatactgtaatgcacctactaagctcctgtataggtgtggattttggatagggtcactgccatgagcagaaagcttttccccctatcttaggtgttggcagctcatttgcaagatgcatttgtgatctctaaagtatgtctgtgatgtacttcttttggttgagcaggatacgaatggcagttggtattatttgaattcccaagaaataatggagtgaaccaagatctttgagagaaaattaaagaattcaagctcttgatcagaccagaaacttcagtaggagagctaccagtggacatgatgtcatcaacatacacactagaatgtatgttgtgtgttgttgagtggctcgaataaatgactgcgctctgactttgcattatgaaaaccgaaaggtagtaatgtggaccttaacatacaatgccttactgcaactatcaaacaaactttggttgagaggagtcttcaaaaccagggagctgcaccatataaacctcctcttctaaatgccatttagaaagacattattgaatctagttgatgaataatccactggtttgtgacggcaacagtgaggataactctaatagttgtaggcttaatgataggactaaaattctcttcaaaatcaaagccatgttgttgcatctgataaaaataaacatcattcctaagttaccaaggaattcttttgaattagtgaataaataaagaaagttccatttgcacccctcaatatgataagtacagtccaatatttaaaaaaattaagcttaaaataattttaaaattctcttttaatatttttttaagaattttttctcacattattttgtgttaattttaacacttattttaatttaaatttaatttcatattttttgtaaatcatgtacaacttttttttattttattttttgttataatatttaaattataatttatttttgtttgacaggtatatttgtgaaaaatatgagttggaaaaaaaattaaaaaaaatataattaaagatatatattttatgtataataaaaattattgaaatagtgtacacttataaatttttggggttgcaaataaaattctccatacataaactgatctgtctgcaagcattttatttaagctataaaatttacttattatttattattgtattgatagtaaggatgctctctagcacattcaaagaatgtttttactctgaattttaacattgctctggaaaaatgctcatgcaggatggtatgcagcgggagatttttcttaaatttcttaaaaaattgtatgggcactgtgagattgctctcattggaagtgatattgattatcgccgtctcataggtcaaagatctatagaccaggtgagggttatgctgttccagttattgtcttgatataaatgtatgattaaataccacatgctatcatggtcgtgttcaaagatcccaatcactaatttaaatgtgaagtttaattatttgtgattgtcctttgaatgatttatgatcatttgcctgatcagttgaatgtgtcatcgataggcatcctacatatccacttgtctgaggagtttaaagaaataataacaattgttagttatagaaggggtgttgtgtggctgttagtgaagtataaaatgagtgtaaccagattctgcagttagttttagactttgtggactttggctaacttgaataaaccagccactgtattgttactaactaattttggatatgaagcttggctttgagtataggagattctttcattgcactagcaagttctatcagcctgactgtgatttatggtatttccccaaatatttaacataatgcatcgatcgtgcatcagtttttcagttatgaatcaagtaacagataattatatttattttagaaatgtgggattctaattatggtttgaattttacttatatgttcaggctcactacttttggcctctggatagcatggctctgaagaattttgaaaagatgtggcatgagaacacagaccatgtaggaggccagattggctctgttactattccagtaatgtttggaaggtgcattaagaatttaatattatcattttcagcagaatctctaccattcattttaataacacttgtttcttaagtcagaatgcttgaggttccagaaagctgcaatggagtcgcgagatttacgtttgagtatttatgtggccagccggtattgttctttcctgtatataactaggctgtgaatttttatgttttttgttcaatcatgtctttggtgattaattgtctatccgaaggaggtccctgaaatttcagtctttttattgtgcaaatgtataatcaaggcactgatattctgattttgttgttccttatataaaacttgctgataacatatgacttcaacttgtttatctttaagaaagtgagaaaacagaaaagaagttaagcaccgtgtataattgaaatctaaagaagaaagtaaacttaaaatagaaaaataagtctctaaaggccacaaaaggttttcagtttgaaagtaaatattttattctgcttaaaatcacttcttttttctactgatattctgcatgtttattggaagcttgctcttctgttaatatgctttctgttacttgattgacttcaggtaggtgcagcagattatattgcagtagctgaaaactatcacacagtctttatatctaatattccagcaatgagtatgcgcattcgtgacaaggtactatttttccttttgatgaataatatcaagggcagacaatgtacgtttaattagttgttaggtgtttttatgttcactgcaagctgcacatcattcacctaagtcagttgaattaatgggacagaagtaatggtaaaagattgttttcaacgacacctagatatgaggagaggtaaagagaaaactaaattccccattgagtcaatgatatgtttgctgaaaaattgaaatttttagtttcattcggttgtataaaatacaaacttattagtatatgtatatttgctattgatatgactaatattttagtacgagtaagaaaactcaactatgtcttacactatgtgctttgcatctattttggcaaaaatttgctccaggcaaggagatttattaccttaattgacgagctgtacaatcatcactgccgccttgtttgttctgcggcggcttcaatcgatgagttatttcaaggaactgaagagggtacactttttgatttggagaggcaagtattatccgtttcatatttgcttaagcacttcatttaagtgttgttcttgttttattatcattcattattattattactaggtccagtatttgttcttgttctcttttttctagaataaatcctgtgttgatagtttcaaactcttgtccaagcatgtgaaatatacgtataaatataattttctttttcttttttcagtttccaatttgaaacagagatggaaggcacaaagcttcgtcgaaatgttttggaagaagggaatgtgagttcaggaggtacctcaaccagtattgtttccatgttgtccggcgaagaagagatgtttgcttttcgtcgagcagtaagtggcattagaatcagaaatcttagaatttttatttatactatccgtacagttaagacaataatgctgctttcaagatacttcgtaaagaattgtaattatcaaccatcccaccttaatattttagattatgtctcaaaattatttagtgagaaatatagaatagaaaatctatatctactgtgctagtaatatgttttctgacgagtggctgtctatgcaggtgtctcgtttgattgaaatgcagacccctttatatttggagggagttggtagtctccatccttattttcggagacaatgccaacaatctgaaactaagtctgcaaattacttgcaatctcagctgtcacactgaacaccacatcgaacgagtaccaattctaatctgaaatataactttcagtgtcatgttataaatttataatggataaacttgtgggactttatttttatttttatttttttttgaaaaattaaaattaataaaatcaaatgaaataaaagttcaattattttattcttttaatacgtggattcaaataatgaatttcgatattttgtaatagacctcggcaacaaagctgtttattttctatagtagtagagaccaattaaggctgacaattcgtgcttatgagtctaattatatatatttcagaaattagaacaatatatttattttgttatatatatatctcaattataattatcttattaggtgcggattgtgtcagtaatagtcccacccctaataacaatattatttgtagtgagtatcctaaagatgaataaacattaagccttctctagcagagatcagaatgaaagatcggtggaaccttttcaaaatttaacagaatagagtatcttgatatagaaaaactgcaagtcccttaaccaaagctttcactgaagtgaggtggcatctgtgggaggaaagatcccgagaacttccagccaccatcgtaaagatacatgcaaagggtatttcaaaacccttaaataaaaatcttgcactaggatgaaagatttgaatacaaataccaagggaaagcaaagcactaatcgagggagaattagtaagatgagga

SEQ ID NO: 218464 - DNA, 4319 bp, Cannabis indica
ttaaatatctacaaaattgttggatacatgctcttatgtcgaatttactttgcgaatcgcaacgtccattctgcagcaattttatcgtgcttcgctttgtctaccatgtataagtgtgcaatgccaggaacaagaggattattacctataagaatgtgaatttcatttcaagtagattagtaagaacatgaggatttttgagatgtcaaatatccaaacctcactacaaagtttaagaccaaatcacaaacgaaaaagaacacaaagattgtgcagtcccgaacacttacatgggtcgggctcggtgaaaatctttctaattgcaattaacacttttgtaattgttaaagctggactccaaccatccttcaagatctccaaactaacattccccacagaatcaacatcgaagtggtagattcgggttttaaacacaacctgaaaaccaattcatttaccctgttaaacaatttcaccagtttgcattgtctaactacagaagattacatacaaaatgagtcctagttttgttctaatgttcaatacaaaaagcactcttctgaagaaaccacatccaatcaaaaaccgagaattaggacactgattatgtctcactgcattttctttccgttgccctttaatcacacaactgataagttcgaagaaaaattagtactccttattagtctcacacatgttattgtctttcatttgtaatttgcattgttgtcatttcataccaaattaacaaaacattactaaaagatgttttatcttcaacagatagaacaaatcatcaatagggaaataaatacctttggaggtttaaatggataatcactgggaaatgtgatgtcgagaaaatatattccgccttcatatggagtccctgaaacataaaacacactctaaatactgataattaatcccaactgagcaatggtagcattgatcgaaaactagaacgctcttacaagttgcgaaaggaaaacgaataaacaaggtaccaaaacccgaagtaagaagcattacatagaactggaaattaaatattcccagcaacaaaatttcaatctataaagattgtaagcaacaaaatcataaaccaaagcacaaggcaatggtttgtcttgtctataaacctgtattcaaaaagctcattacaagataacaacagtccaattactaataatcagatatgatttcaaaatcaaaacattagattaccaatgcttaatgattattttcttttattgcatagtgaacccagttattatcaaatgagagaaaacaagtcaaacaatttgcttcaaccaagcaaaatcgaaaaacacactcattaagttgaactaaaaagatttttctaagattaagttgaaaagaacaatcattgttggcttggctgtaagtgataacaaagaattacatctggaaagcatttagtaattattccttaaatttcaaagcatatggtatctatttctatctttctccataattgtaattggctcttcaaattgaaccataaagaagaaaaaaaaaacaagttgagtgatcattcaaaaaagtgagctgaaaacacaaactgagaacaaataatcaaaacccatataaagaaataaagaaagaaaagagaaaagagaaaccttggggaccaataatggtggcgacccagtggtagagattgtcgcctttggtgccagcagagcaatcaagaggaggatcagtgttgagctcagccatttccctctgaatccgcttaccggaagctgagactgaggtggtggatacccaagtggaggccgaggaagaagacgatgcagggttggatgacatcatcaccatgcctctcttgttcatacctcagtttcaattgatgattatcttcgtaacgatatataaaaaagagataattactattattatttttttacagttttttataaaaataataattgtttataaaaaattttagaaacagaatttaaataatataaattgaagaataaataattaaagagaaaatataaaaaagataaatatttttttacttggaaagttaactagccttagtttatcgagtgtatattcttaaatttatctgagtaaagtctgcaagagagttcaactcctaatttataagattcgtggggtatttatagtaaataatactcttaagcgttctcatgaagtccagtccataaataaggcaatctgctgactagacggatcgaatttagattgatctggtcaacactgagcacactgattgtggacaatatttaatctgaattaattgcataatatttattataggaagtttttcctttaattatgatacgatactttattgtgatctgacaactggaccttccttagttgtgtacaggaataagaagggaaatcgaaagggtcttcgaggaactcactatttcatctctccggtgttgtggtatcagacatgtcttccgagtacgacttgctgaaggtggaaagctttgtgagtgaagaactaagatacgttcctggaaagacatatctaggtgggcttggcccacttcacctttgttaattaggatttttgttccttggcatgtactaaatcatacccccgttaaaaatttctcataaattattgaaattattaaatgtaaagacttttatttaatttcaatcaatttcgctaatgtgacgattgtccatgtactaaatcatgtccaccgaactttaatatttattaaatcatacccccctgaattttaatatgtaccaaattctgctccttaaatttgcatctacgttagactttctttagtaatgtattgaacaaaagttctcaaatccaacaatctcaatagttcgagaagaatttttaacgacctaaaaaattcaagggacattatttggtaaatgtcgaagttcaagggacaaaaattcaaattaaccttaacaaaagtacataaaaatatattaaaataccgtattttttgtacataaaattataaaaatcgtaaaatattttaaaatccgtacaaccgtattttgtaattgtttttattatttttatgtatttgtgaaataacattggatatccacttgtgatcggatcagattggatgctatttttaaatatccaattggatcggatcagatggtggatagggtgtctacaaatccaatacatccaacattcaatcaaactaattagtattttcatttagtttggatgagtaattagattttatattgttatacgtaaaatttatatgtatatatatgaaaattagcatttaaattttattctttttttcttagattggatggatccagtccaatccaatacatactggacttaaaatattaaatggatccaatccgatctaaaaaatattaggtctaaaacttaagataaatccaaatgaaacgaataaatatatatgaaatacatccaatagatatatgttggatcgattggatgactgaaattaattgaatcagatcagatggtaaaatctaacattcaatatataattggatcggatctggatagacctaaaagcattgaatgtggtataatgaacaaccctataaacttcaacaacataatttgttgacaaactcacaaacgttctaactacgtaaaaatcttaattttaatatttatttaaactctttgaaatctccataaaaattattgatataattgccaaaaaaattggatcaacacttatatttattttttttaactaatgaaaatattagttttaagattgcaaattcacattctcattaatttttattagactattatttatgtaaaagctcgtttggtacgtcatattatattaattgcattgtattatattactattatttaatataatattatgtttggtattaggttgtgtaaagttataatatatttttaataaactcaaccccaaaacaccgaatctagatcgggttcgatgtccagattcgagtctggggtccaagacaagtcccgatatggggtttgggtccgagttttggggttcaggatgtaaggtcccgagtcctgagtgtcccgagtctgggttcggatctcaagtcccaagtctgggtcccagtcccaagtttgggtttgggtcccgagtctgggtcaaggtcccgggtcgggtccgtgcctaggatacggtcttgggtcttagtcccatatgttcgagtttgggtctaggtttgaattcgggtcgggttaggttcggatctcaagtttgtatccaggtgcggggtttgaggtccaagtctgggttgacaccaaatcttttataaatattata

SEQ ID NO: 218465 - DNA, 1738 bp, Cannabis indica
ttagtcttgttttaacatgaacgcaccctaagcttgtgagcttgtgcgagtatacaaacatacaactcgcactatgaaggtcgtgtacgttgctatattttgtaaaacagattgaaactgttcttcatttattccatttatgtttttcttaattttaatgctaatattcaatgtaaaacggttcaataattaagttctgcgtaattgaagggacgacttgctttgtatataaaggagtgatccatatgataaacaagacaataatccttgcaatattttttttttttttttccaatttgtctgtatagcttcgtttgaatactctccattctaagttgagtgttcgctcttttttattaaataattatatttttatttctatttggtgttgtcaaaattcctccaacaacaaaattttattctgaactatgactaaatgtgcatgtaatgtaacaatgtgagctacgttcaaatttaatttgtcattaggatcggaaccaaataatatttttaaaattaaaacatgtataaagaaaatatactatatcatgtggttctttattacatgtcacatttttatcatttttttttgatcaagaagaaaaaaatttcattaatcaccaacggaagaaatctgtacaagaaaacaagcaagggtcaaaatcaaaataaactctctagaaagtttctctcatgccccctcaaacatctatttttaacaacttgtaatctgtaaaatataattctttttacatcatttacaatagagttgacaaatttagaatgcctattaaaaatacagttttttctattagtccaaagactatacattgttgcggcaaaaacaacatgaactctatacactaaattggtatcccataacaagagccagctcttccaacctgttgcagaagtcggccaagcctgattaccaagccaagaaaatatttccttcaccactctgctcgacaaaacacaatcaaagaataaatggttatgagtcttagcttccatttcacacactgggcactccaaagaattaagaacaatattaaattgtatcattttgttatgcgttagaagttgagagttaaccacttgctaaaggatgaacctgtgtttaagtaagtttaaagagctccaaacggctttgttgaagaggaattgctgctgaggtaattgattattgtataactaattaattttgaatttgttgcctaccctgccttttgaatatctcctcttgaaaacttttatcattttcaatacatacattataaatttttttattgacaaatatatgttattaaattttagatggcaaactatcatggttctctattttgttttatacatgaattagtataactttgccttcaaatcctccctcccaatgtaaaaaaataaatatacataaattatatatatattttttaagaacctgtgaaaattgaaaccaaacaaaactatgttactctctgatcacatgcacgtacttgtaacatcactatcttttagtacatctattgatctataaacttgccaaattatggttcgccttatgtgtaaatcttaaaccaaatggttaaagaatagaataacatatgatcgcatttattagttgatttgaccaaaagacattgaattttaattttggctcaaaattaatccaatgtgaagaaaaagatatttttatacaaatgatataaaataaaaagtaatgtatgcttttacaatt

SEQ ID NO: 218466 - DNA, 3593 bp, Cannabis indica
atcatggtactcacccgaacaaaatttgatctacactttactggtcctagcaccaaagtagggagcactagtgatccacatgaggcgactagccatcagaaacatcaatgtgatgaagatcagattcgagacgatctcataatcgaagatgtagagtcaagagagaatagttttgacgatgttgaggatgatccccatgatttacccaaggatgcacctgaagatgttcctcaggacaagactgctagagatgatgttggagggaaggaccgacctgaaaaattagaccacatggtcattatggccaaaaaagtttagttaacagaaagtacgttgtctcatcaagaacaattcaacgagatactggtcaaaaagttgacaagaattgaggccgtgatgacacccatgaccaaaggaactcctgatgtacaaacacctccaacaactgatgctcctaaaagagtttatccaaaagatcctggaacctcaaatcctcgcaaggataaagggaaatggatagccagtgaaacttcaaagaagactccttcagccaagcagcaaaaaaagtccaaaaatgtcaaccaacctcaatagaaaaaaaaaaggaaaccatgcttcagtacatggtgacaagactaattttagaggcagagtcacaaaagaataagactgatgccagagtcaagaagcctgaattctagaatgacaaaaatcaccctagtgatgatagcaatcaagatgatgatgtcgatgaagtatacccagtttcatatggcaattgtggaagtctctcacaaatgatcttcgaagaagattgagtaagaaaaagaaagagccaaagttgaaaaagctagaccccgtgagaacgatttgagaaatcatatagatgattgcattcgcggaagagtcttcaaatgacaaaacttaacacctggaatgcaaattcgaggagttgatgaaaatcacggagaagatctctagaaagcaaaacggtactgagtcaaattttgaggaggatgatacagaagcctgcgtgaatagaattataaatgcactactgccagagtgtttcagaatgccttagatggaactgtacgagttaggtaagtacaaccgcattatgcaagttgccaaggccagtgatgatgcaaaatacttttgcttcactaactttgagtaagtccgcgaaagataggtggaaaagactatctctaggatccatctacagttgcaaggacctggaagcaatgttcaaaaaacaatttgtggcaatgaaggagttcgatctaaaaagttagctccctgaccaatgtcaatcaacaactaggagagaacctgaagaagtacattcaaagtatgatggatgtagcagcaaaaataaaagttactgatgaaatgaaggtggtggccttaacattaggactagctactagatttttgttatgtgaagatctccaatgtaaaagagtagatactttgacttatttcctagcaagagcccaaggattcgtaaatttagaagatgcttatgcccacgcatacagagtacttccaacactttccaccgatataccaaatgcctaaacttcactgatgactgctccatcaatttttccttcggaaactacctttacgactccaacggtttacggaccaagtgcttttgcacagccagttgcacatgctagtttttctaggtttgaagttgtacaagctagatacagtgtcgctcccacacaaacaaaccaaaaggcagaagctccaaagtccaacgtaacacaaccatggagcaagaggagttcaaaaggtctaaactggagtgtttctgaaaagaaaggaaatacccaagggccaagatactccgagtacacaagtcttgtggatactcgagagaatgtttataaggctacttgttacatggtccattacaagaaggctccgccaatgtgtaagggcagaggataaaaatgagacccaaacaagaggtgtgaataccacaacgatataggacacaccaccaatgagtgtgactatctgaaggaataaattgtaggattggtacaaaacaaacgtctgtcctattaggtgagaattctagtcatttatccgagacagggggttgcacatggaaaaattttcattccgagatagcatggagccattaatcctcctcagtgtaggccatccacaaactcctagaattcaagcttcaaatgcacaagcccttcagtgggcacaaaatgctttagcagtgagaattgttatagcccccgatcctggagacccatatcctcctggagtagcctagcctacattagatggtcatgtagcaaccatttttggtggaccacatactgctagaagcactcgaaacacacaaaagaggtacttgaatgaattggatcaggatgacacatgtaacttggtacggtcacctgcacaacgtcctcgaatgatgaatttaccaatgaatttcaaagaagatgatgccaagcatgtgcatttccctcacaatgatctattggtgatagaagcatagatatcgaatagaagagtttctaggattctcgtagataatgtaagttctgtcaatatcatttttaaagatgccttcaaagccattggtctggtgacagccaatctgttaccttgtgcaattcaattgcaaggcctcaatggagacacgctggtcctaatgagaaaaatacaacttccaataacaataaatggagaagtctctggaagcaatgcaatatcctctttcaagtacaacacttttgtaatatttgattgtccaacagcttacaatgttattctaggatgaccatttctggttgattttggagagtgacgtccatccgccacttgtgcctaaagtttcccaacaataccggaagcattagaacaatttgaggtaattagaaaagtgccagaagctgctataacatttcaactaagatcattctcatggtccaggtcggaaatgtagcagaagctagaacatcttcccagctagcactggggtggtccaagaagaatatgtgttagatccacatgtaggcgtggaacgaacaataaaaactatggaagaggcaaaagaagtaggcatcaatgatgaagatcccactaaagttattagagtggggaagaacttaattctggcagtgaaagaaaagattatttccataatcaaggaaaatagtgatgtattagcttggagtcattctgatatgactggaattagtccccgagtgatttgtcatatactgaatatagatcccaaagctaatttagtttgaccaaagtagagacctttagacccagtgagattggaagcactgaatgctgggttgtctgccttaaataaaactcatttcaataaaatcatgtttactaattaataaaagatcaaaaatcgttttatgttgcatgattgacatgatttatttcttgattatgtttaatgtacaaattctattaagttcagaacatatatatacatatatatatatatatatatttgttcatgactacagtatcgtcaggacagtggaatataattatgattatatgttcaaaagtttaattcccat

SEQ ID NO: 218467 - DNA, 3718 bp, Cannabis indica
acttgttattaattaatttctttttgttgtcccattttttatattattattatttttagttttgctaataatgttagaatatatatcattcctcattttctgacatatggattgctggggttcacagttacttaaggagaaaggtcgtctaccagcactcagcctccaagtagataacattgtgtgcgctttagatcacgatcttcaaggaccagctgccacagttgctaccatactcagggaaaaaggtcaaactgttgatttagttctcgagaacaaaccccttaaatggtaatattttctgcctagcttcttatgcctaattatgtccaccatatctgctgttttatattgctaataaacttatctcttgcagggtattcaaacgagcagcacgcataaatgctgagaggctgatattggtgggaagtgctgagtggcagcggggtatggttggtgtgaaaattctttcttctggtgaacaacatgaaataaaacttgacgagctagagtgaggaattagaggatacctagtttttaatctttattatgttcaattatcataggttaattaagtctggctcattttttttttaatgaactattctttggttgaaaatcatctttatttgaaaatatttttggaggacgatttgtgaaatttattgaggttgctgatatttaaattatgaaatctactctccatgaaagtgagaattccttacggtgtacaagacttgcagattcaaagtttggcctttaaggctagtttcctttggccatctgtttgatactagtagtgcactatacttattgttactcaagtatttcttcctctgcttggtttgactaaaattttcagaaaagcaaggcgcttatgtttcttgagcgataacagctgtgataatgtaagtacaaaatgtattattaccttactttcatgcgccttctagttacccctgagaaaacttgccattttaagaatgtcttatcatatgacggcctatgtgcttggacagaactatctcttttactttctgactggtgattgggttagagaatctgcatatgttaaattgagtagtttaggtatggaataggtgtaggttagggaaagagcttggctcttgagcttttcttatgcttcgaagttggactcttgcatgagatttgagaggaagaatttagttgagcagttccagaaaacgagaaattctatgaaataaaattctaaatacccagggaagtttcaagcattctgaaatttgcagagttagataagcccatagaagtttgaagcattctgaaatttatgagcactgaaaatgttgctagtatcctatactttacattttaatcaaagatcaccatttctttttcttcgtttggagatgtaacactttgtttatttatgatataaattgaaatgctacaatccatttatacataataccaaaagaacttgctgtataggtattatttcttctgatagaggacaaattattgtgcatttgttctataatttatacgattcaaaacaaaatagtttgcattttcttttacctagacacttaaagctaaggtagaataaggaaaagtttatcacatgtgcaggttgatcacctctgataagtactcaaccacatcatctgtcctgtcctttttacactaattaggaacaaaagttcctacatatcctaaagccattataaagaaatccccagcttgcagtaaaagataaaagaaaaagtcatctttcttgtatagtagattgtagactgcacatcgcaacataaacattcccattaacagctctagtacgtgaattctgtttcaagataattagttaaaaaatcatgctagaatagtgagaagagtatcagctaaaagtcagtagtttcctaggagaagaaagaaacaaaaaaatagcagccagctattttaatgctagggagtgttatactcagagtaagagaaaaaaatattggaattggaaaaaaaataataataaaaagtaagaaagtaccttctgctagtttgaggtcgtggcttccttaggacatggttgaccaaatcgctctttggcttcactgtgttccaagcttttctgttgcagccccttcatcaacccagtttgcttctaagagtcctatgattgttgctttagacagatggattgacatgacattctcaaacaagatccaaaacacaaccaggtgtaaagatctgcctcgtggtaagtattttcacattattattgctaacattaaagaaagtaaaaataaacctctgtttgtcttcagatttctaataccttggggtgctgactgcattgagaatcgtgatgcttgctggaatgtaaacagcaagtggctttgagatttggacttcaggaacaataacactggctggtataacaatgcagtagaagaagaatgtgacccagtgagcaacaatcttcctcacgaaaaagaaagcatatatagatgtagtctcttctagattgacaccctctgcgtgatatatgaaggtacgaagcgatctttttctagaacaaagcctaaatttaacccttaataattttatccaagttgggcaggtgtgtgtgtagtatatattatatgcaaaattattttggattactcacttcgtgaaggatgatttcttaggatatttttcttaagaagttaggtggaccacatgaccagcggtgttactggtatcgatgtgccttaaaagtacttggtagttcgatttttaacctagcaaaataggaactataggttggtgaggattgatgtgcttggtaaagttagaaaaagggttgcaggcatcaaaagcaggagaaattataaactttactcctaagtccccaacaaagataaccctttaagctaattctaactactagatccatgtcttccactgtggttcgatctttccatccaccagcatcttttatggcttggattcgccacagacttgtagttcctgtaaatgtattgtgaagacaaagtacatattcatagtttgatttcatccctaaattaaaggaaaagcattgatgtggtttgctattgaatccaaagaatgaacatgttgatgaccccacttcttggtcaacattgaagtgataatcgagtgacatttccctaagtcgagtcattagacattcatcagcattcactgtagagtaaaagaaaacaaattcaatttttagattattaaagttagtcccacattgcttatgtatggaagtaaaatatcatacataagatgaatgggctactcctcccattgtcaattagttttgagatggaaccccattcaccttatcccaaatcctaacatggtcttagagccacttgtggtccgttgtaagctcaaagtgctactggtctaaaaagtcgtttgtgatttgttgtgagccaagtgctgccggtccaaaaagatattttcgttgtttcccctttaacctccatttggaacctttcgaccaatgtgtgctaatttccagtgttgaggtctttgactttttcaaaattcacaaatttcacgacgtgtacacccacaaatttctcgatatttggccttgtgggattctttcatatgtcacgttcagccctgtagtctcttaaaggttgttcgttatacctacactttccaggcccaaacgcgaggagggtgaattagatttagtcccacattgtatatgtgt

SEQ ID NO: 218468 - DNA, 4062 bp, Cannabis indica
tttctttttcatattttttatttatttctcttctaagtgatatttgatataattacccaaaaaaattatataaaataataaattataaataatgatagaatagaatttaattatataattaaattaataaatctataatcaattcttttataataattaataataatataaacataaaaatgttatgttttaaattatatcactcattataagtacaacatatatttatatataaagattataaaaatttgggaagaccgcacgaagcgcggcttagttccctagttaaaaatatatagtatttattgagcattaaatacagaatgtacagattattaattattaactctgatttaggttagcaaaaatttgagttaatagtttggtgttttcattgagtctttgataattaaaactctaaaaacacatctccctacccaaacacaaattttctattgtggattctacaaactgagacattcatgttgaacaagaagaaactattcatcgtcttggaaaggagcccaagacaacgccataccaaaatttcgaatacaggaaaagaggacatcctgaatgggactttgaaagaaatggaaatgaataaaccattccacaaataaggaatgaggaagcaaataatccaactagtggaattagaaaattgccaactttgacaaagtttggtcgaatcaaattgaaggaatgttaaattggagcgtgaagtcactacaccaagtgtaggtgctaacaacacgcttgtagagaaaattgaacccctaataagacgaccacgaggaaggcctcatggatcaaagaataaaagggcactaaatgtccctatcaaagggaacaatgcaaataattttgcacatccttaagagcaacaacctagaaatacaagggaaggtcccattgacaaagaaattctgaaaaaatctaaattatctaaatctaaggcaaacacaactcgatgttccgaaaccatctcataggaatatgagaccccatcaaaacaatagataactcgaccctcgagttatcgtcaaccaccgcgaggcccataaaggattggaagaagttatatgtcttatctatttgaacgattttagccacgaaaagagactagctctcaaaggatagactcaaatactgttttaagccaatcttcaagatcctatacgagggaggttcttcgtcaaggaaaaaataacatccatcataataaccgtgatgaaaaaaactagcatgagtaacttacaaagttattaatcaatacgtgcctcgcccatgaggttagttagttactatactagacgagaaatgcaatgtgaacaccgaagtgaacataacctatgagaatatctaaaccgaaggcaaccaaatttacatgattacttaaatcacaatgctcctgatttacgtgagcagttaaatcgtattgccgctgacgtacatgagcgatttaataatcgctctctagatggtcttatacaattgtgggtcatgcagttggatgaatagtttcgtaaatattgagacagagagtatggaaaactacttggatatgactcgtatgaggattttgatgttggaacttattttaccagcatcataatttactaacatgtatgtttgattataaatctataatctaacatccaaaatatgaaattcccaaaatgataaattaaacatgtaaaagtgtagtcactttacattggttgcaatgaaatataatatctcatttcgtttagtactctaatccttgttcttttctattgtagattagtaacaagtactgaacttgaatctccttccttaacctaaaaagcgaaagttctttacaatctttcacaaaactctaagtaccaccttgaatagtgtgggttgatgctcaactcaccattggaacacattgcgggagtgaaataggctatgtaatttttgaattagagaaaccagaagaaaagagcttttctgacatagaattagggttttctaacataggaagctttctctcatcaccttatctatgtagccttcacttagggttaggtttacaagagatgggccaaaataaagataattgggatcaaaatcaaccctagggaaaaattcaactctaggaaacctatggatttgatttttgccactttattttatttaaataaaataatgtgtctttttcctattttactaattgttatacccaaaatttggctatgtaccagaagctgacacgtgtcctacagaaggaatgtgaatcaactcagagagtataataatgatgtatcattaaatgcaatttaaataacttatttcaattaaatgtaagtttgatagaaaatattcaaactcgttatctgcttagtcttatgcgagacaagaacaataactattaaactggtattgatgagacacatgtatacctcaggacaaacagagtagtaaaatgtgcaagacgagacagtcaaagaccttaaccctcttgaaaagagaagaacttatgacactcaaccgcctcgtgttatttatagcataatgatcatctcgcattacttataccaatgaagggatataacgagatgaattatttccaacatttagcgtttaatcctattaagatggagaggaaggaaaactcatgtctgatgagacacaaccttccaagtcaggataaccatctaatggataaaaataaagatcagttgggtagttattagatattatcctatgtatgattaaatgaaacgtggggattgtccacatttcatcaatagttgtaaatgaatcaatcccaaaagaataactgtcaacctatattcctataattaggggtagaattcattggaaaagggacgacaaaattgagagagaaaatcctattattcaaatattgttattgtactctgtatcccagaagatatccctaataataaggactcgtggagtatgtagattttgactacaaaactacgtaaaatatttggtgtcattttatcatttattatatatttatttctatagtgcatttattgcaaaaaggctattaatttggttaacaaaaatctgcgttaacagtttggtgctttcattgagagccttggcgataaaaactcagaagaaatccctccttataaacacaatctacccatattcaatggctaatgatgatcaacacaacaatagtcatcctgaggaaacaacccctctctccagcaaagaacccatgggatctcaaagacccaacacatctgaaacaccacatgcaaggatgaacgatggtaatgatgattaaatctcagaaaggaggagtgagaatgcctataactctgccagatatgtgcctaggagtgaggatgtttatcacccaaccagatatgtgccattagtggagttggagaagaggcaacttcgacaatgtttggctgaatcaaaccaacgaaatgctgagttagagcaagaggctacgacggccaggactgcacaagggacagttcctcagtaccaacatgatcttacagtaatgagatcacgaggaagacctcgaggctccaataccaggaggtaggaaacaaaccaagggaatccccaaaatacctaggaggagcaacctgggaatacaagggatatcctaatgaataatcaaccagatcctaatagtgcaaggaatcaagaacattgacgagatgttccacaaacttcccatggatttgttaaccaagggaatgaacgaattgacatgccagaatcatctcgcatgaatgattaagcaaggcctccttgatcagggaatcgaggattccctcgtgataatgagagaaatcctagaaaccaaccaaggtcgagtggtcttcctccaagacatcgtcaacgtccttctcgcccaaatagagaaaatgcacatatgtacttatgtagaggacgtgtatctaatctcttccaaagaagaacgccgatgcgagacgaagcaagctcaagcacggtgaaattttgtattttaatattttcagatttattatttaattaaatgtttaattaaatgcggaataatgaaac

SEQ ID NO: 218469 - DNA, 3625 bp, Cannabis indica
aaaaaagaagatattcgtagggtgccagtgtgggttcatctaacagatctagaattgaagtattggggaaaaaaatctttatacaagataattggtcaagttggagaatcattgatggttgatgatgttactagagaaagaggtaagctgagttatccaagagttcttattttgaggtttccctgacctcatagaatttgaggatgaattcggtgctaaagaattaacaaaaatgctaaacacaaaaatacaaccataaaaacaatactacaaagtagtgttacattccatgcaagttttgtatctccaccaacgttacatgagctcaaatccaacttattattatccaacgacgtcgtttcgttcacatattgtatcttaacattgtcgcaaatagccgtgacagaaatcacttgtttagacttagtatgatcacctttatacttaagtagaattcgatactcaaaccacatcttacttggaacccataaaacatcaccactactaccgatcttgtcgttattggtggtgttgacgccatttgtataattaggcaacatcaagctttttagagtaatccataaagtggtattttctttactctctaactcgaaataattagggttgaatatattgtctctgtctccatcgactatgagtggaaaccaattgtttgcaagtattgtaaaggcatgggacatgaaacttctgaatgtaggaaaaaagaaggaaaacaacctgaatggattgttaagaaagataataggaagcctaatgacaattcgaaatagcctgtaactaaagagggagagtttcagccagttgtgaatgggagcaaaataaaggagaaagctcaagttagcaatacagaagtggcaaataaatattagcttttgtctgaacaagatctgaatgaggaagaacaagctgttgtgccaggaaaacagagtaacacaggaggaggggggggggggggaggacctcctacttccaaattgggagccttataccaataaatgtttcaaggatggtgctttacaacaaatatagcgtggcataaaggaggaaggataattgctgcgtggaatccattacaatttcaagtaagtattcagagatgctcgagtcaaataatacacttaggaatttgcattgttggaaacaacttgcaatttcagttaatttttgtctatgacttcaacgatgaattgggaaggaaagatttgtggctggaattaaaagaattaaatacaaaggagctgtgggtagtacttggtgacttcaattctactttgcagattgatgagagaattggggaccaagtaaggaatcaagtctccaatgattttctagattgtgttcacacatgtaatttagaggatatgcagtatagtggcagcttatacacttggagtaataagcaacagggtcatgatagaatctttgcaaagttggacagagtcattgcgaatcagaagtgggtagatttgtttcagcaggccgaggctctattcttgaatgaggatctctttgatcatacaccaacaataattaaggtttatcctgatgctcctaacaggaagaaaccttttaaatatttcacaatgtgggctatgcatccgaagtacaaacaagaagtgaagcaggtttggcagcaagaaattaaaggctctaagatgtatcagattgttactaagcagaaacaattgaaaaaagttctcaaagagctgactaaaaatggcttctccgagatacaagcctcagatattaaggctcgagaagctctcaaattcagacaagagaagttgcagcaagatcccctaaatagtctgcttcagcaagaagaaaaggaggcaagagagcattatgctgtaatttataaagcatacaatttgtttatgcaccagaaagtgaagatctcatggataaaggaggggggatcaaaactcaaccttgttttatagtcgtctaagggtaaaaaagagacaatacaagattttatcaatagatgatggggaaggaaaccgagtggagaatcctgctgctattactgaggcatttttgagattttatcaaggggtgcttggaacaaaaatgcaaggaagaataccagtaaataaaattgtgatggaacaaggggctgtggttactaaacttcatgaagacatcctcaattgagattgcacaagggaagaagtcaaacaagtagtgttcagtatccctgggaacaaagctcctggacccgatggatacagtagctcattcctacaggaaaattgggagatgatggaagatttgtatctagctgtcaaagaaaccctgcaaactagtcatatactcaaggagctaaattctaatgtgcttactttgattccaaagaccaaatgcacgaatattgtaagtgattttagacctattgcttggtgtaatgtcctctataatgtcattaccaagcttctttgtaataggttgaagatcatcttacctgatttgattgctcagattcaaggaggttttgttaaaggaagatttatagctcacaatattatgatctattaggatcttatcagacactatggaaggaaatctgtaaagtctaattgcatgattaaattggatcttcaaaaagcatatgacaccttagattgggatttcttagaggaaatgcttataacctttaagtttccttctaaggtcatcaatttaatcatgcaatgtgtctctacagccaggttctcactgtattttaatggtgtcctgcatggattttttggtgctaaaaggggagtgagacagggtgatcccatgtctcccctactctttgttcttggcatggaatatctgagtaggattatgaagaaagtgggaaataaaacagagtttggttttcatgaaaggtgtaaggatttaaagctcaatcatctatgttttgcagatgatgttcttctttctgtaaaggagacttgcaaagtatcagattgatgcttcaaggcttgaagctattttctagaatttcagggctttaacctaataatagcaaatatgctatctattgtgcagggatgtctgaatttgagatttaaaaggctgtacagctctctggtttaactagaagctctataccttttaaatgcctgggagtaccaatatgctcaaagagaatctcacagaatgagtgcaacactcttgttaacaagatgacagctcgcattaaaacatggagcatcagaaacatttcatttgcagggagtgcagtgctcattaattcagtgttgctcactattcacacgtattggagccagattctagtatttccaaagaaagtgattgctaagattgaaagaatatgtagaagctttctctggaaaggttgcaacaacatgacaggagcaggatcagtagcatgggagaaagtctgtcattctaaagctgaaggtagaattggatttctaaacatcagcatttggaataaagcagtattgatgaagaatatatggacactagctacaaagaaagacaacttatgagtcaaatggatccatagtgtttatttgaagagtggagattgttggagccacaaggcttccattcatagcagctgatattggaggaagcttgtggaaat

SEQ ID NO: 218470 - DNA, 3619 bp, Cannabis indica
accatgtaaatttctctttaaaaactgtttgggattttttatacaagaattttatattgggccaagtatattataaatgaaaaacgagaaactcttaagtaatatgaaactcaataactagcacaagtggaccttaaaaaaaaattattgagccctttattaaaaataatgtgtggtattttaaatttttttaaaaaaatatataaaataatttgcagtatatatagttaagtttaacttctaattataaataaatagttaagtttaatttttgacaatattaatatatgagtaatatttttggaacttccataagtacctattaagtgtaaattcaatggtcatatgatacttttgattggttcaggtgactaaatttttttaacctttatataagaattcatttagatatactagtaaaaaaataataattggatattgatttgacacttagttatgtatttacgcaagttccagaaatataacttatgtattatttctccaaaaaattaaatttaagtatttatttgtaactaagagttaaacttaagtatttacgcagtaaattactcaaagaaaatatatatttaaaaataaaacattatttttgggccttaaatgggcttacacgcacctttaacccgcattaacataagctcacccttattattaagaaattatatagggtaaaaaattatgcatgactaaccacaattttattcatttttccaataattataacataattttgcccttattgtagtgagtgagtagtgaggggtataaataccttttagtctcccttgagattcataattgacttcttttccatgagaattagaaacgattataggtgatatgtctcctgataaaagtaacatcaattcaaattcagttaatattttgatttgatctataatgatatttatgtatagcttttgaaatagtaaaaatttattcattgttttgtgtaatgacagagtataattaccttttagtctctcgtgtgacccatcattgattttctttctatgagaaagagaaagagttataggtgataagtgttctaaaataaaaaaaaaagtaacatcaaatcctaaaattataatatgtgtattcaatactctcaaaaaaaaaaaaaaaaaaaaaaacaaaatcatctataattacgtaataatgtaaataattttagagtgatagttgtatataatttttgaactagtaaaaatttagaagagagttaattataatttcttacctctgaaattatatactagaatatttttttaaatttttgtttcatagctgtatttgttatagttataacataatttcggtaaatttttgaaaaaaattgaataatttactgtacattccagtctgtgtgttcaaagtttgaatttatttttggtactataaattatttaaaatttccgtggataatattgtaaatattcaacacttattttcaagttaggtaatgagattaactaagaaattgtaatggaaggttgagatcaaaaatttattcataaatactaaaagcatttatgtggtactaaacgctgtaaaaattaacattaaactcaaccattattattataaatttattcgttactataagaaattgatttggtgtatagttaagtgataaataaattaattttagaatgataaattgtgaaatattaaaaaacatttacaaacaatgtgtgactaacactacttgtataaaaaatagttagaattttagacaaagttgcttctcaattcttatttaccttttaccctctttctaggagaataagtaactatatttccatagtcgcaataaacgttcatgtgtttagttgctcctgtaaaagttaacattaaactcaactattattattacaaatttattcgttactcaacattaaaatagaaattgattttgtgtatagttaagtgataaataaattaattttagaatgatattaatataataacttgtgactactaaaagttatctacaaacaatgtgggactaacactacttagtacctgttagtttgttatgttcaagtctttttctgataggattaagatcagaaagatagctaacctcttcggcttcattataggaagggggaataataacaaggtcgtttgatgtgttgatgctagaagaacatttaatactttctgcaacattattgtgtaatgttattgttttgtccattgattctgctgctgccgaatataatggtgagtctagtgatatatcactcccaaataaccttataaacttgtttggaccaatatcattatgcacagaagtgttgtttttgcaagttcttgagttatgcccctcttcttgacaatgtctacattttatacaatagtttttcctcatcatttccaaaagaagacactttgcacaactaggagtagaagccactttgttgattttgtgaggcaaattgtttttttctttctctctcacgtatgtttctgccaattgtcaattttttttatgaatgccaagcaagtgtcaatggttaatttatagatagaaagtttccacttttcaaatatgatatgacacgtgtgttatcttagcaagcaaactcaaaaaataaaatctagataaacaattgtatctaaaatctaggaaaacttcgttccaaattttattatcttatttaaagataataacaattttttaaaaaattatatgctttcaaaaacctgtaattttataaatatttgttttattcacttaaaattattattaaattactatcccttaattatttaactttaaaacagtaaatttaaagtaatatcttcgatataaaaataatatctagaaaaaaaattgagtaatctgattcgaagtcaatctggaaatgttttgttagggaatgttcaattgttttttatattattattattatcattttttttagaaagtttattatttttatttaaacttataaatataaaatattaaaatataataaaattaattgattataaaatttacatctaaaatattcgaaatttgaatgataagccaaatatctatagatagttaaatttgtttgtttcctttttttataattagatagcattttctctaaaatggataagatagtataattgcaaatatttaaaccaatacttcttaaaaagatatttatgcatatatttatatacttttctttatacgtactgtatatatagaagaagctcaatttttttttcaccttacctacggctaatagtttatttaacattttttttaattagtaaaagaaataaagtatcccaaaaaatttaaatttatatgcatatatattaaatttttgaatacaattttattaaaataaaaaaaaataaagcaaattttatattcatgcccataatactttcttctcttttttttttctttctaactttattatccatattctccattcctatttatactgatcgtggtcttataagtcgatgctacccatttttctttttcttatatttttctcccttgcttttgcaaatcgatcaacaacgatcgtcatctaattcgtttgtgtgtgtgaagaaattgagcgaaggaaagatcggtagcaaa

SEQ ID NO: 218471 - DNA, 2744 bp, Cannabis indica
attcccatttttctaagggacaaccctgaaggatggatctatacaggggaatggtacttcctcatttctcggttgagagagccgctcatgcttgaaacatccatagtcaacttggacggagatgcccttatgttgtttcagtaggagagtcaagggagacctgttacttcatgggatactttgaaacaactttctttccatcagttccatatggtccccattgggtcggtggtagaagagttcttgtccctaaacaaaaccaccagtgtgcaagagtattgatttcaataggaagcaccgacatcgagtgttccaagcattatggagcacatcttggaaggtagttttgtaaaaaggttgaaagatgaaattaaaggagatttgcacattttgcaacccatgggatttgcataaatcatggaaacatccccaagagtggaggagggccatcacctatttccttcgggtcaactgatccaactaaccaaagccaatagaacccaaatacagcctctcacccataccaaaaatatcccaaacacttactagtaaccaactccacttcatttgcaccaactcaagacagttccacaggaaaactcttaaccttttggaggatgtcaaaatcacagtgtcaagataagcatctcaaaggtgtttgctttctgtgtgagaagaaataacattggtgtcatgtgtgtgaccaaaagttcctttaagagatgttgtttgttgatgaagatgaaccccaacttgatgttgaatccccgcctagcggctactaaggagaccttggctatgctatcttgaaactcccttgttgagatatcattgacccacaccatgaagcttgcaagaaagatcatggagcttttgattacggttctcattgaaagcggtaccacagaaaatttcatttctaggggaatagtggaattgtcaagactacctatcatataaataacggggtatggaatattgttaggcactaatgattggtcaaagttgaaggtgtttgctctcaagtgtctctagaattaggagagatatgtgtggtgactaattttttgctgttggagttaggaggggctgaagtgataatgggagtcaaatggataaagaccttgggaaatatgcaggacaattggagaaaattggtaatgaaattagaatgaggaggcacttgggtagccttgctaggtgaccctagcctctgtaagtcaactattaaagccatgatccatattgttgaacaagatggatatggttattgagttcaatttggggcaattcagaagacatcagggaagaggagtgataaattttggttgtgctggaggaattcctcaacaaatatgacttagttttccacatggctctgagtctcccacaaaaaatgtctcgtgaaaattgtatagtgttaaaagaaggagtggggaaaaatctaagtgcacccctatcgttatgctaaaattcagaagaatgagattaagaagatggttcaagatatacttcaaataggaattgtgattctaggactagcccttttactagacctgtgttattagtcaaaaagaaagacaaaagttggcgagtttgtatggactatcatgctttgaatagagagattgtagtagaaaaattcctaattcctgttattgatgaacttttggatgagctctatagaggaagggtgttctcaatacttgaccttgaattggggtaccatcaaatacgagtggtagccaatgattgggctaaaacgatatttggaacacatgaaggacactatgagttcttggtaatgccatttgggttgacaaatgctcctgccactttctaggccctcatgaatgaaatcttttgagatcttctttgagaaattgtgcttgtattttttgatgatattcttgtttgagctcaatgttggaggaccatgttagccatttggaagaggtgttgaaaggcctacaacaataccagttgtatgccaaccacaagaagtgtttatttaggcggtcaagcttagagtatttgggacacataatctagggttaaggggttttattttatcctcacaaggttcctaccttggttaaatggttagttctaaagactcttaaggagctatagggcttcccttgtctaatggggtactactgaaagtttatcaaaaactatggtaccattactaccatttctcgacctttaacgaatcaactaaagaaatacccttttggatggacactagaggctctacaagcttttgaacacccaaaagaagccatgtgtactgttctaatcctcgctcttcctgatttttacaagccattttagtagaagcagatgtcttggggtttgatttggtgctgttctaatgcaagatcaacgactgatcatatactacaattaggttttacctaacaaatctcgttccaaatctatttgcgagagagagttgatggccatcgtgcttgctatccaaaagctgcatccttatttattagggcacaaactccttgtccgaactgatcaagaaagtttgaagtacttgctggaacaaggattagtggctgttgagcaccaaaaatggcttacttagatttttggctataatttcaaaatacaatacagacctgggttggaaaataaggctgtcgatgctctccctcttctctaaacagaccccacttgtggtacattatcactcccgaatctaccggctattatggatcttcatgacc

SEQ ID NO: 218472 - DNA, 6239 bp, Cannabis indica
acgcagcgactgccggaattggagagaggtgagttctggtttgcgcacatctcgcagctgcttcaatcaactcagaacgttggagtggccagtacgagtgccgcggatgaccgacacaaacgagcgatagacggcgattcttcggcttcacatccgcttccggctgctccatcgccggtaaggccaccaccatctcggtcaccagagccaccgattacacagtcagattttaatcactcgcgtgattttcgcccacctcgcatcgagttgcccttgttttctgggcgataacccagatgggtgggtgtttcgcgtggagcgattcttcctcctgaatcggttgagcgaagcagagatgttggaggcggccatcattgggttggacggcgatgcccttacttggttccaatgggaaaattctcgtcgtcggattacttcatgggcattattgaaacatttgctgctgctgcgtttccgatctactccagtggggtcgtcaacggaggagctgttgtccgtcaaacaagagaccacggtccgagcttatagattgcagtgggagaccttggcatcacgagtggtaggagttcctgaacacgttttagaaggctgtttcattaaggggttgaaggaagacattcgcgggcctctgcatgtgctacaaccatcgggcctggcccagattatggacatggcccagagaattgaggagaggcattttctttctggtttgggttttagcaatcgagctggagtgggaaggacccacacaggcccatcaccgttgcccagatttttgcagccgtttcccagctcgcggtcgacccccgacaccttcgcccagcaaccggcattcgccaccgcccatctcagcgccgccgtctccatcgccgaccactcctccccctttgcgcaggttaacggagcaagaatatcaagataagaagagccgtggggtttgtttccgctgtgataaaaaatttcatcgtggccatgtttgtgaacagaagtcgctgcacgttatgttaattgccgatgagatggagggttccgagagccaagaatctgacccttctagcccagagtcagtggaggaaaccgtacaagatgaacagctcgcaatgttatccctcaattccttaagtgggtatatcatcagctcatacgatgaaattttagggtcaatagccgcacacccagtaacggtgctgatcgacagcggtgcaacacacgaattttgtgtccaaggatctcgtgacggcagttaacttggctgttaccgagactacagcttatggagttctcttaggtaccggtggtcgagttcgaacggagggactttgcaagaatgtcgagttggatctcggatcgcttcgcgtggtgactgattttctaccacttgagcttggcggagccgatgctattttggggatacagtggctgagtactctgggaaatatgcaagtaaattggcgtacaatggtgatgaaattcgaagtgggaggtacttggattacattgcaaggagaccctagtttatgtaagtcacagatttctttgaaggccttgattcactctgtccaacatgaaggacaaggctattgggtttaatgtggtgcgttaacggcggtgattgacgaagaatcgacggggattgaagcagacatcgaagagttactgcacaaacatgaagctgttttcgagatgccaaagggcttaccgcctcaccgttctcatgagcatcgcatcaccttgagagaaggggctggcccaatttccgtacgaccctatcggtatgcacagatccaaaaaaacgagattgaaaagctgctcgcagagatgttacaggcaggggtagtgcagcctagtaccagcccgttttcgagtcccgtcctactcgtcaaaaagaaagacgggagttggcgattttgtgtcgattatcgggcattaaaccgtgaaacagtggctgataagttccccattccagtcattgaggagctgttagatgaattacatggagcaaaaattttttcgaagcttgatctcaaggcgggataccaccagattagagtggcagcgacggatgtggagaagacggcgttccgcacccacgagggtcattatgaatttttggtgatgccttttggcttaaccaatgctccagccacttttcaagctttgatgaacgatgtttttcgtgagtttttgcggaaatttgtcttggttttttttgatgatattttgatctatagcacttccatggagcttcatttgcagcacttagatatggtattgtcccgcctccaacagcatcgtttatacgctaacaggaagaagtgtttatttgggcagtctcaactggagtatttggggcatattgtttctgcagaaggcgtttcagcagacccgctgaaactgacagccatggcagcatggccaactcccagaaatttaaaggaattgcgtgggtttttgggactcactggctattatagaaagtttgtgcgtggttatgggtacttggccagaccattaacggatcagttaaagaaagactctttcggttggaatgaagacgctcaagcggcatttgtggcactcaaaactgctatgtgtgaggtcccagttttggctctaccgaattttaacagcccatttatattggagacggatgcatcggggacgggtattggggctgttttgatgcaggaacaaagaccaatagcttatttcagcaaggcattatcacctcgtgaccgctgtaaatcagtttatgaacgcgaattgatggccatggtcttggctgtacagaaatggcgtccgtacttgttgggccgcaaatttattattcgcacagaccagcgaagcctaaggtacttgctggagcaacggatggtagcaacggaacatcaaaaatggctcacgaagttgttgggctatgactttcaggttcaatataaaccaggttgtcagaacaaagctgcggatgcactctcacggatgccagaagtaggggcttgcaacgccttatcagtccctaatttaatttcggttgtggacctgcaaaatcacgtcgctaccgatccacatctgagtgtcattattcagcagcttcagcaaggcaaagacgtgttaggatactctttttcaaacggctgtttgaagttcaaaggcaggctggtagttccaccttcgtcgccgtttatagcgctgattttacaggagtaccactgcagtaagataggtggtcatgcaggcgtttttcgcacattccagcgcattgccgctgatttttattggcagggaatgcggcaagatatccacaaattcgttgctgaatgtcatacttgtcaacaaagcaagtacttggcgcagtctccagcggggttgttgcagccgctacctataccggaccaagtttgggacgacatatccatggattttattgagggcttaccgatttccaatgggttcgattcgatcttggttgtggttgaccgtttatcaaaatatggccactttgtacctcttcggcacccatatacggctgctaccgttgctgcccagtttgtcaaagaaattgttaaattacatggcattcccaaaactatagtttcagatcgggacaaggtttttctcagcctattttggaaggagttatttcggctgcaggggacatcgctgaagtatagtacagcttaccatccacaaacggatggccaaaccgaggtactcaatcggtgtttggagacttatttgaggtgttttgtgagctctcggccttcgcagtgggtgaaatggttggcgtgggcggagtattggtataacactgcatatcattcagctgctggaatgacgccttttaaggctctttatcatcgagatccaccaccgctcataagaatggaggggaactgcacaattgtctcagctgtggaaaaaaatttacaggatcgggacaatgttttagagttgttaaagctgaatttacagcgagcacaacaaaagatgaaggcacaagcggacaagaagaggcgtgacattcagtttgaagtcggagataaggtgtacgtgaaactgaaaccgtatcgacagcaaacgttggccaaacggaaaaatcagaagctgggtccattgttctttggaccgtttccagttctggcaaaagtgggatcgacagcttacaaattgcttctgcctccggaagctaaaattcatccagtttttcatgtgtcattgttgcgaccagcgttaggccctcaacaatcagccattcctttgccgtcttcgttgactgaagaactggagtggctccttgaacctgaaaccatgttggctttgcgtccagggactcaatttcagcagccacaggtgttaatcaaatggctccatctaccagattttgaagcgacttgggaagactttaacacaatccagcagcaatttccggatttccaccttgcggacaaggtgcgtctttgggccgggggtaatgttagaccgcccttgacatacgtgtatgctaggagggtaaaaaagggtgaaaagagtgccaagtcagcaaaccgttaggagtgttttaatttactgtatgagggtacattgttagagtggtggggagtgagtatatgaggagtgagctgtaaattgtatggaggtgggctgtaagaagattgattgtatttggagagaatcccagctctcgaactctgggtatttcttaaataaaaagtcagcaagggaattcaaactttgaatccctagtttcattcatcaattgtgcatttcctctgttctgtaatctgcaaaccataccaacctcttgcctatgaccacaatatatatgagtacattttagtccttgttgtaatagaattattataaaataccaactctatatgtcaaatttattaatattcttgtgtgcatatagtatgtaaattcatttttgtaaattgtttaattactattttttggtaaaatctacagtacttgacagaaggaaagattgcttcagagtttaaactttaaaataattaaggatgatcaatatttgttgtgtggtatgagcaaagaaacaagggaccatttatcttttgaatgtaaaatgagcaatatatgttggtctaatataaaggaatggttgggctggaaaacttctacctccactccacggttccacggctactgaaatggatagatcgggcgaagctctctaagtttcgaaaacaggtgtttgttgcatcttatggtcatgtcaaaatgaagcattgtggaatcaaaggatttttatggtgacgttgctaacaaagagaatgaaactagatgtaaaaaataaagtgaaagggtttacgtctaaaaaaatataactaatagatagttaatgatttgctagatatattatagtaaaattaaagcaagcattttttatgatgatatatagaatgtaaacgatgtttgttgagcaatatataattctgatttgcccaaaataaaaaatctacagtacaatataaggattgtttcgatacactcctattcctccatttgttttttcatatagggtcagctctaaggtgaggtgaccaaaagtctgcgtcttggacccctgaatgctcaagtcttgaaattataaaaaaaaatatgatttgtatcaaattaatattcagtgtagtggtaaatagtgtcgtttcaaactatgagtatgagatcaatagatcgatttctaatctctacttttttatttgttttagaaatattaaatgtgtgcttatggaggatcaaggcttgaaacttttaagagtttttaaaaatttcattattgtgtgagagtagactagaattattattctcataatatttaaactatttataggtcccaaaatttaattatcttatatactatataccttaaagcggaccttgcagaataaaattttagtaaatatcaaaaaataaaataaaataataataataataataataataataataataataataagagttaattgcggtataacccttaatatacttatattttagtggcaatataactcttaaaatttaaattttgacggcaaacctttaaaaccagcattcttttagcatttagtcttttctgtctatttttagcagttaagtgctaggttggctatccatgtgtacataggatattgtccacgtggtacaatattattagcccacataaataaatctttaaaaataaaataaaaaat

SEQ ID NO: 218473 - DNA, 5351 bp, Cannabis indica
ctaattagtttgattggatgttggatgtatttgatttttagaaaccccacccaccatccgatccgatccaattggatatttaaaaataacatccaatccgatccgatcacaattggatatccaatgtttggcggtcggttgtaattgaatctgtcggttctcattggattggatcgatttatgcacaccactaaaaactgttttaaaaagacaagaccaaacaagctaaaaaaaaattattttttgtttttaaaaacaaaaaacagttttttagttatgatgtcaaacatgcacttaactaccgaaaaagatccgcgcatatttatgtaaatatttctttaattaaatgtgtaataaaaaaaataatttttaacattctagcaattagcaaatttagcgactaccgaaaaagatccccgcatatattatattttctttttgaaggaaggtgtatcgtattaattaagaaaatcaaaattattcataacaagaaaaatttaaaactttcattaaaattagctaaaaattaagatttagttggtagaaacttagaaattaatttccaaaaaatactcatccacagacaatgctttagtttagcggttcataacttcatatagttgataaaactaaggtaaagagaattagagattgtgtgatgagtttgaaaaacaaaggaagaggtgagattgtgagtgtggccactctttagtgagtatttgacatcaaacataagccatatataagtatctacaatactataaccaaatcaaaagagaggtgagaagtgagaggtggttatcttatgacatggggtcattgtcttatccattttgtttttgttacaacaaaacacaaccaaagaacacaaagaaatgggcaccaacaacattctttccaattttctttttaacatagcaaaagaaggaagaagaaattttacttggatagaaagagagagagatagagagctatggcaaggttggcccttgtacaacaacaacacaatcatccttctttctccatactcccttcttctctctctgatttcaatggcaccagactccactctcaaatccaggttctctaaattttgtactgtaaagtgttgttctcactgggctaaacctgttttggtttgtttttatattaacccttttgactaataattttctaatgccttaaatatttggtttaagaacaagagaacataagaagattataatggttgacatgtttgttaatacccatatctgtttgcagttcaagaagaggatttctcaaccaaaaggtgcattacatgtttcagcatcaagtgagaaaaagattcttataatgggtggtactcggtttattggtatattcttgtccagactacttgtcaaagagggtcataaggtatatttaccattcttatgttaggtttcccctatttttgggttctcttgaaaaataaaatttgactgaagaatcaaaattttctcaggtgactttgtttactagaggaaaagcacccattgcccaacaattgccaggggaatcagatgaggatttcagtgatttttcttccaaggtatgcttatgcaaagtctggtgtatgcctcaaataatgtcaaaatgtctttgactttataaagacccattttgaccaattgttttacaaaattttcgattgaaccttctattttgttaaatgacaatttggactggtacaaaatagtatcctgattttttggtcaaaatcaaacttaatttttagcatttatttatgctaaaaattgttctcacattggttatattaaaaattgagcccgtactattttgtaccattttagaaaatatatggtccatatctcatttgataaaacagagaatctaatcagtaagttacgcaaaacacagagtctaaatggtattaaccctacaaagaaaaatgctacctcaaattctgtttctgaaagttctttttctttggtaaaattttctacttgtaaaaaaattattgcagattttgcatctgaaaggagatagaaaggactatgattttgtgaaatctagcctctcagctgaaggctttgatgtagtttatgatataaatggtatgtgtttttctatctatagttttgtgctacttgtaatctatacaaagtatcttgttataaggtttgctttaaaatgaatattttcaggaagagaggcagaagaagttgcacctatattggatgcactacccaatcttgaacagtaagttccgcaaccatttgtgaatgaaatacattatagtatttgactgataaaccaagcatataattattttaagagagccttatgtggttctttataatgaagcttctcatcttcaacttgtaattattcaaaagagtttgctaagaacttctaaacatagagactgttttacaactcataatgcaattaggtctaattccatgaatttccattttagaatacagaattgatcatgaaacaaaaagaaaaaattgtccaaaaagtcaagctgaatgacatggctatgtacataaacaataatcacattggtgccaagggagttataagtttagataaaatgttctatacatttttcatttaaatttgattggaaacattgtttttatgatgattctcaggtacatatactgttcttcagctggtgtgtatctcaaatctgatctattacctcattttgaggtaaattttctggtttacatagctaactctcaatttaggagttgaactacttctacttattcaattgtgcttagagattatccaatatgagaatgcataattttatcactaaacaaaaaatgacacccctctttcattttctcataacattcttgttgcttggtgacagaaagatgctgttgacccaaaaagcaggcacaaaggaaagctcgaaaccgagagcctgctagcgtctagggatgttaattggacttccataaggccagtctacatctatggacccttgaattacaatcccgtcgaagaatggttcttccaccggttgaaagctggtcgccctattccagttcccaactccggagtgcaaataacacaactcggtcatgttaaggttatgtaacattgcaaaaatgcaccatatctctattcactgttgtcataattctcagcatgcagacataatgtttgactttgatgagaatcatggggttccatctcaaaatcaattggttatgagtagagtagcccatgttcttatatatggctcaatactttgcaggacttagcaacaacttttattaaaatggtgatattatgttatacataatttgcaacattagacttaatggttatgagtggagtagcccatgttcttaatgttctccaataaacttattaaaatgtacacaagtgagttctaaatggtgatattatgttatacataatttgcaggacttagcaacagcttttattcaggtccttggtaatgaaaaagccagtagagaaatattcaacatatctggagaaaaatatgtcacatttgatggactagcaagagcatgtgcaaaggtacatgtcctataattatatttgtatgatcaaaaatcactactcaaaacttacaatgtgtttttggctcttgttaggctggtggttttcctgagcctgagatcgttcactacaacccgaaagagtttgattttggcaaaaagaaagcgtttccattccgtgatcaggtacatggacaaccttccttttgcattttgtgttttgtttagtgttgtttcatcacatggtgatcatattgttttcattgaattaatgcagcatttctttgcatccgtcgataaggcgaagagtgttcttggttggaaaccagaatttgatcttgtggaaggtcttactgactcatacaatttagactttggcagaggcacattcaggaaagaggctgatttttcaacagatgacattattcttggaaagagtcttgttcttcaaagctagacatttcattattttgctatttttcttgtatcttctttctttgtatcaatttcccttttcaggtaattgacttttagtttttatgataaattaaaataatccatgatgtgatataaatttccattaaatctatattagaagaatgaagatgtttcttcaaagggtccttgttaaatttcttaataccatataataatttttgtcttcacttcattgggtgtaatattttggtgtatattttgtgtatacattttacttcttctttaaagtcttaaaagctttcattttcccagttagtggtttgatccaacactcaatctaaagtacgtaagctatgtggaaggtagttagaaattagtggctgaaagctcaatagaaaaagaaagccataaatctaaggagttgacttgactctttgatcatccacatatttatttgaaaagtattaattaagaggtggctatctgctaaggaagtgatattaagattaagtgaaactttcaatgcatcaagttatagaacattgtcccatgtggattaaatgtaaaagtattgagtcatgtacaaagaacatgagctactccacttattaccaattggttttgagatagatctccatgattctcaacacaagtaaactttttcagtcctcagtgaccaaatctaagaaaaataatgttaggttctatctaatttcatgactaaactataaacatagactttgttaagatgaaacatttttaaggaaaaattctatgaccaactaaaaaaaacattatttttttaaggtagtggtataagtacgcaaagttttaaattttcaagtggtataaacctaatatttatttttagcggcaaaagtacctcatgtgtgtaaattatatttttttttccaatttcgtcagtaccgactttgttttaaatttattgaataaatattttaaagtaactgatactatatgtttctgtcaagacttaatgatctggaatttgaactttatatgtgtcatgtttaagacaataacagaagttgtactcatgaaatgggagaaaaattacaattttacacaaatattaaatacttaaaaataaatattaaatttatgccgcttataaatttaaaactttgaagcctaatattaaccatatttattgtaaaagtttgaacaatcaaatgttatggatttacttggtggtccagatttattctgaatgcacaatatagttaagtaaataattattgaagatattgaaaagatcattcttcccaacccctcccaatcaaaaagtaattacatagatattcggggataagttgaaaaatattatttttattaatcaattaattaaatttacct

SEQ ID NO: 218474 - DNA, 3244 bp, Cannabis indica
tgggatcgacctcactcctagtgagtctactacttgaaacgatacgtacacttgcgtgtgctaaatatcgcaacaaatgtctatcatgaggacagctggcctaatttgtcttggaataagcttgaagacataatctcaatattggtctaataagaagtccctcatgaattgtcctattgagatatccaaacagccttttgcaagcttcccaatgagtgttggtaggagcatggataaactggctcaatttattgacaatgaaggtcacatcaggtcgagtaagagtcaagtattgcaacgctcctaaagtacttctatacaaagtgggatcagaaaatagttctccatgtgtgaggctgagcttgtgagatgaacttattggagatggacttggtttatcacctttaaagcgaagcttaactaagtagatcagttatgtgtatagattgagaaatatacataccaaacctatttcgagctatctccactccaaaaaaataatgtagtggtccaagatcttttacttcaaattcgttgttcaaatcagctacaaggtttgagatttgatcttgattggggctcgtaactagaatatcatcaacataaacgaggagcactagaaaattttgtccactaccatgaataaataatgatgtatcagactttgaaagagagaaatccctactcagcaaagtatattttaacttgtcattcctggctcggggtgcctatttcaggccatatatggccttgtgaagatgacaaacatggtgcagttttgttgaatcttcaaaactcgaaagttgcttcatgtagactgtttcttgtagattaccatttaaaaattcatttgaaacatctagctaaattacttgccaattgtatgaaacaactaaagagcacaaaagccttactgtggctggcttaaccacaggtctgaaggtctcttggtaatcaattctaggagtttgaagatatccttttgctaaaagtcgtgaattaaactttccaagggatccatttgcattaagtttcactcggtgaacccacttgttactaactattgtcatgtgaggttatggtttatttttcagtaaagcataaaactcagtttgcaaagcttgtttaagtgttgatggttcagaaggaataaatttgggaagaaaggtgaagggaagctatgtaagctttaggtttttgaattcttacttttgatctagtttgcattggatgagtatttacagtaaaaggagttgcattgtcattttgatttgaattgattaactatggttggggaggaagtgttggaaaagggcatttgtggtggctgaggcaatacaatttagatcagagatgatgtgtgaatgttatttggtacaatgagattatgagagggagataacagtagcatgggatcctaaagtggattttaatagtagtagcaagtataggggcagtgacaacatgcataggggcaatagcaacagacataacaacagtgtcaacaaaaactccatgtgatggagagggcatttcaccattgcgagcaacatgaaattgtgcattagttaatattggagaagtagagaagctagttgtaggaaaatatcaattttcagacaaaagtacctgagattcttttatagaggaatgagcaggaaaatcatcttaattgaaagagacatttcgagctatgtatattctgcatgtgagaccttcataaaggtaacctttatgcggcatggagtaacaacgaaaatgtacttctctgccttgagttagagtttatgagcattgtagggcctaaggtgtgggaaacgagaacacctaaagggcttcaaaaaggcataatcatgtgtcttaaacaatcattcatatggtgaaatgtcttcaatgattggtattgggagtctattaattagaaaattgctttttgaaatgcaagccaccagtatgaaagatcaagaccagattgtgcgagcaaagttaataatttaaaattttttattttatttttatatttatttatgtgactcaattaaattatattatttgtatattgtatccatgtgtacaatacattatgtccacgagaatagtccaacaagacaattaacaattaaaaacgtaaagaataggggcaaattgttaacaaaatggaggtttggaaaattttggtaccaaaaaaatgagatttaagaattgtttgctagcgaaatgaaacttttgaaaattttgtcataattaactcgagttataataacttttactttttgtaagcatgttagaaaattatgacactttttatattacttttttttttttacttataagagtgttatgcaaagctctaccataatatatatatttttgtattattataacatacatgttaatatgtttaaatgagtttttttttttttattaaatttcataacacctttttccactgttcagagttatcttgcaatttataagaacattcgaattaattacatataaattgcaatataatcaaacgtaaagtaatatttggtactaaattactaattaatggtaaccaagagctatttagctaactatagctagattttctattaacaaaaagattgtggctataatatatatcagtgcaacataatatatatttttaatttccttttatataattctatgtataataccactttcgtatgattattcatcgagagaaaattatttaaatgaatagtgatcattaagataatgtttttaacataaaagggtattacataaaaggtaacctttttaattcagtgttagcaatcgacagggagctgagtcagctgactgtatatactagacacacaacacaacacatcatgcttttctatatgtaaaaataattttaattatatacattataaaaggaaactttaattaattaattatattactttagaaggctattatggtcatcagattaaaatcgtggacctttaaatattggaaatcattgcaagtatcccgtgaatactaagccgattgccttatataagttgggagagtaagcctataaataacccttcattctctcatttttcatttcttctaataatttcttatacaatttcatccttcttcatctccgaaactttgtcaaggtatgaattttatatgattacatatataaatattatgcatttaaataatgtatatatatagtcatatattttcaatatgtatgcatgcatatgcattaaca

SEQ ID NO: 218475 - DNA, 1354 bp, Cannabis indica
aagaaatgccgttagataggcacttttaatatataaagatattctatattaataaaatataaataagtataaaattatgtaatatatttaacaaacatagtagtaaagtacatacatcatatgcatacactagagctaccaaacatacaaagttctaagtaaaataatgaaacttaataattggtaactatttatttatacagtcctttttatttattattattattattatcaatatatataaaatttttaataattaataatttgcagttgagactatactcgtatttctaatgaaaaattcattctaaaacacatacttttagttttgcgatgatagttgtctgtcacactgtaaaactatctcgatgaacaattgaactattacatcacaataattaataagcttggtactcctcctactccaaatattagtattccatcttctatcatggaatcttggaaagagcttttggcaaagcctaggagtggagaaggtttgttgcatgaaattactttcttatggaccctcccacccatcatcattttttatgtaaacggagtcacattgctcaaattttaccttcagggggcacaaaacgccccagcagcggcagtagttgtagctctcagtctcgaaaatcagtaccctcctggagttgtattaccagttttagatggtcatgtaacaactattttaggtggaccccatattgccagaagccctcaaaatgcacaaaaatgataccttaatgagttgaaccaaggcgaagcttgtcacttgatgtagccacttgccaagcgtccaaggatgatgaatttgcccatgactttcacagaagacgatgccaggcacatgcactatcctcataatgatctgctggtgataaaagcttagatagccaacaaaagagtttctaggatcctcatggataacgaaaggtttgtaaatatcatttttaaaggagccttccatgccagtggtttagtagaagccaacctgttaccttgtctgattcagttacaaggcttcaatggagatacgtttatccccatgggcaagatacagcttccaatgaccataaatggggaagttcctggaagtaacacagtatcctccttcaagtacacttttgtgatagtcgattgccctactgcctatgatgctatcctggggagaccatttttaatggattttggagtggtgacctcaatctggcacgtatacttaaagttccccaatgatactagaagcataggaactatcaaaggagatcaaagaagtacatagagttgctacaacattttaactagaactatactcatggttcgagaaattttgttgtgactaaaa

SEQ ID NO: 218476 - DNA, 3374 bp, Cannabis indica
taccatgttagtctaaatccagtgtaaaaatgaatcacgggacttaaacttttgaacatataatcatgattatattccactctgctgacaatactataatcatgaataaatatatgttcttgacataatagaatttatacattaaacatataatcatgaaataaatcatgtgaaccatacaacataaaataatttctgatcttttattaattagtaaatttgattatagttaaataaattttatttagggcacaaaacccaacaaatacttggatctaccttcggttatggggaggaataaaaagaaggtacttgatgtcattaaaaatcaagtttgtaacaagctacatggatggaagagctctacgttctcaatggggggaaaataaattttgataaaggcaatcattcaagatttttctaacttatatgatgagttgtctccgactgccaaaaagttcaataacttatctccatagaatggttgctagattttggtggaattctttgagaaatgacgaaaggatacattggtgaaaatgggtctatttgtgtaaacctaattagtagcaagggggctggggtttagggatttagaattgttcaaactagctcttcttgctaaacaaatttggtgctgcattcaacatttcgacagcttgtgtagtaaagtggtaaaggctagttatttccctaatagggctattatagaggctaaatgcggctctaacggttcgttcatttggcgtagtttagtttgggggaaagaagattattcttaatggttatagatggcggacagggaacgagagttttctaatttgtgaagacccatggctacctagacctcactacttcaagatttttgatcgaccaaactttcctgaacaactttatgtggctgatttgaagctttcagatgggaagtgggatgaagattttatgtttgatgctgatgtcattcttaaactttcttgttttggtttggacattaatggtaagattccttggtactagagcaaaatggtgagtattaagttaaaagtggctatccctggcactacagcaaaatgataagattctctaataatgtttgggagaactttatccatgctttgtggcactttaaggcagtttgagcagtttgaaaggtaagtggtttaaaagctgatcttcttagggagggaaaataggatgtgctttctttcttaatttgactttctaaggtatggaaaaaatgtgtttgagtattttattgtgattttgtaagatatgtagtagattaagaataacaccaaacatggtggaaaacctccacgagcagcagatgttgttgaatggtgtgcccaatttgttcatcaatttagaactgcgagggagagtggagacaaggggaggttgtgggatgtgagggactgggctcctccaaccgttgggatgttgaaaatgaatattgatgctagtgtcgaaaagggaagcaaaggtttgggattggagtgtgtggtttgtgatagtgctaggtgggtggtgtacacttctgctgcaatactttagtaggaactccaacctgtttaagtggaacttttggcaatacaagttggtttagtagaaagaatcaagcgttgtctatggctatttagtattgagtcagattgtcttgaagctatccaattaattaatccaatgaaatgaagagggctagctttagagatgttgatagtatactagatcatattcgttatctattattatttgacaatgtggctgatatttcttttgtatttagggaagctaatagggtcacttatgagttacccaattatattttggcaaataaaattcgagctatgtagattggggttaatctctcttgtgtaagctttgctttagagcgagacttgcctaatcctttataattttgttgataaatggattttgatttaaaaaaaaacaaagcatacaaattcaaattttcctaatttggagtattattaaggatagaaaaactaatgtcccttgtatctaacgtgaagaaactgactgtttatattaaagcatgacaaaaatgctcaagttgactaaattttattatggcacttatcaatataaataatatttatatcttcattatgatggtttttataagctttttcttgcagcctttcattttgttggttatgcataggcatattggaagtatatatatgtggacataattgaacgtatgatatataatggagctatttaattagtatttagtagggtgactataaagaatgtgtgtatcaataaagataatatagtgcatattaaataatcttcctcatccaactaataattagttcctgcatttatagtttctaccaccatatgggtggtcagatcgtttagtgattgccactatagattagcaaataaggagtcttttataatttaatagtatagctactaattatacaatcaaaatggtacaccttgagatcattgctaattatagacattgaaaacgatggttttagcgtgaattttgtggcaataatgactatgtgagtatagtaagttttcaaaacccatattatatcaatacacacttttctttgaaagcaatatcgaatgcattgtcatacactaataagtctttagaattactttataagaaatattaatggaatttataccacctataaattatatatttatagctaactgcaaagaggggtgattttcttcacttaatcagatacagatcaaatgaataaattgcaggatataaaaaagggagggcattatgtgggggcgtatcaaggaatatcactagaaaattgtccaatacaacttaaaaattaagaatgtaatttttatgtattgaaatacatcagtgacatcgtcgcatatgtaaatcttaaccattatttaaccgatcgaaaatctataagttttaattatatattattttatctattatattaataaataatctaatatacatatataataatataaatatttacttcttttgacaatttttagaaaagaagacatacgatgtaaaaattaaattgttaccgttacagcgatagtggatagaacaattagtgaccgtgattcacgaatgcttgagttgataatgaaatgtttaataaattttcttcccttattttttttatgttaacttgaaatttttacatttattatttttctatgtttaattaaatatattaacttatattaaccgttaactaattaaaaaatatttgtataatatatttaattaaaataaatacatttaagtatgttgttaatttattttttaattgtatcaatttttttttttgatgaatcagtaatttcattgtactattaactcttttgat

SEQ ID NO: 218477 - DNA, 4361 bp, Cannabis indica
aaataaaaaaattaatcataaaactcaatttttctaatattacccattcatgggtaatactcattaagagtacacccatatatatatatatatatatatatataaaacagaaataacttttaacactagagcgtgtggtgctcccgtttcttctccccataagtaggaagaagaaggtggccctaaagtcggcggtggtggtgactaatgatagaacaaaccaaatggagattgaacttccttcgatccaagatgaagaggtaattgagaattaagctgagatattcaactcagctcaaggcgctctatccaatgatcctgctaacatgcttttgcaatgcgagctaaaagaaaagcttcatgagtataaacttgctcaactgaggtatgcaagttatgcaacaattaagtaaggttaatcgattacaatttagggatggaaactctcattttttacgccataaaaaaaggaaaatagagaatagaatcaccacttttgttcaaaatggtgaggttattgatgagtacaatactattatccacccctatatcacccattttagaaatttttggtaaaaaaaagtgatgtcttgagcgacattgacttggattgtttgaaattcagtaaggttcttagcatccagcaacaagtctgaacaagtcagactgatcagatctttttcaaaagctgaggtcaaggatgctatctttggaatccactctaataaaagtcctgcacttgatggttattaagctaggttcttcaaggaattatggtgtgagattggagatgaaattaccaagggcactactctcaacttctttcaagatagtttgctcccaagagatcttaataaaactattatttctcttatccccaagattaataacccctctacagggattgattacaggcctatagcatgttgcaatactctctataaatgtatatctaaaatgctatgtggtagactttatgaactactgccttctcttgtccataataatcaaggagcttttgttaataatcatttttttgcgcacaacattctaatatttcaagacttgctcaagggttatacaagaaaaaatattttgactagaaatatcatgaaaatcgaccttagcaaagcttaagacattgttgactggcactttgtttcagagcttctaagggtctttgttttcctttgaggtttataaattggatttggtctgcttgagaggaacatcttactctctaatgctcaacattcggttgcatagttcttttaaaggggaaaaaggtcttcatcaaggagatctaatttctccttttctttttgttcttgtcatggattactaacccagttacttcttcaagactccaatatcaaagggtttggttttcatcctttgtgtaagcccttgaagcttgtcaatctttgttttgctaatgatctcgttatttttttgtaaaggtaatgctaagtccattcagattattcaattgactattaggaggttcagtaattccactagtcttcctataaataaatctaaatcttaggtatacttcagtggaatctcagcggactataaaaatcagcttttgagtattatgaatatggaagaggtgtcctttcctcttaagtaccttagggtgcacttgaggcctacgaaatggaaagctggggattgtggtgaaattcttgaaaaatttcagagaaatctccataattggtccagtaagaacgtgtcgtttgtagggagagctcaacttatccattccgtgttgttggacatcaggaatttatggatgagtatctttattcttcctcaaaaaattgtagctgacattgataagtgttctagagatttcctttggggttataatgaaaataaaagtaagtatcatcttccttcttggaaaaaactttgccttcccaagaagtttagtggtgttagagaataggttcttactgtgttagagttagttacagctcatgtacttttctgttatgttagttagactacggtattataactaactccttcttgttgtaactaactctctcttcatcttagctgtgtatataaagctaagttattcccagtgtaatcaattcaattcattcaataaaatcatcattggttatttactttggtgtgcttctcttacatggtatcagagaacctcgagcatggttctcaaagctttctactgccttaaataatctagggtttcaatcagccaaaacagatacttctctgtttatcagcatcacaccaactgatctcacttacatacttgtctatgttgatgacattattgtcacaggatccaatgaaacttgagttgctactgtcatatctaatctaaattctcaatttgctcttaaagatcttggagatctcaattatttcattggaattcaaattcatcacaccacttctcgagttcatctctctcaaaagaaatacctacaggatctccttgtttgaactaaaatgcaagaagctaaaagcatcattactcctatgcaatatggtttgacactctccaagtttggtagtgatcctgttcaagatccaacacagtacaaatccgttgtaggagcattgcagtatgccactataactagaccagaaattgcattttcagtcaacaaagtttcacagttcatgcaatcccctttggaagctcattggattgttgtaaaaagaattttcagataccttcctggcactcttgactatggaattcatctaacaaagtgcaatgattttcatatcgaggcattttgtgatgttgattgggcgtccgatcctgatgatagacgctcaaccagtgaatattgtatgtttcttagatcgaacttagttgcttggaagtctaaaaagcaacaaacaatttccaagtcatcaacagaagatgaattttgaagcttggctgctactgttactgaagtcacttggcttacgtctctcctccatgagttaggacttccgacaacttcaatatccactccaaaaatctagtgtgataatctcagcacattgatgcttgctgctaatcctattctccatgctcacacttagcacatagatatcgatctatactatgtcaaggataaggtactacgatttgaattgcaagttcaacatgttcctgctcttgatcaacttgctgattctctcaccgaagttgtgtccagctctagatttgcaattcttaaagacaaactcagtgttgtttcatcaacctcactgagtttgaggacggctgttagagaataggttcttactgtgttagagttagttacagctcatgtacttttctgttatgttagttagactacggttataactaactccttttggttgtaactaactctctcttcatcttgctgtgtatataaagctaagttatttctagtgtaatcaattttattcattcaataaaatcatcactggttatttactctggtgtgcttctcttacaagtggtattgagttctgtgaaggccgtaaatggatcattacgatgatggcaaactatatttgggcagtctcaaccaaacaagaaaatctttaggttaaatagattgattctatttatttaaaaggtcagaatttttggttagcagctttgaagagtcactcaagttggtactttaggaagctaatcaagcttagaagttccattgacagagatgctctttttagagctatttcaaaagggaaattcagggccaagaacttctacaactcttttgtcaatgcttgtagagtgaattatgcagcaactatttggcacaagatatgcgtccagaaacactagtttattacgtagcaagcgttgaacaaccaactcctcacccgagaccatcttagtagatttatggagctctcgtctacctgctcctcagtttgtgaagccgagagtctcatcagcacgtattctttgattgcatttttgttagaaaaagttagagaagaagttatcgtttggttgggccaatttctatggcctaagtccctggatatgtggagtacctggtgtgcaaactcctactcaatttgatgatgtctattattagtgtgtactttgtttggtgtaataggaataactgttcgtttgggtttgtaattcggataagaagtaggcatggcaaaaagatccattcattcggatcggatcagtgatccgatccgacggatcattactgatccgaaacattcggatagttattggatcttggatcagatccgacccgccccgcttaaattttttacggatcggatctgacccgatccgttttaaatatatatttttttaaaaaaaaagatttttactttttaatatatttttttaaggt

SEQ ID NO: 218478 - DNA, 7430 bp, Cannabis indica
aaataaataaataaagagaatgtataatagtgagacgaataataaaaaaaaaagatgaatatgtgcgataaacatttacataggttgaatcatagacatggagtagatagaaaaagaatatggaggacagagatttaggaattgggggcttggggcttggatggaaaatggagagtgagatcgagagaggcatagagtcaaagagagagagagagctaagagaggcagagtgagttggaatttggaaaaaagtgagaaaagtaatttttgagccttattttattattaaactgaacgtgtatataaataaatattatatatctctctaaaactttaaatttattgatgattgtaatacacgatcagtcggttttgatttcgttaccgatataaaaaccaaccgttcaatagcaattttaattgttgtcgatttttttggttttcagttaaaacagtttcgatttcaacaatgctttgtaggtcggttttaacgattttttcaattttttaaatttcatgattagccttaccaaaaagtattgaaaaagacccttttatatagctaaaaaagatagataaacctaattttagttgtttaaaacaggtggaccgcgacattactcattaagagtcgcgcccgtgcctttttaagtaggcccagcaatttgcaacactgcaaggttgtctaagcacatttatatgaaattcatccagttttcttctcatctaatcaatacgattaaaaattatctaaaacataaaaactaacattcactgaacttgcaaaatatatacaaaaatgctcttatcaacatctctaaagaattacaaagtttcaagctatttgagatgcttgagaatctccccgagtaagctttactcaatttgtacaaatcaattcttatcttatacaattcaccagcccctctagttttatactaaacataattagcagctctaaaccaacatattaggacagcttattaataggaactgccgcctccgccttgctgttattacagttagttttctttggcctcttagagtaggtaagcctaatcggcggtgtatcatttagcttctagaagaattgaggagtaaggagcaacattgtaagtgcttccaatgccaggtactccttccatgacaaagtcatcaggggattcaagattagtgtccacctgcagaatttggacaacgtttgcagttagtttcattatcttccaaattataaccaaacaatattatcaatcattatctaccaatattttaaatgtattgaacaacttgaagatttgtctatttgtcttagttacaacgaaaatgaatcaagtgagggtagaactaaccactcgaaaccatctcttgttcgacggtggtggaggtatagtgaccttgataaaatagtcatgcgcattgaaagccatatagatgtcttcaccctcactgtcatggaatctgcgaaaggaattattcggttaaaagtgcttttgaattcttcaatgttaaatgaattattcaattctgaaattcttgggctccatgttatgctttaatttcattttggtttttagtatattcttcagtacactcgcatggctctagcatcatttttttttaccgcagggtcttattttatttttatcaactcatagtgaatattacatgctcaaaatgctaaagacaacatcatgtacaattttcaaaagcacaaccatgttttcctaagtaaacaccaagcattcatagaatatcgtaaatgcttagaaaatgaaaatgcgatgagtaaatattgacatgccattctatttttgacagggatgacaaaatctcttatacataacaataatataatacagtaggaggatcatatattatattcagttgttcaatatatttacttacgtaaatgcgagaaatttgctctcgtagttgtcccagttgtcttcatgccatgtgacatcattctgcatagatgatatattgtatgagtctcttcgtaaataaatacttgcattaaattagtgatatataacataaagaaatagaagtcaagaattattactttgttgaaaaaagtatcacgtctgaagacacgtcgagtgtgtcgaaatcttatcacctctttaaaaaatctgaagtgattattcctccgtgcttctaactggctcaccaaaataaattattagaattaagtactacaggattatatattaaaaggaatatcgtgagaaatcaaaaccataccaagccccactggaagtgattaagggcagcatcatgtccataactgttgttatttccatagcgagtatgtgcatattcatcccccataagcatcattggtgttccctagtcatattcattaaataataatatcaataagagacatggatcaaaggatgtggaaaaaaaaagttcaataatatgtgactttggctataattaaatttaccaaagatattattagtgccaggtgaaaatttttcatttgtcgagagcgtaaagctttgatggaattatcgtcagtctctcctgttcaaatcaacacaataaatgaatcaccaaaaagttcaagtaaaaagtagcataaacatttggacataccttcataaccacagttccaacttaagttatcattacttccatcattaccaccttctccattagcatcattgtgctacaaaacaaaaaattagaaaacatgccaaatttagatggataaacaaataaattgacaaggataggacaaattaaatttcgatggataaacaaataaattaacaagagtttttaagtaccttgaaattgtacgaaacaagatcatataatgtgaaaccatcatgcgcaatcacaaaattaatgctgtgataaggttttcgtttgttaacctgaaaaatgaacacatacagcttttaataatattatagcaatgacagtatgataatattcatgcattatgatgtaattgattagtttcaataatagaaagcataacaaactctagttgtcttcctataaaaagtttggacatccacatgttttattaattctgaaatcttataaatggtggtcatgttgctaaacaaaatggtaagtagagataaatataaagaggctttcaccaagtcaatacaatacttgcaatactactttggtacttaatcttaaatctgattcatgcttactttgtaaaggtcagcagatccagaaacacgagtagcaaaacttcccttcatcccgcagtcaccctatataaagtaagtttaaaacaaaagattaagatacataaaagtggcaactagttgataacaaacatttttctttttcataaactaagaaatattatattcaaatcaatgaataacaaatttaaaaagcaaaagagaaagaagaaaaaagagcatgtttcttttctttcttcttttccctatataaagcgaattctgtttctctattatttttcattagtgaaatttattcatgtatttttgtgaagatctatttaaaatctgttttataacaggagaaaaagagcatgtattgagtacttctatgaaagaagaaaagagaaaagaaaactaacgaccttacaaacattgtgtatattcataacattttctttaagccctaccacattccaagaggaaagaaaaggtgggaagtcacaaattacctttataaatcttctcatgtcatcgcgatattttccattccattcggcccacctgtattgaagaaatttttgagggaggtgagatgtgcaaaaacaatgtacttagagaaattaatatagttcctacaagatgtgaatgtcaatggtgttcaagacaaataaaatgaatatgtaaaggaattgggagtattgagggaattaataaataaaaatatagccacaactaaggatgagtagctcaaatggttaagcgcttgttttgctcccacaaggtctgagatttcgaaatgacaagaataaaaatattgccacaccacagacaaagcatgcaatgcatcgtcgtatttgttaactttccaaatttacaaattcttttataattctagtactgctaaccaaattaaaatgagactagatagaaaatcatttcaaaaagatgagatcaatggcaaattgtcaattgaccaaaaaataaagggcctctcacaataatatagcaggaatgcacataacaacatcatctccattttcagcaattaaataattttccccaaacataaaaacataatgaagtagagtgtgtaaattcttttcatttaattaataagggaaagttgaatattgttacctgtcccaatttgggaaacttccaacaagataaaggcctccacaatcccaaggttctgcaataatcttacaccttgacagaacagtatctttagcaatagcctgattcaagagagataaataagttaacaaacactattctataataggacaataaatagaaaaaacctgaaggctccatacccataagcctaatgtgtacatataaataaaagaaacagccatacaaacatgcttgtatgcttcccaggataaatgtctcaacccttggctaatacaatcaaacctattacaatactagaagagagataattgtaccttaataagtgggggtgcactaagaggagtaccatctgttcctcgacaaagaacactagcaaggtcaaatcggaatccatccacgtgatactccaacaccctatatatgagcaaaaacagaaatggatcccaatataagcataatacacttagcaaattatttactcccctcgtacaatacacttcatagatgtttatacattaaggtccataccagtgtcttaagctatccaatatgagttccatgacaacaggctgattacagtttaatgtgtttcctggacaagaatttgagatgattataaaatgaacttagaaccattgtcaactaaacatataatgattgttatacactttgataccaaaaaaaaaaaaaaaatcataacatgtgattgtacttaagaaacacttagcaaatttataacatagtaattagatatatacaataaattattctaagtaatgttacatctccatctttgtgaatttttttaagactgtttatcaggaaaacatttagcctcttaggtgagagagcaagtaccaaaagaataaataagtatatctgtagtgtttaaaagctcgaattccatctttcacacaagaacccagtagccatacaaagttgtcccacatgcactatttactatctccatattaaagacttcttttataaatgaattattgaaagaaaaaaatattcatatagaaagagttgtaaagtttgtttaatgaaaacaaatagaaaagtaatgaaattaccacatccagaaaagttaagcaactggccattgttcttttcatccagcatgtaataaacctatatgaaaatatgcattagaaatgaccaaacaccttttatttatgagacaggaaacaagattctccacaattattctagagcacacttatgaaattaccttattatctatgcctcgaaatgaggtagtataagaattggcatcatcagcctcattggtatgattgtagacaacatctaaaataacctgttgaaaacacacattacaaacacaaacatctgagagtccgagagagaaataaaacaaatacaatgaagatccgtttaacacaccgttttttttttctttattgaaaaagaaacaaaggtcaaattttttttattttttttttttattagtgatcctcaattcacacttatccaggggaaaaccaaaaacatttgtgcaccaattttatgtcttagtactttgttttggtattatatagtactactgtacaattccattaaattgtataacatagtattatattgcattatattatattgtatagtaagatattaaattgtgttatagatcatatttttagattttatattatatatatatatatcttataatagaatgcctataatactatataatacaatacattgtaccaaacacacctgggaagaattgtgcataaagtcagaaacatggttacctctattccagcatcatgcagagctttaaccatttgtttgaattcttgagaagctttaagtggaccaccaccagaactagcatagcggctcataggagcaaagaagtttaatgttgagtagccccatgtatttatctaaaaataaaaaaatccaaaacacaaatgggttcaaaaagtacagctaattagacaagaagaccaccgagagaaataaaaaatgagattaaggtaaaattaaaaagaagaaaaagcatgaaatgagtataagcaacaaaagaaaattgagcatgccaatactatcctgtctatatctctgcacgacattaatgtacaaatcaatttccttctaaattcaaaataaatctagtaaaaagtttctaaccaatatatttataatcagctgtgaaccacaaattcacaaccgacacaaactaatttgcacacatgtaaccattttgtgtttgagtaaacacaataaaatatgatctactgttaccttattgtgcaccttgattaattaatattgtttttaccaatcaaagaaaaagagtttgcagacatccaaattgaaagatcaagaaatacaaaagaaactaaaaaattagcagaatcaacacacaaatgtttgaagatatccgtaacaaatgatacgtattaatttatccatttacaaataatctttatttaccatgtgatctctagggtttggtcgcctttgaagctctagctcatcaaattcaaaaactggcagcagctctaccgcattgacaccaagctcttgaagatgtggaatctttaattgaagaaagcaagggaaaggtcagaaaaattaaacacaaaaattaataagataatcacaattacaaaataattatcacacaagatgatatctcaaacttaaataaaagttctcaatttgatgaatttgtaacttaaaaaataaaactacagattctagtaaaaccatttcagtatttttttttctttaggtgcattcttctaatcggttcactagaataatgagtgactaacttcaatataatgaatagttaccttctcaatcacaccaaggtagcttccgcgtatgtctgggtccaacccgctggattcgtcagccgtaaatgcacgaacattcatttcgtagacaacaagatctttctgagaaacaacaaaacatataagagaagagaaaagatcaaattacaataggacaagttagcatatattcactatcatcttggtatgcatgaaagatgttgaaattctatttgtaggacaaagtggtgagagtgagacagacaaaaagaaaggttatcaaacttccataatatttattattttt

SEQ ID NO: 218479 - DNA, 4492 bp, Cannabis indica
gtgattactcttctcaaggggtaagaagattaagaagagacactctatgttgtatgagacatctaaacaagcaatctaatcttgcttcaaaaacattaacacaaccatcaacactctccaatctcttttgtacaatctcaacatcaatcttggtgtcattctttctcatttgtgtttgcaaagagagtagagtaatatcaacactgcccacttcattgaaaatcttgtgtcctttgtctgatgataaaggcatcaactttgagatcaatgaccatccattgattatttttggcatagataagaacacaaacatagcaccaaagattgagatagcaatattgcttagctcactcaacactttagtaaccatttgaagtggttggtcatgtacaaaatggattgaagaaagattattgttcttttgcattgttttcaatgctttaaggctcttggaaacttcctttctagcgttttttctgaagttgatgtaggtttgtacattgctttctatgctcgaatctccaaccacctttcgtcgcagtgctgattgaagggattgaacgttttctttcataccgagaagcaactcccttgcagcgcaacaagcatctaataatccaatcgacgtgtcgagcgtctcttccattgtttgtctcgaatggttttggagaagagcttgttgggttaatggtgagtgaatgagttctttagtagaagcatacaactctgcaagagaagtcaagctagattggattgtgtcacttccaataggagtttctcttgatgaaaatgagaaatcacattgagttttgagcttgtttaattgtgtttcaatcccttgggacttgggattcagcctagatggcaagctaattgaccttgaaggttggtgtgagccaagttttgaagatgaacttgccatgtttgagacaccacttagcttgaattgaaagtgaaatttgaataacaataactcatttcaacactatatatatagaattagtttaagttgattttaggctctaattatgtagggttaacaatgtgggtcaccatgcctttctttctaaaagatcctttgttacaattctagccaacaattttgcagcctataaatcttttattggtctatatggttatgacactagacccttttttaaatatttctcaaggaacattgtggaggtagtaatagccatatactttcttgcctccccaatcattatttctactattattttatcataaccaaaagtccaatcatttcccttaaaaagattttttatataatcacaataggctggcaatagattatcaactaatttttataaaacaatagcaaggtaccaaggtagatgaccaagaagtaaggagaaaagaaaacaatgtaaaaaaaaatggtgacaaagtttgaggcaagatttagcaaaaatctaaccttaagaatctaggattgatgtaaaagaataatcaaggttcaactaaccaagatggttgtttttctttacaaattcatttactaattctaactttagtttttatatattttcattcattgtagacaccaatgcattaaattccgtataatcaaagtgtaccacataaacatttaggaatgacagagtagccataaccctataacaattgtttattaagagagacaagtaaacacttgttatattatatatcaatatcatctctcttggaaaacgttgctaacctctcatccatttatatatataaatatatatattatagtaacatatatcttataaggtgggagagacccagcaaatatttggcatctagtgaatcacaatagagagtctaatgatcctaaggacttttcacattttatatcatcacatgcctcattttataaccaaaatcacaaaccatgattctcttgtctcctttatgttatatctcagtcagtcatacatactagagagaaggggggttggtacctagcaaagcttacataacattgttaattgcaaaaatttcatcataaacacaatcaaagctaactcttgtacggcagagatggtacctaaatactcatgttctcattgtttttccatgctaatcatttttagtcaacatctatgagtttaagggactaacaaaccaagatatgaaaaccagtgaatcttttagaaataaatgtaagagcttaaaatcttacaggattttacaactttgagtgaaaggtggaacttgcctgagcaatatgatggaacttacagtttttatgtgaagagagggagtatagtttatccaatgtaatcatatgctagtgattactgtctctagcgccagtgtcctcacagctgtgctagtagtcttaatcatcatcatggcatcaagactttttatatttaggatcatgatccttaaagcctgtggtttgcttctgctgcagcccatcactgccccattagaaaataattgtaacagttcaacttctagttgttgcaaacttgcatttgcagctagctagctgggctccaatcatgtctagacagaattggcctttggcattttcatacacatatgatataactgcatcttttcaccaaggagtagaagacaatagttgacatcttaagaaaacaaaaaagttcctacaaaagacccaatattcaagtattaatggcttcaaacaacgacatggacataactcgtgaatagaactaagttcaaggttatgaattagatgtcagatgatcctgtcttgttaagtttgaagcaagtaaatagcatcataacaatattttgatctttgtttaaccactaactttcagcctttccaagtagttcgaaattatgattacctaaacttttaaaatgaataacaaagtcatgaaataatgaccaagttgtgaacttcgtaaattctttaaacaagagtttatataaaataccatttacataacatggctttgttctgtagcttttttcaaccccttgagtgtaacctccagtgtggagaaagcaacaacatcagtcaaacttttgctctcaaccgcataatcgaaaacttcataagcctctgcaatcttaccgtgtcctgcaaagtgtcctaacaaatgcagcataagcagctgtctcaagctgcatcccaccttctttcattgacctatacaattcaatccctttctccaaaaaccttgacttacaaaacccatataacaaagtattataagtacatgaattaggagaacaacccttgtcttccatttcctccaataacgcaaatgcccccaaagcatccccttcccggcatagcccattcatcaaagaagtataagttactacatcagggaaatgacccatctcagccatgatactcaaatacttcctagcttccttagctctacccgatttcgataacccaaaaatcaaagtattgtaagtgacaagatcaggctcaatcccattctccttcattttgttataaaccccaatagcctcactccctttactaaccatacaataacctttcataatagtattataaaggaaacaatcaggcttaaacccttcctcagctaaaacccctaataacctagtggcttcccttaaattcttgctattacatacattgtcaatcaaaatagtataagtaacaagatcaggcttaacactaaattcagttctcatctcataaataaaatcataaacagtactaagtgtcctgaatttgcataattgtctaacgagaaaattataagtgaaagtatcaggtaccgcgtgcttcaaagataactcttttacaacttcaatggcgtcctcaattcgacccactgaacagagagctcgtacggcgatatcagtggtgactttatctgggtttgacccgtcgttgaccatgagatttaaggtttggtgaacaggggcgagagaagaatccgatgctttacaggactgaattaacaatatgtggtaagtggatcgatcgggggaaaaggaaggatgggttttgctcatgtggcggagaagagagattgaatcgttgatggtggagattgaggcgtaggattggaggagggagttatggaatcgctggtcaagaggggatcttgcggtggtgataatggtgttgaagagattcttggcgtctgagagattgggggatttgaagggagctggtgatttggtgggttcggtagagtcattgggttttcgagttgttctggctgaaggtctggactttgagggtctgttgttgggtatgggggattgagattcggcctgaactagaggagatgatagtttgagctgtgccgatccaacagcagagcgaaacgatgttgggaattttcccatcttcttcttcttcttcttgtccgaatcgatttcgtctcttctggttttttttattttcagttttcgagccctaagcaagggttttagggttttagggaaggagaatgaggaagacatagtaaacgacatgtcgtttatgataataataataaacaagatg

SEQ ID NO: 218480 - DNA, 2695 bp, Cannabis indica
ttgtgtaacaacccttttattacactaataatgtgtgattaaccaagacttacaagtgacaataaattgtaactcctctccaagttacaacctataagttacaaaagtgtaggttaaaactatatgttacacatttatttaccatacacttaatatatattattcgcataataatatatttatcaagtacaataaaataaataaagcagccactaaattaatatgttcgagacttaaacatctcttacctaatttggtggctcaaaatcaaggggtatttgttcaagggcgtttcatagcgcatcatataatgatttactaggatattgtctatcactatgggaggaagttgacaaaagctaattcaataatcaaatttaatttacaaaaagcttatgatacaatcgagtggagctttactgaaaaaaatgcttcatggattgcaatttcctgagcaatttatatagctcatcacgatttgtatccgatcacctagattttctctcataattaatggatcactccatggttattttgaagcaaagaggggtttgagataagaagattcgatgtctccattgctctttgtacttggaataaagtatcttactagaattatgaggaacattggacataaggcagacttttccatgatagatgtaaagatctgaagctgaatcatctcatttttgtagatgatgtactactattttgcaatggagatcataaaagcatctactatctcttacaaagactaaagctcttttctcaaacctctggattgcaacttaatcttaacaaatttgccatttattgaagtgggatgtctaacacagaggtgcagcatattcttgatgcatcggggttccagaggagtgaggtaccttttacttacctaggtattccaattagccccaaaaggatctcttctaaagattgcaacattttggtggataaaatgactcatagaataagatcaaggaatactaggcacattcttttgcaggtagggtagtacttgttaactcagtgctccttattatacatacttattggagtcagatcatgctcctttctaagaagattctaaaagaaattgaggctatgtgtatagcttttttatggaagggacaacacatgatgattggtacaggcaaatagcatgggacaacatctctcaatctaaagtagctggaacaaagcagccatgttcaagtatgtatgggttatggcaactaaagaagataatctatgggtcaagtggatccacagtgtatatatcaaataggtagattagtggagctactcaaccccctaacaaggcagctggtattagaggaagatagtagcaatgaaatgtatagtctaacacttatgaatccttcatccttcactcaaagcaaatacaaaattgcagatggatacaaattgttttgccctatgccaaggtgagtaaattagagtaatgaagtgtggggaagattaaacactctgaaacatagttttgtaatgtggctacaattcaaagcatattgaagaccaagtgaagactgattcggttcaacattatatccaatacttgtagtttgatgtgtaactttggagatcaaacaattgaacatttattctttgagtgtccattttccaatatagtctccaacaggttaaacagtggctggggtggaagacccttgctaatcgactaactgatttggttcgacatataggaaggaagaaaataactgcctttcaaaagtaggtatttttaacagttctgatagcattggtatatcaaatatagaggacaagaaacaaaagattctagcttcactcccatgatgatccaaaaactattgtatagaaagtgaaaattgtatgtaaaagtagaatccatattgtatggcccaaaaaagtttcaataggagatttagaatggtatactacattataaatacaactatacatagagattgtattagattaaaaagtcaattaaggcctttattataaatgtgctgcttaattttgtaaaaggttattggagtaataaatatactgctgatttcttaaaataataatatatatatcacattttaatctatacttattatattataaaataatataacaatgcggtcacttaatgcaatcgttttggttttcacaacattcagtttgaatttgattgcaaatgcttagttgataagcttaatcattcttccagtttagattcatctttggggttactcctcactgatatcaaagcatcttgtaattcttttaatattgtgagctttactttttgtgctagaactgttaatattgttgttaatactcttgctaagtttgctttatcaacaactgtaaacacagtataatggcctggatattctcattgtattagacactttattttgactaatgccatttattaatgatatctagctctttattgttgttttctgaaattattttcttaaaaaaataaataaattataccaaataagtatattttactctccatcaataaaaaaaggctaattatgatttttttttttccgaactttgacatgtaccaaatcatgccttctgaacttttttggccgttaagaattcccctgaacaattgaaattgttagatttaaggacttttgcctaatttcatttaattttactgtttcagtgattgtttatg

SEQ ID NO: 218481 - DNA, 3950 bp, Cannabis indica
aaaaaaacgcctcaaggctcatatgcgtttttttaaacattgagtataattaattaatatttagaagctgagttgtcaaattcttagggactttaggtgggctattctatagtcttaaggtgattaaatagtttgagggagacttggtataaataaagagttgatcagttgtaacaaagtgagtaaaagattactggaggagatgccgaactgtctcgaaaaagttctggtaaaatactcgaagataaacaaatgaaaggctttcaaaaaatttctcatagaatcgagaatgaagttttcattttgtgtatgccagatcatgaattagtaactgcatccaatctctaaaaaatcccaattgttttgaacttgaaactttataattttctctttgatacaatgtctatgttctaattctttcaagaactatactagaacattagtttatcacatggctaatgaatcacccccttttgtaatgacaaatctctctatgttttcttaagaataaaatagggatttgttcatttttcatggtcttgaaggcgtgtagaaacatataagaactctttaatagaagtaaaacgagttacatttggaattgtttcattagtggaaataagatttttatgctatgaaggtattcaagtgatttgttcatttttcggggtcttgaagggtagtagtagtagaaatacacattaatggaagtgaagcaagttatattttagtcgaactaggatttttatgctatgcatgtattcaagtgggatttgttcattttttaaggtcttaaaggggcgtagaaacacataagaactctttaatgaaagtaaaatgagttagattcagatttgtttcattttttgaaataggattcttatgctatgcaaatatgtaagtggagactcgaacttgagacttagagtaagagcaaatacgcatggtagaaagcaatacacatgcctaatcacttaagctactcttcttggatagtttcaaatcaaaattagacaatatggaaagcataaaacaaagctacaaatcttacatagctagaagacaagctggaccttcaagcactgcagttagtccttcaacagcaactatatcagaagctcttgttacatatcttgaatcgcctttgctatattctttccctacaaatcaaaaagtgatttatatgtatgaataaaactattaccaaacaccttaaaatcaccttcaaaaaagttggtcacttacaaacttcagctaagtaacaagcagtcttattcttgtaaagttctggagaaaagacaaaatatccctcaagtatcatgtgggtaagtccagtgaatgcccaccagcacattaatcatctttctaaagttgttatcttttttgttttacctgttcatacatatggatatttatacaacaaatcttgcaacaaatataaatttttgacgtggtcacatggtagtcttttagatattatttatttcctttccaagaaaatttgacacattggttagaaaaacaatacttattcaatcatttggagccctttactttactcagtataaaaaacaacattcaaagaccatctcaaataaataactttcccttcagtaaaagtaacaaaatacctagaagtcagccacatgataatgatcaagaaaatgtccttcatacataaagttgtatcagcaatgagaatattgctcaatcatctcaaaacatagatctctttatcccacaaatctgattcagttatgcactccacaaaaggactaatctacttctcaagtttaaaatttaattgcttaaaaaaccaaggataaagttttgttaaaagcccgtgtttagtttggttgagttgatcacactaagaacttgatagtgtggatgagacaaatactgattccagtaattcagctagtataaatgagtgacaaatgggcaggtctagtggagaagagaagaaaattcagacaataaagctgtgaatgcgtgttggagctgaaaaaatggcagatgcatttgatctcccaaactatgaaaaacaaaatatgaacatagttgggtgatccatctaactttctcagatgacaaggttagttataaattcaaataaaataaaattacaatgtacatgcttggataataaatatagccattactttgtacctgtaattaggcaggaacaattatggtcttatctcgtaatggaggcaaatgagtatgcaatttcttcatcatctcagtgagcctcctgattttatccacctcacccttttgcataagaagtctctctatcatctgaaatgctgcatcacttaagtgcctccctctctctaggacttgtatggagcactcaaacgcatcgttgacaaaccctctggagcataatcctgtcagcagaagctccagtgcatggccatgaggacaatatccattctccactaaataaccccataaatgcaagcctagatcaatccgacaattttcacagtaaaccttcattaacataaccacagtccgcgtttttgggacaaattttctttcagtcattttttcatatagctgaaatacaccttcgaagtccttttgtttaatcaagccaaagaacatggtgtgataggtcatataatcaagaataatatgtttctctttcatctcatccattaaggtggttgcagcctgtacatttttacacctaataagtgaactcatcaaagcattataagccccagaatcaggaaataagtttctcgctggaagttcatcaaacaatttacgtgccattattggatttcgagcaattcctgctccatgaataagagtagttattgttcctaacgtaggagacaaatttgacctctgcatctcttcgagaagtctcaaaccatcaccaaagcaacctgttttacagtaaacatcaattctaatattataggtgacaacatttggcttaaaacctcttgcaatcatctcgtgatagaacaattcgacagcagtagtatctcctgattctttaaaacccaacaacaatatattcatactctttttgtctggggcaaacctggaatgcatctttaggaacactgaccgtgcctccttcatctgcctctgtgtgcaaaacgctcgaagaagtacattgaactcctctgtaccaaatttcctcccaacgaaaatttcattctccatcttttcaaatgctgcaagcgtatcttcataggactggaactttgcaatctttgagatcatgatgctcattgactttagagtaagcaaggaagggtattcttttttgattcttttcatcaattcccaagctctatcgaaataccgcatccgaacaaggatgtgtagtgtcttctcaaaagcatcagtacttggactaaactgtgaatgacaaagggaataatcaaaaaactcaagggctttaagaccattggaatgggcagcgaaaagacgaccaagaacattctctactaaaatgttggaaattaaaggtggagggataacttgcagaagggtaggttgaagtggctgatcaggaaagggatgctcattaataagtgcagcaattttgtttattttgattttagtttgagattgtggaccttcactatgagtaaacgacctaacaacattaagtatgataaagttactcttttgtgggatctgaacaacttgacgatatctgactagttttgacataagaagcattgtctcactgaaagaaagaagttcaagaattaatacaaacaacaaaactactgctcaaaacaatgcatcatttgatcccaaaaccactgtaaagattgcaagttctcatgctaagtaatgttcaaaacaatggaatacaacaaccaattaaaattaaaacagaataatatatgaataacattttgcaagtacaaaaatatgattacaacatataggagataaaaaaaaaaaaa

SEQ ID NO: 218482 - DNA, 2759 bp, Cannabis indica
ttttgatttgaatgacatatatattgattcagatgatggggttgaggatccagagagatcatccccccctacgaatttggtcactagctcccttgattgcccttcgtgggtacagcaagactctcaccagtcaagtccacctcaaacaaattcagattcagcgtctgctcagtcaccctctagctcaaacggagaagctcaggtatattaatttagcaaaacatgtcttatgcacacatagaagacactccaccgaaaaaatttcctgcttcattcattccacactttaatttatttaatttctgttttcacaaagagcatgcaggaaagtctcccatgtaagtgttcatagtgatctaggatttttttttttataaatttggtataacccgtgactgtcccaaatgcttatgttatatgagccaagtgctccattcttttcccctctcccctctccctaatttattaatttgaggtgatctgattttgtttgggctgagttggtccaatctggtaagtttttattttttgctgtctggggattttcggtttatgtgatttgtttttctaacatttggttcattgtgtttttcttaccagagccgcacagatagaattgtttttaaactcttcgggaaagagcctaatgactttcctctcgtcctgcgtgcacaggtaatgacctgccaaaccaagcatcttcaagacttgtttccccacctcattagatttatatcatattaccttttaacttttcagattcttgactggttatcacacagtccgtcagacattgaaagctacatcaagcctggttgtatcattttaaccatttatctacgtcagtctgattcagcatgggaagaagtaagatttgtctgcataaaactgctagtgtgaccttggcgtgagtatgtgtatgcggtttgcctctttttaagaatttgagaaaccttacagttatctgttctctttcacagctatgttatgacattagttccaaattgagtagactcctggatgtttcagacgacactttttggagcactggatggacctttataagggtccagcatcaaatagcttttgtttgcaatggtttgtggtcctttagtatactttgtttgagctgactgtaattcttttagtgtgactaatgtggaagttctaacaattttgaaatttcttttgatgcaggtcaggtcatagttgacacgtccttgcctctcagaagtagcaactgcagcaagattgtaagtatcaagcctattgccctacctgcatctaagaaagctcagtttctagtcagaggtacaaacttggtgcggcctaccacaaggtattaattttctttgaagaggatcattctttaatatgtgctaaccccaaggggtggtcatttgtgggcatttgtttgttccaacgtttgaatccccagactcaaaaaccttggcatcactgggaggtctcccagttgaactgccagggcctaaaattcaaaaattaaaaaacaaaacaaaacaaattaagattgttaacccgaacccataatttaatttcatcatttagattagatctactagattagtgtgctagaacacaggctaaaatacccctttatattattttgcaggttattctgtgctctagaagggaaatatctcgttcaggaagccactcatgagttaatggatggtgtggataactcggagcatgacgagcattgcatcagtttttcttgtcccattgacgttacaaatggacggggatttatagaggttgttttcttatgattcttctcacatgtatagttcattcatgtcaaggcaataaggaatttgtaacaccattttctattgttttcctatttggttaaatctttacgtttagaagtagtaaatcttggtgacatttacaactctaaaagaggttcgtaacatcaattatctgtaaaattcctcatcagaattttttcttgacatgagcggtgtagtagttagctagaggattgttttttgccattttacacagaaagatgaaacttagttgcccactaccctccttatctgaacaccccaccccacactttcatatgctctcttaactacttgaaagttgtctgttctgggagtaatttttttcattcttatgctttgtaacatcttagctcctatattgttgttacttcattcaatactgattaatgattttagcttgtttaagctaataatattttttccttgaattatctagattgaagatcaaggtcttggcaacagcttctttccttttctagttgcggaggaggatgtttgttcagaaatccgtgtgcttgagagtgtactggaatatactgaaagccatgcagttgtaggcggaattggaaaaccagaatcttacaatcaagcaatggattttattcacgaaatgggctggcttctacatagaagtcagttgagatctcgattgggtgaattggatcctaatgcagaacccttctctttaaagcgtttcaagtggattatggaattttctgtggaccatgattggtgtgctgtggtaaagaaaactaactggacattctaaattgatggaaagtataggtgaaggagaggatcgtcccttgaccttgcattatctgaaatggtacttcttcacagggtctgtgagaagaaatgtaaggcttagtagaagcctctgaatatgcccaaggactttatcaagttagaatctgaagaaaatcagctactcatggtccc

SEQ ID NO: 218483 - DNA, 2785 bp, Cannabis indica
aaaagaaaaagaaaaaaaaaggcacgttgttttttccatacataaatagctcatcatatatgcaattatgcgttatatagaagtgttaactaattccttaattataatataattgatgtgatgagaaacatgtttaatggttctacacattttcctcactaaaaaaaaaaataccaagttcgaatcccctcccaaatatgaaacgaaaaaaattataatttaagtttaagtcatatacagtactatatatattggctatttggtgtgaggaaattagagggttgaattacaaaaaactcatgttaacagttaacgagatatcctatttagtgtatatttggattattgtagtctgtactattctgtattgtattaaatttcatttgcattatatgtttagtgcttctaaaaagtatcctcaattaagggaaatgtgtcaaataataatactgtttaactatatatttatatatttgtagtgtttatgaacatgtatatcctaatttgctgataatgacgatcactttcttatttcgcaatgaaattatcagatcagcaattacgaaaaagaagtggaagaaatgaagcacatgacaaggcaggaatatgtagcatctttgcgaaggtatatacatatatataacatatatgatcatcattatcactaaaaaaaaaacataattaaatgatcacattttattaaaaattaacaacattggtacatatatatgttggtgtaggaagagtagtgggttctctcgtggtgcgtccatttatcgaggggtaacaaggtattgtaatataattatataattatcagttaatctgtagttttgaatcattaattgattaataaaacaaatgtactttatcttaatagtgtttgatattgtgtaattattaattaaacagacaccatcagcacgggagatggcaagcaagaattggacgagttgcgggaaacaaagacctgtatttgggcacattcagtaagtaatagtatatgcatagtagccaagccaaattagtgtttgtgaaaaggcgaagctgacaattattactacctcctcttaataaggtacacaagaggaagcagcagaagcatacgacatcgcagctataaaattccgaggactaaacgcagtaaccaacttcgacatgagcagatacgacgtcaaatccatattagagagcagcacactccccataggaggagcagccaagagactaaaagacgccgaacaagccgagataatgacagctgtcgagtgccagcaaagaaccagtaacaatattattgtcgaaccagacaacatgacctcaccgctcacagacgcaatcaccaattacaatgcagccgcagtggctgcggctgctgctgccgttgctcatggccaccatggcggtggctggccagctttggcagctttccaacaaccattcactatgcataactacccttatggtaatggacagagccgaggactttggtgcaagcaagaagttgaagattctgatcatagcaatactcatgcctttcatgatcagattcagctgagcaacactcacaatttctttcagccaaacaacaattctaactcagttttgcataatctaatggggatggactcttcttcaatggaacacagctcaggttcgaactctgttatgtacagtagtagtaataacaataataatggaggtgatcatcataacgggtacggaaacggcagtggatataatgtcgttcctatggctaccgtcataacaaacgacaacagtagtaataataacggttttggtgatcatcatcatcagcagcagcagcagcatgaaaataataataatgtgtttggtaattctagtaacgatccttatagccatgctaggagcttgtactacatgtccacacagcagtcccctgtgacggtgggcgttgttaaaggtacagggtatgatcaccaacagggctcggcttgcagcaataattgggttcctactgctgttccatctcttggaccaaggtcatccagtattaacatggctccattcactgtgtggaacgactcctaggtttgttgtcgtttttggtgatgaagaagaagaagaagagaaatagtaggggattaatgggctttttaattttaattaggaattaatgtatacgccaactgggttcctaattttgattttctggttttttttactaattatcacctaggatattattatagtgtttttttttttttttatattctagctaacttagtgcaatagctatagctaggcattattgcatgcaaaaaggggtctataaatggttcatttgaagttcggcaatagcatatgagaataattatgtgttttattctcacttgctatgaattttgggaacttcggatttgaatgttgttgcaccctatcggatgtctttttttagaaaaaaagaaaaaaaaaattatgaattacaccaagtttttgtaacttttttgatcagcaatgtcataatgttatatatttatatgtgtgtgtaagtgtaagtgtgatatatttcatattgtgatgtctctccttgatttattttaattattttctgattattgtgcttaattatagtttaattgttacacacttcgcataccattgtgtaaatagtaccatgcaaaaataatttgattcagttttccacatttgttttctactaacaaaaatagcatgatgggtactactcaaagatataaaaataatttattgaaaaatgatgaagaatattaatatatatata

SEQ ID NO: 218484 - DNA, 4293 bp, Cannabis indica
tattattgagtttgtattgtaattttgagaatgaggtggagttgtcaaagcctattggggcgtccatgaagggtgaaattactattaagtagttgccaatgggtttgtctgctttgagaatggcgtttgtggtttgacctgggctgacaaatatggtgtctgtttcgaagggtttggtgtagacagcgtcagcttccaccacggtcagcttgtggccggcgatcttgaagaagagctcgtcgtttagggctgcgtttatgattcgtagtaaatatgtcttcccactttccacatgtagagtgtaacctgcaatattagttacaagggcaaaatcgtctcattacaagaatatatgtacatgtacatctattaacggttcattttcatgtattaataaaatgaacaaaacttttgacttgatatattgttgctcaaattcaaaaataagctgtgcaataatttaatttataagttattagtgttgtatattaattcactatacactcatcatatcccattataggattttgacattaaccattagatttatagagatctttagtcaagccaggaaagggttgtcaatgataattagcacaaaaacttttaacatagttaggaattattgatcacaaaatcttagcgaaatgcatgatcatataagttaatatttaaatatataatagcataaaattaagaattatatgcattggtattaggtatccgacaccacaccaatatgattcattaagaatgattagcagttttttaaatcatttattaaataaaaatgtgtgaaacttatatcaaattacattaataacagtttggcattttttttttgtagtgtttgacaaggtgccgtagaatttttcaataatatttgaacaaaaaacaaacaagcacaaggtttaagtatacccccatgtggtaattagtataccctgagaagaacaattaggaaaaggtcctggaaagccattaatggtgtgagcatcggagacattgggtggcagaccagcttgtgtggcttcgttcaccacactttcaacatctgctttccaccactcacctatatatacatatatattatttgtacatacaaaatgaaccaattaatagatactctatatatagctaggtataattaagttggaaaatgtctttgaaaaatgataatttaattagtataattaatgagtgagtatacctaatatgatgatcttttcggcgtgaggttttggaaaagggtaaggaaaggatttctttggtaaaatgacaatggcgccgtggactgtggctcttagccaggagatatgggcgtgccaaagtagagtccccctttgacctgttagggtgaaattgtacacgtagtttttgcctggctgtattgggcattgggtcacatatgctggcccatcagcccaacctgttcggacttgtctcactccatgcctatacaacagctcactcaaacatccatatatatatatttaccaaatatgtattgttatatatcttcatacaattttttatgagaaatgctaccaacaccacgaactgaaacattacatatatggttgttgtaattaatcgattagctagcgtcaccaataatataacttatatataacttaatatactgtaccgagaagttgtagacgtgttaagaaagctttatattctcaatcataaattacattatggttattaaatatattaaaagtatatatatatattgcatttattaagtacataacgtcaaacaattcaattcattttttttactcacttttcccttatttctacatttatctccttaaccatcaaacaactaattttttttatagctcttacaatatattgctttttcttgtctaattaattaaattcatcataaacgggactgaattactgtttttttttggccaatctacaaagtcaactttcatcatttcctctttgtgtttagtgactgtaaggctagagatgatattttatatacttgcaaagcaatgacgatgtattttttgttattgtgagatgtaataattaatgaatttctgttttaataatactgcatcctcgtgattaatatgaataggaacaacaataaagtaaattttttaagaaattatatacagtatatatatatatatatttcgtttaagtttcttttcaatttatttattttatgtgtccacttagtaatatgtgaattacaaatctcctttttatgtatatatatttcttattattacttcactattttttataataaaaaaattgtgacaaagatttaatatatgtgatcattggttaactatttctaatagaaatctaatcaaaatctttagtatatatttagataaataaaaacggaagaccaaattaatacttgttcattgttctcagctcaaatatgtattaacaaataatttaatgatcgttaatatgtcaattttcgggacccatatgcagtactagcaaggatatatatataaatatatatatatatataaaacttcttttaaaaagtgatttagtttatacatagtatatatatgtatttatatatatgtgtaataatatattgtaattttgatctcaccagtgaatggtgaggttgtatgtaacgtggtttgtgacccttacgaccacgttatcgtcttcccttgcgtaaagagttggacctggaaaatggccgttgacggtgacaatgggtttagttgagcaaagctttgtcgtattcctcaatacaacctgcatatatccatatatatacatataatcttgtccttattagaattatatatataaatatgtgtgtcttctttgatatatttgatcttgattatatcagcatgttgattgataaggtcttgatcagcgataaataactattaactttaatttggggaccagtactacactcaaataattatatatattaattattgatagtccaatattataatataaaatatacggacacacaagacacagcctacatgattattgaaaatgatatacatgaataacccataaatatatacacatatatatatagctagggagggacgtagactgatgctgttttagctactttttgatctttcttttcttccttctattattcctttgttttggaagaagttgaccaataattaatttgtacgtacgtttcgtctatctgctgctttttattattattattattattattgttattattattattattattattattacttgcttaaagcgatgatctttgctgttaatgaatgagattattattatagactaattggtctgattcttagttaaataaaattcaacgaataaaaagaaatatatattgagatataaagctcaattaatgttatgaatgaatctgagatttcgagactcgcgaatatcttttattcaataaaaaagaaaaaaacccatcaaaatggtgtatatataacatcttaattaataatcataatatatatagttcctatacaaaatatatatatgtgcatgtatgacttgattaaaatatgcatgcatgtgtacttacatatatattttcaagtactctatatgcatgtatgacttgattctaggtttttctctacacagggacacttgaaatggtacgtgtgtcctataaacgaaagaattaatgcagaaaaagatatatgtacttactctgaaattgtagtgacgaaccaaactgtcaaccattgccggaaataagaaagaaaggagtagtacaatctttaataacatggacccataataactagaagacttcatgatgatcttaatcatcttattaatttctcttattttatcaaaatatgtagataattctaaaaataataatgtgttcgttatggtgtgcgctctttttgtaggaatgagtttcgaattagtggcaatgcaataaatatatatatatatatgtgcaactaggatgcaatgtcgtttttgtagacggtaggtgaatgagaaatgcatgccaccccaattattattttatttaggtacatgttgatcaattgtcataaacaaatatacataaagttgaaaaatagttttcgtgcatgctaaacaaagtatgtatagtatatatcgtagttatgaccagtcgcctttaaattgagtatttttttatctttgatgaagttaaattgacttcttgtgattcaaccaaccagaaattcactcacacacaaacacttgtaagaactgtagctagacaatcaatcaatcaaaattgagaagaaaagaaatgcagga

SEQ ID NO: 218485 - DNA, 5684 bp, Cannabis indica
attaatttagaaattaaacaaaaataattaattaaaattattaataaattttttaggtgcaaactttttcccgctccttctctctctttcggtgtctcactagagctatggcaaaaaaggcgaaaatggccgagaaagggaaaactaagggaaagaaatctggtccaacatcctcggatagagtcatcaagactagatccatggatgttgtgctaggaattcaagaacttgagattgacgaggctgaagaatcaatggaataatgtaacgaagcaatggaacagtacgtagagagaatttttttcacctgaggaatcggaggcagtcatcaagagacagagtgagattcgaaatgatttctcagattggctttcaattgctaacagaactgctcaggatgttagctctaggaaaaaggtttcaccttttattctcagatctaacatagttcgaaacctggagaattcgtttgagaaatcaaacaaagatgctgaggaaatcctgggctcgaagaagaggattgatatcgaattcaaagatattgcagaagaggtgaattagtggcaacctttgttagtatgctatgtcattaaagctaacccttgaataagcatccttgagggttttgttcgaagactgtggaaggatgaagtggtcaaagttggccttcttaccaaaggcatattcatcatcagatttcaaaatatggagcagagagacaaggtgatgcaccaggggtatgttttctttgacataaaaccaatgtttatgaaaccttggaatccaatagatgatttcactaaggaggaggtgactaatgtaccaacctggatacaattgagaggtctagatatcaaatactagggggaaacatctcagtttaaaattgtgagtcacatgggggagccattacaggtagacaacgttaccaagaatagagacagactccaatgccctcggatcttaattcaggtaagtttgtctcatgactttcctaataaaattgcatttatggatgaatttaatcatgaggtggaattggaagttaaatatgagtggataccacttgtatgttacaactgttctggtatttggacatagcacaaaagattgcaggaagaaagaagagaagaaagaataagggaaacaaatatgggtgccaaaatagataaacacagagaaggagaatcaagtcgatgctgatgggttccaaaaagtgagcgaaggcaagaaaatactgataaataatggaaaagaggagactgtagtgcagaatatgttcgaaactcttggtgatgaagctggaaatatgattaatacatggaggggagggagatctctcttcctcaaatggataggtttttgtgttggaatgtaagggggattaataaccagtaaaagcacaatgagatcaagcaattgatcttctcgaagaaagctgagttcgttagtttcctagaaactaaggttcaaaacaagaatatgggaaccttatatactagtctttttaaaggttggtgctttacaaacaataatccttggttggataaaggaagaataatagtttcttggcagcctagtgtatattcagtagatatcagatattgctctagccaatgaatacatagctatgttcaatcacagtagcaagtagggaagttttttgtgtccttaatctatgcttttaatgatcaaaagaaaagagatgaattgtgggctgagctagaacaattggcacagaatatagatgagccatggataatgatgggggattttaatgagataatgaatgctaatgaaagaattggaaaaagagctcatagattcccatctcggagattttgagacagtatggagaattgcaagatggaaatttgaaatattcaggttcctttttcacttggaacaaaaacaaaagccagaggagagaatattttccacaattgatcgagctatggtcaatacacattggaaaaatatctttcccagttctgaagttgtattcttacctgagttaagtttcgatcatagccctatcttggtgactatttatgaagatagaagctatggaaaaaaaccgttcaggtactataacatgtggaaaatggctcctgattatgacaagctagtgactaagtcttggaaagaagaaaacagggggtcaaaaatgtttagcactatccaaaaactgagaaggctgaaggctgtgttgaagtagattgatcaggcaagtttctcagagatacacaagacaaagatcacaacaagagcataattggctgagttgcaagctaaactgagtcaagagccacataataaagaattgatggaacaagattaggtggtaaggaaaaaatatgctgagatcagtaaggcctttgccaactttatgtcttaaaaagctaaaataagttgggcaaaatttggtgatgagaattcccacatttttcatgcttctctaaaatcgagaagactccaaaataggattttctcgattgaagatgagcatggaaattggtgtgattcaccagataaagttcaacatgctttccttgagtattaccaaaaattactaggttctactacaccagcaagaaggaaggtttttcaatcagtagtggatcttggacccaaagttacagattgccatagggagatactacttgttgattacacatccaaggaagtggaagtggctgtattttccattgatagggataaagcacctggacttgatggttatgggagtgcattcttccaagataattgggatttagtgggacctgacatagtggaggctgttatttctttctcaaattctggaaagatttcaaaagagataaacacaactactatcacactaattcccaaaactacatgtcccaaaagtgttgtggattttagacccatctcatgttgcaatgttgtgtatgagatagcaaccaaggtgatctacaatagactgaggaagatacttcctgatcttattgcagaaaaccaaggaggatttgtacatgggagattcattgctcacaatgtgttagtgtgtcaagacttggtgagactgtatgggagaaaaaactgtaaaccaaattgcatgatcaagatatacttgaggaaggcttataatactatagaatgggagttcttggaagagatgatgactgctctaggtttccctggtaagttcataaatcttattatggaatgcattagtacccctaaattctccttactattgaatggctctatttgtgggttctttaatgcaaagagagggttaagacaaagtgatccgatgtctcccttcccctttgtgtcaggaatggaatacttatccagattcttcaccaaagtgggagaatggccaggttttaaattccatgacatatgtgccttcttaaagttgaatcacatgcgttttgctgatgatttattagttttctgcaatggagactttatttctgtgatgctgctactaaaaggacttaagttgttctcaacttcatctggtttgttgccaaatgaacaaaaaacaaccatttattgtccaggaatgcctgaatctgaagtctccaggatccttgaggcatctaattttacaaggagctcattaccatttagataccttggtatccatgtttgttgaaagaagatatctcggactgaatgccaaagtctgctggaaaagatgacaagtagaattcgaatgtggagtacaaggaacttatcttatatggatagagtaaccttaatcaattcaattttgctagctatacatacatattgggcacaaatttttattctaccaaagaagctcttgaaagatatagaagcaacttgtcgatcctttctttggaaaggcacttaagaagggacaggccctggtttagtggcctaggattcagtatgcagacctaaagcaacaggaggtttaggctttcaaaatgtacatcattggaatgtagcagctttggggagatatgtttgggacatagctagtaaaaaatattgtctctttgtcaaatggatacacaatgtgtatctgaaggagcaggattggtggagttatgtaactccattggattgcagctgggcatggaaaaagatagttgctgtcaagaataagattaagcaaagggtagacatgaatggctttgtgatgcagaaatataagatccaacaggggtaccatttgttattttctgaatatgagaaattgccttggagtaatctagtttgggatagactcattattcctaagcataggttcattctttggttggtgctttgggaaagactgaacatgaaagagagaatcagcaagtacactcataacatggattcaaaatgtttatcgtgtggaaaaaaagatgaatccatagaccacctattttttgagtgtgactatagcaggaaatgtctacaagagataaaacagtttctgcaatggaacacaccagcaacaaacattaagcagctgctataagcatgtcacaacacgaagaggttctctgcaacaggaaaagtatggtgaaaactgttcttgcaagtcttgtgtattacatatggaaggctaggaatgaagtactatggaatcaacaagtgtggctcattaatactacgatgaaaaaatctcaacaaatgagcaagctgggaattaaggggctgctgcccaagaaggccaaggttgaagataaaacatggattctgatggtgtgattttgtaaaaaggctaagttgtaagtataaatttgttagcaaaatgtaaagattagtgatgtaaaaggtttgtttggagcaataaaaattcttattcataaaaaaaaacaaaataattaataaattacctgtaacctaatactaatttgattttatttattttttaaaataaaaaaatatttaaaaatattagttgtaaaaaatatcttattaaatttttaattaaaaaattaatttatcttaaatatataattaattataattattttgagtctacaagaaatttttacttgttagtaacctgttatagcaggtcacaaaaaatataactatcatatttacatttttaatataatcattgaatagtcccccaagaatatatatatatatataatagatactataattgttaacgtagatttttgttaaccaaaataaatagcctttttgcaataaatgtatatactacagaattatatgcgtatttattgaacaccagatatttttacgtggttttgtagttaagatctacatactccacgagtccttattattagggatatttttgaatgcagaatacaataataatttttgaataagtaatcttttgttaacgcagattttcattaacaaaaaataaatagccttttagtaataaattatctacaaaaattaataagtaagtattgatagaataactccagatattttaacgtggttttgtagttaaaatctacatactccataagttcttattattagggatatttttaagtacaaaatacaatatctgattttgaatgctctcaaattttgccatccgttttctcatggaatctgccccaatttataggattataaattgattgttatcctttttggggattgatttaaatataaatattcatgaaatgtggacaatccccacatttcatttaaatcacacgtgggataatatttaa

SEQ ID NO: 218486 - DNA, 7438 bp, Cannabis indica
taattaaaataagagaaatgctaaagggcaccagtggtgcttagcaccctcctatgtgtcaatatcgttattcgtccaattaagtatcgggtcccatataatttaatataatagcttttagagagtattgttagccaatcgcaacgcgacatgtcgagaaggtactagacaccactggtatctactagcaatgctcttaaaataaacaacatgccccgtctaggggtggttaacatcaaggacaagagtcgagatcccaaaggttatcgtcatcatgagttctaagaaataacttagtatccatcacgatataacttggctcccggagtctaagagctccttgatgaatgttacgattactacattttagtgaaaatagagaaaatattatagcttgtcctttttatacaaacaaaacaaattttccataaagcggaataaatgttgggatttgcatgcccactattagctgatgtgtatatacagttagttaattcagttacagagttagttacgtctgctatagtgtgttcagttgtatctatcagaatccttaggatgttagatttcaattagttattttctttcttgctgtgtattcaagattgtaacaacctttttactctataaatagcaacctcttgatcatagttgattaatcaagctttttcattttctcagttctgttttctaaactaattgttcttaaagtctttcatggtatcagagtaattgactcacgtccatggcaacagcttcatccgatgcttcacaaggtcatggttctaccatgtttggcaacaacaataccactccgccaagctctgctacactggcaacaaattcttcatggaatccattctcgaattctctcacatcatcactaaccatcaaacttgatcgaacagattacttagcatggaaattacaagtcgtaccaacagttatatgacatgatcttcatgagatcttgttcaacaatgttcgtccttcaactactttgattactggagaagcaaatcctgtcttcaaccaatggaagagacgtgacaaactcttgttgtcatggctaagatcatcaatgagcgaaggcatccttggatctgtgatgcctattccacctcctttgatgtctggaaatctcttgaacaaaaattctcaggccaatcaaaggccagactgctacaactaaagggcaaattaacaaatatccagaaaggtaacatgtcaatatttgattatgtttataaaataaaatctatttgtgataatcttgccattgtttgatgtgctatcaatgatcaagacattgagttgcaaattctcaatgatcttggaccagagtatgactcagtagtttctggaatcacctccagcaatgaatccaagagtcttgaagagattcaagccctgatggcccacgaatgtcgactcgaaaggcatcactcagtttgtgatatcaacaataaaatggctgcaaatcttgctgttggaaattcaagaactgtctacaacaacaataggaacaataactttagatctttctattagcaacgacaatcaaattcgaatgaaggaacaagaggttcaaataattttcctccaaggtatcccaattccaactcgagacctatttgccaagtccgtttaaagattggacatactgcctcggtctaccattacaggtttgataaaaactttgttacaccaaagaacaattctcaatctaccaaagcctatctttctgaacaagagtcatttaaagttaatgaccctcaagcctacacaactacaacaatccctgattttggtgatgatatgagatggtacgtggacattggggccacaaatcatcttgctcttggcatggagcacctggacagtgctactccatatcagggttctgagacattagtagtgggagatggtaagcaactgcaaatatctcatattggaaaaaaattcattcactctaactcttctccatcactaaaattaaaatgtgttttaagtgtccctgctattaccaaaaacttgattagtgtgtttatacttacccatgataataatgtatttcttgagtttcacaagaattatttctttgtgaaggacaaggacatagggaatgtcttagttcgagggaaacttaaaagcggcttgtatgttcttaatgaaaacaacacaaagttttcccaagctgctattcaaggtcaactggccaccatctcaaaatccaatctgcccttagaaatttcttctagcagtactaataatacatgtaaaaatgattgtatcatcaattttgtgagcattagttcacctacaaattgtaacaatcaatccatcaataaagattctacttcttctgattttgaatctcaagtattgttaactactgttggttgtgatgttaatctatggcataggaaattaggccaccctgcatgaaatattttaaaacagattttatctttcctatctcttcctacgtcttacaagatctacaattctttgatgcctgtcaaaagggaaaaagccataagcaacttttccctctgtcatcaactagagccacaaaaccactagaactaattcatactgatgcgcgggggccctctcacacaccatccatatatggttttaggtattatatccatttcatagatgactttagcaggttcacgtggatattccctcttacacttagatctcaggcttatgatgtatttacacaattcaaaaaacttgttgaaaatcaattttctttatctatcaagtctgtccaatcttaccggggaggagagtatgtagtgtttgctaaatttttgcagggacagggtatccactttcagcatccatgtccacactcacatgagcaaaatggtcgtgcagagaggaaacatcgacacattacagaaacaggtgtcacacttttagctcaagcaggtcttgatatgtcatactggtgccatgcctttcaatgtggagtttacacaatgaacagaattcccacaagagttcttggcaacagcagccccttccaatgtctatttaataagtcaccagagtatcagtttctcaagacatttggctgcatctgttatccccatctcagaccatatcactctcataaactaagcttcagatccgaagcatgtagatttttgggatattccccaaatcacaaaggatatatttgtgaaagctctacaggccgaaggtacattgcaagggatgtaatcttcaatgaaaaacacttcacatttcccctttctcccactacaacaccaaccaccccaaaatttgctccaactgctcaattttctccacaactacctgcccaaaattttactcctgcaatgtcacctgaccatcaagataatgatgtatccattgcatccccaattgccactgtccagagagcctaatgatcctcacccaacacctacacaacctggttctcctttgtctaatgcttctacatctcccagccttcaacaactgcctactggttcaacacaggctgttgcttctgattcaatgcccctattctaattcatgccatgactacacgatctcagaggggtattttcaaaccaaaatcctatatggctaccaaacatcagctcccatctaccgtgctcccatccgaaccaaaaacattaaaagaagcccttgctgaccctcgatggaatgcatcaacgactgctgaatttgttgctctcaaaagacaaaatacacggacattggtcccttatactcctgatatgcaagttcttacaaataaatgggtgaataggatcaaactaaatgcatatggaacagtggacaggtacaaatctcgattggtggcaaagggaatcctccaaacttttggcattaattttgaagacacattcagccctgtggtcaagcctgccacagttcgaacagttctcacaattattgtgtctcatggttgggaagtcactcaacacgatgtaagcaatgccttcctacatggaaccttgaatgagcttgtctacatgtaacaaccagctggattcgttgatgcttctcagcccactcatgtatgcaagttaaacaaggctctctatggcctcaagcaggcccctcctgcatggaatgaaaaactcaaattaacattactacagcgggggttcactcaatccaaatctgacaactctctgtttatctatggttcagcttccaatcttgtcttgcccctggtttatgttgataatctgttactcacaacccccaacaatgatctcaaacaacaacttatccaagatctcgacactcatttctctcttaaaaatcttggtcctctacattattttttgggtgttgaaattgtgcaaaactttgttggcatgtacctctcccaatccaagtacatcacagatctcttagtcaaacttcaccttgatggtgtcaaaccatgttccaaccccactagttctactcacaaattatctgtcactgttaaagatcttttcccagacattcacttgtacataagcacaatcggggctctgcaatatttcaccttaactaggcctgatgtgtcctatatcattaacaaactgagtcagtttcttcatgccccaacaacaactcactgggaagccactaaaggttaccgcgatacttaaaaggcaccatgacagaaggtcttctcatcaaaccaacaccttttctcaacttgtatggctactcggatgctgattgggccaactgccctgacgattgtcatttaactagtggctacaccatcttcttaggaggaaatttaatctcatggtctgcaaaaaaaacaggctgttgtggctcgctccaacattgaaagtgaatttcgtgccttagccaatgcaacctctgaaattaaatggttggtttctcttctgtctaagcttcaactcaagctgcatgaaccaccaatactttgggtcgacaactagagtgctgctgcactcactgccaaccctgtgttccatgcacgcaacaaacatattgaaatcgacatgcactttgtccaagatctgatccttgccaacaaacttcatgttcgatatgtttcctccattgatcaagttgtcaaactcctccccaaggctctcacaaccgatcatttttagtatcttaaatctaaactcaatgtagtcaccactcccttttgtttgaggggggatattagctgatgtgtatatatagttagttaattcaattacagagttagttaactctgctatagtgtgttccgttgtatctgtcagagtccttaggttgttagatttcagttaattattttctttcttgctgtgtattcgagattgtaacaacctttctactctataaacagcagcctcttgatcatagttgatagatcaagcttttccattttcttagttttgttttctaaactaattgttcttaaaatctttcacccactattttcgcatacacgttttctatgcactcataagcagctcacatagtcaactatcacatcaatgaaagatatgtcaactctactctacctacgaagtgtggtgagcttgctccatatgggctgaatatagagaaattactcatccaaaatgtgtattctctcaattagaaactaaattattttctcttaactgatagaccctggcttccactataaataaaaccacttcttcattgtaaatgggtttagattttcggttatcaagtctaaatattgccaaatccctgaaagcctccattgttgtagcgaataattccttaagagaatgaatggtggacagaggcattggtttttatggtctaaacaagagttcatggtgaaagaaataaattaagaatatatttattgaaaccataagcccgagatctcaacatatttataaacattaaatcctactatacgagtaatagaattttaccttccaattgactatcaagaatccttgctcttttcgtacatttatttattatccactccaatcttgctattgattatgtcagattgcataccaagatcttccgtatcaacctccaatccacaaaggcatgcttgagtactagattattaatttaggaatgatttgtgatcattaagtgttctcaacgcataagacttagtttgaggggtaaaaatattctcaggggtataaaagtaattttgctcataataaatatagaagagataattagatgacgtgggagattttataagaaatgcaccgtttcattaaaacgaaactaagaagaagcaaaatagagcttagaaagcatggaatgtggagtagagctcgaaggaactaggagtaagttttgtgaagctcgaagagtagaagaagacaagaaaatccacgaagatatgaaatgaattagtccacatggatatatctgactgagagaaaggaaaggttcagtggtcattcttgcctataattgggagactccatcgttcaaaatgacaaaattcttgatcacacctgacaagttgaaattctgccaaaatacattctcaaattattcttagctcaagaagcaggacgtctaaagagagattatcaaagtttagagggaattatgtaaactagcaaaccattataattctattggatcaaattctggtgtaaagaatttaatgtcataataaaactttgttcttaaggtaatttttagcataaacagctagcagtgacagtggtaatcactagaacaaaaagttaaagactaggctacaatctaacatgagatctataaaagcagtggagaatgtgtagaaggtaatagcttcgagaaaattaaggagatacttcaaatcaaatttttgatccaaaaactgctcgagctatggaaatgaacaaaagtaagactgcacaagataagtataatgaaggaatgtagcgtctggtagaacaaaatggctagcatgagtgaaaagtgaacaagacaaggactcaacatgaggatggacagacaagcagttcaaaatcattgttatttggcaatacacttcagcaaaaattgcaacaagcagcgatttctcaagatacgacgagaaagataaggaatcagctaggctgggcaataaaagaaaaagatttgctggaaggaacaagaacgacaaccacgataagtgaaaatcatgattccaggctagcatcatgcaatgttgccagtacgaagcagacattccaaaaatacttcaatcaaaaatgagggaatgtgaaagtaagaatgtaatgtggaccaacgctaggtggaatagcacaaaagtttccagtgatcgatatgcggccatagcctttgggccctgaacaatctagagatgacttgctgttggaatatgttttaccaggatccagatttactaccatgtatgttatttaacatcctcaatatgaatatctaaaataatgtaaataaacacatataa

SEQ ID NO: 218487 - DNA, 4715 bp, Cannabis indica
aacacttatccaaggtgtaagcatacctatcgctgattatcatgccagtctaaatccagtgaactgacaaatcagggaataaaactttcgaacatataatcaagattatattccactgtgctgacaacactataatcattagcaaatacatatgttttggagttaacagaatttataatcatgaaataaatcatgtgaaccatgcaacataaaacgttatttctgatctttattaataagtaaatttgattatattgaaatgagttttatttagggcacaaaatccaacacagaggtacattccttcccactctgatggtttttgtggggtcttcatcattgatactcacttcttctacctcctccattggctctaaatttcaatctgtcctaaccatgggatccaactcatcctgaagatcttcttggatggcctcagtatccatcagatctttcattccaagagcaatagatgtctcctcccggaccatgaacacagcccatgttgagacgctgtaataggttcacacacctttttgatcgcctttaatcgtgccaatacatctgttctcacaaggaaatttcatacataaatgcatgacggacgttactgccccaaagttcactagggttagccaccctaatatcgtattgtacgttgttgggaaatctactaccacaaaagtcgagtgcttaaaatcacttgcattattttctcctttgagggtaataggtaaccagattttccccatgggcattaaggcgtctccattgaaaccttgcaactaaatagggtaaggagttaaatctgcttctgtaagccctatcaccaaactttaatagaatgttaactgagcttccattatccacaaagactctagaaactcgcttatgggggaaacgcacatttttggcatcattctcggtaaaagtgatgggcatattcatcattctagggtgctatgcaagagattgcactagcacgcacacttttccttcttctacctctctcaggtatcttttttgcgagcttctcgtgcttcctgcaagatgaggtccacctgagattgtggctacgtgtccatctactagaggtggggtgaattcgagaggatatggggttccaggtcccagtgcaagtaacgatacccaagctggcactagagaagcatggagtgcaggcaatgatgttataaaagcttgagaatgccctaccccctacataggatttacaacattcttttgtcctagaacgatcatgttcccgtggacgaccctctatctgagataaatgatcagaattcagacccattgtcccaaatgtcttgctctgaccaaaattcaatgttgtctttcaaataatcacactcactagtggtgtgacccttctctccgtggtactcgcattctttgttctgatcatgtctattccttcctttgtgaaggttttctatagtggaccatattgcaggtcgctttgtagacattttcttttatgtctatcacactagaatactcaaagtacttggatcatactccttccttggctttttcgaagagttgttgcagttatttcccttgccccctcttttgttccaagagtggctcacagttgattcgggaacctcagttttttcctgtctgggagccacactgcacgcggtctgtgcagccccatacccaaaaaaatgggtatgtgtatgtgcgagatcagagggtgtgggtccgtaaatagttggggaaaattgagttctgagaagagttaaagccaaagccagaactcggggtgtgaagctgggtgtagtcgtggaaggggttggagctggttgaactccaaaagattgtatgtaagcgccctcaagattaataataccttgagcctttgacataaattcacttaatgttttggctcactttctctgcaactctcctcacaacaaagaaccaacagccaatctagattggagggccatcaatttcatgttgtcgctgaccttagtctcggcagcagcctccatcatccttcgaacaaaagcctgcaggctttctttgtttgacaaaagcctccatcatgtcgtcgttttttgacattggtaagagaactgacttccatgtccttatcacgtgcggtgataaactgtttgagaaaggccgattgtaagtccttccagctatcaatcaatcttggagccagtcgcttccaccagtcttctgtagacttggtcagtgttagggaaaaacataaacacttggcatcgtcgttgactcatgccacttgcatcatcttgttgtatttttccaagtgtgctcacaaatcggtccttccctcatacaactcaatgtggggcattttaaagttttccaaaagtggggtcttcaagatcctccttacacatggttctaggtcttcatcttccgaatccgagagggctccgctttgctttttgaccagcttggttagggcagctatctgctcctccaacctctatatgtcactttcaggaagttcacatcccctcattttatcacttaaatggttcctgaggtcacccccatgtggcctcgctttctcacttttgtacttctcgtacttggcgtccaatcactggtggaggtctgcggtggaccagctgtcctcaaaatgcctaacagtcgccctttcgtcctgattgatagaatcgctagggtggttcctccgccccttgggcttaagtactctcgtactttgcccctttggcatggtttttcctctaggattagaagggcgttcaagttcgaaagcactggtggtcttctgcgtcctcaagggctctctagccgaatttgtgtcttttcgaagaggtttaggaggcaatttttgtggggggggtcatctacattgcctttacctttatccttacgagaatttgaggtttcggtctcaattttcctgagagcacgctcttcggccattacgtcccccgaaggatcatcatcggactccaccaagtcctcgaatcttttttggaggtgctccataattctcttcattttttcaatgaacttcctttgttttgctaactctgtccgagtagcctctagttctttggtcactcgcagtaaattcaggtcatggtcatagtattaaccatctttgcaatactcatccttcacatatccatcgtcgtcatcctcctctttcgtatcttcaaggttttggtcatcatcaatgccatcaaacacgttctcggcatcctttcttcggttctcgacattggtcatgccttcttctcttacaccacctggttggagaccgaaggcaagggagtctacttcctccataagagtatccatgggagttttcttgcttaagttctttcgagtatttaccatggttgaggtggtgcagtgactagcaaactttcctcagctctcaatgaaactacaaaaatatttactgagattttcaaacagtaataaaacagagcttaagagagatataaaatgttaaataaaagaggtaatttttatgtgttctaggtgttaataatccctagttcacaagtccgttgtattagccttacaggcgaatgtttgaatattatgttacaatataaaccctagctctgtattcctattgtttctcttgaaggagaagaaagctaataagaattttaggagaggttaggtaagtatgaaaatggtcatcctttgtacatgaaaaatgagagtatttatatgcatacatgtgggtaagggcatacccttcacccacctagggtttcgtactcaacacgccaaaaaggctgatattacatcatgatgatttgaccgttggttggtaagaagcttgcccatcatgtggtgtacggctactgtaaggaattttttgtgaatgaggatacatgtttctcaaaggtttcaccttgaaaaattattgtctaggtaagtcgttagacaaaaagggagcttcaaaggcacgtacgtgcactaccatggtctaacgcaagggacacgatttgatttggtatcagaagataaataatcgtcactttgaactccagatggaatattgttaaataggtttcaagatcattgagtcaagtccttctcgaattacactaacccactaccttcctggaatactcatagcttcaggggactttaatactccttagtggcagatgaatagtgggagtcctgatatcctttctgtactcactgatatggagaaccttcgactaactcctggaagataatgtcttctgtgatgctattaaatggaagacacatactgattgtggatagtcagaggtggcatctttccgtaattgccacgtagcaggcatccgagaatacgaataacaagtaaaattacatggctttagtatggggatgacaattcccattattttcatgtctttttgaaaaaaagaaaaaaaaaaaaaaaaaaaaaaaaagaaaggttgaaaataggattactaccttataagcaatggtgagattattgtgtattatgatcgtttcggccattatgtagatcactttcgaaactttttgagccaaaaaaagtaatgcgagcatggatgtgaattggattgtcttgatgggtccataaactgagtattcagtaacaagtcaacttgataaggcttttctaaggatgatgttaacgcatcaatgttggtatatattccttgaaaagttcaggtcctggtggttttgggacgggtttc

SEQ ID NO: 218488 - DNA, 3164 bp, Cannabis indica
tttgaaaaacaaaaaattaaataaaaaaatattaccaaacgccaccataatattattttattaattatataattttctttaaaaaaaatggacataaagtaaagataattttataattaattttcttaattaatctatctatttaagattattttcaacaatagcctaatttttatttgctaaaaagtaatttcagtggtagggagcattttgtaaccctcaccgtggaattgtcatgtatatgtaaaattttgaaatgcaattgttagtgtttttcttttctaaatatagattatagaatagaaggggggcattcaataaatttggtggagctaataatataagccaagctaagctaagagatgggagtgaagtgtgattagtaaatagtaataaataggtagagtttactaaagaaggaataaggcaaagggggtgggtaaaggggtccttggggttatgactcatcatcatctctctctgtcactccccaaattctgagcttctatctgattgtgattgattggacatgttgcttttgttttctttctcctctcctcgttgtcatctacagctactctttctttctccttctgctgtgttaccatattacccttctatgtatcaactctctatactttcctactcacacctttgttttatagacttttgaaactcttatcacataatcttcattttgtaattttcttgttttcatctcttaacatgtaatttgtaatttattcaaataaaaccttttatttgtaatgattgtcgtttttctattatgattgaatttattgtcaccgtgtaaattatgtcaaattatacgaaattttctaggaaactttgcctctctattttttcttttaggtgaaaaacaaaatcctcttcaaatttctgaaagcacgatcactttgtctcccaacttgtttttaaagtaatttgggtactactacatcaaattttcttttattttaattgtgacaaaaaaatccaaattaagtgtcattttcattgaactattgaagcaagggtaatgttgtaatttggggaactccatagatgataaccaaggtctctgtctcttcaacaagctcatccgctttataacccaattaaacactccaccccatagaggaatctcttctcactttcaatgccactttctttcagtcagagaacaaaaataattctctctctatctctctttcagactaagaagagctatctcaactaaagctgaaagaattcatcgaaaactagcactggttgtgtgagcgatttcaagtccaagtaaaaaagcaacttcacagcagtacatacacatgcttctgagggatgggtatgagctcaatctcttagtgcttccagattacagtgattaacaccactagcttctttcgtcacaagcctttcacgtccatttaagagcaagacccaccttgagaattcttatacgtacttgttaaaactaagaacaaaagaaaaacattaaacaaaagctatgaccagtggaaaagtctttggcggttcaatcatcaccattctactaccagacgaaaggcatccctgtaattctgatcttctcaactctctttggattcctggctcttcctcatcttttcaaggtaactagccaaactctttttattttctttcttttctttttaaaagcaactttcgctctgttctaggccttaattatgtttttgggattgctgttttttttctctttattgatacccttttccttaagctattttcccacttgagcaagcgtactttgtctttctttgttaacttttatggtatgaaatgttgcatctagatttgcaaactctgatgctttctaattcatggaggctctctgttgttttcctctcttttgtgttccttatattaaacaatcgtgaaatcaaatacaatatgtgcgtctgtctagatgtggcctagtttagttaaaaagactaaatttgctgctaaataaagtttgatgttctggacttaactagtgtctttatcctctattttgggcatctaatcctgtgtttggtctcatttcaggttcaaaatcaatgtttagttttgaaaatgtatgcggaggagattccacagatgggtccttcttccaaccacttgacaaagatgatgataatggggatgatgattacgatggatgtttccatcaacccggaaagaaaaggcagctctcagctaatcaagttcggtttctcgagaaaaactttgagttagagaataagcttgaacccgaaagaaaagtgcaacttgctaaagaactgggattgcagccccgccaagtagctatctggtttcaaaacaggcgggctcgatacaaaaccaaacagttggagaaggagtactactcactgaaagccagttacgacagactaaagtttgactacgacgttcttctcaaagagagtgaaactttgaaaaatgaggtataaacacaaacactacttcaaaatgggttgtgttaagaacataacggtttttaaatttattacctttttgttcatctatacaggtcgattctctgaatgaaaagtttctttgcgaagagaatggcaacaagggtcatttggaaaacccaactgtcaaaacaacagattctgaaactgttgcgaatatggcaacgatggtggtatgcaaacatgaaaatgcaagctcagctaaaagtgatgtttttgactctgatagtccaaattatacacacaattattgctccatactggagccagcagattcttctcatgtgtttgaaccaacagaccactcagacttttctcaagacgaagatgataataacaacaaaagcaataataataataatcttatgagccagagcttatttgcaccatcatttccattgccatgtatccccaagtttgaagcttgcttttatgatgacccacctgcgaattcttgtaactttggatttcaagttgaataccagtctcttaatttctagtcttagtgaagtgggctcacatttggcttagataactataattatatgcaaaatactttaagttattagtagtagttgtaattaaggttattaaaaagaaataaaatcattattatgtgatggtaagactattgtgcatgattactttgctctagttttagttttgttt

SEQ ID NO: 218489 - DNA, 5560 bp, Cannabis indica
ttcttgaactcactaacagttggcatattttcccggcaaaaaaccgtcgccggttcaaccgactcgtcgccggtccggccagaactgctgttgctcagcctgtgttgcggcggaagcattttgttactcgctccgtttgccggattggttccgctgctttgcagagctgaaatgaccgatttcagagcccgactcggcgacgtccgattcgatatcatcaactcgccgatctccgccgcgctgagactcgctccggtctggaaaatctcttcaacttgagggaatagcttgtgttcctttaaccctaggtaattattggctaaacctttaaaagcagagaaatcgcagagaggaaaatggatgtgaacatcgattcgacctggtctcattaccgattgatcgatttgatgatctttgctgttcatcgtgaataccaaaactcgttcttcgccgcaactggagattataccgtccatgaagtttagtaatcccgataaactcactccgccggctatggcagcggtgcgtttccccgttaagaatctgtcgagatcttcgacgacgatgagtgatttcggagtcgtttggagaagtaatgttttcaaatcggagtcgtcggagactttggagatatcgatatcgtacacgtcgtagcagagaaacctagccatggcggcaatgaagctggtttttccagtaccggaagctccgtagagtaaatagcttcgtttccaaacgcgacctaatctgtggtaatattgcttggatttgagaaacaattctaggtctgatttgatttttgtcttcaattccgcgtctacaacgacggtttcgaaattagccgggtgtgtgaaaggaattgatctccaccgttcgttttctcccgagagattcaggtgaagtttaatctccttcttcctctgtccaatttcatctgaaactgatagaatgtgctggaaatactgacgaaatactcttttcttgtcgtttttcttgattttgagaacgaaagacttgattccatcggtgttagatttctgattggtccaacaaactctggcgccgaggaaagtatcacgaatcgattgggtagcgtcgaggtggaagaagatgtcgtttgatttggaacctgagaagaggttggtagagtcagaatcttcaacagaaggaagagaattcaggtacgttgatatctgattatacagctgattttcctgaaaatggtcattgtattgtggaactttgtagagttggtatacatgaaaatggtccatgaatgattgccatgttctaaccagaatcaaaaccagagatgtttttgataagaatctaacaaccaaacctaaagctatgaagatgaatgtgtatgtaaatagagtagccaaaaccatatttggtccaaaccagaattaaaaaccaagagaaatggggtgtcttggttttgagttcgtaaggtgtaaaagactagtttttgagcttgagattcattttgggttggaattcaaaaacaagtaatggggttttggtttattgaggtatgaaaaagactagattttgaggttgggttagaattcaataacaagaaatggggtttattaaggtgtgaaaaagactagattttgaggttgagaattactgattgaattgtttgggaagaaggaaaattagaaatggaattatggggtgtctgataatgagaaatggggttcttccttcaagatattaaggtagttggtttattgggggtgtgatgtgactatgggaatggctacttattaagccggcatatttaacaaggtcaaaaattaactattgtatgtacgtggaaataaaccaaaagaaaaggcctagaagaaggtagataaagattgaagctagctagtagctagtttctttcttctttggctgtgaatgtacgaccatggaatatgaaccatatacattagttaggaataattggtcgtaaatatatattattgtattgtattatattaatgtgtactattttagttagaaaataaaagagctttgattatgtcacatgtgtgcatttttgttcaatggtattgattgactgtataattatatattatataggttggcttttttaagtttaggacaaacggcgctggatttgtacgaattatttatcatcatcatcaagtgcttaatttatgcaaactttattagtttttttctttttgttgtttgaaatgttggggtaatcatcacatgttttagttttataatatacaaatttgatctctcattcatgagggaatgatagaatgtggttgtctgatgagacctgttctcttctctgtcaccaccaatattatggattgtccctacaagaaaaaaaaggtgtatacaaatgattttcttttaacttgggatatttcttattttgcatatttatacttatttgttatttatttttattatcgagttttatttttacttaaaaacatataaatacatctcattttattattattttttgtgtaatatatattttaaattttttcacttactttttcattttctttttttattatattctaaaaaagtacatatattaaatagaatataatttaggggataaaaaataaaatcaaaaaatatatataaaatcttattaaagtaaaaatataactaaatgttcattatttaaaaaaatacataaaaacaagaaaatattataaattaacataaaaaatgtattttcaatttattaagagtaaattttaaaactaatttaagttattttttttaaaaaaattaatataaattagagttgggtggtaaatatagtacatgatttgttattatatggatttggtgttactagtattagtattactactcagcctaaccgtggccaatgaccaaattatatggatattgtgttttgcaggcattattgaatttaagaggggaatctgattgagatttaaaaggttcgtttctttataactaaatctctatagaataataataatcgaaaaaagaaaaaatgcactacacatgaaagtgacaaaatgatgaaaacagaggaaagaatagagaaagagagagtttaataataataacttcacgttgaaatttatatcagtttttattattatatatttccccaccctacgtgaagaagattatacctttgaggctttttgaacaagtaaaacactaataagttatccacagtttgcttatttattttattatattgtcttcttgttaaaaaagcattaaaaaagtttgtattgacacacctgtgaacaaaatagtcaataaaatgtaaattgctcactaaactaagctttgacaaaatctattccaatttttcaactactaatgacatttaccatttcatgccctttgaattttttttagccgttaaaaattttctctaaaccattgatattgttggatttaaaagcatttgtgaaattttatacagttttattaattttgtgattgtctatgtactaaatcatacttcctagactttaatatttaccaaatcttatctttcgaactttgacatgtaacaaaacaagtctcctgaactttcatacttgttagacttttcttattaaaattggcaaaaaaaaattcttaaattcaacaatcttaatagttcagagagaatttttaacggctagaaaaattcaagaggcaagatttagtacatgtcaaaagtcaagagacaaaaattttaattagcttttaagtttgagaagaagacatttatatatgattagacaaagatagagccctttaattctattagattattgacactagtttgttgttgctgtagtagacttgtgttgtgttgatttgtgtttcatattcagctagatgaagagatagaaaagagggagaaagggagtgagtgacccatttgaaggactctgcaaattacaatccacaaaattggtttatggcaggtaccacataatcattttgatttgatggttcagttgagtatgagtttttcttaaagaataaaaaaaaaaaaaaagacagattgaaagctttggtggttactatgttggtatcaattcatggccggagtttgtttatataatgagtatttatgtatatataattgtcttattatatagtgaaaaatataaagtaaatcaagcaatttgagccggaagtggaatttatcgccatatatttacaaccacaaccacaagaataaacaatttaattgtattttgatgaaaagacaccaaagcatgtttcaatatggttgtgctttcaaatctatatcaaaaatatctattccccaccactttatctgtcaacttcatcaaaatctgttctttgtgatggtgattaataaacatgtggtcctgtttatatacataagagagagagaaagagagtagaagtagaagtagtaggagtacatgcttttgcaacttaatttaatcaaaaacctaactttattggccagctttgactcactcctaccacttcaaagaaagagatatatgctaagtattagtgctttgttgtcataaacgcttttaatttatgagaatttgaaagttgagcaatattagcattaaaaataattttataatatttttacatcaatttttactattgtcctttattaaaaaacattgttttacatagattaaatgtaaaaatattaagtcatatataagaatatgaattgcaagtcatatataagaatatgaattgctttattcaatactaattagttttgagatggaattttatgtttctcaatatggtgttagaattatttctttagcggactttcgattcatatctatccagatagttagccaaccgtatgagatctagatggtgcaaagaagctcaagatccgaacaaaaaaaaaatgagcaaatgacacggtttgtgataaggtgattcaagattagatagcaaacatagtcacccatgtttcttaacatgctctaatatataattgtaaatcttaatgtaaaatttaatatgtcattaaattgctcgtgtaatattttattaaaaatgtaaaataataataataatacaaaattaaatataaaatttaataataattattaaaattgctataacggtaaatataaaagcattattttttttattgtgatgtatattttgtatcatgttatattgtgattcaaatttggattgcttttatatgataaatttacattacaatttggcacactattggagtagattttttataaaatgaactatattttatatttgcatcatttattgctcttactttgctataattaagtatcgtaattcatgtattttaatataaaaattattatagaaaatcgttaatcatttgcaagtagcattgagcactattggtgtgacaatcattagtcccgtgatccgtatggaaaaatattaagtaagttgtacaattctacattgcctgaggaaggtcaagtgtgttgattctaagcttgagtaggtatgtaactacacagttgaagatggattaaatggaatgattggtactatctatatcaacaagatgcat

SEQ ID NO: 218490 - DNA, 9602 bp, Cannabis indica
cgaacacgacacgatgatactatttcgcccctactgttaagccatgaattggttataataattattaaattgtaccaatgtgggatttctattctattctttaaaatacctcactaaaacttcactttttctattttacctcacacatttacattacaccatacatcagcttctttatatttttctctatatcatttaaatattatatcttcacatatattttattaataaaaataaaaacacaatacacaaatgaataaaaaaaataataaaaaattaattaaataaacaaaaaaaatagaaagaaaaaatataaaatatgtttacctcttcactattcattgagttatatgtagagaagagtttcttggagtttgaaaatatgtataatagctaagagtttaaagcatttgatggagctcaattttaaactcttagctattttattttaccttttagctattatacctcacttgttgtgagtgctcttagattttgtaggttattatttttatttgttttgttttagaaaagtaatgaatgagagagagggcactttcttttgtttaaatggaaaagagcttaaaagtgtaccctaacatggatttaatactgacaaatggaagattctacccaaatttagtgcatatttaatagttaattaaatcacattttttaatgcatgcatgacactttaaattatatataaagtgattttttttaaagaaatatataaagttaaacatatatatgttttatttttttgaaaagagacttaagacatcttgagcaaaaacaccatataataagactaggtaagtccaagtacattaattaactacttattaatttatttggatagttaagttcattaaagtttcaattctgagaagtatgatttttgaaaattttatgtgattaaacaaaactttgttttccttaaaaaaagaaaaaagcttcgtaaaaaagaaaaatccttattaattattataacccaaaattttctttcttgatgggtttgattttacaattaaactttgatatctacaaaacaatgtttaaattttttttttttttaaaaaataatttctaacatatactagtgactaacactttcttgatgtctcattagaacgttatttaaaaatttttggtcactaatatttaatagcaatatattcttaagaaaatatatatgtacatataatttgatgttacaatcaagaacatattgtctcaattttttccataataacaacattgtagcatattttttttacaattttcattaattttcttttaaaattttataatcgcaccctttaattttattttgcactttagctccccaaatcaaaggtgcctcctatttattaagcacaataggcaaggttaagagtttaattacaaatttaaattttgaaacatttaactgccaaaaaaaacaatctcaacaattaatacataatccaatttgttcatgaaaattaaataagccaaaaaaaaaagtggaccctttaaataaagagattaggttagcttagtagcattgataatgaaattcaaaaatagccaaatcttgctcaagtttccataaaagagagggtcagtttcgtaatatcagaagcaaaccaaggacagaatcggaatcaaataagattgagtttgagttttcaaaaaaattcaaaaaagattaattaaaaccctctttgtccatttataacggtcgggaaccggaattgcgatcgaaacggatcttttccctcttaacgccgttaagttcaactgtcatttgccgtccttggattggatttttcagaaaagctcccaatttatttatttattttaaaaaattattaatttaaaaaagtttgacgtaatttattttattttattccagtgcaggcgagcctaggtagtcctacaatacactctctctctcttcattgcttctctttcacacagcttcactcacacagacacagtaatatatatatataaatatttaatttttatatataaatatcaaaggaagaaaaaaaatagaaagaaaatttcttatgtactaaacacgcacgtacgtagtgtttctctctctaaattctaggactttctctatctaagattcctcaccaacattgcttcaagaacctatttctttcttcttcttcttctctgtctatatcaattctatccattttaggcaattgaagctgaacttttcaagccggcatttagattttactgtaagttttttaaaaatgatttgtttttttttggttaaatttgttgtagtttttttcgatcggtcattttcgatctggctgcgattcagttttttgtttgaattttcattttcggtgcaatgaagacttgcattgtttgatttgattgatcaaatctctgtttgttgagttgtctgggagattctgatctctgttttggatttgattgtaaagcttagatttttattttttgggattggataaacggagctgcgttgactgtgattttaaatttctggtacataatcagtatttgcttgagtttcggattcaatcagtatattataaagttgaatttcatccaaatttgatcctgcatttgtggaaatgaatgattaggagtttctatttttaggtttaaatgagcttaatttatgtctgattttgggttgactcactgagttttactgattggtttaaaggtctgagatttattcgaacaagtatagagagctatggattcttctcagtctcagctgagaagaggaggattagtttcactctcaccttctcagaccccacggtcgagcgacaaggcagttcgggatctgcgatctggagattctaattcaagtagcaagcatgataaagacaagggtgtcaatgtgcaggttcttgtgcgttgcaggtgagtgtttgttgagtaaacccaattctgtgttagtgttctttcttttgtccaaacaaattgattagatgtaatatttgcttccattttgtaggcctctgagtgaggatgagatgaggttacataccccagttgtcataacttgtaatgacggtagaagagaagtttctgcaattcagaatatagctaacaagcaaattgatagaacttttgcatttgacaaggtctgtctttgaataatttctgtttttctttactgtgtttcaattatactgaattttttgtactggagaaagaagtcttggtataataacttaatttcttggtgatgtgatcttgagcactaaaagaatttgaactcctggtcctgtggataattaaagtttggtattgtggtggttaggtcttcggtccagcgtctcaacagaaggagttatatgaccaggcagtatctcctattgtttttgaagtacttgagggctataattgcaccatctttgcatatggtcagactggtactgggaagacgtacactatggaaggtggagctcgaaaaaaggttggctaaaaaattaaggcaacttcaaaacatctaaataagcttgcttttctagtttcgactttgcttcggtgaactaaaattttctccattttttcgttggcagaatggagactttccaagtgatgcaggtgttatccctagagctgtcaaacaaattttcgacatattagaagcacagaatgctgagtatagcatgaaagtaacatttttagagctgtacaatgaagagatttcggatcttttggccccagaggagaccacaaaatttgtagatgataaatctaaaaagcccattgccctcatggaggatggaaagggtggtgtctttgttaggggtttggaagaagaaatagtatgtaccgctaacgaaatctacaaaattttagagaaaggttctgcaaaaaggcgtacagctgagactcttcttaacaaacaaagtagtcgttcccattcaatattttctatcacaattcacattaaggaatgtactccagaaggggaagaaatgataaaatgtggaaagcttaatcttgttgatcttgctggttctgagaacatttctcgttctggtgccagagaggtatgtcatatggtgataagctttttggtgtaatgtgaataagagaatcatattaacatgtttcttcaaggattatgctgtatctgatacttgcaatgcatataaatatttttttttgtgaacttaatacaattttctcattgcaatcttattttcgagaaattttttatccttacttgcactacatataactcatgggaaaaggttcattcctctcatatctgctgaaattagattttctcgtgcagggtagagcaagagaagccggggagattaataaaagcttacttactcttggtcgtgttattaatgctctggttgaacactctggtcatattccatataggtatagaattcaatttgcagtcaatatttttgaactttaattaatcccaatcttctggatattaatgaaatatagttggattattttagggatagtaaactaacaagattgctgagggattccctgggagggaaaacaaagacatgcataatagccacaatatcaccctccatacattgtttggaagaaacactcagtacccttgattatgcacaccgtgccaaaaatataaagaacaaaccagaggtcagtattatgttcttcatctgtcaagctcgttggtgcaattccatcttctaatgcaacttagttccttccttcgtagtgtcttatggctttctgttaattatatttcagataaaccaaaagatgatgaaatctgctttgatcaaagatttgtattctgaaattgacaggctcaagcaaggtacgtaatgactgattctaacatacatgtcttttgcttttttcctctcttggattttgtttttctagaaaacatttacttatgttttctgattgtcaattgtaatcttacttggatcagaggtatatgctgcaagagagaagaatggaatctatataccacgggatcgatatcttagtgaagaagcagagaagaaggtctaatccttgttatatttgctaagttttggaatacttatccgagtttcactagtaactccatcttttgactctatttttatgtttccgtaggcaatggcagagaagatagaacgtatggagcttgattctgactccaaagataaggtattcacatcattgtatattgatgtcaatgtgcaatattttcagtttgaaatttagactaactcttaatgactgttaaacagcaagtgatggagcttcaagaactctacaatgctcaacaacttttgaccgctgatttaagtgagaagcttgaaagaactgaggtaatattaaaaatatgattggtcaattttatgcttagatattaagtattcttatgaattatttctctcgtttttcttcaatattcttgaacttaaaaattactactgttgtactccagaaaagactcgatcaaactgaacacgtgctgtttgatctcgaagagaaacatagacaggcaaatgtgacgatcaaagagaaggagtttttgatatccaatctcctcaaatctggtaagaaattttggtgttgtttgtcctgcttcgggattatacacttccactgcactccaatccatgcatgttttagtttgtcatactcatgtttttaggtttaggttacgaagtgttccatttatatccttccatgggcctttttgttcatcaagtgttttttatttttcacttccacttcacagttcaaattgtcatctgcctgtcaaattaactttttcactgtcattccatgctcagagaaagcacttgttgagcgtgcatttgagcttcgaacagagctggagaatgctgcttctgacgtatccagtttatttgccaaaattggtttgtatttgataattttagaagtcaatttgttggataatcagctctccaaaacttgtagtgatttgttgatctttttccagaacgcaaggataaaattgaagaagggaacaagtcacttgtgcagaaattccagtcccaattaacccagcagcttgaaatcctgcacaagactgttgcagtttctgtgacacaacaggagcaacaattgaaagatatggaggaagatatgaaatcctttgtatcaacaaaggctgaggtaagatctcaaaaatgggttaattcaatttcgtaagctactaatcggtcggtctataaaattttatgtattctatttgctgtaggctaccgaagaacttcaagaaaggctaggaaaattaaaagccatgtatggttctggcattaaatctttggataatatttctggtgagcttgaaggaaattctcggtcgacttttgttgatctaaactctgaggtctctaaacatgcttctgcattggaggatgtaagtagtatttataacattgtttgacaacatacttctcaagcaattgtaaatttttatccttttccttttccatttgacttcagttatatgcatctttatacagcatttgacttcatttatttgatttcagctctttaaaggaattgcttcagaagctgatgaattactaagtgatcttgaaagtagccttcacaagcaagaggaaaagctttctgcatatgcacaacagcagcgtcaggtttgctccctttacccttaatcagcattacacattctagttcaccaattgcctttcgtttttgcttcccatgtttttatggagtttataaagtgagtattctgatattcatcacttcacaatacaggcacatgccagagctgtggaaactgcgcgctcaatttccaagattactgtaaacttcttcaagactctagacatacacgcatccaatctgacccaaatcgtggaagaagcccagggtgtaaatgatcaaaagttatctgcatttgaaaagaaatttgaggtgcttgcataaaatatgctacgtcgtttaccaaatgagattcttttttcttcagctgtttactgagtgatattcattttctctttttcttttcttttataggagtgtgcagctaatgaggaacaacaattagttacaaaaagtggcagagctgctggcaagttcaaatgctaggaaaaaagagctaggtatggtataaaaaagacagattttgttctttatgatcaaaaatcaaattttcacttctcgttccaaaactgataacatgacctgacccatctctattttaggtccaattggcagtagatgatcttagggagagtgccactagtaggaccgtcaaattgcagcaagagatgtcaaccatgcaagagtctacctcttctgtcaaggcgaaatggacagttcacatggaagaaacagaatcccactatgttgaagatacttctgctgttgaatctggaaagaaagacctacaggaggtccttcataactggtaggacgatttggttcattgagtgcttcagtcttatgattagttttttattttgttcctggcattaatccaaaacaatataatgcagtctgaagaaggcaaaaacaggtgcacaacaatggagaaatgctcaagaatccttgaccagtctagaaagtaaaaatgtcacttctgtggattccattgtcaggttgacttctttacttttctcaaagaatttgttccagaatttctattaaagatttctcattttctttctatgaacttttcattaggcgaggaattgaagccaatgaaaccctgcggactaggttttcaactgccgtgtcagctgcacttgaagatgcagatattgcaaacaagaatatgctttcatccatcgatcgtgagtgtctattttttctcacttcatatggtgtaactctcaatttataactgatgaaaaataacatctgcagaatcattacaactcgaccacgatgcatgtggaaatataaactcaatgattgttccttgctgtggagatttgagggaattgaaaggtggtcactaccataagattgtagaaataaccgaggacgccggaaaatgtcttctagatgaatatgtggtaaaaacctgttttctcttcctcattattctcttagttctactacaaagcacaaaatgctataacaaagttctttcaactttgacaacaaacaggtggacgaaccgtcttgttccacaccaagaaagaggtcgttcaatctacctagtgttgcatccattgaagagcttagaacccccgattttgatgaattgttaaagccattttgggaagcgaaatcggtaaagcaagcaaatggagatgtaaaacacattgcaggcccttatgaagctactcctcagtcattaagagattccagagttcctctcactgctattaactgaagagaggaacccctgagaagcgttgtacatagtaagaagaagtaatatatatatatatatttggtcaaactttactactcaatgctgagctacaatattcattattttattctattttttttaaaagaagaaagaaaaagagtataaagaaaagtgattactgtttaaggtggaatatatcctgtattcttgtgttttttgtaggctacttgtgtttttgacttctttcaatatatactgaagtggattattctttcgtttttatcaaactagatttatatttatgatttcacattcattgttcatttattttgagaaatctgtaactttcatcgaaataggaagcacacagttacaggattttaaggaagtttggaatatttaccattcccaacatcattttaggagacaaagacaacgaacaatacccgatagaggtatccatcgaacggccccaagcaaggcttcgcctaccttctgaaacaacagcatggtcccccaacaactgcctcgagaccaatctaacgcaatgcaggttgtttgtttcatgaacattcaatttaaggtccccttttagtggtagtagctaattcatatttctattgacttgagctgcttctaagcttccatgtactcctgcaaccaatgcttagaccaaagaaacaatttttctagggataacagctttgccaaaaataattccatttcagttgttcaagattggccacaaaaacataatccactctcatacaagtcggaatttaacaatttcaaagcttttacaataaaatcatagatattcacacattattcatcttataaaaagagtaaagatcaaaaaatttgcaaaaaagcatgagagactgactcaatattgaaaccacaaatcccacatgaggcattgggtaaaatacacttattatactcgtttggggagcaaagtaagaggtgatgagatctatctctacaagtaagatgatgcttaattttagaatttttaattgatgagctatcaaaaagaagatgcatcttgttggcataagtaatactgcaatacacattaatttatttaagttttttcttgatatttttaaattgtatggatacatattttttttttcaagtaatataacttttttcataaaagaataaaaatattcatgaatatgctttatttattattaaaaaaatgtgaattgaagtactaagtatagagaattaattttaggggtaattgcggcataaa

SEQ ID NO: 218491 - DNA, 5567 bp, Cannabis indica
gtaaaatgggaagttcatataattaatggattaaatttgtacaaattaagaaagggtataaattttgatatgaggtatattattaagggcaaatagtgaaaatttcctaatgaaaatagattcattttcttccattatctgaaacataccctaacaacaaaacaaataaacaatgctaccaataaatcatgaaagactcgaaaaaaacgtcctagctcatacagaagcagcagaaattagacaaaaagcactgcaagttgtatgcgaacttattttaataaaagatacatataaagaaaattccaataagaataaattctttcataattataaattaatattatatattttatgatagtacactaagttatacttaaagaaatgccaaaaagtaacatggtacattctaacatgtcatatcactattaattaaatatcaaattttatataatttaacatataattttttataaaatatcgctaatcaatctattatgcttagccgagtccatgaacgtgttgacccacatgagttaacactccaaacatgtccacataagtgtgctttccaatttcccaaaactagagaaaaataacacattatgacttaatttgataacagttaaagcactggctgtgacttgtgaggtgactacgaatctttcaaagcagatatacaagtcaaaatgcgaccaatacacgtttcgtgataaatctattttactgctctacaacttcaatatatagttcactgagaaatgctaaagtgcacagtaatacctagcactctcctatgtgttaatattgctattggtccaaataagtatcagatcccatataatttaatataataatttttaagaagtatcactagccaatcacaacgcaatatgtcgaaaatgtgctactggtgcctaatagtaatgctcgtagttcactgtactaaaagaaaaaaaaaatccttttttacatgaccctatcaccacgtgccggcctttttcgtttttctcagttttggagttagtgctttcatttcatttttttaaaaagaaaatacctcagcatatatgtatatgtaatattttttatccctcttattactaagattctctcaagtggcagtcctttcctagaagttgccactaagaaatgtatacatataataaaaatacacaacagcctaaacatatttatttactcgtggaaaacatttgtccctcgaccacaatattaaatttgtttaatataaaaccaactcagatgtacatacataaaataatttaaagtaacagaagaatcatataagctttaagtaaattaattatggaatcttgtttaaagtgagagaaaaaagtaccgtggtggctctgtacatcagttcctgaagagaatcacaatttaacaaacagaagttaaagctttatgaaggagctaaaaatggtttggttttctaatagattgtctcatattgatctgattcaccaaattatacaatacaagaaagaaaaagaaaccttccctgagagatagagaggaaccttccaattaaaaaagggaaactgaaaagatcaattagaaaggaaatttacagataatgaaaccaaagttagtacacaaacccttgataattcttctttcaaatttgcctagaatttttaaaattattgctttgtactttcctaacaatagtagcagggtctcaaaaaggaagcttttatacattagctatcacaaaaatgaagtggtcactaatcttataaacactttcaaatgtaattttttatcaagcaaatcaaaaatttggttctattcacctttcatacaatatgaagttattcttcaacaaagaacaaaaggctcaagagaaaacatacaaataaatgtacatttggcaagtcaaatacccattttgaatgtatggttgcatcacttagtcttcttactaccttgcgttgtcttagtaagagttttgaccaaacctttggatattttccaaaaccaaaacagattcatgattcctaacacaggaggcactgagagcaagctgtagaagcccagtggaaaaactgtcttcacctaaaattatacgagtttaaagacttatcagaaagatgcacaatttatagccagaaacccaaatactttcaaattacaagtgtttccagtgaaaatagagggaataaattggtcattggaatctatactcaagaattgtctttgattaaattgaatactgaagtttgtgtttatcaagactcagtaacaacatggtacggactcacctcttcaaaatggagaaacatgtgggtgaaaaagtatataaataaaataacccttgcaacctgcaggcatcaaaagaagttacatgaaagtttaagataaatacttgctgaaataacaaaagctagagaatttagaaaaacagaatcctatttagtgttcctatccttgtcgttaaacttttcacaagactaaccccaccatttcttgtactggaattatagaatagagacatcaatcttcaataataagtgtaagtatatatatatgtgtgtgtgtgtgttgatgtgaatgcatctttttatacctatacatatagtatgtcggtaagcacgcacttgaaaacacatttatgctaaagataaaaaagaaaaccacgagagaatccacaactagttctcgtcagtctgatcgagggagaaaaattagccaaatgcataattccacatttcaatgaaatagcccaaggcagatacctcagctcattcgtgctttgtatactttttgtgcaaaagttcacaaaactattcaacttccaatttatttgagtttattcccaccacaataataaggtcatatggttggtgaataaaacccaacgacaatattaattaatatccaatggatagtttatccagttgccagcactaacatggatacatcatgcaacagtatgacaattgaatgagaacaagcgatgaataaattttgggtatctggaacgtaccaaccaccccacgaacaaagcaatgccattgcaaatgtaaagactggagttcttctgaccagcaatgtccaagtacctgtatcagtgttcaaaatgatcaagggttgaaaaccatgaacatgaaaaatgaaaacttcttggttccaatcttaccatcttaagttcacaaaaggagtggtgctttcggaaaagagaaccattagtatgtaaatctgtgcttgaccacttaaaagggcgagaatgattgaaaacatggatagcccatggtgtataacctagtaaaatcaaacaagaaaaagagaaaagtggcagttcatgttaaattttcaattgcatatgaaattcagattgtcaggtcaaaagagattcacaaaatacatttatttttaaagttgagcaaataaaatgtggagccaaggaattatacccagagccaacaaacagctaaaaaaattccttagcaatatgattttccaatgttcataataggctttttttttaacaagtttatataatatgttaatatcaaggtgccaagcaatcatttttttttcttttcatttaagcacttacatactcgaaaccacctaaagctggatagagccagaaaatcatagccaagtctgtaagaaaataaccgatagagacctgcacgaagaacaaaagcaaatgttgaatcataaccaataccataaaagtaagatataacacagaactcactcacagtaagaaatctcttcagaaacagtaagaacattaagtttaaatatcatcccataaacttaaatatcaagctgaaatctaccacttaaataggaaatagaaggaaaaatgtcatgatgcactgataaactaccaaaccattgacaaagcatgaagcaaaactgatgcaaagtaaaagatcaaaacgagtgagatttctaatatgcataaaatccaataattgcatagctgttggctgttgaaacaaacacaccaagatttgagattatcacaatcatttgatggtgacagataaattttataactaggatggagaatcctgcaaacaccttgtgatacttctaatgtatccacttacccccaaaactgtatttgataaagtagagtttctatcaataattagtccatcaacggaatcctcacgaaacaaatctgataacaccaggaggtagaatgatgcaaatgctacaacaatagcatgaacagtggagaaccccctgtacgagtaaggcatcaacaattacacagatactaaacgaaatctaaaattttgaaaaacaatacgtagaattcagcgtgtacaatgcaaaaaaagattctcacctgttgttccattcaagtttttgtgctccacttaaatttctatatgacttgaaacaaagagagcttatagcaccagttaaccaataaaccttcaaacaaaaacaaaatgcatcacttgaaaaatctttgttgtttgctgtaatccccataattagttcaatcataaaaaatgcatatagaaaaaaatcaaaaatagtaacaaaatcacaacacttggaataaatcctcagtaattcattctctcttctattcaatccagccattaaatatgtagtttcggtcctgtttttacaacatcattgagcaaaaattttccctctctccaggtttactatcctaatttatacaaacacacaaaaacattcacgtagaggaacacttacaatggcgcatagaacaatgcccgaaaacaccgaagcaaggtattgaaattctctgctggaagtttcatatccagcaacggatgcaattccaaacggtaacgaaaatccaaccatcccgcaactcttgtaaatttcagaaccaaaattcaccagattcccgcgaagatattcaatcgcttgtcttcaaattctcgaatcttatcccataaaaaaacgtatgagaaatttaaacacacaaaatttacatcaattcttgtgtatatatacatgcatatacatatacatatacatacctgagggtgaggtagtagcagaggaggcagaacccagtaaaacgaagatcaaagaataagaagcagacttcgataacaataatttttatttttattttatttttcaagaagaagaagaagaataattcagggccagtatttatagtaaatagtaatggtacgattgagctggaccaggaagattgtaggaaaaaaggaaacaaagtaagaaaaggaaaaaaagaaaaaaaaaatatgaaaatgaaagttgggaacatggatagaagagggttacttttgtaatttaaccaaatatatttggaaattttatttagttctatttccacccccaataaacttataaatacactccattattaaaaaaatataaatttaaataattctttaaaacgtatttttaatatttttttaaattttttcttcacgttattttacgttaatttcaatacttattttgatttcattttcataattttttttaactcatgtattttttttttaagaaaatttcatataatttttttatttttatttttttgccataatatttaaaatata

SEQ ID NO: 218492 - DNA, 3586 bp, Cannabis indica
aaaggctaattaagatttttgcccctgaactttgacatatactaaatcatgccccctgaacttttaaggtcgttaaaaataccccatgaactattgagattgttggatttaaggacttttttccaattttagtaaaaaagtctaacctggataaaaattcagagggcataatttagtacatgtcaaagttcgaggggcatgatttggtagatatcaaagtttgggagcatgatttagtacataaataatctttgaaatagtaaaattgaatgaaatttgacaaacctgctaacatgtgcatcttagtgatcaaccaaatacgaagctatcctatcaaaaacatttttaaattcaagttttggtttcgcaaacatggatacattcaaagtaatcccataattgactcacaattttcattcgaaaaagattcaaaagcaataaaaaaaattctttaaaatccaaacattgattatacataaggaattgatgaaaaggggaatatttccatattttctttgctctggaacaataaaaaagggcatgagaaactgtctccacatgattttgacaataagaacagatagaactaggaaacactttcttgaaccaataattagaagtagtagtgagtgtatgatgataagctctccaaacaaacaatttaatttttggtggtagtttagagtggcagagaaaggaccaccatttttaaatgttttgtcaattggaaggagaaggaagatccgaaggaaagaaagtcaagtgatatgtagattttatagtaaactgactagaacttgtaagactctaaatttgaacatcaagattatttaggcctagttagagatcacaatgatagatttaacaacatcccctcaaaataggtatctatcttatgtaagttcgaggaatctgagggatggatgaagaatgagacaaaattagaagaaggcctttcttgtgatttgtaataaatcaacctaagatgaggaatccaacgatcattaagagtgctgatagaaatttcattacaaatcttccaaacaagactcctgttatgcaaatctctacccccaatgagtactctgccaagtaaacggtgcgctatgaacttttctagcatgcatgaaaagtatgattgaactattgtaagactttggccaataaggaattaggattcttaagtactcttcaagcttgtttagctaacatagcttgatagaaatgcactaaggactgaaaccccagacccctaaaaaatttagatttacataaagcatccttacatttctagtgaattttaaatccatttccaagtgaaccccgctagaatcttgtgataaggggctcgattcttagacaggtggccccagataacctaaaacaagacatagcataggaagaaatagcttgaactactctctttaaaatgacttctttacttgcccttgaaaaacacttatgcttcgaactattaagaaaagaactaaccttatcaatcatgaaatcaaaagacaaatttttagacctactaaaacattgtggcaaccctatatattcacacaaaaaaaaagtttattatctaaacctaaaagatttaaaaaagattgaaaaagattggttagaagtattaggagagaattgatacagaataatatcttttctgttatttctgtttttctgtcctttttggttgttgagttagttacaggtttgttgtaacaactcctttcctgtatttttgagactataaataatggccttcagctcaaagctctgtagcttttgcaagactttgatgctctattttctcgttcattgctctcttaagttctgtattgataagctctattatggtattacatagcctttggcatcttcgtctataatggatcccagtgttcttgatcatcccactaatgctttgactgccacccctactccggcccttgccccgcagccttaattatggaatccatttaaaaattccctcaattcatctctcactttcaagttagatcgcacgaattatcttgcatggaaaataaaataaaaaagatttagctaagttcactaatcgacctaaagctttattataaacaagcaaagcatgcttaataatggctacacaagaaatcttatctaccatagaaaataagatactatcattaacaaaaagaaaatgagatactatagtagggctattcctagagcttttaattcccataaacaacccttcctctagttttgaagctgcaacatgacctttacagtagagcaaaaatgtaaggagacaacagattctcttatcttattcccctagaagcttgcacatgaccaatcacttgtccattaatgctaaaactaatagaaacagatgaatgacatttcataattaagttaacaaaactattaggaaacctgaaatgtaaacatcatgatttctaaaatattccattctactttgttaaccccaaaattagcaaagctaactttcaagattagccaagtaaacgtgcggttaacaaaattccttcgagaaagtgaaggtggtttgaccccgaacatcaagatacaggtttaaagcttcaagcctcaaagtcctgagactcaaccatgaagcaccaagcctcaagagatggtgttggtgaccttcctgacaccaccatctcggcatgcatcaccccggcacgcatgcgtctccatctcgacatgcatgcatgagagcttcttagcatgcatgcacgagtgcctctcgacatgcatgcacgagtgcctctcggtacacatgagtgctctcggcacacatgcaaaagtgcctctcggaatgcactagtgcctctccacacgtatgcacaatagcatcttgccacgaatgcactagtgcctcttggcacgcatgctcaagtgcatcttgatacacatgctcaactgcctctcgacatgcatgcacaatagcctctcagcacgcatgctcaagcatgcatctcagcacctcatgctcatggtaatgagcatctcagcaagatcttgtcttgaatggattcttctaagagaatacctcgacaagattctcagagtctccaacaatacgaccaatatttactgaaattttcctaagtgataagaaagaaaccattagacaaggagtcaaaaggataatgcatgcacacgtctgggtacgacaatatatttccaaggacaaggaatcttctgttacgtctaaatgtcagttttgaatcgacacaaagtagtgtcaattctgaactagtgtaaaattttatgtgatgtttttctatcagtttttgacattgattaacgtgttgaccaacgcaaaaagtttattttgtaatagtgaacccaaagaaaatgagctataactttcaaaacgaacttaaaaaaaagataatgagctacactaaaacttaaatagatactaaatgttaaaattttattttattaaaaaaaactacatatttattatttattataacttagacaacatttttactcattaaatatacacaaatattttaggtgacttaaaaatacctaaacttttgaagaaaaaaattctaaaaatata

SEQ ID NO: 218493 - DNA, 6613 bp, Cannabis indica
ctttcttttttctgtacttagatttgaaatttcgtactccccctatttcagtgtgcaaccaccattttcttatgtcttcctctcttctttgcccccgttagggtactaaagtttaccctaattggaaatccaagtcatggtccacttgcccttcattttccagatattagttgagtcattgtccatattttcgccacctaagcaccttttattcttcattaacgtcggctggactttctaccaaaatacacttactgggctggccaattgctacgcgatgattgctatagcaatgacagtcaggagcaagcctttttctactctttttccttcttgtcccaaatatttccaaatacccatttccgtattttttctgcttaatacacataaaaataacaatataagtctatttaacacttactgacacacacacttccatttactacaaagacacaacaaactaaacacagttacataatatagacactaattactctatttttagcttaaaattaaagtttaaagatataaaaaataaatctaaatcttagagttatcagaacgacatataaataatatataaataataaaaactaataacaaaataataagaatacaacataaaaataacatgaaaacatcaaaagattttagcttctgtaaataaaatctcaaaaatagtaaaagattaaaatgtcaaacaatcgtatttttttaaattttttttgttgtttatgtatatttgaaataattctatctaatattttttataaaattaatgggatacaattttatttaaaagttttttatatttggttattttaatatgaaaaataactttatggtatatttgaaaaaccaaaagaatcatattattagttggtcaacataaaatgtaattgaagttttttttgatgaataagaaattttattgctctaaaccaaacttcacatcactaatcttttacaatttactattgcttacaatcaactatcaacaaagtataatcatgtacaaactcacatcctcaaaatccaatctgtgtccttttcctttactttcttaggcaacagccctttgattctcagcttactcagttgccgagttttctgcactgtagtgtcgatgagccacacttttgattccataatacttcatttctagccttccatatgtgatatacaagacttgcaatgactgtgttcaccatacttttccttgttgtcgaaaaccttttcgtttgatggcaggattccagtagtttcttaatgtcagctgctagtgtgttccattgcaggaacaatttgatctcttgcacgcatttcctactgtactcgcaccgaaaaaacaagtgctcaattgattcatcttctttgccacacaacaaacatgttgaatccatgttgtgattgtatttgcttttttctctcctttgtatttagtcttttcaaaacactagccaaagtataaatctatgtttagggataatgagcctatcccaaaccagattacaccaaggcactttagcatgttcagagaagagttcttgataaccctgtttgattctatatctctgtatcacaaatctgttcatgttccatttttgccgaaacttgttcttgatagctacaattttcttccatgtccagctgcaatctagtggagcaacataactccaacagtcttgatctttcaggtacaccatgtggatccatttgacaaagaggcagtccttcttgctggctatgtcccagacatatctccccaaggcttcaatgttccattgctagatattttgaaaccccaatccccaacagatttgggtttgcaaacatagtcccatgccactaaaccaggaccagctcgtttttgtgtgcctttcaaaagaaaggatctacaagttgcttcaatatctttcaagagcttcttgggcaaaacaaaaatctgggcccaatatgtatgtattgcaagcaagacaaaattaatcaaagtgaccctacccatataagataggtttcttgtactgcacattcgaattctactagtcattttttccaaaaagctttgacatttagttctcaatatcttccctgagaaaatcggtataccaaggtatcgaaatggtaaggaactcctcatgtaattagatgcctcgaggatcctggacacttcattatcaggcattcctgaacaatattttgctattttttgttcatttggcagtagaccagatgaagctgagaacagcttaagccctttgagaagaagcattacagagataaagtcaccactgcaaaagactaacaggtcatccgcaaaacacatgtgatttagctttaatggggcacatctatcatggaatttaaacccaggccattctccaacgttggtgaaaattctaggtagatattccattcctaatacaaagagaaggggagacattggatccccttgtcttaaccctctctttgcattaaagaatccacacataaagccatttaggagcaaggaaaacttagtggtacttatgcattccataataaaattaatgaacttaccaggagaacccagagctctcatcatctcttccagcatgtcccattctattgtgtcataagccttcctaaagtaaattttgatcatacaacttggcttgcaagttttccacccataaagcctcaccaagtctttgcatactaacacatagtgagcaatgaacctcccatgtacaaaccatcacttggttctctgcaataagatcaggaaggatccccctcaatccattacagatcaccttagtagaaatcttgtatattacattgcagcatgaaatgggtttaaaatcaactacaatcttagggcaagctatctttggaatgagtgtgattgtagtggtgttaatctctttaaaaatcttcccagagcttaaaaaagacagaacagcctctacaatatccttccccactaactcccagttatattggaagaaagcacttccatatccatcagggccaggtgctttagtcctatcaatagcaaacacagcttcttccacttctttccttgtgtaattagccagaaaatatctctgtgactacttgttattttaggaccaatatccactattgattggaatactttcctttttgcttgtgtgttagaccccagaagctttttgatagtattctaggaaaacttgttggaccttctatggtgaatcacaccaatttccgtgctcatcttcaatagagaagattctattttagattcttcttgattttagagaagcatggaagatgtgagagttctcatccccaaacttagcccaactaactttagctttttgagacatgaagctatcaaaggccttgcttatctaaacaaacttattccttaattcctgttcttgttccatcaactctgcattttttggctcctggttcagtttggcttgcagttcaatcaatgctactcttgttgtgattttgtcttttgtatctctgagaattctgcttgattaatgtgcttcagtattgtcttctaccttctcaatttctgaacaatactgaacatttttgaccccctgctttcctctttccaagccttggatgcaaactcatcatactcaggtgccagtttccacatgttaaagtacctaaaaggcttcctcccgtaacttctatcttcgtaaatagtcaccaagatagggctatggtcaaagcttacctcaggtaagaacacagcttcagaacaaggaaatatatttatccaatgcaaattgaccattgctcggtcaaatttggaaaaaattctctcctcaggcttttgcctgttgttccaagtgaaaaaggaccctgagaattctaagtctgccatattacaaggctccataaaatctcaaaatctctgagatggcaggctatgtgctcttttcctgattctttcatcaacattcattatctcattgaaatcacccattagtatccatggctcatctattttctttgccaattcttccaaatctacccactgatcatcctttttttttctcatcattaaaggcatatatatcagtgatacatgaaacttccctgcttgccactgtgattgaacatagcaatgcattatttggctagagcagtattgaatatcaacaaaatatacactaggttgccaagctacaataattcttcctttatctaaccaaggattattctttgttaaacaccaaccttgaaagagactagtatataaggttcccatattcttattttgaacctttttttctaggaggctaacaaacttagctttcttcgagtaaatcaattacttgatgtcattgtgtttatgctggttgttaatcccccttacattccaacacaagaacctatccatttgaggaagagggatctccctcccctcctgtattactctcattcctaggttcttctctaagagtctcaaacatgttcttgaatgttgtcccttccgaatccttccttagtagaattttcttgcccttattcactttctggaatccttcagcatcaatctgcttctgcttctctattactgtcttctttggcacccatacttgttttcctggttcctttttctcctttttcttcttgcaatctgtagaactatgccccattccagaacaattgtaacatactaagggtatccactcaaacttaacatctaattccacttcatggttaaattcatcaataaatgcaattttatcagggaaatcttgtgatagagttactagaattgaaatccttgggtactgcaatctatctttgttcttggttacattatcaacctgtaaaggttctcccagctcgcccatgattttgaacaatgaagtctcccctagtacttgatgtcaaggccctttaattgtatccatgttggtacatttgtaacctcctctttagtaaagtcaccaactcgattccagggtttcatgaccattggcttcgatcaaaaaaaaacatacccttgttgcatcaccttatctctctgctccaagctttgaaatttgataatgaaaatgcccttggcaagcagaccaacttaaacaacttcatccttccaccacctcgtaacaaaaccttctagtatgcttattggagggttagctttaataacatagcataccaaagaaggttgccagtagttcactttatatgcaatatccttaaaatctatcttgattatctttttcgagtttgaattctcagcatcagtactcgatttatcaaacgaaggctcgaagtttctcacgatgttagatctgagaataggaggagaaatcttcttcccagtacttatatcctcaatagcacgattcgcaatcgaaagctagtctgaaaaatcttgacgaatctcactctgcctaatgataagtgcctctgattcttcaggtgagaaaattttctcaacatactgttccattggatcttcagtttcttcaatctccagttcttgaatccctagcacgacatctatagatctagtcttgatgactctatcggaagatgatggaccaattttcttgccctttgatttccctttcccgacaattttcacactttttgccatagctccagtgagacaccgaaagagagagaaggagtgggaaaagtaaatgtaattgaagttaatatcatatttaatatatatatatatatatactcaaaaaaatatgatatcactactatacaaaaattactacttttagtaacaattttttagtcacaataaaaaagttaattgtgactaaatatagtatttagatacaaaatctcaccaatttagttttagtcacaacaagtattgtgactaaaaaacaaattttgtcataacaaattgtgatttttgtgacaaatacttttaattctatttttggtatatttaattgacaaaaatattttattatttattgtatatttcggctggtatgtttaatttggtttccttattttgtgtatccaaacttggaaggaaagttgtatagctttcctatttatggaaattgtggtaaaaatggtaagtttgattacacaattggttcttatctaaccagctgtgtattctgatcatgtgtgagttaccgattttcttagatcaaattcttgaagagaaaacaagagctaaactttccttttctacaaaagaaaagttgtacttactgcccacgatcatataggtacacaaatgaaaattcctaggctgattaaagttttattttagggaagtttctagtgggctagggtcttgttcagaccgtgtgtatgctgtcaataaggtgtatattgattataaatacaccttataatagctaggtttagtatatctttcatacacttaaaattgtattcatatttttaggaaagagtgtctttgttttgtagagaagagttgtttgactcttactctgtgtacttttatttgtattatcttgagtctgtattcaagtctacaaagaagaagaacattagtgtaactatcgggagaaggttttacaaagatttcgggagattacttttcaattcttgcatcgggaggaagcaagtactcgaccttcgagagaaggttttacaa

SEQ ID NO: 218494 - DNA, 4669 bp, Cannabis indica
tttttttttttgattgcgtacatatcagctctgtagaacagctgaagaccaccctgagattttattccttaaagtcaattttgatgagaacaaacctatgtgcaaaagtttgaatgtgaaggttcttccttatttccacttttatcgcggagctgatggacagttggaatccttttcgtgctctcttgctaaggtaagtaacttcaaccttttgtttttcttcgtctcatcatggacatgtatacaatcagcatcttcctcctatgtaaaacgagttattctctcttaaaaggtgacattgaagaacttcttactccattagcacactagcatattctaaacttcataatttttcccatagtttggaccaaagggttttttcatttattttttaatctctcaagaagctacacaatttatattttgacatctgattcttctcaaaatcttatgcagttccaaaaaataaaggatgctattgcaacacataacacagctcgttgcagcattggaccgcctaaaggtgttggagatattctactgcctgcagtagtagctcctaaggacaagtcaacagaatcatcttcagcatagtgcgtttcaattcaaacacaaccattgtactaaaatgtctattcttgctaaaaattcagcaaaccaaccccgaagtgaacttgcatagttagctatctagtaccttcagtacatgtgaatttctctgtgtagaagaatgttttgtctgcattctttgctaatttttttcttacttttatatctttataatgtgtagttaaaactcttgaacaagaaaatcacatattcctgttatatattaaattaaataatgtgtttttttgggctcatctcattctttttgttttcttataataatgtcccaaaatgaatctgaatctgtataaactgcatgcaatagtcaatttctaattggcctagtggaataagaattaaaaggatttatttattattattattaataattttgaagtaaaattccacttgctgtatttttctcatggtcaggtgttggaactagtaataaatataataaaattttggactcctgctacatactacaaaacagagttctcttatcatattcatgtcgtttttatgaactaatgaactactttaactgttgtaattccttttcttgatgtcgtctttgtttttgtttttgtttaggttgcttgtatgttggtttatatagtcaattattctttgcctcccctgcaaaaattggtctctatatacagaccatattctaatacataatattgttatagctatatgaagaacccctttcgataagtactgttattgaagttgttctttatttttaagagaacaatcaaagtactgttatatgatgtaactaaaattaataacaaaaggtttaagaaacacaatcattattcatacactcaaacatcacccaatgatgagagagaagattaattaatattcgatatggctgattgaaatttgattattcgaataccacacacgtggatataatatccaaaattaatatctaagtatgcaaaattgtatgtgtgtggtacaaatagccactaaactatattactctaatcgagataatggtcttagtcgttccctactgtatggttcttttagatcaaatgttgtatacagtcaaatatcacacatcaaaatgtattactatatatgaatgaagcttcctagctgcaatattctattatacttgtgttgtgcattcagctatatttgatgtgtaatagactaatagccacgaaactaagtggtggaaggaacttatacaataatattatatgttaaaaactgactgtggatagctggatttttgtgattattgcttgctcttagggccacattcaatctctttcattaaatattaatccaacactcaataatgttaatttattttcctttttgttaacacttgataaccccaaaagttcatttgatggagacacatgtgaaataatctctggtttatgagtcaactaagaacagagcaagtagagtaactttggctagcacctttttagttttcaccttaaaatttcatcatagctattgtagttgtagtggcttaaaaagaaagtggcaggagtctactattgttttgtaagcaattctttatgtacaagtgctgaaatttatgaataaaaacgttgaaagtgaaaataaagatgacgcaatataagaacaccagtaccactcaatttggcaattatgagtggtccaaagcccaacccaatgaaattcaataatacgacttaaaccagtgattgtacttgtatgtcacagttttgtaaagtaaaccaataaatcaatttaaagaagagttttgggatatcaatgttttttcatctttacaataatctaatgcttcatgaggttagtttttctgttctaatgaaatgaataaccaacccaattcataataataataaaaaagagaagattcggataactgtagcttaatgtacacagaaagatcgatcatcttcattcatttcatttcattgactttactcaatccaaattcaatcctttttccataataacaataaaccaaaatggttagaaaaggactacaaaagtttatgatagaatacacatttagtcatttcactctcatcaacaagaacaagcctttttactgcaatgaaaaacccgaaactcggagtctggacatattgactgtaagagaagtcttgccgtttgttcttgtctgatcaaagcatcttccttctctaccaaaacgacacccacaattttgtcgtacccaccaccaccaccggcgatataagcaaccagagccgcctggaccggacccaagctcggattataggcagctgattccatataagaccctttgtatatctttccattagagtccaaaatcgccaccccagaagggcagccactgtacggcgcgtgagaattgttcgcagcttctaaagccgcgagtttaagcagacccacctcgccattttcgtcgcaggaggagccattggacaagctctggttagtcccgttcgagaacgaaaacccattccggtgtggctccaataccaacggcatgtccttgtccagtaggtcgtccggtccaaatcgctgcggtaagagattcagaagcgggttgaacttgtccaattcgggccgatcggttccttcgtcttcgtctccggtctccgccgacgtgatcaggatcttgatatccggggctccgcggatttcttggaggaattggcggcaatggccacaaggagcggaggaaacggcgatgtaatcgagacgggtttcgccgttgatggagagatttgtgacgaggaattgctcggcgtgaacagagtggtgtagaggtagacccgggaactcgaggttgacgccgatgaatacccgtcccgatgagccgtaaccgactgcgccgacgtggaacttggagatggggggtcggcgagggtctgggctggcttgacgaggagggaggagttgtaggactgtgaggcccgacttggtagccatggcttcggcctcggatgcttggattacgaatctgggtggatccattggtccgaattctgtgttttggatcaaagagagagaaacagaggaaatgagtactcccggaaattaggaagaggagagggaggaggacaatgtgaagttgttcactaatttataggccagcccaaacagattagatattttattattattaattaaatagaaaagcatagagttttgtatggagtcactagtttcattttattatccaaacaaacttattattattaatcattattaataaataataattggattaatgttgctattcacgtttgtggatattttaggtggtctttgaattaggtgaggttatgggtatttgaaaggctcttagaaattaaaaataaaaaataaatgacgctgatccttgagatagattttttagtagcagttgaggtcatttacaatcctttaataacgatctctcctttggtttaattattgataattttttagtgattgtttattgatatgctaatagtgttttgctcgtaagtttgttagagcttcttattctttttcttatcaaattttgagtgggagtactcttcctattaaatttacttctatgttgttagacaatttatcttcttgaagttatttccttaccaaaaaaaaaaaaaaaccttttattatttattactaatatacctacaattttaaaaaacttagaatactcctattagtttctttactctattctcctttaaaatgtatttattaaaatttcacatttatctatttgacctcaaataaacttttacattatatcatacaataaattctctatttttcttctttattttatttaaataatatatttataaatagaatattaaattttttaaagtaatcactattcatctagttaattaatgtagagaaagttttaactcaaaaacttataaagtaaaataaaacataaagttttaaataaagtcttattggtgcctagcacttttctcgttatcataaaaatatcgctaactaatcgtaaaacgtcactaactggtaaccaataagaatgctcttgcaacccataaccattccttctcttatcttatat

SEQ ID NO: 218495 - DNA, 4323 bp, Cannabis indica
tctctctctctcctctctctctctctctctcttgaatattatagtgcatttgtgtaagtaagtagttccaattttagtggcaatcttcaaaggtacagcctttgaatgctaaccttggggttggccaacacttttgttctattattatagttttctgcagtagctttgttatgtattttgactttgatagcagagggctattcttgatttgatgcacttctatcgcgagaaagtagatttctttattattgaggagattaatgagtgttggatttcaccattagtgttgtttttgatttttatatcatccacatacactaaaatcattatgtatgaacttggagtgaacttaagcaagagagagctacatgcctttgatgagaaaaaacccaacttgcccatcaaaccaggctctagtagctagttttagcccactcaaaagtctagtgcagtttgcagaccatgttgttcttcttgaaaagtagggctcaagcatttcgctgagaaatgtaacatcaagttgtagactttgatgttcctattttgtgagagggcctaagttagaactattcttgttgctgttggttttacaacaatactaaaaagttagtgtaatagaaatcaagtttatgaaatccttggcaactagtcttgccttgtatcttgaaatagagctatcaaaaattcttttttggttaaaaatcctttcacatctcacaatcttttgatctctgggaatggggacaagataccatgtactcgtttttcatcaaggcgctgtgatcctaattcataccatctctccatttacatgtctcaagggtgcaaatgtagagtttggtctattctcatcaagaacctctaaatgggacacctttggcttgtacaagtacatcccagctgtggatcttgttctcatagggtacttgttcatggttggacaaatatttggacccatttttctcatctgtatagtcttgcatttctctgagctgcataggatctcacacatgtagctttacactatattggtgtttttgtgtttgtgaatgatgtgaagaagcttgtcaatttggtgatgttgtaaatgagatgcactattgtaagctctactactggcatttcttgtttatggtatatctcaaatttcaataaatttcccaattttgtgaaagtataattcattctagatctagattcataaatattttggtcacatgatcttagagctgtaggattttattagttcacattatattttgtatgttcatatctgcaacatctaagcttcaacactataagatttcatccaattttgaggggtttttcattttgagtacttttctgcttggcaaataagttgatattcttcggtgacaagtattagtatccttagtggtgcaaggttcgtgtacatacataacacatttttggttgagcaagagtgcagattgatctctatttgaaagacatttcttattatgtctctataaagagataatatgagaatttttactaccttgtttaacgtagtaaatagtggtattttgttatcatttatcttttcagggaaacatgctagcccactacctttatctgtttatgagttaggatatggagacttatctaatgtgaattttgtatttgtgtgtaataataatttatcatctatatattacttctcatcaatggaaaagaaatcccattattttccaatccatatctttagtttatcagttgtttggttctttgcaggaccctattgaacctttggagtggcccagaaggtagattcatgtttggtcgtagcagttttagtattattaactgaacctaataatgttgggtacttatctgtacttttgttgaatatagttattacaggagctatcacaggaaagatttgcttaaccgggtttatgcctcggatgaagtacggaaatatgccatttatagagcagaggtacttcaatcagagttagactccaactccccaagttttgtgaaaccaatgcttcagtcacatgttactggaggcttttggctggtaaaccaacatattatccaagtttttatttgcttcactttgcaatgaaattattgaatttggctattgaaattctatttatttttttatttttctatagtagatgtgtcacataattatgttggttgaacagggtcttccagtccaattttgcaagaatcaccttccacatacagatgagatgattactttgattgatgaagagggaggagaattcccaacaaaatatcttgttcttaaaactggccttagtggaggatggaggggtttcgccatcgatcatcaactagttgatggggatgctttagtttttcatctggttaagtcaactcaattcaaggtattctttacatttgatagtgaagcatattggcttgtaatgttcatcaatctgaattgatattcaatgaagcttgtaatctagttcatatattctaaacatatcaataaattgcttggttgttttctacataaaacagcctactttacttaatacgagcgattcattttatcatcttgatcttgtaaataaagttttttacattaaactttgagctcactccttatactaaatgggttagaaacttgaatatcatgcaccatagagaatgatatgcttattttctttttgccataataaatttatattctttgcctagtcgttttcatttcttgcaaccttgattcttacaggtatatataattagagcaaatcaaactgaagaccaggacttggttaatgaagatgaagctaaagaagagaacaacaaagatttggatgatgttcttccagcctcaggctcaggctcaagcagaaagtccaaaaaaatcagaacaagtaatttttttttctactccatataactttttagaaatcctgttaagttattatgctagtgaattctgtttaaacattctagcaaatcaaacagaaggccaggatgtggttaatgaagacaaaactaaagagaacaacgaagatttaaaagatattccctcagccttaggctcaagcagaaagtccaaaagaatcaaaacaagtaatttctttctaccccatataactgttgtagaaatcctgttaagttagttattatgctagcgaagtctgttttgtttagccatttaatcattctagcaaatcaaacagaagaccaagatgtagttaatgcagacaaaactaaagaagagaacgaaaaagatttgggtgacattccctcaggctcaggctcaagcagaaagtccaaaagaatcagaacaagtaatttctttctataccttttttctagcaaatcaaacagaagaccaggatgtagttaatgcagacaaaactaaagaagagtacgacaaagatttggctgacattccctcaggctcaggctcagggtcaagaagaaaatccaaaagaataagaacaagtaatttctttctataactttttagaaattctgttaagttagttattatgctagcaaagtctgttttgtttagccatttaaacattctagcaaatcaaacagaagacgaagacatggttaatgaagacgaaactaaagaagagaacaacaaagatttggatgacattccttcaggctcaggctcaagcagaaagtctaaaagaatcagaacaagtaatttctttctactccatataacttaatagaaatcctattaagttagttattgtgctgtttaaacattctaaccaatcctaaaatttagccatattattaaaaagctgttataataatcttcactttggccttttttgttgtgtattttgcaggcaaaaagtagaagcatgacataatggaatatgtgatagataccaaaagactagtttctgtagtaattatttttttttttgttaatctgaagttttctgttgtatgaaatgttaaagctgttatcatgaaagatttaactaactccctcttcatattttgcctctaaattaaatattatgaataaatatgcctcacaacttagtgataggatgttatttatccttaattaatatcaaaaagaaaaaatctcaagtagaaaacatatactaaaatatactaattaaagtagaaaacatgattagagttttaaaaaaattgaaagaaaaagtgcccacatgcaggatcgaactacagaccttcagtttacaagactgacgctctaccactgagctatacgggcgttgttggttttacaaatgcacacttattaatttgacttgtttaaagatatatttttaatagggaaatttgattttctatacttagaaa

SEQ ID NO: 218496 - DNA, 4183 bp, Cannabis indica
tattataaataccttttaacatttcacttaatctaaagagcatactataaggcatcaatacttctcataattaaaacactaatataaacaaccacaaattattgtactcaaaaaagaaaaataacaacctttataactgtatataggtaaacagaattcgacattaattaacacgtttgatctttaaatgagaatttaaaggcacttaattaaaaattaatacaaacaagtcattaacaacggtgcctaaacgatacgtgtaagtatagaataggatgtctcaacaataaactatatctttcataaaaaaagaaaaaacgataaactatagatgcatattcaaaacgtcataaatgtaaagcattaaattgtatttatataagatatttatattaggtaccagtggtgcttagcaccttctcgacatgtcacgttgcgatttgctagcgatactccctaaaaactattatattaaattatgtgcgacccgatacttagttggaccaatagcaatactgacacgaaagtactaggcaccactggtaccatttagcatttctctttatataattatttaacaaatactttaccttattccacaactcagggttgaaatgaggagccgagacattaaaagagtgaatagcaagcgctgcagcgtaatccacatgttcacattggtgggcatcactggtgatcaatgcctgttttttataagtggtggacgtccagtccgaacccgttttctcaacccgatccataaaatagaagaccgggttcttacacgggtcttggctgaagaatcgggtattgaaagtaaaaggaccaagattccacgttcgccatgtcttgaaggttaaccacgctgtggtgagatccttggccgaaaccagtgaaggatacaactgtaatgtatagccccaagacactgaaattgaccaattccttttcaagtcgtagcacaccgtttgctggagaatccgacccggatccatttcatatgcactgattagtcttttgagagagtcaatccgggtttgattaggaaacaatggctccaggtggtttatgtggtggagtgagactaatggagctactgggtgcgctgccaatagcccataggagtgtcctcgaatatcaagctatcataataacatatatgatttcttcaatattgtaatatattaaaatcacaaaaatatttacacaacacaatatatatatatttacctggtgaaaaccaagctctctggttaagggtataccgatttcgcttaaacagccttgaactttctgatcagacccaaaaaacttgtggtatctattaatacaagaatccaaaaccctgacgagctcagccgctaaagggtagctaacggcgaaaccaccacctccgtaggccatggagtaagaatgtatcacattctgctccacactctccgagttccctcccacgtagtacatctggttatggtcgtatttccctaaaacgacaaccaaattctctgtaaagaaaacagtatcgtcatctcccatcacgaaccaccttacgttctccaaacctagttcgaagctctccttcaaaatcctagccatccgaaccgcggaccgggagccgtaagagcacgagtacttaaaatccgacgtgtctcccgagactctgtacggcataaaggactccgaagacgtcgtcgtttccggattctcgtcgagccagacgaatccacgagtgacgttgggcttccaccatagcttggagtagtggcgccggtcgttccatgtcttggctgagccgccaataccgaacaggatgtgggatatgttggtcttttcctctttttcatggctagatatcgttgggagagtggtgatgtttcttggaatggcgtcgtatcgggagaaggaaatgatggagtaacggttagaagagataattaccaagaataggagaagagatatgaaagtcaatgcgaaaatagctagagttgacttgaatttgagaaaattagtgggatataataggacatatttcagggatttgaagggattattgaactcctggttgttaagagtactaccggtttctcttgcggtcgataatgataacatatctgaaattttaagaaaaagaatgatagaaaattattagttatataaatatatatatacagatacataaagtttagttatatattgatctgaccatatggtgtttatttatacactgtactttttttgttgcgtagatactcttcctttgatgatgtgttacatgggtacacgagtcaggcattagtcaattcgggtggcaattgtgctcatgtttataagtttatgtcatgtggtagtggtgtatttattattaccatagtaaatctcttgagtgtaaatgggtcggtccaatttccgggtatgatccgacttgatttaaattatatatgtatggatttattccgccccactccattacatcacatactcgaattggatcggattagatccaaaccgatttattcggatcggatctgattcgactcagcttttttttttagaattttaattttatattttcattttaattttgtattagtattatttaatacaatactatatatgtttggtattgacttgtactgatagattgtataaagataatatatttttaataaactcgaccccatactacaagaattatgggtatcaatgacgaaaaatttcgtcagtgaaaggtacatttttcgttagtaatgtccaacaattgtgacatttcattggtgaaaagttgttggagaaagttcgtcagggaaatgtaatatcaataacgacatttaatgtcattgaaaaaaaaatattaatgacaacaaataatttttttttactatattgggatatcaatgacgataatgtcatcattaaaaaaaattatgattttaaattagattttattaaatattttcttttcttttaattaattaatatatgaaatcatttaattaattaacattaaaaaagtaaacatttttcataataaatatttagagtcacaaatattacaatatcattaaatactgcttactaaaaacataaagcgagtggtcataaaacatctataaacttaaaactaatagttcataaaactaaaataaaaattctaaaagaaatttgtagtatcatcatcatcatcataactagcatccctaggaacattcagtatctgtgggtagtatgacaacgtctgcgaacttgtcatcatcttagttgtttgttgcccatgtggtgtcaatatcatctgagatgtctactgcccttgctgtgtcagcatcatctgagatgtcggctgcccttgttatgtcggcatcatctacgatgtctgctgcctttgttgtattggcatcgtctgcgatgtcggctgatattgctgctcttgtggtgttaacattatctgaacattttgcgacatctgtgtcatttgttgtgatgacatcatttatggcatccgagactgtgacacctgagatttctgaggcgattgcatcatcatattcatcattacttgcgaattgttaggcgactgtgccaaaaactgcaagatcgaatggtacatctgactgtgaaactgttcaggggttaatggtggagacgaaggaataggaggctattgtagtagttgttgaaacgaaataagagtctattgcagctgctgaagctgaaaacccattggttgaaaagatggactagatccatctccaagtttatgagagggagaaagttgtggatgcgtcgattgggttagagctgcatcattcatctcaacatccatttgtgaccgaccttcacgtgataatttctaagtcaacatctgtatttgtctctgcatctcaacaactatttccggtaagtcaggttgatcagtagttgcaagttgtgagcgtcaccctgatgattgccctttcaattttccacccactcctcactgatggccacacctctcttcaagattctgccgaagtatctcaagctcagaaacttatgtagatttaggagcactatctcgggttgtaaccatctataataagaataagttagaaaccaaccaaacttagaattatttgaatatatttaaaagtaattattttataaatagtcttacatatgtatttttggcagcctcattgacaaaggt

SEQ ID NO: 218497 - DNA, 4983 bp, Cannabis indica
aaaataatatatgaggtaatttccctattttttgttttaaacaaaaaggaaatttttattcaaaaaagacaaaatacaagttcaaacaaaaggcgagactaccccaaccccaactccaacagccacctaccagctattcaaaacattaataagatgattgtcaaatttgtttttgatgctcctacacacacccaacactctaaatttgattgttttttatatcaacacacacaaccttagcagttttacaaacaagattaaatatataatcatttgtttttaacaaaatgtagtatatgattacaataacaatagagttcactatcttctcttgtaaacttctgtgaggagttgagaaccaatcacaaaaatcaccacgccaatcaagcaacccaacccagcaaccacctggatcgtgaaagcagagtccccaaataggtaattatgagtctttcgagctctagcacaaaccggacacatgtctatagtaattgataggattttactgagatgatcacatgttaaaagttggttgttgatagcttgccaactaataaatttgtgcttcagaatcaccatcttttttaagcttgaataaaggataattaaaagattttagttttaaacttacctttatcaccagcatctgccactatcttattgtaaattttatctctgagcctcaaaagtttcttgtagtaccaactagcatcatgattgaaagccaccgaacaaaagtcttgtccctttaagtaaatggtgttgatccaacgaacctgaagattatcctgcttgctagaaatggcccaaataaatttaggcgccatccaagcaaagattcattttctgccctcctgaaagcctattccaccaaacttcgtaaggagacacactttttcccaagacgagagatgaactttgctcgaattatcgttggatccctaaagaaaatccctacagcatttatcaatagttacagtaatttttggggggaggataaacaagctcatccgaaaattccttatacccaaaagcactgaatgaatcaattgcgccttgtctgcaaaggataaattcctactaacccagttatgaagatttctattgactttgtcaagaataactccacaatctggtgctcgccatttaatgggtctaagctaaactcccaagtactcaagagagtattttccctattccatttgcaacatatgaagaatattatttttgcaatcatcattaacaccctcaaaataaaccaaagatttggtttatttgccattaatcatgttgattctctaaaggttttgaagccttcatgaataagcctgatagaatttttgttacccttgcaaaaaatgattagatcgtctacaaaacaaagattccctaacttaagagacttacaaagggggtggaagccgaatcccttctccttagatttttggctcaaaagtctcatcaagtattccacgatcaaaacaaataacaaaggggacatcaaatcaccttggtgaagacctttttcacctttaaattacccttggaaccggccattcaacaacaggacataggaagcaccatggagacaacttagaatccaagtgataaacttggaagggaaacaaaggccctttaataaatcagagacaaatgtctaatccacggtatcatacgccttgctaaggtcaatcttcataatgcatctagcataagtgcttttcctggtataacctttaagcaagtcttgaaaaatcaagatattatgcgccaactgtctattcttgacaaaggcaccctggttgtcacagatcaaacaaggaagcacttctgaaagtctagcataaataatgagatgcatatatagattgtgttgtagcaggaaattagtttgtagtcatttgcattatgggggtgatccgtattgggtatgagagagacaatggcctcattaagatgcttagggagaattcctttttgaaagaatcccaacacagcactagaaacatcctccccaatctcattctagagacccttaaagaactctgctccataaccatctggacctaggctttttgaagaatggatgccaaattaagctctcttgacatcactcttattgaactgtctagttaaataaacctgttgaagcaagctaagtttattattattaactaaacattccaagttaattctccttgtagttgagctcttcttccccataaagttgcaaaaatgattaagaaagtgatccacaactttagggtaatcttcagtgatagcacaatcaattcaataggataggatcttattctccgttcttatttttttcatgatggcatgaaagtagctcgtgttttcatcccaaaaccgtaacaaagacacttttgattgttgaagaagatagctagcatattgtttttaggtagcaaggaaatctaggtgagacttcttcttggcttgcatgagcaaaggcaaagtaggttttttggcaagatcttcttgagctctaatgaaggattctttagccccgctataacagttcttgacatcctcttttttagagacataaaggttcttcaagacatgcttaaactctaaaaagagtcttggacagactattcaggtcagcaacattggaactcttccacacatttagaacaacctctttgtacccttccatatagctccaatggttacaaaatctaaagggtcttttacaatttctatcaaccttaacatgtttgataaggtagtagcaatggtcagaaagaatcccccatctaaagctagcctctgtgttccagtattgttcaagccaatggttgttgacaaaaactctatcaagtttagagtaaattctaaccctctcttcatgtttatttgtccaagtgtatcgagatcctaaactcctatactcattgacttggcccattgcaagccaatcttaagcatcttgaatattcgtagccttgacttgtctaccaccacttctatcttcgaaagcaaacatcacattaaaatcagcaaggataatccaaggtttattcaagtaaccaatgtcaccaagtttgttccatatatagatcatttctctcactcaaagagttactaccataaacaatagttaagtaaaaatcatcttcataaccgaccattttaactttacaatggacaaattgtctatcatccacaagaacctccaccttgaccatcatgtcaatccaaatcaataaaattctgtaagaaatcgtgtggttggaataaaaatttcaatttccaaaattattggacatcacactatgaacattatcatggataattttggtttcaaaagctccaaaactaattttattctcctcgcaactatctaacaactcacgccgcttctcttttttattcagccctctaacgttccaacaaaaaatattatagctattaatgtaaagaacgggtaccaccaatctcagccagcccctctacatttccttttaaaacatcatatccattaataatcatagctttagtctgaggaatcaaaaaaaaaatttgagcccctttttggtggagtaatccaatcacctatttcaccttcatcccgattatggccaccactaatctccatatcagccttcgcctaatctggctccctattattaactgccaaacaagtagttctaacctcagaaataacctattctacctcgacatcttggacagagttcacaccagcatcttctttttggcctacatcagtatcagcaccaacagttgcagctcccctactggctttcattcccaactttggtgtctgttttcgtgttttgctattttttcttccaaacaaccgacatgcccttgttacagtttgtaacagtgtgacctaataatacacaagcagcacactttgatggcagccactcgtactcaacttgttggtccacaagttgttttctttcattaacataggcaatagtttttggacgattttttgaaatttccacatcaactaacactcttgcaaatttgatcgtggatctttcaagtgttaccttgtaaaacttattggtttacctatagtattcaccaaagtatttaaattcttcttttcccaatattggagacccaatccattcaaccgaacccaaattagaaccgatttcaccatttgcgtggtgtccatatcttcttaccatagtctaaggaccactaattttttgtgaaaatgtataaccccatttttgagtatcacattcctggtagcttcatctttgaagctaaccatggtgaaccctgaattcattctaacaacatgttcaactcctaggttcacccagatccttttgatgaagccttcgaacactttgaaagggagatttgcccctaacactatacaaacaattgaagttctctagaaggcagcctcatatttgatttcatccaagtctaatttagcaacagattgatctctaattttcatgggtttagtaatgttcaactaagatgaaagggttctaaccggattcatgttgaatttactccacatgtcaggagcagaggcttggcatccagtctccaaatgtcttctccatctcgttggcctaactcactgtcttcgagttcaatttctgggcagatgaaccttcatcgaggtccttcagatccatttcaagctcctggcacaggtctagaaacacctccaatggagcaacaatatcatcttagatcacaggcagctcactctggactatctcaaccatatcttccacaatcacaggcttcgttttagcaagcttcagtgcccccttcttcctctttgccatggaagaacggagagaggaacatacgtttttttattatttatatttttcgtcttccttaaattattatttttaacaaagaaaaattttattcaaaagaacacaataaatacaaggcaaaggtcgactgcattagcaaccaatcacaaaaaaaaaaaaaaaa

SEQ ID NO: 218498 - DNA, 1689 bp, Cannabis indica
agccgaacacaagcatctccatcaacaaccttgtacattgaattttgtaaatccggaacggactgcatcaagtttgtctctgctaaaaaaattcaagttcattaatttaaaaataaaattatgtttcatcaggaccatgattatttagtaaaaaggtaaaagaaatacaagacatgaaagagtaaatttcactatagaaatatatttttgaaaggtcacatgtccaattattgcggagaaaagctgtggtaactggtaacccacaatcatcaacaaagaaatgaacaagcacaaaaaactgaccctatgtactgtgctacatttctcacaatgaaaaatcaatttcactgctaaaatgaacaggtacacttacaatacaattgttcaataattcacatacaataaagctgcactaattaatagtccataaactgaacaaaactacaaatgttctcctgaactgggatctgtcatatccaaacagcaatgaacaaaaaagaaaggtcattatttgtttaatcaatcattaagatttttttttttttttgggttatacgaagaggataaatatccccaaagtggtatgatgtggagcacaagctgttactaaacatgatagtactgaatcttattgtttgcaaacaactattaaaatttaaatctaatacattttatcaggggtctagcattctcatttaaacatgtttaagacacaattggttctagttgtgagcaagatcctgaaataacccatttcttttttcagttcgacaaataaatgaataaaccctaaatcaaatagatatatgtaatttaagatataacgtaccggcaagagagagctggaaattgaataagaaaaggaaaaggaggaagctggaggccataatggtactactacttctcttgtccatacaaaaccctagaattgcagctataccatgctcgcgcgagaaatttaaatagggacagacgtaattagagagtagagaccccgctgcgccttttcactcactactcagtagtgcttcataaaagctctattgtaaacttgtatgaagaagtccggatttcagatttaaaaaatgagccccgtaccgcccgtgaaatgaacgggttcatcggtttgcgggtcacgagttcggttaaccgttgacccttttttttggttgacctttttttttttaaataacagtgattttttttagattaaggctattatattaaaataagagataatacatttgatataagtggagttagaagttcctctaaccataaacaaccggtatccaccgaaagtaggggtgagcaaaaaatctaagaaaccgatcaaaccgactacactgtccgtccgaacaccgaaaaaaccgacactaaaaaaactggaaaccgaaaaaaccgtcttcggttaaaatcgcctcaacatggtcggttttagtgtcaatagcaaatcgaccgattaaaccgataagcgaccgaacatatacattatatataatatatattatttttgtacatatttaatatataattttattaaactaattttacttatatcttttttatttaaagactcaattattcattgttttattttattattatttgatgcatttacgtaatatatacacattttaataaactaatacgagatttttaatacaactcattaccatattagtagca

SEQ ID NO: 218499 - DNA, 6803 bp, Cannabis indica
tttttttttaattattatttgtttttaaaaatgagaaatttcaattatctcatcctgggtcattaggtttcaccctcttacattcaaatatacgtctccattataaaaataatgatcaaatctaagccaataatgacagtatatcctaacaaaataaacatttataacattcaagccaacagaaaattaaggttgaccgtaaaattgttattgacataataataattgttattttaaattattaaaaaagattgctttcaatgattgaccattttatggttaattgaaacgaaagatatagaagaactttatgggattttttaagaataaaataaaataaaaacaaattgacagcaaaaattacacattcatgaaaatatgcgcttcctttaatgaattttttttttttttaaaaagaagcattattgtataaatgtaaataaatcagatctcatgaccataaccaaattgtaaacaataaaaattaaaagatttagaaaccttaattacagcccaaaaaagtattcataaggctcctacattaagctatatatttatcaatttcacactttgagtttaatccttagacaactttattaactatgtcaaaatcgcattcacaataacaaattacaatcctttctctgttgcaacctccaaagccaacagacaaactctagccaccccactaagagcattagcaaaatgcatttgtttgatactaatccaaagcaccttctttacatgatctcgagcaaccactaccaacatcatagccctctccctaaccatagccctctccctaaccgccacatgacagttaagtttgatctaatccacaggtgaaggagtcaactcggcgacctcatgagaaggttgtaattgagataaaagagtgaccatattctgtataacaataaataataaaatcaatattataaggtatgctatacaaatggttattatgtacattgttatttgtccctcttcatatagtgttaactacgatagacgcatataaaaatacatatcaacattcaccgctctcctattcaaaatgcaaatgaatttgatataaacccacagtctagtcttcgattctgaacaggaatgagacctcaaggagaaactctccatagatgagaagccatattacaatgaagaaagagatgttccatagttttttcctcttttccacaaatcaggaaagaggagtcttcaatgatcatccattctctcagggtagatcgaataggaagtgcattggatagaatgctccaccaaaacactttatgtcgttaatgcatcttgttattccatagtttattccacaaagaaggattgacatgacagtgttagtttctctcaagagcctgcaaaaggtaagtaaaattggtggagaattcaccatttggttcctttgtccaaacccaatgatccctcccttaccctgatggcttttctctttccaatatgattcctactgtatcatgatcatacaacctatttagttaaagatcccactatccattttcaaacaataaatcctctacagtcgtaaagcctggagtaggaacaccagttagagttaggcaaaaaacattaccatgggcaacccatagatctttctaaatattgatattttttccatcaactaccacaaagcaagccccttttctctaaacatcttttgcctaaaccatattcttctaaaaccacgaatcaaagctcttgtaattgcattgaagaaaaggggtactgttaaggtatttgatagctagcactttgcaacataaggattgatctttgttaatgagttaccattcccattttgctaaaaaggctcgattcatctccatagttttttgaaagcctaaagccccatgagacttaggtaggcaaattttatcccatggtttcctttctcatttccccactagaaatcctagaccgttccatcaattattgatgccgactgttgagaaagttttgtagtttgcatagtataaatcaggatggacagaccaactgatttaataagtggggcacgacccgctttagaaaggattttcctttccaaccttggagctgggaagataggttttccaagataaagatgaaattagcatccttatgacaggttctaaatataggaaactctaagtatatgatgctttcgtttaggttttttatgcctagaatatctttaatacccatttttcattccttcaatcgtgttcttattgaaaaatattgatgttttaagcatgttaactttctatcgtgactaagaacaaaatttttccaaacaattccaaaagtgacgggcttcctcaatattagctcttgccacatggataaggccgcccgcaaagaaaaggttagataatcttggcccatgcctactcaattggattcccttgattctaccactatccaatctctcctccaacattgtagcaaggatttcgaccgctgagatgaaaatatacgggggaagaggaccccctggtgaatactgcatttggaataatctttccaatcggccccctgataagacaaatattgagcgaagatgttgtaataaattgatcgggagatccaattacagagtttctccaagatcctataactttccataacctattctacaaatgaccaactcaagttgtcataagccttaaccagatcaattgtgaccgtaagaaaaccttccttacccttttaaagcttgaaagaatggatagtttctttcgataagacattattgtcctgaatatttcatttatggacgaacacaacttgagtggggaaaataaatctaggaagcaaaggcatcattcgattagaaataatcttatatataaatttatatatgacattgcacatggatattcatttgaactgggacaccttctgagggtgtgggaccttcagatgagcaccacattagtcaagttaattcccttgtgcatcgtaccccaactaaagaaaacacctaagcataaaagtcctcaccaaccatctcccaatagtgtttaaagaagagcacatatattccatccagaccaggaactttaagactacttattgatctcgtttttagccaacgatgctgcgtctttaaagcgataagataatatgtaataattaatacaattaagcaataagaatacaaaaatttatagaagttctataatgaccactattaacatcgcttttggccaacaacactgagtcttgaaagcaatggaatcaattagattcaatgagagtatagttaatattaagcgtaaactaagaacacgagatgttatagaggttaaaccctattatttggtaatagattacttccctttttgttttatttaacttgtgagtagagaagcaagaacaacttgatctctcacgaaagctttacaggaatttgagcagcgtaatagctctctcagaaatattatttcagatcccttcataatagaattgttccactatttataggggataattacaataaaaattagttttccgaaagttgtaaaaccatgaaaataggaaatgactctcctaaactgcgcaaaatatataagtaaatcctcttaaattgggatatgattacatataaaataggaaagtgtgtttaaaaaatctgtctcacgcattttcgcctagccgggtcatgcgaggtgctgattggatctctccgaccaggtcagtttcgtccatcctgtacggtgagactttccttgcttgtttattattacatctgacatggtgtatgccttaggtggacacttcaaaagactatttcctcccccaggtctcgatgccatgatacgtgtcacctaaagaaacatgccatatcacctgaacaaaattcgagataatatttgcccctcaagttcacattggaacttttttattggtgcgtggacttgcttggcttaggtattacgtgaatgcagtgacacgtgttgaatagataatcatggaaaactaggttgtcgcttcaaatcttttggagcatctttttacatatttgatgcatttaatgttctgatacgtattaccgtgccctaggggcatgcactgacagttatactcatatagggtagtcattgtaacttttggggaaacaaaaatttaatttgggtgccaaaattacagttgtatcccctaaaattcttgtaaaaacgaaaaaagctcatttggcatttttactctttttaaacctctcgataaccagagaacactcttattttctctgattctcaagaacgtatttggggatttcaagcacttaacctcgtttttagtctcagcttcatatatttcaaccaacaatttcactagtgagtaactatccattttatatgtatttttaccctattttattacattcaatcttatatgggaaaatttgaatatatgctattgatgtttttcactgtttgaatttaaattaaaatttattctaattgttgttggagaatatatttgtacatgatttaataactgaattatcgaacaaatatatattcttcttgaaaaaattcatcaaattgaggcttgtacaatactttagcgatttctgaggttaacttgttcttgaacatcttcacaaataagaaaaacaaaataaatatttttgtatttaattttgcgtggtaaggaaagatttttttttttttttatatatataagaaggaaagatttaattgagtagtattatcccatggagattaggttaggtgttataggagtagaataggcagaggatggagtagtagtaggtaggtagggttggtccaaaactgtaggagaaaatagacaaagtaattatagataaattagacaaaaagaaaaagaagaaaaggtaaatgggtgtgtgtgtgtgtgtgtgtggagtacaaaaggaggagaggagggacaaggtataaaagaaaatctgtacggagtgcaccacctgtaagaaggtcacgtgatgcggtgggaacccatcacgtgatgaaaaaggcacacgtgtttgattttgttttgaccctcttcacctaacatcccacgatttctaacacgcggtaacacatacaacctccgcttacccatacccttctcaagatcctcctcctcacattcattcattctcacaaacaaatccaattttctctctcttcaatattaaaattgagaagaggtaatttatttaatttatgtatattagcttatattacattatttgtatatgagaaatgttgaaagtattagtagtgtctaacatctttaagaagtatcactagctgattgcaagacgatatatctagaggtgctaatcatcactggtgtccaataacaatactctttttatttttgtatacttttttagagtatttgtcatataggagttcgaattttttgattagtgcacaaaaactagcgacgatactaaacaaaaaaaagagtgttggtgctaaaaaatttgatgattgtaggtataaaaatcaaataagtatctctaactattcatttaatttgaaaatatttttattaagaattttattaatgaaaacctattatttagtgtaggactattgtcagggctgtctcaaattttttggaggtcatgttctaattttaaaaagtaggcccctaagaaaaaaaaattataatttataaataatattttataatataattatattacaaaaatatattttactacaattaaacacctaaaaactcaaacaattttaataaaattgttattatttccaatacaacttcaactatatcaacattctattcactatgtagttattaaatattatggaaaaaacaatttaaaagggcattaaataaagaaataaatttattgttttttttttaaatttggcatgatagaatgctggattgaaaaaaaaaattgaaaagtaacatgggcctttttaagttttgggctctgttgttatcaaaaaaagtttggggccctgtgcatcagcacttcttgcacgggtacatggccgaccctgactattgtgtgtctaaagttagcaaataatatttcgaatttagttacaatattatttagtatagtattaaaattgaatgtttaatattataagttgcaaatttaattagctaggatcgttattgcgatgaatggcgaatatgtttgttaaaaaagtttgaatatcttaaatattcatccgtagtgaattaagttataaaattaaatgtgtacaacttttgaaaatatggtaaattatgtattgttacgtgatacttataattattttatattgttatggactgtttttaataattatttgtagattcaaattttgtttgcatgtataattttgtttataataaattataaactatacactaaatatttacttgttaatttcactgtttagatcgaagtagtcagatggtcaaagacttattgtttactcaaaaagttggcttgatgaaatctatattatttttgacgtgttgcatgaaaaaaaccaatcctgggttctgcatcccaggataggacagtgttacctgcacactgggaggcaactaggtaagcaccaagatccaacgaagtcgtttctgagagtcattcaacaagtaggtcgcaatgaccgcaaaacgatgaaatgttaagatgaggatgacacctggacatcccggagctcaaactagccacaatacaagtacttggcccccaagttgacaatctgtgccctaacttgcatcagtttcggttctcaataactttctacgtgcaatctgattatgttggaaattatttt

SEQ ID NO: 218500 - DNA, 4007 bp, Cannabis indica
ttgttgatagaactacaaacctatgatgctatcattgaaggataaaaaatgagttaagaaacatatttgtatttgtaataaatgtcaatatttatgaaactataaggaacactcaccatacaaatttaagatttgagaactgttatctacacatttgaaatatcaagcaagtagactgaggcttaaaactgatggcactcaaattgacaaacatttgccaattgcaaattgtagaagttattaataagggcataggtttctaaatgaaaacactcaagacacattttcctaataagcgtgaaattctctgcttccttatataaactaaatcagcatttattcatactccagggacacttaatgttgggaccaaaactaccactgacataccgttttgtttttccatttatattgaaggaaaggaacattatatgaagattaatcaggagtacaaattgaagcagagaaacaaatgtgtgcaagactagtaaaaaaatatggccaatgaacaatccagaattgcatcttttagactaaaatgttacatttcagcgtatgtgcaaattccaacattatttattcaagcagaaaccagtaacacatccaaataaaagtgcaggaagctttcaagtagaatcccgcgattgaatagcataaagagagcaatgaaatcagctaattgaaccaaaaactgagttggtgctaggcattcacaagggaaaccattcttagtgccattatttttttttttaacaaggaaaagctgcatatgtggagaaattagattgtcttaaggtaaaaatatattgacctcacagtgtaaccaaccatcaatcaacgaatatatcgaatgctgcactataatctctcttttagcaacatttcatgtgaaacactatttctgaagcattttgtctatgttcctagcagagtatgtaactaatcactaatcaccgagttcatttgtaagcctgttaacctttcattttcaaaaccagaattctcatttcttttcctgttttaaaataaaataaataatacaaaaattacaaattgaaatcacagtttggtcttcgttgtgtttctttcttcgttcacctttattacacaaatacgatcaaccttaccaactgtaaaagttttttcactttctagacctatagtgatatgatccaaactgttgctgtcaggttactaacaaatacaacagtatattataatagtaataggaataatatgtgttccagtagtgaaaaaagatgataaaagaaaaacttgtattgacgaaatatgattcacacaatcacaactccacaggtttcgagagcctgggcctctcctattgatgctgaaacaaacaactagttcaagcatacccactacaccactcaacacatatatatagcactcacacactcaccaagccaaaccaaaagctaacaataaacacacaataaatatactaaacaccttttacttctcctagcataaatgaagcgaaccaagtgtctaacatataggtaatcatgttatttgacgttcaaagcttctgactctacatttctccatcacatgaataatcaagtgttgtctgcttaacaaaccatggaagtttaacttaagatctttaatttctatttcacattctacataagcaggtgaaaacagaagtcttttaaaaatatacatgaaatagaaggaagcagtcatgatcacttccaaagaaatggtccaggaaaaatttgatatacttaaggacagatagatattacttactcgggaagactttcatacgcagtcaaaacattccatacttcacgaacaggagctttaactgttatactagccaccacacatcgatggacacctccattttccttcattcaagattgttttgtcaacaacatgaagaaagaatctcaacaggaataaataaacagtaagaagagtagtttggggccaaaggtaccaataaaccatcaaatctacgaagatgaacctcatccaccaagccatgcctatcaaggctgcaagcttttcctaatatgcccaatttactgtttgagtcactaaaagaaggggtcaaaggaccaacattagaggttaagaatccctctttgagctctgcagatgatatattatcctttccattcaagagattatcgacattcagtttcagtgaactactaacacttgtagaactttgagtgaaggagttctcagtaagtgccatgttctgattccctccaaaacttttttcggctttacaagccaaggctcgaagattaacaggaagatctgatctaatgattcgttccaagaaaatagcaggaaagttgaatcttggtatcacattaacttcatatgataaaatagccgtagatgatctgcagtaatcaatagacaagaaaattagaacacaatacattacacaaatatttaaatgaacatgacatatttttaacaaactgttagaactcttaaagggcctgcaaagaaccaagtaggcaaagctagattgcccataatatcaatagttgtgacgtttattgaaaagaaaggtaatttatgctaaggtccgtattaaatgattgcaccccaaaatattaatcactaatcagcattttagcttgttttttgtcttcggtattttggtatcgctattcattaatgtcaatcattattcccaattcagagggtcaacaaaatctaacatactccagcatatagtgacaaccttactatgtattcaatcaacttgttcaattccaaataaaggcattgccaacatgcttaaagttctcattatcattaatatttttgagagcattacatccaaatagtacctggtaccacatcttacagaccattggccttcaaactttttgaagtccccatcgaccatagaaaaaagaagaacacgatcaaaatcctgaaaaagaaatttaaaagagaaattacataggcaaacaaactaaaaatgatgaaaactaaaagatagcaatctatgtatttaaatatatattatagatatagatgtgatacgcatacaataaatgtgatataacccacatgggtgtaagttgaatcgtgaagctgaccaaattgtaaggttataacttgtgaggatttagatgattactgaattgataatctcttgaaggtccaaaacaacccgagcttcaatatgccaatagagtgccctttgaaaacctctttgttccaaccatattcgccctggatatgggcacggaattctcccactgtcaattttaacaccacaatcaatcaaccacacaccacttgctcaaaaactgttctattcaatgcaaatgagcagtaaatgaatatatataaatattaaacctggagactaaattaggaacgaaatcggctaagcgttcgtaatcggtgagagcattccagaccgattcgacatcggcatggacaagagtttcggccttgattctgcgttctctccatgaaaccacttctacttcgcaatgcacatttgtcttttttccttcatcctcttcgtcattttccccttctacttcttcttctttttcttccttctcttctcgcttcctctggctcttcatgttttggtttcctttgttgttggaagaatattgagtgacagagccgttccatttggaggaaaacaccatgaaattgatggtgcgagcggtgtgtcctcctggggagagttgtacatttctaggaattggtatggcggcaaattggagaggaagagttccaaagttgaagtttgaaggcttgcaagtaaccatggagtaaggcgagagagagtgtggtagtagactacagtaacagcactgtacaaacagatatttcttttgactcggatagtgagtcgggtggttttagaagctaaaagaaggtgagttcactcgaccgttaactggtaaccacatgtttcggatcctttgttgtggcttgtgtggttgactggctccaatatctcccgcctttagaagagaggg

SEQ ID NO: 218501 - DNA, 2067 bp, Cannabis indica
gttggcactggctgaattttgagacttgaatgtattcttttggaattttgaaagatagtttaagtgctttaatgttgctcgtgcaaaatttcataagctttatcatactttctattatcatcaattaatttttattttttcacttaatttttttgttaaatttagtacaaaatttatccaatttctaaagatatgtgcaccagaaatctatgtagtgacattttttttccagcaaaataaaaaaccacattccattaaaaaatatattacatatatttgttgtatataaaaaaaaaaaagtgatatgtaatatgcggtgtttttgatttgcaatttatgctctatagtgcattttaaactgcattttttaaactgcattttttatgctctatagtgcagtgcggtttgtgcattgtgagcgatttaaagaacactcctactctcaagtagagattgaatatttttgcaaagaaattcgtattatgttttgtaaaaccataatttgtgttattatgccagccattaatgaaagaagcaactacattaaaaaacactaaaaaacgaatgcattccaagactacaacgcttactctctggtacacaaaatgtgaataaaagattcacaatctctctctccctctctttcacacggtcacaccccctcaaattcaaaggaaagacagataataaaacacaccatttagggaggaggtcctggtcttactcttgtcttgttgtttttctacttactaagcttcatcccattcatcattcttgtatgatactagagtgtctaccttgtgaatctgcaaaaagacccaacacaacacaaagacccaattaatcaaaattcatatctagttgatgagtgttcaaacaaaccatatatattccaagacttacctttgtatcaaaagaatgcaatttcaccatctggggattagcaatcaatttaggatcactttcaatccaagtgaatggtactgcaacatctgtatttgtatatgctagaacatcaaacacacctaaacacaaacaaaaaaaaaagcaatattgtaagtaaaatttcaccacagctgagtaaagaagtgtttttctctttctttctttctttctttctttcttacaaggctcatcaaggcatggcaagtaagtgatactagaagcaatctgtctcatgattgcttgaatctctctcataatttccttgtcacttttttccctgacaccctgagaaatcaaaaataaccaaacacaaaaaacaatcttaaataaataacatggagtaaacaaaagaaaaagtttggcttaccctttctcaacgacttcaccatcggtctcaatgctgaaattccacctctctaaaacttcatttatagacttgctcattattacaagaacaactctttgtaattggccagcttccaaccactctattgaaaatacattccaaactcgaaatatcagtaaccaagatattggaaaagtagaatgaagaaatggaaaattgatttccttttcctacatattttcttggcttccaaacagtacagagtagactaacctgaaagctgtgcgtttaggttggaaatgaatgatttgacaccctcatcttgggtaagcagcatagggagcccatatttcttcactttgacaaaactctcttcaggataaactccccgattatacagaatgctatatcatcatcaattcaacattagttccattataattatatatatatacatatattaagttacaagaaatgagacaaaagaccctaacctgttagcagcatagcctgagaaaagtgttccaaaagaaaaatccaaagtaaaagaaagaaatcagcaaaatgagatgtgaatatagaacgaaaaaaggcacccgcaagaaagaaaaacctaccaaagaactcgctgacgatcgccgcagagcctcgaagggtaattatgtctttagttgtggtctttgcagccattttctgggaaagaaatctcttcttttctcagtagagaaaaaaaaacaaatggggatttgttgatgaaatgaaaatgggaaatgggt

SEQ ID NO: 218502 - DNA, 2539 bp, Cannabis indica
ggtgtttcggcgagtctctaccctgctgtggtgttgaaaaccaggcaacaagtagctcagtctcagatttcttgtatgaagacagcgttttcaatggttaggcatgagggttttagagctctttatagaggatttggaacttctttaacgggtacaatccctgctcgggcgctttacatgacagcacttgaggtcaccaagagtaatgtgggaaccgccactgtgaggcttggactttcggaggcaactgcggccacccttgctaatgcagctgcagggttaagtgctgccatggctgcccagcttgtgtggactccagttgatgttgtgagtcagagactgatggtacaaggttgtaggaattcgaaacttcctaatgcttcggcgtgtaaatatcttaacggggtcgatgcatttagaaagattctcagaactgatggtcctaggggattgtataggggttttgggatatcgattttgacatatgcaccgtctaatgcagtttggtgggcttcttactcgattgctcaaaggctggtttggggtggagttggatgttacaataccaagaaagacgatcatattaacaataaaaatggggttagcacatttacaccaaattcaaaaacagtaatggcagttcaaggagtcagtgcagccatggctggtggggtttcagctttgataacaatgcctcttgataccattaagacgaggctgcaggttttggatggggatgaaaatggtcgccgtgggccgacaactgtaggacaaacagtcaggaatttggtaaaagaaggtgggtggacggcttgttacagaggtttagggcctcggtgggcttcaatgtcgatgtctgcaacaacaatgatcaccacttacgagtttctgaaacggctttccactaagactcaagaggttttgacactctgaacaaagtaaatactcacaatccggtcagtgaaaagaattgaaaaacagagttttgtgttttccttttccttgtcccctaatatgtattatcttttgtattaatcctgttgtgagttatattctctgtaatatctctccctttggctttcttttgtttttgtcgaccgtctccaccggtgatcaatgcaaaccattgtaggtctccttcacatatataaagagcggtttcttaaaatttattattattattgcttaatttgaccttgatttaccatctcaagttcaaccaatctagaatatgaaggcttgcattttcagtgattgagagcttagtttatggtaattttcgggtcatttataacttgttatttctaacttccccaatcagaaacagtaacaatgagaaccttttttggtattctataatattgtttttcagtattgtaagttaaatcaatttttttaatttgctctatacatttaagataggtgtgttcacgttaccctctgttacacaccgaaggccaattaccatgcatgcatttaacaatgaaaagtacaaagtcctagagaaaatttaaagataatattattgcaattcaccaaagatagaaaggaaatgctgaaatgcaggatttatatcatatggtttaaacattcatacagcaccaagaaataaaatattgcaataataataaaatggtgacgtagaagaaatggacggactaattgtgctaaaagtcctgaaaataacactcttttcgaaagtgaccaaatttacaagtcttggttcagaaaaagacatgttgaatatgaccttaaagaaatgtcccttggcagtcctatctcctattcttttctaaattccacaaatataaatttttaaaagttctgagtcattattgtgaataaaggataccatgtaaagtaaatggtccaaggtgagctaaaaattcaaaggcagttcacgttgacatgttgtagcataaaattttgtaagactatctatttaaccattagagaaactaaaattaaaatgtacttaattatgagcggggcatccaaacattaatggtactaaacttacactgagattccccctgaaacaaggtacacagattcacaagtttgcacgaattctagaactaagaaagaacgactactatgcaaagcagttagcaaatttcattcaaacaagcgtaaagctagaagtctgcatcagattcattgagcatttcaagggcgagatctcttgttgctgcacgatgggcatttgtactgcttaatatgttcggctcttgccggggttatcttcacacactttccatggaaccacttctcgcagatgtcacaacaaatccaaaattcatctgatgcatagttttcaccacatgccccacataatgtttccccgtgctcgtcttcatcttcttcatctaagtcatcgtcttcatcttttggctccaatgattttggctgttttacctgagtttctggtccccgctgcttatatttaagccaggaaatgagaatcagatttgagataatctgaaaagagtactaatatatacaaggctagttgaagaaatcaagtattttacaagct

SEQ ID NO: 218503 - DNA, 6092 bp, Cannabis indica
tctctctctctctctctcctgtttgtatctgtgtatctttgaggcttctcgtctcagctcattttcttttcttttctctttaatgaatatgctgcttagaagatgtgtgtttttattaatttattaccatgataagacgactttggacatcaaagtattattctcaccaatttcgtgtgcaagtctagctagtaagttaatcaatgcactgtaaactaactgacatgaatttgaataatttcagcgcttcggaagtggttctgtgccaacttatcttattgggtctaagctactcaggggagagtgggaagcagctgtaaacatgattcttgatccaagagaaggagatatcctcttctagtttcttcatttaactctggctaaataatatttttcttttaaatcttctaggatttccaagctgctttaggaaattcttgtttttgaaaagcttttatgtgttgtcttcatcttgacatttaattacaaagaaatacaattgcgatggcacgtcaatactataaggaaactaatgacatcgatgggactctgagacagttacctcgatacctggttgctgagagggcagtagtaagtttttcagcaatattttctgcatttttaatttcattttataaaacttggcgaatgtttagagctcccataagttctaaagagtaaagacacacacattccttcctttctcatacagttgcagtgtttgaagaaatgtcctgggaaccacctgcaggctctgaaagcaataccgagaactttgagaatgatgtaagttgctcttttgttctctctccctctccctttttacttcgtagattttttttgggagattttgctgggcattaagttgacttgacctaagagagaatatttgtggtcctcagaaatggtagtcgaatgcaattttaaactggaaaattgatcatattattatcactgtgttatttaggtatgtccatagttaccaaagctatttgtggaatcacgcagctagtacaagggtgcaaaaacatggtaattcttatatttgttttttctatctcagaagacattatctgggtatttaggtgcttgttgtagcctgtgtgtaactatctcaccattcttcatcgtgttgcaggaactgaccatgttgtggtgggagacttagtatattgtaaagaacatgatattgagaaggcgaaagaaattggtaatgctgagtgtgaagaagaagaccctaatgatacacttgaagctcacgaactagatgaaatctctgacactgttcttcccgaagaaaagaaaaatcctgtaaaggtttgtgccctttgtttgctgtaagcttttttgtgctgcttatttaccagattgcctctaattcaatttgttgtaaggctctgattgacgattaattgtatttgttattttggcggttattgaaattaaattgccgaaggtgattgcctatgtaaaaacttgagaagtatgattgtttttcttttctcaggctgttactgcagaagatatccttaatggaaattataccattgatgatgttgttcttccattacctgggtataaaattatcagcctgcatctcgctcatatttttgtgtatatgttatggttctttcctgatctgttgtttcaatgcttttggtagttcaagagtaatttttccaacaaatgacattgcccaagtttatcatgatctggcaatgaaggtgattttatatctttctaattttgttgttggtttataatctatctttgcttactccaagttcctgggttaatattgttttggctaaaaaagaaaggggagtcttctaatttttggttttactatcaaattcaggacacaatcagtttaacagagagtgtacacaatgtcaagtacgtttacagtttacttgatcacttcactaccaccttttttcttctttcttaacccctgctatcaaacttgccttcattttcttctaataaaaggtttccatcataattcagagaattctcaattactagtatgactggtagttacaggcgtgtttttcaaaaaccagtcgattacgaatggtatgcttctaatttttacactttcttttccccttttgtctttggctttttgaagtcatttcttgtggggtatataactgctgctttcgtttgttatcatagggaattactgaaatacaccgatggcaacatacctctagcagaaacagatttagacgttgttgctaaatctaaacgctcaaaacctgtggaagagcttggagtcaatgaaagcaaagggataaatgaatttgattgctcagaaagattgaacccctctgagaatgacataaaacttcaagcagacgacaaagaggtgggtggcaagagagaagttggaatgctaattgaacctaaattccaagacgcccaaacagctctcaagcttagttttactctcccggcgtcttgttatgcaacaatggccatcagagagcttctgaagacatcaacttccgtatgttttcactctacaaagaattccattatttcattatgtttttaatgataaatttctgcaacccaaatggttgaattcaagtttactacgccatcagtccaaagcatctggtgataaacttgcatactatcaatcgttttgtgcttattttgcttggcaaatgtaatgatcatatcaatcttctaaagttatctgtattattactaattattattttggattgtgtacaggtcgctttccataaaacgttaaactagggagcgcgttagaagtttcatggcattccttgacaggggaaatgacccccctaggggcccatgtcacagttttgagtaccatattttacaaattccacctttgtaaggggagaggtattagctttaaatttgcatttcgatacaatttgtaaaatttcacctttacaaaggttgtattcttttccttaacaatatgatcctttcaagtcatctatgatcaccttttagtatgatacgattaccaatcttccttaagcagttttcaattttatttattgaattgaaatatgtaataccgatattaaactacaatggcttgacacctcatgtcaggcaccccttagcaatctatttaaatatgtttccaacctaacaacaaagttaaacaaaagcatcaatcccagatcatatcttccatatcagataaaatccaacacaaagataaatgaataatgagaacacccagtacatcactcacaagacaactctacccaacaagatgatctaaaatctcaaatggccaacccccaaaatcaaattgattaagatcggtcagctaaccacaagtggctgaccccaaaattggtcacttgttcacccccgaatcaacttgacttgacaacctgtcttgtatctacgctaggccagtttttgtaagactcgtcatcacgttgagattacagagtaatttcttttcttttttatttttgctgaaagagtacagcatctaagcttttaatacatgtataatttctaacaaaaaaaaaactaattagtgagtgacctaatagtcatttttacaagtccctttctgcatttacataacagaaacacgacaatatttgtcagttttatttccataagtgagcatttttgtagtcttagttgagaaatcatgacagaaactaaacatactctcactaagaatttaataaacctttttcttttccattgaaaggatactctcttacagctaaatacctcagaaccaaatttcacagccagtatcatatcagcctcacaaaatgaaaaatcgacaaatttgagcacaaaccattgaacactaaactattaaatttatacccaatgcaatggattaacctgtaagaaaaaaaaaacaactaaaacaacccataagcccattttccccaagaagttttcccaccatccaaacacattctaatttctagctttataaactttcactatatcggaacgtatctcttgacagcctgcttccccgcaactgcagccgccgccgcaatccctccgatggcaccagcaatggccgccgacctcggtcccgccgccgctttataaagcgcaccagtcccaagtccagccacaacagtattcaacaaatcatcttgacctcttaattgaattaccccactttccaaaccggcgaagatcaatccaagaatgccaagagtgtttccgtacctccgtccgagtgagccgcccgaattaagaacacggttaacgcggagcttgagcgtatcgcctgcctcagctgccttgagaccttctatggatcccttggtgcctccgatgatcgcaccggacaagtaaccacaaccggtgtagtattgaaggttctcaccccatgatcgatgaggctttgaggcttcttcgataaagaggtgttctggtgcggttggaagattgtagaggttctgcatcgggacatggagatcatggtacgggttgtaaagccggccctttcgctcatcgttgttcgaactagataaatccgccattggaatcgagcaaggtcaacaagagagagaaagagatggagagggttttagagagaaatttctgggttaaagaaaaccctagcaaaattgacgttggcggaactaacagggttttgggcttagctgacttggcatctttgagcttaaaaataaattaattaattaattaataacttatttattattttcacggaataacgatcagtaagaacaaaaaggaaaaaaagaaaaatgagtgctaattataatcttttagttaatttttacgtcagtttaccatgcacgtttaaaaaattttaaatgtattttcagcattgtaaattattcgaatttttttaaaaatttacaggaatgatgttgtaagcataacgaacacctccgtaaaaaaataattgaaaaaaaatattccgacatatattttcgagcgtagagattgattaaaaaattgtaacaggaggttcacagtaacactcctaaaaaaatgaagaaaaaaaaggttcagcgactgagcacggaagcttcggcactagaaactccgaagcccaaactcatcattgggtaattattatgggctaacatatgactctatacgcgttcgtgaagcaacttgggcccaaatggtgtaatgcatttattatactttaatgatttatacctcattattatgaaaatgtttttaccattttttatataatatatgttgtaatttttttttctcaaagtagtagagggtgtagtttaatcataaattttatatatttttatttatttatgagtaagtaatatttgattccaaaattcacgagtaaaatattaatttttatgtctcaccaattttttttttttaaaaaaagttgtattttctttttactcgcgttatgataatagtgtactcttattagttataattattttaaaaaatatgaggactaaacatatacatcatattttgtcattttgtatataaactatgcactctttaacaattgtgtgcatctgtttacaaaaaaaaaaaaattaaaaaaaaagaaacatttttgtacatattttgtgtaataaagttaaagaaaaaggtatttacaagacaatttagaaagtaagaaatgcttgttactattattgtttattagaaagcaacttaggcacatgcaaacatgttcaatcaaaatagaaattaaaaaatttgggcatactaattaaaacggagtttaataacaaatcaatgagtaaagtcaatattatgaaaatcaattgaaacaataatgtatttgctttcttcaaatgataataaaaatgaatgaaggctcctccatattgccctataatttttgcatacacatcttgtcaatgtggttgggaaaggataacaacgaccaaggaagaattgaactttttacaatgttcccttgtattcattacaagttgtgaccagtctctttcaacaactcataccaaaatagtgaataatgtggtattgtgttatagagcattaaatatcatgcccgccaaaggcccatatacatcttactttgacaaccttttttttttttttctttt

SEQ ID NO: 218504 - DNA, 8847 bp, Cannabis indica
tgttggttaagtccaaaacctctgagaagcaaagccttaatcttgaagaagccttcatggttatcaaaaagtacgggatgaagctaaaccccaaaaaaatgtaccttcggggtttcctctgggaaattcctgggttttgttgttagctctctcagaattaaggtgaacctagaaaagatgtttaaagtgttattggtcgaattaacgcactcagtaggttcattttagaatcaacaatcaagggtatcccgttctttaacgtgttactaggcaacaaaaagtttgaatggaccaaagaatgcaaagaagattttcagaagctaaaggagcatttgactaaagctctaattttgtcaaagcccgtggagggggaagatttatacttgtacttggtagtgttcgatcatgctataagtgctacacttgtgtgagaggaagagaaggtcctacccggtctactacgtaagcaaaagattgatgggcgtacaatctagagaaactgacatttttcttactaactgcatctcaaaagctaagaccgtacttccaagctcacgccataaaagtactgacgaatcatcctcttctataggtacttcaaaagccaaagtccttcaatagactattaaaataggccatggaacttagccagtttgacattaattaccagccacgggtgtcaatcaaaggccaagccctcaccgatttcatagtagagtgttctagcttgaatgaccacctgatagatctagtctcaaaaatgcccatctggaagatctattttggtggagtgtgaaataagaaaggagctagactatggaatattttgatctctctgcaagggcactagctcctaagtgccctacattttagttcctgcgcctccaacaatgaggctgaacatgaagctatgttggaaagcttaaaactagctaaagaagttggagcctaacacattgaagtacatagcaatttcaggctggtggtgaatcaaatatctggtgagtaccaaatgaaaggtgaaaaaatggctgcttacatcaggatttcttgggagttgctataagggttcaaaggctacaacatctgctaggttctgaggaactaaaattcatttacatatatgctttccaatcttgcaacaaaccctgcgatcatccaacacggagtagtcttgatttgtcaccaagaaaagccaagctttaaggtccaggggctaaattccatagttgaaaattctctttcctggatggcacccatttacaaatttttgagtttgaagagcttcctacaaaaaagctacctctaggaaagttcaatattaggctccccattatgtgatcatggatgggaagctttaccgccagggatagtcaatgctataataaaaatcaacattgtaaatccatgagattcatgattgcgtttgtagagatcacacatccagatctatcatataaaagaaaatcctttgccagaggtatttttggcctacaatgaagaagtaatgtatatagtatgcccagaaatgcaaacaatgccaaagatatgctaacgttccacgtggactgccaattgaaatcacacacatgaatagcccctggccttttgtagtttgggttatcaatttagtacggtccctccacatgggaaaaggagaagttaaatgcacaatagttgcggttgattactttaccaagtggtttgaggtagagccgatgaacaccgtcacctcaaaaaaggccttggactttgctatcaagaacatcttgtattattacatacttccatacaagattgtcttcaataatgggaaacattttaacagtgaacacttcaccaaatttcgtgcccaacatggaatcataaaaagtttttcagttgtagcccagccatgcaaaggcaaatggacaagtggaagttgtaaatttttttttgaaaacaatgttaaagaagaaactcgaggcatgcaaagctcattggccagaagagcttctgcgagttctttgggcctatcgaaccatggagataacttcaatgaggcagacaccatatgtaatggcttacgggtgtaaagtagtaataccagtggaggtcacgatctcctatcaccaatgagatacctacgacccttatcagaaccattccttgctccaggaatcattggacctaaccgagaaactctgagaacagtcataggttcaattcaaaatgtaccaaggaaatatcactcgacactttaactcaaaagtcaagaatcatacgtatgatgttggagacctcatcttgagaatagtgagcaagaacaaggagtgggggtactcaggccaaactaggaaggcccatatgagatacttccaaaagtgggtcaatgaactttttaactttagatgatggatggatggatcgaaggtccctcaaggttggaatgcaaaccacttgcgtcggtactatcagtaggctgaggtgaccaagcattgatgtatctcttatgttttatgtaaatttttgaacgattctcttcttgatgtaaacttatgggtacaaaaaaatgaaaatagaagaagtttacactataattttacaattttttatttttaagccacaagctatattttaaacaaatgaccaagaagttgaagatgtccaaacttcccagctcacctggggagtactaggcctagctgtgtatgggccccaaaaatgtagagtgtgctatgtttatttactttatttatacatgtcaaattttttagtgtaacttgcatttaacccaaaaaagagatgcattttcagccaaattttccaagggagagactcacctaaattccttctagtgattaaaaattagtgtaaactctaaaattagacgcatttgtagccaaatttcctaagaggggaaaattcgcttgaattccttctcaaaaattttagtgtgtttcctaaattttaatatgtcgattgtttgcgaggtacgaatggggaagccttgcctaaacttctacgtttttttagtcctatcttaatagaaggatattgcctaaaatccatagtgtgtgtagcatgccccgtagtttatgtatggccctcgtggaaaagactcttgtcgataaagtctagactaggaaaattcgcttgaatgttatcacaattttaggccagtccttgaacaatggataatgcctaaaatctataacatccccaaccatcttttccgtagcccaactttataaagactagtagttagggaacacttggaacacagaagcttgcccttctacgagaaaacaatccctgactagcattcttcatgcaacattctgtttaagtagttaaatactcaaggcactaagcttcaagaccacttgacaggtcctgaagcaagttaacaacccatttatgttgtcagggtgtttagctaatttaaattcacaactaccaaaagagtcttaagaaaaataatcctacctaaaaataggaaacaagtgtttggcccccaaacacttcctaaatcaatagacagattaaaggttaagcacagtctaaggtttgaagttttgtttgttggaaccaaaaacctttaaaaaacctaagataacaacccttaaattgtctagcatgcaaatgaaacaaaataaaagattagaaggaaacaaataaaactagaagcctatatctattatagtgccacacaaactaaggataataaaatgttttcgcaaaagataacgactcgtcccttaaaaccagtaaagatagtcttctacactattacaaattgccccacgtaccaggcatagagaaaacacttcttcaaaaattaaaaagtatgtcttgaaagggatagtaagttaaaaaataagggaataagagcaatgcctgatcatttctatggagggatcagacttaagtttttgattttggatttgccctcttaggttgtatacctaaaaattgtaaccttcccaagaggtaacttccacaacctctacagattgattctcttcagctttatcatccttagcatccttagtttgggtttcagcctttccatcttctaatgcctcatctttggccccatcataagtatcgaggtacactttgacgtctcttttttaaaccttgaacctattggaaaagtcctctgcatcttgagcaagatagataaagatattgggaacactctctgataagaacgccaacataaggacatgggctaggtttacagagctgactaaggctcgatgatgggacttttgctcttgcttgcactcttccttctcctgtgcgagttccttgcactaggcggtaacttccttctaggcctacacctggccttgttgaaactaaaaccttatgtctagcgaatcctgtatggtcttggtctttgttacaatgagcatgtccttctctctgatgccagcagttaaggtagtcacctagtcttcagcaagccgacaaagttcctaagctgagtcaactttagccctccagccacttaatgatattatttttgtcctaaagttcttgaagtttgacagacaagagtagagttggaagattctagctcagcacgcttgacttgatttttcctccatttggtttgtgaaatcctctttataatcattgaacttctacaaatacttcttactagccttggcattcgcttcaacatagtactgttttgcctcttgaatgtttttgtcaatcttttccattgcctccttgatattctttatttgagcctccagtgttcgtcatgtggctaaggaaagatcgagctaaaccgtcatagagcttacttctctgaatgtatgctccgtaagaaccgccatctgaaataagaggagaaaagtccaaaaaggagaaataacttacaacaattaaaaaaggagaagttgagtaagaggtcaaaataccctgattgcttgttgcctcacaaaattagccagtagtacgggatcagtgctgctggctatcacccacttctcagtagtcaatctcacacttattgctatgtcctccagcaagttagaattgagtggtcccatttccctacccaagtggggcacgagttattttttaagggcaagaagatcaatgatgggtttagagtctcctaggttacagatgcctttagttatttcaaccatcttctctgtagacagccagtcaatcctagattggatgatgttatgctcctcaacaagtcaacgtttcaaataaatgttagccttatgtacttgttcaaacacctcagtccctatattagtaggtttcaagggaaaattaaatggcaaaggtcagatttttggcaaacaagtttggagctcttgggtttgtttttccttagcagtgttggccaaagaagatgaagctagaattaattggttactcagagttgttttggtggttttatttgggtaagttgtttgcttggttggatttatgttgaggggttggtggatgcgagaacgatttgtcgctcgttaaaatttttatcttacagatggtgaattgtattaacagcttgagttgtggagggaggattaaaagactgtgactgttggttcctaactggaaggctctccaccctaacagatctagattcttgaaggtctatggtgcctccagtggacaagtgcctagccctcttatcttcctttttttggatgggagtcagtgctagagcatttcaacgctactactgcctttgggaataccaagccttccccggaaccctcatcatctgaaggaatcatgggttccctctcttgggtcacaatattagtggaaatgggtaatagaattgttgcacaccttccacatcctgtggctagtcgagtttttggatttttcttaactttggattgaatggtggtaggatcaactgtatggctagccccttgagcgctagaggttttaggggtgccagaagctttggcctttttggccctatctttttattgcctcccttaccatcaaccacatcattgccctttttgatagcactcatcaagtcactcagcatcttggactcaagtgtatctgagagatcaaagtacaacaacaaccaagttaatcgacaaaacagaaaatagtaacccaagcaagcaataaataacactagactagatagtagagatgcattgtgaatgtgatcgtagaatgtgtaactatatggttcccctcttgtaaataaagttacttcttcccagccaatgaagttgtcatgttttatgaagcccaagaagaggatggtttgaaaggtatccattctaacaatattcgtgaaagactcaagcttattcaggttcctaactattttttctaccctattaagatatctttcattggatacctacaggaatcgaagttcaggtagtaattttcaaaacccccttagactcttagtgttatatgagacagattgggggtgcaaattacgcagaagggcattttacctcttccagaagtacttgccccagaagaatttttatttgggtatgcgtctaaaaacctttcctgaatctcttctcctcagtaaggtggttcagatgatgacttgaccacgtagttgcgagaagttcctcatattttgctgccttattaatcataacagacaagtccaaagcactttgctctttatgatcgctaggggtctagggttgacccctacaactgacgccatgaatgctctagagatttgcaattaagccatgctggtgcaacaactcagtggtcaccaaatcctaaatttttagctcttcctctttatttcaattcacctgttagcgtacacctgtgggagaggattttctgtaagaaacatactaaagtcaagtacagagatgggaatgcattttaaactttcaaaaaaaaagttacagaaagatgaatctcgtacctggaaatttgaagtcaattgaaagagctgggattcatttcagaagaaaacttgtcgtgaagaacaagtattcacgtagatttgggcagtgcgaggaggtgtttgttggacagtgagtgcgattgtacttctggaggtgatagaacccaacctttgtagtgtgcccccacatgggatgtagtttcaactcataaaaatacaatatctcttccgaggttaaggaattttggccctggctttagataatacgatccatctagagagtagtttatatgaaaccaaaagaagttcgaaaggcgcaatccctgccttaacgcaaaattaagcaaaataggttctaagtggaaggtgggctccacatgaaatatgcgactaactctatgccccaaaaccttccacactttgggatggagattccctgatgagggacatcctatgccacataagtccaagaatgttttggatgccaccatcattataatacacctttagtaagccgtaactcctgagctgattgggccattgacccatctccaaaatagaattgttaagtgctaaaggggacagagaagtagctttggattttcctttgccctcgtcctttaccttccttatttcctggatgtcttcaagaggcccctctcttggagttgggtttttaagggccatacacgcagggggtgcattcactgaagacgctctaggaacctcttcaaggcccatgatttccaaatggaagtcattgttttcaccaaacactataaaataggacaaaaaagaaaacccaagcagttaataccccatatccaaatggcaagtagggtatcaaggaaggcctcccccaaattgcttggagaggtgcccacctgactcatcacaataaagggaaccctcatagagaaatctgttgtggtgaaaaatcaggaatctaagaatacaaaagaagtaaaaaagtctatattttcccttcacaaacaacaagagaaagggggattgtgctgggaatttgcctaaacccaaaaacgcttaacctaaatgttagaaccaaaaaactttgttcatacagacgctcatatcgacaaaattaaatggaaaaaaatccccagcagcactctagttccaaaggtatactcccaaagttcatgcaaaccggtttcacacaaaacaaccctaatattcaaatctaaaccctatgcatgcaaaaaaatgtttttttacaaaatcgagatcatatttcttagtcaaagctaaaaataacaatgtttacaaaaagaatacttacttgtagacggtttacagaagaattatcggttgcttatggttgtttaaggtcttgtgggccgctcaatggtctggttatgactcgcctcaacagaaaacttgttgtctatgtgagattcaactattggaaaatctagcaacaaggttggaaaaagaaatgaggtttctagttcaatgaagtgtgtaagggtgagtgttcttctaggtcgagggtttttctgaggaagctttgtgggttataacatgtagactaaagtgagaaaggaaaaattgaacttctttgccaagttttttatttatatgggtggcaatgacttagtaagttttgaaatggatggtccagatcgtatcgatcaaaagctgctccatccaatggccggggactcaaaaagtttgcatttactgcacctggggagagaaaagggggcattcattacttatgattttgcgatggcaagaccaacgtaccacaaacctaccatcttttcaagtctagccgccattcttttcccacaaggaacgcacttgggcctggcacgttagtcccacggcttcacaaaatggatacaacgtttcaataaaatgacatttgtatcgaatggcatatcaactctttatttgtccaaagtactacaaaaggctacttccacatttcaaga

SEQ ID NO: 218505 - DNA, 6861 bp, Cannabis indica
aggcgtctgatcacttcctcttggtcattgattctggcttacatttctacaaacctattttcctattcctatactcagtactctagtcatactgatgtggtagcagataactcatactatctgatagcctaggatatatttgttggcatctcggtgcaactctatgtacccctcaccgatgcctaatatgctaatctgatggcaataggtttgcctattctgacggcaactaacatgtacgctaaacatgtatacatatatgcaaccattatactaatcttacctcgtttctgaaagcaagtgtgccgaccaacctaagtggaacagctgctcgacgaattacaggcccctaaaatcacattattcgtaaaactggtgagtgacgtgctaaatcacttttcagagacttaaacttcaaactaaaagtttccctatcggtgaataacatagcaataccctaaatatcacaaaactgggatgaactagggttcccaaaaatacctcaactagaagactggttccccaaccaaaagtctgattatgtggggtttcttggagaccagccggttgacaggttcctataggtccccctgaactggtcgactggttcagtgcaggaatcacatgaaaattcactacaccctcaaatcaaacccaaactctaccaaaccttctagacctactatttacactctaaagaacatattcaaggcaataaaataccacaacataaccagaatcaaaaattggcattaaaaagcaaagcttgaattcttaaactcaaagcttgctcaaacctcacaatagccctcaaaaccactttaaagaacctcaactaacataattaaaacctcagaatacaaactcaagcagcaagaaccgaaaatagaaccctaacccacaattcaagcaaaatccctttactttaagcctaagaaaatcaaaaggaagagtgctaggaattaccttgagttggacacactctaaactttccgaaaactccttgaatttagcaaaaaaacacaaaaccctagctggttttctacggagttcgagagagagaaagagagaggtgtagttcgtgatttttttttctatttttataattaattcttaattatctgctaatttccaaattaaaactaagaggtctttacatagccaatgctctagggcaaggaaatcatgttgatttgagaggcagagctttggagaaagataggcctagtgcttaggtacaaaggcctactatttagagagacaatgattaccctagctagtagtactgttgacaagaatgatgatgatgtagaagaaattcatcagttttctgatgaaagcatgaccatacataacctccgagtgtgactaaatcctagaggcaaaaagccaggggcaagaaagtaaggcctcatggaaacaatcttaagacaccacaactaaacaactggaagaataagttagtgaattcaccatgttcacggagcgacttgcacgaagacaaaatgaagtcgtatctaattttgaagaagaagatttggaaccaagtgtgaggagaataatagaaacatcattgcctgaacacttcagaatgccacaaatggatttctgtgaggtaggatggaccccagggcccacttatctaaatacatcaagttgatgcaagtggccaaagcaagcggcgataccaagggtctttggttttcttcaactttgataaaaatccgtggaaaactagtagaaaagattatctcccaaatctatttgcacttggaaggatctgcaagtgatgttgaaaaagcaatttataactgtgaaggattacgatatggaatttagctcactaaagaacatcaaatagcagcagggagaaattcttaagaagtacattcagagaatgatggacgttgccataaaaactaaggtcaattatgatatgaaactggtggccttaacctcagggatatccaccagatctttcctgtggcgaaagttacaaagaaagaggttcaacacactgtttgatttcttagctagtgcccaaggtttcataaacttggaagaagaatatgtccatgcttacagagttcttccagcaccatccaccaatgttagtggaacgactcaaactcgccaactgtctactccatctattgtccctccaagaagtacactcataactccaacagtgtatagacttggtgcctttagataagtagctgcacatacaagtttatctggctttggagtggcacaaaccggataaagtaccactcctacatagatgagtaaaaaaattgaagttccagaatcgaacataaatctttactgaagcaaaagaagtactaaggctccaagttgaaacaaagctctgaagaaggggaaaagtcatgaatcaaggtaactttcagtatactagcctagttgatactcgagaaaatgcttacaaaggtacttgtaatatggttgattacaaaaagccttcaccaatgtccaaagttggaagacataagagggatcataataagaaatgtgaaaatcacggtgatattgggcataccacgaatgaatgtgactacatgaaagatgaaattgaaggactagctagaaatggtctctatccaatttggtttagacaccaatcatatatcccggataaggagtagcaaacaaacaactttctattcttggacaacaaggagtcataagtcctactcaggtagtaggttaccctcaagctctgaaaatacaagctccaggtgcatagaccgctcaaggggtacctaacacccaagtttcgaaaccttttgttgctctggaacacaaaaatcaatatccacctggaatttctccactagcattagatagccttatggcaaccatatctggaggtccacactttttcaaaagtagacgaaatgctcagaagagatatcttagtgagttggatcaagaggagacgtgtaatctcgtgcaaacacctgctcagcgctagcgaatgatgattcttccaattactttcataaaggatgattgtaagcatgtgtacttttcccataatgatccgttagtgattgaggcccaaatcacaaataaaagagtatcaagaattctagtggataatagaagatttgacaacattctttttaaaattaccttccttacaattgatttagtggaaactaatttgatgccttatctaattcaactacaaggctttaatggagatattttgttgctaaggggaaaaattcagcttccagtcacactaaatggaagagtatctagaagcaatataatatcttcctttaaatattgcacatttgtaatagtggattgccccactacctataatgtcatgctaggagagctagccttagtagattttagagttgtaacatccatctgccatttgtgtatgaagttcccaagcgataatgaaagcattagaatagtgaagggtgatcagaaaagcatgagaaaattctataatgtctctgccaagacagtcttcatggtccaagaagagaaccaagaggatcctagggcacccgttgaaacaggatttgggataatcctagaagaagacgagttagaccctagagtcagggtaaaaagaattattgagcccatggaggaggtagaagaagtgtgaatcaacaaagaaaatcctaccaaacttatcaaagtaggaagaaatttatctccagccattaaagaaaatattgtatccacgatgaaaaagtatagtgatgtactggcggggaaccatcctaacatgaatgggatcagtccccatgtgatcttcaatgcttaaaatgttgataaaaaaggcagatccaatacgtcagaagagaagaccactagatccaatctgagcggaagcagtgaaaataggagttgataaattgacggccatagagttcctctgggaagtagtgtatcccttctgtttgccaatccaatgttggtacctaagcctaatagaacttggaggatgtatattgatgtcacagacttcaataaagcctgcctaaaagactgtttcccacttctctagatcaattagattgtgaatgccatgtctggatataagctttttagtttcatggatgcatactcaagctacaaccaaataaagatgcatgtgtcagagcaagaacatacaagttcttagacggacaaaggtatatactgttacatggtgatgccctttaggttgaagaattctagagccacatatcaacgtctggtgagtaaaatgttcaaagatgttttggggaaaaagatgaaagtttatgtagatgacatgctggtcaaatcaaagactttcgaagaggacactaatgatcaggaagaagctttttccatcatccaaaagtatggaatgaaactgaatcctaaacattgtaccttcagaatttcttatggaaaatttatgggtttcagcatcagctccaaaggaatcgaggaaaatttggagaatattcaagccctcctaggtatgccttcccccagaaaacaaaaggacgttcaaaagtactggaagaatcgtagcactcagcagattggtctcaaagtcatctaacaagtgtattccattcttttttgttctatgtgcaagaaataagttaaagtggaaaattgaatgtgaatatgccttccaaaaaattgaaagaacatttaaccaaagctccactattatccaaaccagtttagggagaaccattatacttgtactgggttgtgtccaaccatgccttagtcaccaccttagtgcaagaagaaggaagggtacaactttcggtgtattacgtgagtaagagatttttggtcacgaagtccagatatcctatgattgaaaaactttcctactacttagatatcacctcacagaaactaagacagtacttttaggcccatgcaataaaggtagtaacaaatcaccctctccgtcaagaattacaaaaactagaaccatcattaaagtgaggaatagagctcaactagtttgacattcattatcaacaaaaaaattaattaagggtttagctttagtagaattcattgtgaaatggaaaggaatcaatgacaatctagaagaacttcttctggagctagaagtctagaaggtatgtgtggacggagcatcaaatgagaaaggttcttaagctgaaatcattctaatctctccacaaaccatcaacttataaatgccctctagttcgaatttcctgcctccaaaaatgaagtagaacatgaagcaataattgcaaacttatacttagcaaaagatgttagagccaagaacattgaacttatagtggctcgcaactagtggtaaatcagatatctagagaataccaaataaagggtgaaaaatggctagttacgtgtcaaaatctcaagagttgctccaaagctttaaaagatatatcatgaagcaagttcccagggcccaaaattccttcgcagatatgttagcaaaactagcaacaaatcaaaaaataaaaaagtatagactagttccaatcacccatctagctgctccaagcatagaaatactaggactaacagtcattgatcatttaactttttggatggatcccatacataagttcttagcatccacagagcttttagatgatcgagcagccgctaggaaggttcagtatcaagcactgagatatgtgctcctagatggaaagttgtacctgagagggtcatctataccatatcaaaggtgcgtatttgaaaccaaaataagccatgtgattaacaagatacacgaaatattctatggacattatacatcagaaccaagtttttccaagaagatcatctgacgaggatacttctggaaaaccattaagaaggattgcattgattatatccaaaattgtgagtagtgtcaacattattccaaggttccatgaactccaccaacagagaaaccctaacgaatagttcgtagccttttactgtctgaagaatttatttagtagggtctcttccaactggaaaatgaggaatcaaattcaccatttttgttgttgactacttcaacaaagtggttgaaatggaacctatgaaaacagtcacttctaaaaaggctttggactttttcatcaaaaacatactcttccattatggtatgcaacacaagattgtgtttgaaaatggaatcaatttgatagtgattgattcactaatttttgtgtcaagtacagaattatgaaagtttttcatctatagcctaaccacaagcaaacaaacaagtggaaaccgtcaacaaaattttgaaaactatgttgaagaacaagcttcaggcatgcaaagccaccgcccagaagaacttcctagagttctttgggcataccgaacaaaggagagaaattcaacaagacacagtccatattcattggcctacggatgtaaagcagtaatcccatcagaaaatactataccttttaatagaagagagacttattatcccacccagaatcatccattacttcaggaagttgtgaatttgattgaagaactccaggagcattcacaagtccaactcaaaatgtacaaaggaaaaattaccggacacttcaactcaaaagttaaaagctagaactttgaagttggtgaccttgtattaagaagagagtttccagcatctcatgagctgggagtggggttccttggacctaactggggaaggccatatgaaatacaacacaaggtacgtgacaaaacgtaccaaattaaaagacttgatggatctaagattccaaaagcatggaacgcagatcacctgcgccgatacaattagtgaattggggggtgtatggatcatttttatttttt

SEQ ID NO: 218506 - DNA, 4845 bp, Cannabis indica
ctgctaatataattactcataatcttattaaagcgtcttattcttttctaaactaagtatttaacaaaaatgatattgttgtgaagatataatcttatctttttactaatttcaacattaataaaaattctatatttatatcaacaaacaaaaaaatatttgttattcttttataataattattatattgagaatgacatttttctttgtgaggcttgaattgaaaagaacacttgtcatagttttttgattgagcacatgcaataataatatggagtaggacttaaatttcaaggaaatatctagaactacaatacgaagtacccatttattaaaaattaaatataaaatatgaggaccaagaaataatgaaaaagaaaataaacctatcatttatttatttatttatttttatttacttatgttttcttttttttgaaagagaaaagagaaccagccaaactggccaaaagaatcttctatttaggaaccctttttttttacattaaaaagaaaacaaaaaaaaacattttttataataatattttggttatttattttagggcatttacatgagcataggtcgtccaaagaaggagaagtgattgtctgcgaccgtgtacatcgatcatatctgcaccctttctatgggaatgacacgtgtaagaagaggtgggttttacaatcgcgaagtgataaagttacagcggctgtcattatccattgcagtcacagacatcaccatttcatttttattttctcttttcttgagaagggcattttcatatggtacgttcttttctcacaaaaaataaaaaataaaaaattctttgtctttgcatttgaatatttacataatataataataattatctaaacaaagagtgtttttcttttttcgcaaaaagataaagatgagatgagaaaatagaacatattcaatttggattttgggttatctaactttttaaacaaataaaaatacaaatagagtagcaaaagaatttctccacccatattttattcaacaattattaaaggtaatgtttgaagaaatattatataataaatgtttatgatttttttaaaaattaatattaaagagaaatttagaactatgaaaataattaaaagaaataaaaagacagtatttttaatgtgatttatgtgttaatgaattttagtccgctaagaggtaatagtattaacaataataagttagttaaaatctcttaattggttagaacaattagtacagttaggcgattaggcagttagacttattttattcttttataatatcatcctatatataggtcttactttctctaaattgcaatatgctatagatgcaaactattgaagatcgaagcttttcaagaactcgatcatggtgagagtaagagtaaaaacttcagctaccaccactgatcaagaaaatccattaatcaatgcccctgatccgattgctcctccaccatctcaaacttatgttaaaactcaccatcaagttacctttacagctttgaaccatcgcccaacccagattgatcgaccagcttatgacgacattcgcccaacccagattgatcaactattttatgaagacattccaagtccctacttcctaagtaaagcaaatcatccaggattagcactcacaaccactgttcttacaaatcacaattttaagccatgaaagtgtgatttcaaactctccattagcacacgaaacaaaactccatttcttgaaggtacatcacctcaacctcctctaaatgatcccttacttagttcttggattagatataactagatggtcatgttttggatactccatttggtctcacttgagatcaaaagcaacatcatgtacctggacactgctatcgagatgtggtatgagttgaacaatcgctttaatcaatacaatgggccacggatctttaagctcgatgaaaccttgacttatcttcattaaggtgacaattttgttagtgtttacttcaccaaactcattgcaacgtgggatgagatcaatcaattgcgtcctctcatcctttgcacttgtgttgctgtcgcatagggccaagatcatcttaagtattatcaggttcttcaatttctcaaagggctcaatgaatgttatcatggtttctgcagtcagatccttctcattaatccctatccacctctcaacaaagtcttctccatgatcatccatcaagaacgtcaaaaagcacttaaaaattgcactattcccccaattattgctgcaacaccaaccttgttactttacctaattctacaccaacaacaaatcatacctcaagaaataaacgatcgcattccatgtgttctcattgccaaaaaccaagacactacagagaaaagtgctactttctccatgagtttcccctggttatggccaaagacgaccaactacactcttgccaacaacaactccaaacaagaaaacgacaataactctaaagttaatcctcaaatgttacaagtcttaggaaaaattattgatccctatacatctcaactcactctcgatcagtgtcaaaagatcatatccatgttgagccaacaattgcagcctgctgctttaacctcaacagacactccaacaattaccaacttttttggtaactattggaaattatttaactaggatcttaatttattaatcatgtatgttggattataagttataatctaacaacctaaatataaaatctctaaaatcgataaataaatcacataaaggttgtagaaaatcttacattgagtgtagtagaacgttacgactatttccgttcagttctctaactcttaatcatttttgttgcaaagtatgatcaataactgaatttgaattcaattctccttcgattgtgttcatcacaatcttcttctctatattgggtattgctttgacatgtgtggacaatcactcaatactaaggagcacaaaattttgaggagaaaactaagagaattttaaaaattatatatataattataatagttttttgattcagttttttctaacaaaaggtaagtcgctatcatattacatgttgactcagaaatttggactagacttttaagccacacctactcgctagattgtcgagaatgaaaaagtagttaagtaattataagagtgacacgacaaatttatagtagttcactatctgtatcatgtatcacgacagtaatggagctatatctactttgagtttttatttctcatgagatggtattatagaaaaatgctaagtgttagaagctccaatttatggagagagaaactatagagagtagctctcaccttgtgtgtagttttctaaaagtcaaaaaaatgagctaagggaacttttcttttataggtgaaggaagcccacaaaaaatgagaaaatacattttagatgtttttgactagagatgatgatctaacggtaaaaattagcttatggtggtgatggtcattttatggagcccggtgagacctgctgcgggtaacccggagcttattttcgtaacttccttggagtgaattttggtgccaatagctttagaattacaatcaaagtgtgagatatgacttcatagagcattgaatcaactttgaaacataaattgaatcgcgtcaatcgaattaatattgagtgagttctggctgttttgctgaaggcaataaatgatccagcgcccaggttgacatccaacgctaggttgacatctcagcgcccaggttgacatatgatgtcaacttggacattgggtaagtgtaaaaacgtccaagggatgtactttaagatggctaagtgataatactgttttgcagaaatgagagattcaaaacttttcatttccgagtgagttttccatgttggaaatgagaaatgtaaagttgtgattttgaattctctgacttcgtggatcttagttattgttaaaaactagatgaacagtcaaaacagaatcagaattggataagcataacccagtgtcccaggtcatttgtcaacttgggcgctgggtactcattctcgagcttccaagatctcgttttgatacttctaaggttcatgaacttgaggatgatgtctcttaccctatttttgaccattttagattcattggtcgaattaaatttgacatttaagtaattgaaggcagcatcccaggttgattatcaacctgggcgttaggctcgggtttgtgattttctccccgagtttgcttttatttttgataatagaaaaaatgatcggaacattttttggtgaacttgattagaaactgcctaagttgacgatatgtcaacttgggcattgggtcacagttatggcccttcgaaagttccgtttggtccccaaaaataattgaatctcaatattttttgaaaacagagaaaattctcagaagagttctcagaaaacatcattgaaatcggcttttgtcaacctgggcactaggccagtcccatgtgtcaacctgggtgctaggccttgtttctagcacccaggaagtgatatttctcccatgaaagaacctatttccctgtttttaatgaagacgaagaatatgaaaaagttagatcgtcgatctgatacttggaaggtgcccagattgacaaattgtcaacttgggcactagggtgctctaggccccagggccccgggtgctaggggtgttcataaaaaccgaaaaaccaaaaccgaccatcaaaccgaccagaccgtaaccgaattttcggttccacgacatcaccgaatttggcggtcggtttcggtttcggtttttctgacatggcggtcggtttcggtt

SEQ ID NO: 218507 - DNA, 6586 bp, Cannabis indica
attatttttttattatttttgtactattttataaaacaccattaaaaatgtaaaaaaaaaattcttgaacatagaaatgtaaaaaaaattacacaacattatgtaattatcctaaaataataatgtacaaattgtaattgtgggcctatgatctcaaaaagcccaatgtagagtattaagcccaacccaaaattttgaacggacactaacgtctgtctattcggacatgaacattttgaacggtaagaaatcccgcttctttctcaatctttttaaattctctttctctctctctctcttcacacacaacactttactagccgtttgaaacgtcttctttctctctctacaatttcaaacccgaaaaccagagagagaaagcttcagaaatttctaacaatggcaaccaatattggtatgatggatggtgcttacttcgtcggtagatcggagatcttggcttggatcaactccactctccatctcagtctctccaaagtcgaagaggtttgctttgctttaattatcgagccctaatttggttctgttttgaactttttctgattaaaatggatgaaattgtttatgtattgtttaggcgtgttctggtgcggttcattgtcaacttatggatgcggctcatccaggaatggtgccgatgcataaagtcaattacgatgctaagagcgagtatgagatgatccagaattacaaggttcttcaagatgttttcaacaaactcaaaatcactaaagtatatatctttaactttactccacttataattttttttttttcttttcgtaattttttaagtttatgtttaatttttcttcttttgtagcatattgaggtgaacaagctaattaaaggaagaccgcttgataatttggaatttatgcaatggatgaagcgctactgcgattccgtcaatggaggtggaagtcataggtatgaaaaataagcaattaatgtgaattttggcttggaatttcttattcaaattgttatgttcttgcaaactgtgtgtagatatatattttatcgggtaatttgtacatttggtattttcgtatacttttttgagtggtgtgtaatttttgtgctcttgagtaaaatgaatttagcaaatgtagtcatatttcatgtactttaatggggtagtgtgtaacttttgtattcaatttgataagagaatgaacttttagagtgctgagcttatgaacttaaatatgaatgtactatgatgaatgattgtatattgtttctattagttacaatccattggaaaggagagaagcttcaaagggaggaaaagaagcaagtaagaaaggtgcacaatcacagacctcatctaaaggcggttcggctgcctctaaatcacaaggctcccataatggtagaagaactgaggctgctgcaaatgctgtgaatgctgcaaatcaatctggaagaacctcaaggccttcttctagtggaggcctctcaaggccttcttctagtggaggccctgcttgccctgcttatgatgaacaggtactattattaatgataagtttaggattaagaattttgcgtttgaaagatagtaaattgacaaaaatttcattaatgcagatcaccgaattgaaactatcagtcgatagcctcgagaaggagagggatttctactttgcaaagttaagggatatcgaaattctgtgtcaatgcccacaaattgaaaacctcactgtactgcttttcttaatccttttcatttttatgatttgatttctgtctatggtaagattttgaattgtgattcgaattgttgtgtaggttgttggtgctgttaagaagattctttatgccacagaagatagtgcatcagttgtggctgaagctcaagccatggtgtctgaaaataatggcaaggaagtggatttcttgagcccaattccagaggtttcagaggaaagaacaacaagttcagaaaatcaaaagagaaaaagtattgtcaacattgattttgagtctgctgggattacttcattgtctccaaggcaaaggatctcagatgttgctgatgttcatggcaatgtgtcaccccttatgacatactgattgatgatcatgatcatttttttaataagcaaaatatattctcattttctctgtgtttggatagactactaagacaaaggaaaatgtctcaatgatttttgtggcatatataatagtatgttgtctcttattaagaatgtataacaattaattcttttgcaatcttctctcttttgttacaaacttccctttttcttttccttctttataatgggttataacttataataatttaaaattacactttttacctaaactactaatatattcatcaaatttaattttggaatatccaagttctaaatatatataattgtaaattgtaaaataccaaatgtatattactgaaattactttatgtggaagccaaaaaaatcttttgttatcagcttagtctcacttattttaatttaataattaatattaaaaacaattaattattctcaaaactctacttaaggtgtgtttaaacagtctattaaggttgtaattcgattcacagaatgttatctgggacacgataggagtttgcgtgcctcaaaaggacacagaccactagagtataacacaagattgccttttcttgttaccatggggttgcgctattttatagaattacactcgtatatattgagctcgtaacggtactttgcaattcaagagtctctctaccgctaaagaataagcttgttcagcatagaaacatagataaagtcaatgacagaacaaacaatgaaactttacaataacattttcgtatttcctataatcttgtttgacaaaataattagtaattacactaaaaagttatatattttagtatttattatataatatttaaaataaaatgtttttagtaattacacaatgtagcaattctcataggtggcaatgaaaattggagagtgtaattggaattcttcaattatatctaattacacagttacagtataattacataatcagataaacatgtcaaactgtgtaattacctccaattacacataaatctaattacactgtggtttttcaaatgcacctttagtggtggtgcaccatattggatagaatttatgttgttttgtaaaatgacattaagaaaaataactttaccaaacaaccatttactattaatatcaagttttattttgaccataatggttgaatatccttcccatccggctaaaattaatcgtccatttaagactaagtaaacaacaagcaactaacaaagcaaaacaagtgaatataaatccttattaaccccaaagaaaagtatactcaaatattgtgttaattacaatcactcctaaacatggatacacaacccaacaaggtaaaaaattcctcttatacatttctttctaccaatgaaatcttattcctctaatctcataatttatgtaatctaaactcaacttgtgtatttacttatcaaaattgaaaattgtgtagactataaatgaactaggtgaagtgaaatcaaaggtggatagtgtggatcatcaatcttcagcaggacaaggccaagaaatgagacatgtccaagtgattcaccactcacatccttcggggaattcgagcaccaccaccaccacgagcggtgtcttggctggcgccgctgctgctgcaacggtttcaattcagtgtgcaaaagatgccttgtctggaaaataagacacaagtgacactaataacttgcttaaagtttcaaactttcattgtttttaattgaattttgttgtgactaatatcaaatattgtcataaagttttggtctttatatgatttatgttaattgatataatgggaaagtttgtaactttatctttgacaagtgaatattagtgagaaaaatatcttctttttattctttttcttttactaacaccaaaatgaatcttttattctttctccaacttctaatcagaatcctattctcatacaccttttatgccttaaaagagaacattgttctaatctaaacttatctcataatattcataaacaacaaaacattaaaagaaagaacattggcctctgttcaaaccttgatacaaaggtcaaaaagctttaccctttatttgttatcatcattcttgtgtagaagatttggtcttgttttgatctgtgcttttttgttgaactagttttgaagatgggtttatcgatttctcggttcatgagaatgtttttcgccaagaaagaaatgagaattctaatggtgggacttgatgcagctggaaaaacaaccatattatacaagcttaaacttggagaagttgttacaaccattcctacaattggtaactatgtattactcttttgattgttctaatctaatgattattggtaactagtaataagcttaatcatttatgttaaacaacaattaagcttattactagttcactaatcgagttatgactaaaggtgtaacttgtacaaatctttctatttttcaattcgatttgatccattagttcgtagagctatttactcaatcgctacttctaacagggcgacaaatagtcaattttgaaggccttttctgcactatattaaaatcttcaaacctatcaaaacatgctgtttacttttaatagaaatgaacaacttgtgtactaattcgggtttttttcgattagggttcaatgttgaaactgttgaatacaaaaatgtgagctttacagtttgggatgtaggaggacaagataaggtaagaaggtttgaacctttcaagtactatttatctaacaaactcagctatggacaattctgttgttaatgtaacaaaatcaattcattgttacagattagaccactatggagacattactttcagaacactcaaggtcttatctttgtagtggatagtaatgacagggaaaggatttcagaagctaaagatgagcttcacagaatgcttaatgaggtaataatatcaatcatttacatatgtattttgacaaagttcaaggaaattttatgcttcaatttttttgcaggacgagttgcgctatgcaacgctgttagtgtttgccaacaagcaagacctcccgaacgccatgagcgtttctgaaatcactgataaactaggcttgcattcaatgcgccagagacgctggtatgaaaacaacattgaaacacacctttagaatgagcatttctatctaaatccatgtcatgtttcccaagtgaataaaaatgttagtagtgagtgaaaataatgaaacaagtgaataaactgcgggtgtaggacaaacatgatagggggcttaaggggttgtgtgccccttgaatacatcgggtttggggggaacatcccccgctctctcactttgattcaccacccttcgagtgaactacgagtgtaggacaagaatgatagggggttcggggggatgtgccccctgaaatgaaacacacatttaaaatgagtatttctatctaaatctaagtcatgtttcccaacttgaataaaaaaaagttagtagtgagttaaagtaatgaaacaagtgagtgaactgcgtatgtaggacaagtaagaatgatagggaattcagggggatgtgtatgccccttgaaataatatgtcagaggagttcgggggatatcctgtttcccccggtctctcactctgattcaccacccctagagattgttaaggggtatgagcctgaaaacaatccttcttgtctaaacttcgttgctcatctctttgacttctagtgaaagaaatcaagatgagttgagttgcggacacttttcagtttctttggtcaattaggtcttttcatagcattataatgttaatgatatttttaatgaatttcaacaggtacattcaagcagcttgtgcaacagctgggcaaggactctatgaaggtcttgactggctatcaagtaacatttcaaccaaagcataacaacaaaactcatgtaatctcttcttaatatactcaaacaaacaaacaaacaaactatcatatgtctataattatgcactgtaacataaaacaatagtaagtgatcaatcaaacaagaccagagaaacacacactaataaaaattgtaactttcttgtactataatcaatcatcaatcatttccattcattcccactagtaaaaatccaatcttttataaatggggttatttaatattattgaagctatgattatccccactttaaaattctgacatgattgttctgttatgaaaaatgtgatatttagctgtatatgatatggtggttggtttttggggagaaagctttattacataatttttgatagacttgactgactgacaagttaaagactctaaaaaccaggtgctcttattttgtgatatgatttataggtgagttcattgatgtctatagattcagtttatgtaacttgttccttttactttattgtctgctcattaatcttttctaactaaactttagttcatcaatcaatattctttttctttc

SEQ ID NO: 218508 - DNA, 3582 bp, Cannabis indica
tattattattattataaatatatccaatttttgtaaataagacatataattcaaaaatattttttcttttgcgataattaaacataaataacaactttctctcttcaaactaaatttttaagtattttttaagaatataaaaataaatttgtattcgtaagcctcaataattctttaaaaaaaaatgatttatttttatcttgatttattcattgctttttgttaaaaccaattcctctttttctgaaaataaaatgtggaattctgttctcacttctaaatcttttttttagtcatagcctgtatcattaattatgttttatttgtcaaaatcattaattatttattcaattatagattattaacttttcaatattcctcttttgtcatttttttaatataaaatttttaaaaaaaattataatctatatatctctgtgtatccgttttaatatgtgaactaatttttagtcgatttttttttttataatcatgttaaatttctatattatagattacttgataattatttctaaattattttaaatttcttaatttttttgaataatatctgatgacaaaacaaataaatcagaatatataaaacactaaaattatttttaaattcttttaaggtgcagataacccatataaatataaataaaaataaaattattaaattatatatataaaaaaattattttttcttaaaaaaatattataaatactttattttattttatttttcgaattttacctgaatctcagtgagattaagcttattgagatttttaatggtgcagagaaggaaattgtgccgggtgttaatctaacaacccacactaacggcgctcagaggttttgcttcataagcaacacaaacacagaaggtgacccaatcaacgtcaatcttaacaacgacggcgtttactgggttccctcatggtccgtcactctcctccgtaactgcaacagcgagatttacaacactgccaagatcaatgctcagacatctctgttcgtcaaaaaacaaagcttgcctcacaaccatgaaaatcagaaaggccccggattcaaatgggtttgggcaccagaaaccattagagacacacttcaaggtaaaggaagattcagagcttcacaacttctcgaacagaaactcaccacttccgatgttagtgattatttatggtatatgaccacaatcgaagtcaaccaaactaagagagtgtttttgagggtcaacactactggtcatgttctccatgcttatgtgaacaagagatttgtgggttctcaatcgggtacaccgaatcaacttgggtttatctttgaaacccctgttgtactgacacgtggcaaaaacaacatcactctgctcagcgccaccgttggattggctaattacggttcatttttcgaaaataaacccactggaatcgctggaggtcctgttcagttagtgggaaacgacaactcctctgttttaaacgacttgtcgtttaacaattggtcttataaggttggactgaatggagagtggaagagggtgtttgatcccaatgctcatcaacaccatccatggaggactactgtgccaccagttaaccggagaatgacttggtacaagacgagtttccaaaccccttcaggcgatgaccctgttgtggttgacttattgggtatgggaaaaggacatgcttgggtgaatgggaatagcttgggtcggttttggccttcggttttggctaactcaactggctgtggcaactgtgattaccgcggtgagtacaaccccgataaatgtgtcaccaactgcggcgaaccgtcgcagcggtggtaccatgttccaaggtcgttcatgaagactgatgggaaatccaacactttgattttgtttgaagaaattggtgggaatcctaaagatgtgagctttagcactgttggtgttgcgattggttgtggtacagcttatgaagggaacacaattgaactttcgtgcaacaatggcaaaattatttctggtattgattttgctagctttggagatccaaagggagagtgtggttcttttactaaaggtgtttgtgaatcgaatgttagtgtttctgaagttgagaaagcttgcgttggaaaagagtcttgctctgttaatgtttctacaaacacatttggctctgttgattgtggaaatggtgttattaaaagattagctgtacaagcttcttgtgcttagaaattgtgaagagtgtgagtgagtggtagcttaataatgttagtaataatggggtttgttttttctttctttgcttgattttattagtaattgtaattgatactttttaagtatgtgaataatgtggtttgtttttcattatcgctttggtgtgagtagtgttttttcttttcattattagttcctaacctttttcggtcttgataataagtcttttgttttgttgagttgcattagttgtgtataattagagtgaataatcatttttgactcaaataatttgaattctaattctttggttgagtttgacttttaagccaccaaaaacttgtttctaaatttttgaatgacttataatttttgtttatatttttagcttcttaatgaagtcattaataataataataatgatgatgattgtaaagtcattttatacaatgttaatattttagatttcccaaacaataaattcttctgatattgatgatcatcgtgataaatattattttggatgattttgtaaaaattattaattgaactttgttttgttaaataatataataaattctatatattttaaaattatataaataggatcttaaactattgtcaaattaaaacttaataataatcggatctaatgacaaaattaataacattttttatattttcttgtgttagaaatttaaaaaataaaattattgaaaattgaactcgtgtcatatttttactattttaaattagagtaatttgcgacataaataattttcaattgcaaataaatacgaagtttaatttttagtaataattcttaagttatatttttaaaatacgtgattctttaattttaagtcattatcgtcattttttttattggtatatttaaattattttttttaaaaaaaaaaaaatttgatgactttcaccaattataaattgacatgtggcaagtcacttaattgggtatttatttacagaaatccaatatataatttttgtaaaatataattttcaaaatggtattttaacaatttattaattaaagaaaagaaaaagagagaaagaaagaattaatgtgcatcaacactaaaacaagaatcttattttcaggttgaaaatttagacacaatattttgacagcaacctaaccggccagcctattccaactgcaaaaaaaaaaaagaaaaaagaagaagagatttatcaaagataaaataaaattggaacaaagaactgaaaaagcagaatgttgttgtctagtgcttgtaaatctattctttttttttttccactgcatacaagttttaaaaatacagaagcaaccttaaagttttaaacttttctct

SEQ ID NO: 218509 - DNA, 1739 bp, Cannabis indica
atataaattatatgtaataaaaacaaattccacaaaattagggaagccaactaccacaaggacattcatagttccgaccctagtactttatgcaagactcaatattaaatcacattaaattaaattaaataagatataggagtgtatatcatgcaaaatagtgaaaatggtttgcatgtatttatgagtataagtgcaattctctttggcactaataatgcctaatacaatttaaagatcttgctttataattggttaacacaatacactttaaaagttattaaatcaaattatataaaaactccaatatttaataactatttattttagcatttctataagtattattaagtaggtattttccaaaaaaaagtacgtatgggaaggtctttggtactggccaaccataattagccataaatgtttgagcaaactcagtagcccatggttccagctgtgggtaccatcccattttggtgtcaaaacaatatcactttctcttctctcacttcaaatttcaacttcatcatcatatatatagattttttcttaattttttaagtaaagaacaaattgtgtcatgtttgaatattaaaatcttttaacactagatagtggttcaaatcttggtggttctttgaaagtcttaaatgtgaggataatagtgctaactctctctaacaacttttggcatctatcttagagagtgttttgttttgatttttgaattttggggaaggaattggggtaggaggccatgtgaaactcaaatttacaaagatattgatattacctattaaaattatgtgggtcccacctagggctggctttaggtgcgaagacctaaataaaaaaatatacatatttttttaataatttttaaaaatattatttatctttatagtaagggtccaaaaattattttttatttatgactcatttcaactcagggtcagccctagtcccaccatattttcacccaaaaatgtcactacacatatggtaggtgagtaggtttggtcgggttatagcatatttttgccaagctaatataaatattgagctacaattatttaattgtaacccttctaattataaattagaaaaagtttaacccgtccaatgcgttcataggtttgtttgaattaacccgttcaaaccgatctttctttttttttaataaaattattatcgttagcttttagtacttaaataattagatttttaaaaaaatatattatttatattttaagttaaaaaaaaatattatagtttaaattaaaaaaactttaatatatataagataaatataattacgtaaatataatttttttttaaacaaatattaatcaaaaagtaataattaaagaaaagtaataatatgataaagattttatatttaatttcaatatttaaatataataaaaattattaaccataaagtcaatatttcaattaaacactataaagaccaaactttaaatacaaaaatagtttaacaaataaatataataattctaacagtagtaaaactttttgaaatagtaaaaagtttgaaagtacaatcatctaaagtaaattaaaaagtgaatgttcagaattcatcccttacctcctacgttaaaataacactctctaccaagatattaaatactattttggtgtatttctttattatttaatattttatttatatacaataaatttttttcacaattttagtgccctaagtgttcgaa

SEQ ID NO: 218510 - DNA, 7621 bp, Cannabis indica
tttaatttaattttttaattaagttttaaatttcttatgtcatattggtttattttaggaaggtggcatgatttaatgccaatgtggcattagttgctgacaaggatcgtgccacgtaagctatttttgcctttaaacggagccaaagtgacggaatagtgcggaccaaaacggaagtggggttcaggtagtttagccgccaaaatttgagttttggtggttaactgtcacaaacccaaaagtttggggggtttagccgccaatatcccagaagaatatatagcatattttttagtatatgaataaatgcatattcgtactatatgctctattcatctgtcttataaattttgtaaaagttatatgaaaataaagatggccaacttaatttaatatatgaaaataaaaataaaaataaaaaattagaaatactgtattgatatactccattgtggaataaaattaaagttttgtaatttttcaaaggttaaaagtttatgatacctaatgtattagttatatttatcactcaaataaataaataaatcagacaaataatgcgaattatacttgtaaagggggtttatacctttttttttttttaaatactttgttccatttgatctttttttgaacgggaaattttaaagttcatttttttttttttagaataaaacttgttattataaattaaactgataagtcatttacaataacagagtagagagatggaggaaaagaatccatcaaatagcaagcttcatctaaccctaaagcatatctagccaaacaatgagcagctttattagttgatcgtttgacatgagtaatagatatacccgggagaaaggaaagaagacgagaaatgttaataataagatcattaaaagcagtaatacaatttgatcggccatataaagcattgataaccattagagcatccatttcgacatgaccaaattgaattcccagctgttgaagcccaaatcaggctgtggaaaattgcctttgcttccatttcatgtgatgcaaaattcccaatgagaggtttggagaaggcagcaataacatctccttcactatttcgaataacagctccaacgccagtgatgttgttagttgaatccacagcaacatccacattcattttgaggcttccaaagtcaggtggccgccaaggagagtcgggaattggagcaggtggggggttctggtgtgcctgaacttgttgaggtctgtactttgcttgagcttgtcgatagttggacaagtaattggtagcaaaggctgctaaaagagcagctggtttggctttttaaccatgaacaaccttgttcttttctgtccaaatggaccataaagtacaaaaaatttgctccatttcacttgctgaatgtagagtagacaagtgagctaagtaatcacctttgttcataagtgcagcagttttccaatcaaactgaaaattcatggccctccaaactgcccgagcatacttgcatccaaagagtgcatggtcaacggactcccaagcttgtcgacatatggaacatgtggaatcggtaatgtatgtcttcgcaccagcgaagtagcaactggtatagcatcattgaacacacaccagataaagatttttattttttggggcagttgtagtttccagaaaaatttccaccagtgtgtaggtgaattcgatgaggaggtgaggtcagaatcctcaagagaagcagcatggtgataacccgagtgaacattgtaaattcctgaactatgatggtgccagattaacttatcatttgctgaaaaatagctcaatggaatggtgagtattcgttccacatcaaggcgtgagaagtattcattaagtagttgatgattccattgtcggtcctctgtgattaaattggcaacaacagcatttgatggtcccttatagtgtgttggaaaaaagttagtgtgtccagggatccaaggatcgattgcacagttgatgtgtcttccctctcctattttccatcgtagaccagggcttaagagctcagaccataaagaataccttgccatgtgagtgaaggggaatgaccatggggagcctccaggaaggaattgttggggaagtatcggccttttagcaatctactcaaaagggaggagggattgtcgagtagtctccatgattgcttggcaaggaaagcttgattgagtgtataaaagaccgaaaacccatgccgccatcgagtttagttttgcataacaatttccagcttcgccaatgaattttcgtgccattttcattcgaaccccaccaaaaattagacatcattgtttcaagctgattgcagatagttaccggtaatttgaagcaactcattaagtaagttggaatagattgcaccacagctttgagtaggatttctttacctccaaccgagaagagcttgtcattccaagtcctcataagacgccaaatttttctttgactttactgaacaattgttgcttatcacgatcactatatgctggtaacccaaggtatttttcatgacaatcacggatgggcattgataacactctatgaaactgaacttgggcagccaaaatcgtatttggtgagaaagagagtactgatttttccgggttcaatacttggccagaagcacgatgatatgcatctaggcaacatttgatagcttgacacgaactttcagtagcattacaaaataataagctatcatcagcaaaaaagagatgtgaaattggaggagatcttcgtgtgagtgagtatccgtgaaggttccctaaacgttcttcatgttgtagtaggcatgagagaccctcagaacaaatcaaaaacagatatggagacagaggacaaccttgccttagtcctctagtaggagtggttgaacccgtaatttgtccatttaagagaaaagtgaacttattcgttgtcaaacaagtcattatgagagttttccatctatttgcaaaccccattcgttccattacagccttgataaagttccatttaacccgatcaaacgctttactcatgtctaatttcatagcagccacccctttcctacccgatgtcttgagattaataccatggattaatttaaaagcaaccagaatgttgtccgttatgagtcgatttggaagaaaggcactttgagtctctgagatgacatgtggtagtatctttgaatcgagctaccaggatcttggtgataagctttgaaacaacattgcataagctaataggtctgaagtctttcatgaactgagccttttttatcttcaggataagagtgataatggttgagttcaaaggagtagggtctgctccatcatttagcacacttaacacaacagaagtgaccatgtttccaactatatcccagttgttttggtagaacatgcagacattccatctatccctggacttttatccagacccattgagtgtaaagcaaattatacatcatctttggtaaacggtttgaggagtgtagcattcatatccatggtaaccgagaccgatattgtggctaaagttgcatcaagagcaaaatgatcaatggatgaagccttgaataaattggagaagtagtcttggatgacattgctcaaatcagcttgtgaggtaaaggtactaccatcttcagttttgagagatgtaattttattattagatcgtcttgccgaggctttggagtgaaaaaaatttgtatttctatctcccaattgcatccaatcaatgcgtgaacgttgttgccagtacatctcctcttgttctaacaattcatcaagaacagattcgttgagtttgagtgtagcagatgcgtcatggctgagaataggagaattgtttagagcattcactttcgattgtgtttttgcaatattctttttcattcggccatacttcttgatataccactgctaaagcgatgttgtacatgattccaggttgttgagaacattgctgatggggtctgttgtgcaatttgacagctaacaattgcaaataatagtcttgctttcgaggtcctataaccaaagcttttcaaatcgaaagcggctatgtcttttatgctgctgagtagtagtaccagaaaaaaatttcagcagaaattacacgatgatcagagtgaaagtagtccaaatgtgagatttttggttgctgaaaaatggaagaccacacatcattcacaagacaccagtcaatgcgctctttcaaagtgttggtcgaagttctatctttagcccaggtgtaactatctccataaaaaggggggtccataagatggcaaaagtcaagtgcatctcgaaatgcagacatctgagactcacttcgaagagatcccccaaatttattctcatttgatattatctcattgaagtctccaatgattaaccatggttgcaaaggtgtaatatcagagagtcgacgaagcaaaatccaagagtccaatctattgtgcacagtaggagctccataaaaggctgtgaaatgaaatttatgatcactggcatcagttatccaagtgtcaaagtagcaagaaccaaaagtgttaagttggagcacaatatcatccttccaaagcagcattagacctccactaagaccgatccgaggtgcctccaatccattagaaaattttaataattggcgaaaacgatctacaaagttgttgtttagtctagtctccataagaaacagaacgtggggagattgctgttgcacaagcaatctgagatgtcttaacgctctcgggttccccaaaccccgcgcgttccaacttaagattttcataatgccttgcgagatttcaaagaaatctccgctgaatcgtcagaatcaccatccgaatccttggaagttgaggaaacaatctggtgtgagcaattccctattgacgagaatgaggggacaacattgttgttttggttgcggcatctcttaagcatttgtctcatggttggagcatcagtttgtcgtttgaacatacggttgggatgaatgttatctttgctgggatatgggctggtactggtggttgatatatgtggctgggaagttgttatgagaggtggtgttatggtagaagtagcatgcatcggggaaaggttcataggaatggtagacagggttataggtggataggttgcatagggaatatgaggagtatgagaagatccaatatcaagggtgaatatgtggcttagattagcagtagtgataggattggaggagagagagggaaggcttctagcgtgaggggatatggtgggagatgtaaattgatccgagatgatcatgtttgatgcagcatacgtgatgctagaaaggtggtaatgagggggtgtagaagaagatggcagtggcaaagtcagagatgttgtggtgcgaatatttaacgatgaatcttgaggagcagttgtggtggaaggtaggtgagtatttgagggtatagaagatgatgattgaggcaaagtgtgggtaggttgtgagtactggtgaaaggaagcagaagtgttgtgagcatgtcgagacaaattaggtgtggaactagaagactcgccatggaaaagtatttttggttgtggttgttgtctgttattgagagtcgggattgtagatgacaaagattgacgggtcaggcgagtcaagagtggccaagcattgcccttagcaaaatcagtcctatacttgtcataaccagtagttggtaatttagaccctttcatccaaggaccatactcaaaatcatcatcattgccattgtccattcttttcataaaagccacacatttttcaaaaggattcccaaacctaccacattcaaagcaaaattctggcaatctctcttatctaaaatcaacccaaaagtcatcccgaatccttggtaaactgatcattctgcctctaagaagaggtttgtccacagaaattttaactcggatccttaagcaaggacccccacccctcatctaaggagtcttcatgaacatcaataaactctctaataatgtttccaagtgcagtagcaagagactttgatttgctgagaaaaggtaaccggtaaacttgaacccaaaagggagtgctcaagagatcgttcattgtgacattatgtagagtacttggtgagcagaaaataactaagtggttttgaaagtgccatggctccttattcaaaacccgaaacttgtctcctgcacatctaaaacaaatcttgaacaaaccatctccatattcagaaattacaacaggaaacctcatcttccaatggccacccatttgattgtagaaggtaggtttgtggacataattttcagtgagtatccttgctattagtatgtggctagaattggtattagaggcattgtcaacttccgtgggtaggacagcaacagaactttcttcctcagtgagatttaaggtggaatcaaggctatggagtaagggatccatatcaagataaaggaaaagagatgcagaaaaccagaaaatggtagcagttaacaccaaaagtatgaaggaaaggagaaaacccgaaagctgagaaaagaagggggaaaacaaaataattggaaaaactgttaaaatcctaaaaaaaagtagttaaaataatacaaccgcaacaggcccaaacagagcacatatttgttttaatattaaacaaaactagaataaaaatgataaagttcatccattaaaaagaccccattaacaaaaaaaaaaatacctccaaataatattatataaattgatacttaagttttgtaagttataccaattttacttctctaataaataacatcccaattaacacacactctctctctctccctctctctcaaacaccaaaacaccacagtaaagtcccaaccatcgcatgtctgtcttcgcacatccgcctccgcactaaacattggtgatctttctttgtagtttctctcctcaaccaaaattgcaatgtgggtgaactataaaaatgagagaaaaataaaagcatcaaaaaatcatcgatgaactattataaaaggtattgcaaccgtatcaaaaataatcacaataacaaaaaaacataaaacacgaaaaaaaaatcattgagaagccattcgaaataacttatcgagaagctatcaaaataacacctcagtttagtttttagcataggaaccccaaaccagataaaaaaaaaaaccataaccaccacaatctcaagcctcaaacaaacacaaaagaaaaaaaaactacataaaaatccaagcaacaaaatcaaacctttggctgagttgataggggtggggcttcaacagagatgagactatcaacaaggactcgtgatctggcctttcaggctcaggatctggttcagtggggcttcaacgacaaacaaagagagaggggtggggctttgatggaggtgggactatcggtggtagggcttccacgacggaccgggttcggtcttgccggtgtcgatcgtcttctcgtctcctctcggatgggttccttcaaagagagagatgtttattggttttatattatgacagagtaaaatgggaaaactaaagtaaaagtaagaataatttggtataaaatatt

SEQ ID NO: 218511 - DNA, 4044 bp, Cannabis indica
atataatattgtttctttggttataagtaaattaacattaatgttttttttacaaagtataaaataatgttagataaacattatatcttatcttaattaaacttctaaattaagtaacataatttttacaactacataatttctccataggtgaaaattttcttaaacacctttttgttgaatccatttggagatctctgaaattacaataggcataagtggtatcaaaaactctattattatttatggtcataaacataacataatagtattatatatttttttaatttacaaaataggaagtctcaagttttataattttttcccaatattaacaaaaatgtgtctactgtgttaattatattagtgtataattaattaatatatgaaatctcaaatatttaaatcttatataattaatacaaaattttgttaattgttaatagagaaaaatactaaaaaaatactagtaaagcacacttttcttgttgttatattgttattattgtaattaagtattatgtttcatataatttaatataaaaacttttaaagaataccgttagctgatattaaccaatcataaggcgctacttttagaaagtgttaggtaccagtactagtatccgataacaatactcttattaatgtagtggtggtgcatgtaggctagagtgaaggctctttccctagaaccaaacacaaaaatatgcctacaattcccagtaaactgccgaaaccggctccaaccgcctctaggctccgatttcacaggcaacgccttcgtcctggcctcggtctcctcgaccgccaaacaactgaccgaagagccattggaagaaaccatcgggaaaatccaaggtgcaaaagaagtactgaacaatgattacattaaggagtacgtgaaagccctagaaaactcatcagacaagttcttgccttcaatgagagaattaaccatagtcagtgattggctcaagttcccttttggggctttggatttcggttggagaaataatgagatgatcctgtgtggtgcagccttggtagggactcctgttcctgaagcttgttttctcatgcctgaccttgaccaagatcgagctggtgatttcttggttaggattgggattaatggagaggacaacattattgctgattttatcaccaactttaaaacttatttcaattagtatatatatatatacttctcatgattttatgatgatatattgtgtacgtgtgtaataattaataatattaatatatatatttgtacgtgtgtacttatatatatgtactatatatatctattatatatgatgagtgatgtgtgtgtgtgtgtgaatgtaatatatagtgtgtgaattactcgatcaaaactttgtttgtgattgttaatttggcttaaatatatatatgaaataatgaaagtataatctagctggggttgtgtattttttatacatgtattttgacaaataattataatgtgtgtatatatgttgagtagataattaattctataattaagtgactctttactaggataatgtttacatgattaatcatgtagaaaatgataagggaaagtgtatgagaagaagatgtatgaaatttttatttcaaaattaataatttatgcatcttattatgctattaagtttttataatatatgtattattagtgtgagattttctaaaaattagacaaaatgggtgactactcaatgattatatttttattgtaaatatgatgattacatttttattaacctgtaatagcaggttactaacatgtaaaaattctttttttagaattaaattaactatcattaactatttcttgaaataatattaatttttaatttaaatatataagaccctttttagtaattaattttaataattttatttttatatttaaatttttattataatttttttaactgttaagccatttaattataatatttacaataaaactctattattttttaaaaattaaatttacaccattttaaaatatatttttaaataattaatctctaagtctgagaatagtgcgaaatactagaatatgagaattcatgatttatacatcatatctaaactccaatttcatctgtatatcttcaagttgcatgttttagacataattgaaaacaaccaacaacttcatagatcaataaccaataaatgatgtactaactttgttgacaatacataatcaaaatcaataattaataataatcaataacatcggttgctaagtttatcaaaaacgcatgttcataatccataaccaataacaattaataacttttaaatcttcaataatacatattcaagatcaataatcaataacaattattaacttttaatttttttctaataacgtacatattcaagatcaataaccgataacagttagtaattttcaaacctttcaataatatatattcaagatcaataatcaataatgatcaataatttttaaacttttgtaattttttccttttttatgattctacatcgatcaatatatatatatatatacaatatattaatttagaattgcaaagaaggaaggataaagtgactttctctctgggaaagaagaactacatgacagagggtggaatgaagtaaatatgtgtcgagtacggcaaaaaaaattatctttaattatataattgctattagattttaatttttttaaaaccaatcttagacacacttatttggcacttaaagtattgaaaataaaatcgactgcataattacatttaattagatcttatccttatcattttttattaattaaggttatataggtctaatacttttaaattataagaaattttattataaatattttaataatttaagtccaaaaaattaaatttctaaaagattcttatttagtaagaaattgtagaaaattaattaataattattagtaataatttaattttaaatataattaattttaattaagattttataaggaaataaatttttatgttactatcaagttacaagttatttatttatttatttattttaatttctaaattaatcacaaacatttaatagtaatccaatgactaaaaagaaatgtaaccacataatggttacatatttgaagtaaccattgaaatctcttccaatttatgttatatatctttcattatttaaaaattgcacaaataatcttgacaaaaaaatgtaagaataatacttgctcgtaaatatttcactattaatgaatttattaacaaaatatatatttatttaacaaaatgtctataatttccattctcttatacattttagagtgatttatataacaccaaaaaaatcgaagaacatgtgtttacatacataatctaacaccatcttcaatccaattttcaaaaaggaaaaaaaaggaaactttattattattatgtcaaattcaccacaattttaaatatgatatatttgaaataactttaatctgtgtcaaatttaacacaaaattaagaaattttactttttaaaacataacgacgtcctcttcaaatttttgttttcatttattaatatactattattagtttaatttcaattaatgtttttatggggttagaattataaggagttcatttatcgtatttatgtgttgaaactaatttagttttttccattagtcttgccttttcacatggttctttagtcttttccttttaattttttctattagtcttgtctttgacatgattttttagtctttcccttttagttttttctggttcgagtcttgtcttttggcataggttgtgtagctcagaatcatcttaatgctatggtagaagcattcaagaaagagaagattggatgtgttcaacccaaaattagtgagataataggcattaaagaagcattgagttggattgcaactcattcgtgggatatagtcatgttagaaacagatagctcggtgtgtgtccaagtgattcagagcggtaattttattccttcacagtttggtcttattgt

SEQ ID NO: 218512 - DNA, 5225 bp, Cannabis indica
aaatttaattatattgaaatgggttttatttagggcacaaaatccaacactcgggtgcaaggtttgatgtcgtcgacgggcatttggttcacctgcgttgttcatcttttctgccgatatttggcttgtggtggtggtgtttgccgagggttgttctgattgactttgtttagtaagatttggtttgaatattcgtggtttggattgggggttttgatcatgcttccagatgcagcagggaggtggaggacttgttgtatattgtggctgtttgggtcagttccttgcgagagggcgggtttagagagttgaatagaaaacttgtgagtttttgattcatggcttacaaagtcttttttagtgtgttgttttattttttatgtttatttttattacctttggttttattttcaataatggggttgcaacactactttactttaatagtagggattgctttaattatggtgatggatcttcaccatattctgatctgggagattcttcattgaccctttgttttgttttttaattcttttgtaagattaattattgggattttgtgccctaactaaaatcctatttcaatgttatcttgaatttcattatcaataaaggaacaaaattattttattacttgtttagtataattcttggtcaacatgtttatttcatgatcatatgtttgatatataacttctattaattccttatcacattgatatatattcatgattattgtgttgtctacacagtgaaaaataattaagattatgtgattgttaacgcagatttttgttaactaattaataagcccttttcgtaataaattaagcacataacttataagaaacttgataagaataataatagtaataatgataccaggttttttacgtgattttacagttaactctgcatagtccacgagtctatcttattcaagatatttttggatacaaagttatagttttataattagtgatcttttctctgaaagatttttcgtctccttttgtgtataatctgttcctatttaaaggaaataagttggcggttatttacacttgaatttgaaatacataactgttttcacaaaacgtggactttgaccacgttccattagcatacaaacttggttagtatgatgaaaatatgaagctaattctagttccgcggtatttgaatgacaaatatctaagaaaatattaccaataaatgtaaaaggtctggggaccacacaattgcatggtgctcaaggtttgatgaatggctgatgcaaaggtctgataaccacttttaaagcacggttcatatcagcaatcattgatcttcagtaatgtcttttgcacggaatatacccttcagaagtgataaaaggcccacaggcagaactgatatgaaaacgatttttttttacgttactacatgggagtcctaggctcttgatgctcagcggccaaagttccaagattctagatggcagaatccagatcggtaagcttggtcttctaattagtgcaaaaaaatcattttcccatatctttaaccttcctcatcttgcaatacccaaccatgtctccatgtttgtcatcttcaagataactaaagtaagcctttgggttagccttccaaaattcataaaacacctctgtaacagttgtttcataatactcaacatccttgacatgagccgcccattcagcagtaagttcttccttaagagcagacttctcattcaaagaagattcctctttttgctgaaaggattcttcctttttcttaagagccttagtcaactcttagatctgtgtttcgtggttttgaagaattgttcgaaatccttccctctcgtcagtgagctcccaaactctctttgactcttgctctaagtctgcttcaagcttggcggtggatggcatatcttttatttgctgctttaagtcattaatggacttgttcacaacaacgagtaacttgttcacctcaccaaactatttttcctctactcaaaatcacctttggcttcttctatgaccttcttcagatcattggtggtcgtactagttttgagagatgctgacttggctcgagaatatgcatatgccaacttcaaatcagtttgaaaacaataaaacaaattagaaaagttgaggtagcgaactgtacaaaagtttcaaagacaacaattataaacctaccctggtcgtctcttttaaaatgcattcgatcagaagttccaccgataaggcattagtaccgatgagctattcattcacctcggccattacacagtcctagtagaaactgagcatctccttggctttctctatttcaagctaaatgttggctgtgatagccgttggtctggataaattatgtgactcaacattggtaacatcacccccaatcgagcctttagaagatttggaaatctttggctggacggtaggcgggcaaaccttagaataattcttggcttggagaggagagtttgagatatctacgacaccaacttctcttgtcccggaattcggtgctactgaagtttctttagtgttgggacaagcagttttggagctcaaagaaatgttgatcggaagagtgtatccaaattttgactttttaactagatatatttggctagagctatcaccgaccttcctttttagcatgcttttcaacctggtcgacatggttgcaatgaaaaaaaaaaatacttgataaggttttatgtaaataaaaaagaaagcaaggctaaaaactaaaaagggtaccttggacttcaagaagaacaccatcccaaattagtaaggatggagcatccttattggaggagtctccttgatctagttcctcaattattggcttccctttcccagtaaccacttgggtagcaagaagggctgctacttcagaattatctttgatcaaaatagaccattttattggaccctaactttgcttcttaggatttttcttcttcttattcttctctggaacttcccgctcaggagtgggatccttagctactcgttcattatctggttcctctttggacggataaagtctgtactcaagaaagttttcagtactggccaagatagagatgttttgagcagattttgaaatttgaagaattatttgagccttaaacctcaaccccaaagtgaaagggggacaaaagtaagttggagccaactagaaggaaagatggtcggcatccatgtccttcacaatatagtagtcttggaggaagctaccaatcttttatatgtccttgtgcattgtaccactctgccattggtgctcattttaggaaaaaatagaagtagcctaacttgttctaatttgggctagactttaaatcaaagaatcaatttgtgtcatgggcagaaggttgcccccacccttgcttggcatacaacacaaatagtacggccagatacttatttccctttgggtgaacgggtttggggaaagtttatagtaatttacgatctttttaaagtacgaatgcagaggcaagattgcaccttattcagcatgaggtctggaccacacacagagaccctctctagggttattggctagctttctaagggttagcagaaaggcttccactttgccataagacctttgtcataaagatttttaagcctcttgtaggtaagactgaacaaagaagaatatgcacggagttgaggttgggtctcgtaaaagaggtggataaaatcactatctatccagtggttacctctccagtattctgcagggttcatctacaaaaaaaggaagacaaaggagtaagaatcagacaaaagcatgaatttttgaaagggtaaaacatgtctatcatgtcgacttggataatttaaaaggaaaaagaaagaaatttcattcaaacaatgaaattctcaaatagaaggttcaacgaatgacaaagaacttggacaattcccagaaaaccctcaatagataatttcaaatagtttctagcaaaacaacaagaaaggctacaaacttgaagtgccctaggcatatgttaatgttaagaatctaaagccctaagtgtacataatctcaattgttcaagagacatttaaagaatctagaattcacagagcaatcctaaaatagtaacaaatgcatttaaagaaaataaaaagaggaaggaaaacttgctcacgactttgaagcttttgaatgtgcctggacaacttgtgcaaattaagcttctaggaatgaagtttttgaagatttcagaaagaaaataattttatgctctaatgtctttgagagtaaaaatggctaaaagagtataaaataatttttgaccctttatataaatgctcagaggggtaattcagtaactaaagttcaaatttggggtttccgccaaaaggtataatcatcacatattggggaatgcatacgacaacatgtgatactcaataactatcaatgcgtcgattgaggtccgaatctcatgactagttagtaaataccctaaatactaaagagatagtcaaatgtttgctatttttcattcaatcacattggatcaagacagagtctaatgactgaacacgtgttaccgacccgaccagcttagtggctgaatacgtccacatgcgagcaaaaagttcccacacggacttgggggaaaatgttatcccatttttgcacaagtaacgtagcatccatctgagtgacacgtagagaatatttcataacttggatgggcaatatgcttcatggtgtactgatcgaagtgatttgttactcataaaaaattgatttgaagaagaagctagaatattcaaacaaggtttgttataccgtccaaccagcctccatcttacaatcagtaccaatacaccgagccaaataaatgtggctgaaataccttcaaggacattccccctatatgttcaagcattcgcatccttaattttgtgagatagatttgcggagacagggaaaatgaggaaatcccttagtttcctattttatttctctcgattttggaaaatagttgaatttccttatttatttcttgtttgggaaacaaacaagatgtaattattccctataaatagtgaagtcatttcactatttagggatccaaaatttttcattggatagagcattcaagctactaaattctctgtaaaagcttttaaggaagatcaagaacttcttgcttcttttctcacaagtta

SEQ ID NO: 218513 - DNA, 2545 bp, Cannabis indica
agtgtacagaaatgaacactatttagaccagtattgcagggatggtgcagggtctgatacaatgtatctcccttctgtatacgtacctggtataatagccacattaatagcttctcgtgtgactagaaaaaatggacgtagaaagagtatgattgttggtggaataagttattttattggggcaactctcattgccattgttccacgattagtccaatatggtcctgatcagcttgcaatcataattggccgaatctttgctggtgtaggcgttggatttggagttcaggtactttgcatacaccaaaatattatcgttatttcactcattaccaattggtttgaagattaggcttataaagagtcttgttgtgtgcaggcgattccactatacttgtctgagatagcgccagcgaagtaccgaggaggcttgaactttttgtttcagttagcgatatctcttggaatgttggcatcaaacatcatcaactatgtcactcgagtcgaaggagagcatcgttggactgactacagagggattagtatctcctttgggatggttgcatgtttggccttgttgatggtagttggagcgaaattcctgcccgaaacacccaatagcttaattcaacgaggctcgaaagatgaagggagaaggtcgctagagaaactcagaggaaatgaagaggtagaggaagagtttcaagacatagttgctgcaagtgaacttgctagtactgtaaagaccccttttagaagcatattttggaagaagaataggcctcagctggtaatggcaatcctcatgccagcatttcaggccctcactggcatggattctttactctattactcatcaatcttgcttctaaacatggggtttggtgaaaaatcttccttctattcttcggttatggttggtgcagcactggttttgtcaacactgttatctatggcagtagtagacagattaggcaggagatttctacttattagtggtggaatagtaatgattatatgtcaagttataattggcataatcttggtgaacaagcttggagatgatcaaaatttatctaaaggcttatctattctagtgatgattctgatatgtgtatttgctctagcttttgggtggtcatggggacctattgcttggacaataccaagtgaaatatttccattggagatcagatcaattggacaaagcattacagtggctgtgaactttggaatggttgtagttgtggcagagtcattcatgcctctactttgtgcgtttaaatttggactattcattttctatggtggctggatcataatcatgaccatctttgtctgtctgttcttgcctgagactaaaggtgttcctattgaggatatgacttgtgtgtggagaaaacactggttttggaagaagattgtgcctacacagcatggacacatactttcatgaagagaaaaaatgaagaaaaatgaacccactacatatgttgataccaagagttagttaatttaagatgtattatagtaacattgatgttgtttttattagatagtaatgtgattatcttcattctcttttgtaaaaagattcttttttaaaattgagtctattaaaactaaccattaataattgaatattcaattatgattagatagaagaagtaatttttgattagtcaattgttggagtgcaaaaatttaatataatcgagcaaatcgatctaattttcatttaattatatttttatataattttaaataattaagataaattattataatttaagttgtactcctataaattataatgaattatgcttataatttagattgaattgtaatattttgaactaattattgccttttatgtatatatattgttttgaattatttaaatgagtaattaatgttttttatagattaaatatatatataaattaagcttaaaactttaaatatttttattttataaaaaattagcctaaataaagattccaaaacattggattgtgtcaatcaaattcaatagatacaacaacatatcaaataaataattaaaattgattgattatctaaatctaacattcaatagataaatttgattggatcaaatagaattgaaatatggatataacactctaagcccaattatatctaaactgtgcatattatttattaacttttttttgttgctaaatttaacactatttttatattttgtattagagatggtttaataattttataaaataaaatgtgtgctaaatcattcacatactaaaagttaataccattttttttattataaaaaatgtctatattaaaaattaaagagactgcaagagttaatacaatagagtttgaactacactgtttggctagccactgtttgattaagttttcaactttaagattagcctccttggggtcttctaactccactcatggctctttgatcattggtttcagtattagtgtttggtggccttgggagaagagctgtggagctagtttctaggcctccacctaacatttgaga

SEQ ID NO: 218514 - DNA, 5825 bp, Cannabis indica
aatttgaaaaaaaaaagttaaaacacaatatatggggtaattccccaactattttaggtgccacctagtaaatgtgttaagcactgctaatacttaataacaatgctcaaactgatttgacacaacacatttttatctaaacctaataatttacaatataagcttacacgtgtcttgtttaagatattaacaaaatatatactgataaaatgacaaaaattacaattttactacttacccaatcattaagtctacttcgtttacaacctcaaaattttaaataattagatattacaataatgaagtgatccagccccaatttgaatctacaataatattgtaatttgtaacaattaacaagagaccacccaaaggtaatttattattacaaatatgtacctctttccattttatctttgaaattgcacagaaaaaggatttttttttttttctctactcttgcttaaacgacgacaaactttaaaataaaattggcaatgtcatgtcgtttcttgatcaaaagagtaatggactataatccgtttcgtttcatttattcgcttacaaacgaaacgtttcgttttatcctttctcgcaccgtacttcttctctcttatccaaatgaacaaaacacataaatctcaaacgcatgctctctctttctatcatcaatggcggcttcgctctcctcaatcctgaaccagcctaattgcggtctcttgctaaagctccacggaagatgccgtttcggtctcaggcttcgtaattttgcttcgcatccagagaggcctatttcgcagtgctacctccgccgccgcacgcggcaaggaagttcaggtcttaaactctcccgaagcttttcttcgtctcagtctcctcttctcagcaagcccgagactccaggtctccaccacttcattgcccaagcagctctcacatcttctgaagctcaacaagagtgagttttctacgatcctgttcgctgttgaattattcgaatttaggtttaatttggacaattttggttcgttatagttataattagaattgggttgcaattattacactgagtaacttcaaagcgctgatctttatggcttttcattttgaatgtttgttgttagtaaaagcttaaagactcgaactttatatttggatagtaaaaaagatattgaactttattgggatttttcacttgcttttatcagatgatagtgtatgaatcttatgcccactttctgtttgattaaatgtctagccatgtagcagcttctgaaatttcttcaaagggtcgaatttatcatgagacttatgggtgtcagatgaatgtaaatgatatggagatcgttctctccataatgaaaaatgctgggtttagtgaaactgtggatgtcccagagaacgctgaagtgatatttattaacacttgtgctattagggacaatgctgaacagaaggtttggcagagacttaattacttttggtttcttaagaggcattggaagagcaatgttgcgactggtaggtcacaatccgtacgtcccccaaaagttgttgttttgggatgcatggctgagaggctaaaggacaagatattagattcagataaaatggttgatgtagtttgtggtcctgatgcttacagagacttgccaaagttgcttgaagaggttgactatggtcagaaagggatcaataccttgctttctcttgaagagacttatgctgatattagtcctgttcgaatctcgaaaaactcggttactgcatttgtttcggtgatgaggggttgcaataatatgtgctcattttgcattgttccttttactagaggtagagagcggtcgcgccctgtggagtctgtagtgagagaggttggtgagctttggaaagagggtgtaaaagaagtaatgcttcttggccagaatgtaaacagttataatgacacatctggagatgaggaagaagttgaagcaggaactaattggaacctgagtgaaggattttccagcaggtgcaaggtaaagaaagttggtttacgtttttctgatctcttagatcgactttctactgaatttcctgagatgagattcagatatacatcccctcatcctaaagattttcccgatgagttgctatatttaatgcgagacagacataatatatgcaaatatatacatttacctgcacaaagtggcaacagcacagtgctggaaagaatgcgccggggatatacccgagaggtatacttggatctcgtgcaaaagataaggagaattgttccagatatggggataagcagtgatttcatatgtggtaaggggtttcccattttgacaaattactattcaatactttggtagctttgctaatttgaggaggaaatgtcattatcagctattttatttgtggttgcagtacataaatatgttgtattctactttctgtgacatcatgaacataggattaggaatagaaacataaacaagtgttgggtagttgcaaaacttcttgtggggttaatatagctgtgatcaaaatatcttgaaaatgattctcccccattggttttatctctctttatttatccttttaatacaaaaaattctccagaaacgggactgaactttctaactagtattttgcttaagcttttgatgcatggtgcaactcaattccattccttgtgaatcgagtgcctatctacagtcgttctttgttatgtgtcatcaacacttagtctccaaaacattcatgtgcctatcttcactcgtgaatctgtaatataaatttgatggtttcatacgttaaacttggtttcacaatcttagattctgttatatgtaaaatgtatcttgttttctcggagcattgacttcataatctgtaaatttctacaggattctgtggagaaacagaggaccaacatgaagacacagtaagtcttataaaggctgttggttacgatatggcatacatgttcgcgtatagcatgagggagaaaactcatgcaaatagaaactactctgatgatgttcccgaggaagttaagcagagaaggctgaccgaactcattgaagcatttcgttcaagtaccggtcagtgttatgactcacaagtaggaagtcttcaacttgtgttggtagagggacctaataagagagctccagatacagaacttattggcaagagtgacagaggccatagagttatctttgtcagtactccagtccctcaacgagattgtgattcaaatgggacaaggaagccaatggtgggtgattatgtcgaagttcgtatattgaaatcgacaagagcatctctatttggtgaagctcttgctattactaaattgacatcattttacaacatcgagtatgaagaagctattgcctgtggaagcagaagttgagaatcatttacttattgttacctctctttacttaaaaattttgcatactattctttttcttattttgacaatagctgagcagattttgctgggcattatgattacaagggcatttcatttgtataaagttgattaattatcatcatgacacaacttatggttagaaattggagaaatgttaaaggtagttatggtgcttaccactttcacaagatattatcactaatacaattcatttcaatatcgggtctaatttattttactttaataataatttgaaaaaaccactgactatttacatgatgttggtattgggcatcatggtgcctaagaatagcaagcaatgctcttaattcaactgaatctttatcttttttccatgaatgtgaaacctgtaaataggagaaattctctctaagactctaatttcatcggctacaaatttacaaaacaaatattggtagttattcaaaattgagaatccaaacgatttatgttgcttagaaagtatagtaaagtgtatggtaaaaaaataagagattaatcttaaaaactaattagtgaaattaatggctcataatttttttttaaaaaaaaatggcttatagtattataaaaaagcattgactatcagtagttcctaacaccatcataaggtgacatcttgtgaataattaacagtttttcataattatttttaaattaatatacgagagtaggtgatacatttttttaagaaatcatgtaattttattagcaatctgcaacccaatcggaaaatctttcctgttagaaacacaaccaagattagaatcagaaaaacaagtcaactaatcagttgcttgatttccgaatcattttacaaaataaactaaaataaactcatataaaaaagattgcagtatcacagttaatattaagaacatttatatttagtttactccattgctcaaaagacacaacagtaaatctgttgcaacaaattcattcaacctcttagcttgaacattcaactattgtgcaaagtacgtagctgcacccttaacaatcccttcaaccgcagagaacttgttactcccaaccactaacagtaatttgatggcgagacatcaaagaataaaaagacgaaccaacaacgaaataaaataaaacaaaatcacattatagtgacaagactaatcacatcaacctaaacaaaaaacactcaaaatatgtcacatagacaagactaatcgcagtagcaaaatcacaaattccaatcaagccacacctaagcctagggagtgttggcaggcctagccagagaaaagaaaacctcaaatgtctaatttagaaaaaaaaactctagcagacaatataaaatattttagaggcgatacttaattacaccaacaataatttactatttggttatcattaaaagaaaacatatggatctataaaagtataaaccgtattttaattaacaaataggttctcattattagattatcaacattagacccacaccacatttgtattagtagtgcgaagtatgaacttctcttacacctttgctttttaaaatataaaatataaaattccttttacactacccccaccatgtgtggatgataacatattagattttatatgtataatattgaagaaaagaaaaaagaaaaaaaagaatgtatttgtgttttgtatatatttattttctttgctaattaaaaaaaaaaagtgacatttgtttctttctcaatatggcttgacaagaatgtttgcttctctagtgaagtattctatgtgtatatattcatataagttggattgaatgtaagaaaccaaaaccaccaaaaattatgttataagcttagaatagaagttaataatcatgttgttgaaacttgtataaaataactgaaaaaaatgagaatctttactatttatggattccttactatttcttggttgtagtaattcttataggtataatacaatctgtgaatctgatacaataataagctcaaatgagtctgacatttttatttttaatatttaaatctaaaatatgacatatgaatgattatagtgcattgacccaagcaaggaagcatgataactaggtatatttaaaatcaataaataaataaaaaggtgcaaccataacaaagtgtctctatcaagagggataattttgttgtgaataaagtagtcattacatgatcatatttttttttaatatttaaatatatatggaaaattttattgtacactctatagagtttccgaagattcttatctgtttattctattcagacattgagaagagttttttaatttaattttttttttataataatatacattgtagttatttaagattacttataaatttaaaaaaattctaattagttgatggtgctcaaat

SEQ ID NO: 218515 - DNA, 6181 bp, Cannabis indica
acaacaagtattgtgactaaaaagatctttagtccacaataaattgtaatttttgtgactaatacttttagtcatagaccttttaattacatcataagaaaaatattttataattagtcacaaagtcacaaattttgttgtgactaaaagtaagattttttgtagtgaatgtgtggaatgataaattgtttttcaatgctgggaacgaagtccttctttagactattgtccaaactcttctatgtctaagccttcgtataattggtggaaaactgtttaaaatcttaaaatgcctcttaaaattaagcattttatttagaaagcttttaatcatgcatattcttccacctgctttgaatctttttaagaaaaatattattcctaatcccttttgttctttgtgttttggcaaagttgaattggttactcatgctcccctagagttttccaaagcaaaataaattcagagggataatttgtttaaacaattttataataacaacaaaaattgtggttttaatgagtttttattaataggttttgataatcttaggaaagatgaattccttttgttttttgatattattacatgatgcatttttagccccgaacaaccattccaaaacgcattatgcggtaagaaaggtgatgcataaattagggttgggggacaaaatatccatgttttccaaataattacacattattttggaaagaacatgctagaaaatcaaaatggcctatttgtgaggaggatcgatgggtggacaacaacaccaagggcaagaaagtaccgcataaaatgatacattattttcctttaacccatcggttaatgcaagaatatgcatcgaggcatattgcgcaacacatgagatggcatcatgaggaacgtatcaaagaagaaggtgtgttgccccatcttgcagatggggaggcttggaaagatttttatcaaaataatccaacgtttgcaaaggaaccaaggaatgtgcatctaggttcggctgttgttagattcaattcttttcataacatgagtcaatcttacagtttatggtcgattatgttgacgacttataatttggcaccgtgattgtgtaggaaagagactaattcatgttgagtctattaattcgagaggccttgttggactataaacaattatccagcaaggagtagtctttctaaatggagtggtcaatgctattatgcttttcctacatgcaatgtggcaatgccttctatttgattgcttaaatagattgcttattatggcaggaattttttaccaattatatactattttagaagaatcaagaaaacatatggcactgttgaaaagagaccaccccggaggaactaagtatggaagatatgcacacaaatgaattttatattagaatctcttcctagtaaacatgaaaattatggtggaaaaaaaagaaagtgtacagaagaactagttattggttggcaaaaaaggagtatattcttcgagcttccgtattgggccaacatgaacctacgtcacaatctagatgttatgcatgttaaaaatatgtgtgatagcttagtaagcacaatagttgggttggagaataagaccaaagatacaattaatgctagattagacctcgaaaaaatgaatataagaccagagttgtagctgaaaaaagtaaatggccggttacaaaagcctatggaaaagtacacattcacacaagggaaaaatgtgattgataatgacaacaagatcactagttcaaaatcacatgagtgtcatatcatcatgcaatgcctttttgcagttggtgtgaatgcatttttagataattcgattagcacactaattattgagttgtacactttcttcaaacttatatctgctagaactctactagtctcagatttagaaaaagtaagaatatcaatacttgagattgtttggaagttagacaatattttccctccgactttttttttttcaatattatggttcatctagtcatacatttaccacaagaagcaatacttggaggtcccattcacttaagttggatatatccatttgagagatacatgaaaaagttaaagaattatgttcgtaataaagcatgtttggaagggtcaatagtagaaggatatgtgatggattgaggcattaaattttttttcaatgtgcttgaaaacagtggagacacgatttaatcgtccagatcgaaatgtagatgttgctctatcactttcaaaattatcagttcttagtgtcaaggtcgtctaatcggtaagaaacaattgagaccccgtgatgaagaagagaagaaaataattgaatggtatgttctaaataactgcgctgagatcgcaccatatattcggtatgtattttaaatattaatatccagtttaattcaattattttttttaaaataattacttaatttattatacttgatgtagagaacatatgaatattcttctttctagatgacttgaacacttagaacaagtacaacataatgaatttctgtcttggttttataataattaagctttgtgatatttaaagattaggatctctagaggcatcaaaagagttattctctttagcatcagggtcctccaatcttgtcgtctcgtaccctgagtatgttgtaaatgaaattaattttttgtgtcttaatagggatgagagcaagaaagctcaaaatagtggtgttacagtaattggagtttaaaataaaacttagtatggacaattggaagaagttgttgtgatgtcatattttagtggatgttatattatattatttaagtgtaaatgatttgacactagtcgaccctcaaggagattgaagtttgaacaaaacatcattactatcaacgcaagttttgaagggttcaaagatgataaattcattttggcaaattaggctaaccaagtttgctacattaatgttctcaaaaataaatctgattggaaagtcatccaagaagttcatcatcgatgtgggatattctacaaattgaagaatatttggaggatgttgaagtagatattacgcatgatacaacttcatctaatttctaattatttattgatcttggtccattatcaaaaattaactttcaacatataggggctctaataaagtttgtggatatagataataacccacccgatgaggatgacacggatgaaatggaggaggaagacatataggtgaagtagatgatgaagagatggaagaagtagtggaggaagacaaagaagaagcggaggaggaagatgaagatgagaatgagaacaacgttaaaattgataatttataagaaacttataatgatgaataagtggtaaattattacatatatatatattgttaattggtattttattacattatgacattaacattattatactgtttcgaatacttatatttctcatatacgacagatgttgttcgttctcacggggtgatggaggaagtgatcctcctattggtgcgaaaattattagagctgattgtgtgcgaggttatataatttaagatatttaacttatgttattaatatttatgtgaatatactaacttatgaatatttaaacatgacaacagctcatctaaagaaacgtggaccccataagggattaagcacacgagaaaagcgagaaaacctcaaatgtccactgcctattgagtgggacattaaaggaaaaacatacaaggaggtaggtccgtacattttagattttttgagggagttaggattgctcgtacgataatacagggatttagagtacaaaaattgggcacaattacctaattctgtgaagagaaggatattgtctagagtagaggtgaattatttttagagttaaattgcttttcattaactatatataatattaactaatgaagtttattttataggacaatcttttcgatatcggttgagaaagatatgaaggagatcatctctttggtatcttaacaagcattgataaatcttgtgccaaaaaatattacaaatttaaacatgaactcaaagaacacttagaaaataatgttcctgcaactccatatgttgaatacactatagactaattaatggaaaaaggccatcacattttttgaacaacgtgaaatgaaggtatcttagttttattcaaccccaattgaatttttactaaactaaactattttaatttcacatattaatatcttcatatttatttttgatagaaacattcagagatcaatgcatgaaatagaaaaaaattgaaggagttgagccatggaggatctcattcaatacttgctttgcgttattaaagaattattaaagaatgtgattaatttataatataattatcatatttatattttttttgttattactttgaataataataaaaaaaatatctatgtcacaacgtgattcgaagtctgggcgatgggcaccgatcccagatgcttggcacgccactcaccataaacagggaaaatgatgggtgactgacactgctagaaagacatgagtatgtaaattaatttaaatattattgtgtaataggagaaaatgattgtcatatgtgagacacaacaaacacagtccatccaaaatattgaagagccaggcaatgtcatcaatcaagaagacaaaaagatctatcatttgtccaaactgttttcgggcaccaaaaaaattattgccgtctagttagtacaagagagatggaagcaccactacgtttactcaaactcctccaccttagcctggtgtatatgttgtatagctaatgtcatagttgatatgcaggccaggagcagattagacagttggaggaaatggttaggacaaattatgtcactctgggatcgtaaaatctgcctcaacaatctgatcatcccgatgatggaggactgagtcagtagttatgtttatatgtagcatctatttctttcgcgaaccctttttttagcatgtttagtatttaggtaactaaacttataatcttaaaaatgtaaaaaaaaaaagaaaagagtaaatttatgatatttttattaacgaattttatttttatcattatttgagtaatattaatgtgaaaataaaaatgtatatgatatatttattatgaaaattaatattgaataaaaaaaaggtgttattttttaaaagaaagcttctgttctcggtaaaaaattatatcaagaacaatgttttcaatataaatgagttagttgggctaaaatgaaaggtaactgtcgagggaacttatctaacttttactaacaatcaattgttctcggtatagtctttaacgagaacatcttcgcttccttgacaaaaagttattactaatgatgagtctctaacgagaacgttgtaacgagggcatgtccttgttaaactgttttgccaaggacatttgcacttgtaacgaggacatttatcctcgttaaagaccttacttttgtagtgttataggtattttgcatttttgtttttcaaatataggaatgaaaagaagacaaataagtaaggatatagaggaaattatatttatacttattttattttacttgtcataatttttacttttatttctatatttttaaaatatacatacttttataaataatgttcttattatctttaagttaatgtaaattatgtattagatttaagtagagattgatcatgatatattgggtagtacaatttaacaaaatataatataagagtatttgtgattaataaataaaaaaatatatatatatatatttctcccctcatcccaagagttatgcatcattttgttttattattattgacactctttttttattatttgaagaagtacattttccacaaaaacatacttatactttacacaatatcaaaatatatcttaaccattacgttacgtactacttacatagtttaatatgtaagtattaaactatgcagttaactatttgtagttgaacggttcttgacccttttattaatttcttcttcttctcacaattcgtaacctagaaacttggttgaagaattaacaaccgcatgatcaagtccatgccactatattatatatatttatatttactcgtataagtacgtagtacacagtagtaactaataaatttatatttatataata

SEQ ID NO: 218516 - DNA, 7689 bp, Cannabis indica
tatttttttttaattaaatttacggtttggattgcatccatactgttacttattatattatgtgaattttagttgcaatttaaattagtttgttggttgccatttaatttttattagttgcaattattattattattattattattattattattattattattattattattattttgcattttatgcaattttgaatattttatgttaagatgaaaatttctagtaattcaaacatattgtctaataattttagtgacattggatagagtaattttagtgacattggatagagttttttcttttgttgttcttgttgattatgtcttcttagcaattgtgtcagcttttgctaggagaattttttttttcaagtgatatgagattattataaaaaaatgtaacaagtatgttatttgaagagtattcgatccatatatattaatcggcttatatagctgcacatgaattagtcgtgcttgctcttcgaattcgaatagattaagttgtttaataaataatattttgttactttacttttattgaataaaaaaaacaaagaatgataagtatgtttttaagaaaaattatgcttatttaataagaagataatgcttcttaatcaagttataactcttttcagataatgatttgtcttttttttttcttggaaagaggattataccaacttttgtttcattttttcaacttaaaaaatcctctaagtactttaaacatttttatttaattaaaaaactaaaaactaatataatagtttcatagcaaaaatttcattcataaataaatgttttgcataataatatgtatatgatagtttccttttattgataagattcatcatcaatgggaattataccaattagttagagcaaatgtattaataataatcacttaaaactcaattaggacatcagacattaaacttgattaggatgaagaaagaattccattactcgatttcattaagccgcggctgttgatgatgtccacgactctgctccaccagaatcgaaccaatactcggtctcgaagagctcggttcttgagatgacaacacaaggatggatcaaaaaccagatgaatcatgctggtggtttgtcttcttccaataataaatgaattatggagctaataaccttgtcagaaccaacattcacattctggggcacaaagaaaaattggaaaatgaatcatattggaattgattaattattgactaaataaatataacaaaaaagtaaaagacatttaataggaactagtagcaaaggtaattgtttattgaagtagaacacaataagtagtttaagtacaaactattgctattgggtaccagtggtgcctagtacttctaaacatgtcgtcttgcaattggttagcgatactccctaaaagttattacattaaattatataagacctgatacttaattggaccgatagcgatattaacacatagaaaggtgttagacaccactagtgtcttttagcatttctctttaagtacactaatataggtttcgaaatgaagatttagagaaggcttggtctctcccaaagagtcaaaactcttttaataacaagacaattagagataatgatctaacccttattaggctagcttatttaatatcctaatcctaattagttggttacagctggccatgtttcaactacaaacattgttattagacaccagaggtgttcaataccaccacgagatggatccttacaaatggttagcggtttttcatgaaaatatgtggacacctcgtaactttcttctaattaacaatcctagcctttccattctctctagaataggttatacctaactaggatctaacaagtaacaacattgtcaatctaggtgatgggccaaacaaagagacacacaaaagcttaattaattatatataagcatgggaatcattaactactcagaccatatatccatatatatactaaacctagatcatgcatggcactattcaagcattagagactacatgattatagtttttttgtgtcaacaggtaaaatatatatggtagttagctcctcattaaatgtcatggactagaggactaaaatggtgtttaattgagaaaaatgaaaacataaaaatagaaaagaaattgtgaatagaaatagaaatgcaatggaatggaatcaaatttaaaatacataaaaacaaaatattaaaagatcattgaaaaaaatttcatgttgcactgaaatggtataaaaattattgtttttccattcccattccatttcattaccttcaaccaaacgccacctaacttttcaagagaagtataacaagttttcagagaaggaaaagataaccctttaaagactacaagatagtgaatgtatgagtaatacctctggttttcttattaagtcctttaaaatagaatgaagagtcaaccgaagttccttgaacagaacagcaatttgggctggtgctgccaattttaaccatccatcaatgatgacaagcccggtctgcaatgacgacaaacagcgaagtactcgatgataaatatgagcagaaaatggaaaaaaaaaaaggaaccacaagctgtagcaccagcaccaataacttacacaaatttcattattgaatggaagacatacctgatgctggacgttaatggaaccaccaaatagcaaaattgagtatggagatatgatggtggtatctctaagaaacactttgttggtttcaacctacgtaaaagattaaagtaaatatctcaatagaagagatgaaatacaatctagtatatgagtaaatccaaggaataataatgaggaaaaccttttcaaggaacgcaaggaaaggatatcgaaattctttccagttactgttgatagacgaagggtgtatgtgaacttctcttcttccatcataccagattatattactagtcaaaccaatagactgtttaaggctcccaagtgctgctccagcaattcctttctcagtggcagcaacattcgggtataaacctgcacataatactgcctgcatatttggacatagcatgaactacttgactccgattcggggaatgcataatatacttatgatacaaagctgaacagagtttgaaaataaaatatttcaattaatcatggataacaacagagccaagtaatctgctattttagatacagtaaggaaacctcggagtttacagtggtacactcctctaagaaggaaaagaaaaagagcatttgcagttgagtgtgcaagcaatagaagcacaatatcatgtaccctagtactaaatggaccaaagctcaaagatatacaaatcgacgtcgtatttttcccgttttccaacaaacatgaaatttatggaggactacccagtaaatgtctttctggttgtgtaattatgatcaaatctcaccagaagcaatgtgggatttttggaaaggggaaagaaatttggaattaccataagcagtacaaccaaatcacatgtattacctttactattgatgaatgatgcgaatacatattgaatggctgtgatggatcagaaagccaaatgtcaatgttttctctcttccgtccaacctgaaacatgaaaacaaattttttaactaagcctcaagagcatgacacaaataatctcagatagtttaccgttgttggattattacttgaaccactttaccatggcattaaaaccagttaggctatgttgcttgaatgatactaaaaccacatacctggaaattttttggaaaactgatgagcccaatatctgcaagcaaggttccaaactgtattctcatatctctgaaccaggtacaaaaattgaaaatacatattaggatccttgaaaaatactaacttcatacaatttatgattctttttactgaaacacagagaattagaaacacaaacgcgtttagtgaatcaaccctccaagatgaactaacccgtgaatcttgggaaagcatgtcttttcaaaggttttcctttttgtaagttaaaatgaatttcttcccagcaatatatcagtgaataatagttaaacactataaacactgttcacacaatatgcctcaataacagattattgtcacaattaaactccagagaagaaactgcaccttatcatgtacaaaaccgaactgcttaaaaaataagagctgcaaaaatggtgtgcagctttaacccctttctgcaaataaacaggacgatgttatgtaaatacaatttattttgaaataatgcccgcaatatatatactgatcagtggtaacatgtaagcttgtaatcaataatggttccggatttcaaatggacagtaaatgatacttctgacaaaccaactgattctaccatagaagccaacgatggataataagtcccctctgaacactatgaatatagctcttgataaatttaccaaagatgaaaatgatttatttgatattatggagcacttggccttcaatgtggctataatgacaagcttggcatatctaaagtattgcaataaaactaactggactagtcctttccgctggaaccaagtaaatcatatattacaaatgaatacaagtaaaacagacaataacctcgcgaagaatcttttcccatttcatatatgcaaccatcattaacagatggtcagagttcttgtcaacatcatatgaatcagtaggaccatcccgcttatcagttagaagcgccaacttagccctttcaacattttgtctctggaattacagagaaggaaacaggtttataatgcaaatttaattttatagaataaacaactaaatatcttttgaagaattgtaacctcatcttttggatagacaaaaggagacttgtgactcaaaaatgccgaaattgagagaacgggagacaggcaaccaaatattccaccatatatcatcatctgtagttgcagaagaccacagaaataaaacttttagttcaaaaggaaatttgaatagatattaatgacaaagagataagggatgaaatgttaaggaagaaactaatgacaaaaataaaactgaagctaaggctgctgctggaattttagcaggtttcatactcggtcttaccaattatattttacataataacccgatatcaaaattgtattacactctacagattatggaagttgtttaccttcccaatcaatacatcaactggaagtttagctaaatgatgtccaagaggagtaaggagctcatctccttcaagagcaccgacctatagaaataacccaacatttagaatcgatttacatttgagaaaaacaatgaaatgcatttaataactagaaagatacacaaaaatagtgtgaactgataaaaaaaaacatatgaacagaagcaatttatgtaaacagaaagtggttataaattccaatttggagactcacgggttagtttactaacaaactaaatagagtattgcataaaattaagactaatgcaaaaaccaagatgttacgcatgccaaaaaatataaatcattgattctaaattgtcaaccaaatatttacaaaaaaacaaaataaccaagatactggaagagaaaactagcaaataataaagtaaaatgttgagcgaaagcaatcaacttggcaagtaaatcactattattgagaagaaacagacatgtaggcaaagcagaattttcatgaatcttcatgatggcgatttcgaatttaataagtacctcatacaacaatgaaattgccgacttcatagcatcatctttaggaggttccaaagcctgaaacataaaaattaattaatagaactgtcaatgtaaaaccctgtaatttaagatggtaatacttacctcagacaaaaatggctttatgaatcccaaagaaagtaattttatttgtaaacacagctctactaatggagttcgaagcatttctggaacctgggtatagtatattacacattagaaaaaaaaaacgaaataggaataacaagagcgtgacaaaacatattctataaaaaggggaaaaaaactgggcaaagtacctgaaaaggtcgcataagtttttcaaaacggttacgtgtatacaagcaaaagcaaattccaggttttacacgtccagccctgccacggcgttgccttgcatttgcttgagatatccaatcttcaaccatgcttgacaatttctacagtaataaaacaatcagatcttagctggctggtccttataacatatgaacatgatcaacaaactatcttcattatcttcactatatttctattgatataaataaaagaataataaaatgatcaatttgatcgcagaagctttaaaatgatgaattgttttgacaacttcttgcttcaatgatcaaatctagtcattctctagaactgaaagccattgaatgtgcgattctagcaatgtatttcttttagtgaaatgtaatttgatggtggtgaaaaggataaggatttaagctcagagacctgcaactatcatatatatatatatatatataaatattttttggtaaataccttttcattgaacttttatttagtgtcttgataggcagcttcttctgtgtaacaacatttttattatacaagatacaaaaaacaaaccttctgtggattataacgattctctttatgctttccacagtcaataacatacaccacatcatctatggtcaaactcgtctcggcaatatttgtggctacaatgacctgggatacagagtattaaagaaagatgtaaatagctagtataggagttattcagagtagctagtatagaacaaaacctctaaatccaacattatttcttttgtgcataaaaattgtttctctgctattgaattcaacattcaatagttaatttcaccagattaatgcacacaatcattatacatcagaacaacattcttgccggtacataaaaaaaagaaacgataaatgtggaactaaagaagaattagcaagggtaagtactaaaatatagtaaattaccttacgaatgttctcaggtggtcttaagaacaccctcttttgatcagctgatgcaacggacgaatgtaatggaagaatccagtcagaagatggtccaccgaatcgataagaagcagctagcatatccactaacatgttaatttcaaacactccctgtattttgtaattaacatacataattaattaaatatttagaagaatgtatgtacacacaagtaattcatagcaaaaggatgtgggcttacaggcaagaaaacaagtattgcaccctcactgcaggtttcatctatgtgacagaccaagtcttcaagaagatcataatcaatgaaatcttcattcaatcttttctgttcaaaagccgattcaatttattattaaatctacagacaaacaagaagtatatgcatgcaggtcaaagaatacacatctcataagcacttaccaaattttgttgagtttgctcgctatatgaatgataactctctggcacatagtacgggttaacacgttcttcagaaagaattgtatcgtcaccccatgcttgcataacaagatttttcattcctcttcggttgtttactggaccactctgatctcatagtttcaacatttggtaataagttaaaacaaatatatatatatat

SEQ ID NO: 218517 - DNA, 2218 bp, Cannabis indica
tgctgcaggatgcccaagtctccatgggcagctctgaagcgttcccaaccacgtgatccaggagctcggcggcgaagggggcagcctctctcccaccttaaaagccaggtgcttttccaaggttcaacctccatggttggcccaatagggggtagggtgtgcatgccgtctaaagtttcagccttacggaccatggagagcagagtggcccttctacgaacttgcagcttgtcttcctccaagcgccccttcagagccttgttcacttccctctccttctgcatggcgagaggattaaacagaatggtcttcctcgggaaagtgaaccccactgagggtatttttggaatggtcgaggggtggtatgaccgaggctggcccaacctcagtggtggatcatgacgctgggggtgggccccactttcaagagtggccgcctcaggcctttgccttttcctaccaggggcattattgcataccgctttggaagaactggtcctatccaatgcagatctgatatacctaccataagtcgatacaacagtaaaacgggtcagcacatcgtaggaccccaggactctcaaagactgcaagcacgatactgatatccctagtgcaagtagccgtacgcaacatgcacaattccctcatagctctataacaattaaacgatgatgaaaacttaccacttgttaagagagaatgaggctgatgatcctggtgttgcgcccttgtcgacagagtacgtgcctgggtggggaggtgtcaagaatagagggaggaatgaagctaaacaactctggtgcaacacgtagaaaaaatgtaaagtgtggaatggatgttgaaagtattcaatggctaccaagaagaggtgccttccacaagaagcaatagttcgacttgtttgcccgagggacatctgacagttggataagtgggaagctaaggtgtctcgcctcccaacggttgactttcatcattgcatgcatcgtgagaagtgcttagaaaatgaaaagtctgctcaaatccaaccgccgctattttttggcatcccacaaaacacacacaaagcacgcgcgcaaaactcaaaagttagcatttaaaaccgtgacgagaaaatagaagaaattataccgactaggcagtggcactccatttggcggctgatgacgtaatgtgataaagagcttgtcataactcccacgtgctcgaaatcgctcaggaaaagatactacaagctcccggaccatggtacgcctcagaagcttgggggtaaatgttattcgcatttttgtaatcatgacacgtggattctaatcaagaaaggttaaggagtcattagctaaccaatttcctcaattgatgctccgggaagataaaggcaccaacttcgcgggaagagtttctgtgataggaagttccctgactgctagcaacacaataggtattcgtgagccaaagtctccctccattttaggaactaaagccatctactcccgagaagagtatgagttttcccagaggggccaaggcattttgagacacgttaaatcgggctacgcctttagcccgtagaggctctgcctacacgtgttgggctacagattgagtgattaggcttgtttaggtacgacgtcagaggttgtctcccacgacacgctatcatacagagcaagcgcgttgttgtgtacctgaccaaatgatccaacgactagagataaaggaaattcaaaaaggagaagtccttggatgacacgcgtatgaggcccaacctgtacgatctgacacccttaaatgccatatgggaaaaatgccacctatcgatccaacggttgaaatttcacctcaatgatgatccatctaaggaagcacatgcaaagaagttggcctataaatatccctgaaaaaccacaagcaagggggatcgggctcttgaagagagaagattctttcgtcattatccaaaaacacattttgtataaccttacagccaaaaaactccaaaatattcttactaagcttcctcttttttcaagaggaacaaaagaaaaatggagttccaatccattgtatctctatttgtaaaagcagttaccggccaagttgcctaataaaatggactcgtggactaaggatagttaatgcctgaaccacgtaaaaaatctcgtatttgttattctgctatttatactaccttcactttcttaagctctaaaaa

SEQ ID NO: 218518 - DNA, 2166 bp, Cannabis indica
gtgtaatgttattaaaaggtgtaattttaagactattaatttaatcctttcaaataaaaaatgaggaaatgtaagaactttataggcatattaatttaatttgtgaaattgcatacctctacttataatttaaaaaataattagaattcttagttttttggtcatattaattaaattggtaaataaatatttttgatattttcttcttgacaatatatatatataacaaaaatactaagtgtatatagtcactctatttaaaaatagaatctaccaaagaaaaaaattaatgaacttgtcaaaaaaaatcatttgggttctaacaaaacaaactatgtacaacaatatatatgttagtaataaagttaataattaaatctgatgtgagtaattgtatatttggatttaaatgaattctgtatatttaaatgaaatatataattttagaaatattcttttaattatttattataatgttgtgtaataaattttttcttgtttacatctgacctgaattttaattttaataaagccttataatttggagaaataatgtcagtattcttgtctatttatagttaaaaagttatttttataataataaaaaaataaataaaatgtatacatagtacatttaatacactgaccattcaccattttttttaaaaaaattatatatactactgaagttttaacatgttgttttaatgattattcttttggcaaaattctgtctttatttggtaattaatttttattttattttatttttttttaaaaaaaaggaaatttcaaacaaatttatgtgaaaggttgaacagtcccatcttgcatgaagagtcacataaaggaattattaataaaagttcaaaatccctatcatggttgacacttttttgttaattaattaatgaactaactaactaaaaaaatatgccttcatttttaattttaagttggtaagttgaaagctacagttataatgttgttgaaaacatagtccctttcaaaaaaaagtgtcaaaacatcataattgtttaacaatagttgaaaactaggtacccaacaaatatagggaattaaaaaataagatacattattaataattggaagattaaaaacaagctcaaaatagcttaagaaaatattgtgaattaaaatttcagtacatgcattagtagataattgaaggaatttgttaaataatttccggcataaatatttaaatttaatttttgacagtaataatatttaaattatatttttagaacttccgtaaataccttaccattaagtgtcaagtcaatggacacatgcaaattcttgattggtccagaacattaaattttatcttttatttaaaatttaatttaaatataccaataaaaaatgacaagtgaataataacttgacacttaatggtcaaattccgtaagttccagaaatataatataagtattattactatcaaaaattaaagttaagtatttttctgtaatcgagaattaaacttagttttttatcagcaactaaaaattaaatttaagaatttgataaaccaagtagaatagaattcccacctagcaagtacaatacaagaataaccgaaagagtaagatcagctatgcattgtaggcaaaatatttgtgcaacaataagccaaggatctcatctcataccccaaaatcacaaaacatatctgctatgctaatactataacctaattcaaatttcctaattctcaaaccctacttatggggatgggatcaaaatttgcgatcttttttacaatttgaacccacaagtatttactaaaaaagtttcacttcctagacaacaatgcgaatattatgggaagaagtgctgagcatccatagaagggaagctggattgtgttattttcattccttgcagtatactctttgctatttccttctcctgtataaatacaacatgcaaagagtaatatatatacacttttgaaatctataatccagcttaagttgtagtagagatgtaaatgaggcggattttttctttttaaatgttagcttcaaaagaaagagttgggacgggtcgacgggtcgggttaggattgggtctaacctatctggctcgaaaaacttaatgggtcgagttagtacacaaactaaaactaagaggacg

SEQ ID NO: 218519 - DNA, 12499 bp, Cannabis indica
tttttcttcaaaggaatactgataatctcttcctccactggatgcaatgctattaagcaacatgaatggcatatgaatactattctctttttgaccagctacattttcctgcagaaaattcccagaaatatttcttatcctctcattacggtcacttgtttcacttaccattacgtccttcataacatgctggatatctctccctctgctggctgtaatgttattatcaattaagaatgacattgtgccttttgtttccagttgaccagctacatttcccttctgaaaatctttaggaaaatttcctgctttctcattgaagtcacttgtttcagctaccctctttcccttcaaaggatgctgattttcgctccctcttttggttgcattttcagtatccaataaaaatgacattatactagtattctcttgttgaccagaaacatcttgcacgacaaaactcccaggcaaagtttccactttctcattgaagttggttgtttcagctaccattttgtctttcaacaggtacttggtatgtatttctttgttcggaagcaacgtcatcatccaacatgaatggctcttgaatattattctccagctgactagttacatattcctggaaataaatctcgggaaaaccatcccttttatcattcaagtcacttttttcttctaccacttttcccatctgtcctcctctgttggatgtgctattatcaaatatgaatgacgttttaccggtattgttttgttgaccaactaccttttcccggagaaaagtttttgggaagtttcccattatcccattaaagtcacttgttttagctatcactgagccattcaaatgagccttaaaagctcttcctccattttcagcattcttattattggagataaatgatttttttccaaacacatctcgatcattgggactcttttccttcgggggaggcataagtagactatctatctttaatcttccattatcagctggctcatggactttattgtcaccataagagctgtcaacaatttcttggtctacaggagaagcctgaaggttgagattgaatgtgctgttttttccacgagaaggaacattatttgagataacaggtaaggtagagactgcggaggcaatattaggactttgagaaggaattctcagtgggagagatggtgttggtgatgggagcagaatcctttgagtggtctgttgtcgatttgagattggagcttggtaatttggcacacattgcatcagctttctggcggcaaccttctgagctgttggtcccaagtttttgacaaacattaaaagcctttctttgtatccaaatttcttatttttaccaatctacaaacataaaaatagagatataagaaggcatgttgttatatagcagcatgatatgacaattaatgccatgcaacaaaaaagaaaaagaaagttttgactgcaaattaaaattataatattagcaatagaagcagttgagacaaggagtgaatgaggtcaagtatggaaccatgatatggaaatgaaaatgagagagcatattagtacgaaaggtatgttacaaatactataagtccgtttggtttagccaagtacgtacatgaatcagtggtttgtaagcatcatagacagatgagactcctaaatcagagtctctgcaaaatgggatcaaaggtctttctctttcagaaaaggtgccatagttccggcaatctcttagtcctgttcagggaagatataagagaaactaaattattctttcttttcaatccacacatgctgtatagatacacaaagatgaaggaacctctattatgtgttccttctatggagaggtgataggcattaaagggatatgggaattaccaagagatgaaggaccaattttgaagccaccaagcctaggaacttttgcacgtcggcctctgatttcacttattaagggtctttttccagggcctcctgatcttgttgcacagattaatcgtgactcgagtttctgtggatcagttctcagacattgaaatattacttgggctacatcttgtacaccacgggcctgaaaaactcaatatctatacatccttagtactgaaagatacataagacctcgttttacaagtttaatactggtgaaacacaaggctgaatataaaatagcctacctccttgtagtatattgtagttgaagaattaaaatgcattgcattgctggtgatcagaagcacatcatgctgttgattgacagaaatcgctaatcagttaatactaagaactttataaattcactgaggcctcgaagtattcatcaatacggtggtactataattgcagcgagagaaacatgaacgaatattattgtaaaacttcataccaagagagacgttacaaacaagatgaaaaatgtgataggactatgaataattcttagttttaagagcataacctcaaatttttccaagcttgtgtaatgcccttcctgaagtttagtcctcatggtactaaaatccatcggttctttgataatggtgtagtagttgtccacctttaatggcaagaagcaagttgtaattgagaaaataattaaaaactcaatggcctaaacatttacaaaccaagtagctagaaattgaagtgataggactgacctcattggggtcaacaggctgagcaaatattttatgtgtatccctcctacagtaagattatcatatgattaggaacttttcaataagtaatttgagcagtatatgtgcttacgtttgactcattttctgttctattaataatgaggaaagtttaccataacaaaatattcacctttgcagtatatcaaggataagctcaagtatgcgtttttctggtatccattgcacggatggcaatccattcgcttgttgatctaggtattataaacaacattacattggtaaatttataataggtaaggtgttaaaaactgtagtcaataatccataggtctacagaataacaaaattaccatgtctggttaaagaatctccatgtatgttttcttcaccctacataaaaagtaaaatgatgaagcagaagatattaaatccacaattttagggaaagtcataaatgtattcagtcaacttatgttgttcctctcccttaacctcttccttataagaggcaaatataacaattctccaattggctctcagtatacaaggaaaaaggaaatgcaacatcagggcctttttttatggaaaagaatagtaggactgttttgactaaaatcatgctgcattgaactattcaatcaaaattcacagcaaaaattacaattttgccaagcagtaagctttcaaaaacacacacattaagtaagcattaaatgaacctgttgaagcagacttttggcaaaggaaggcaagacaaggtcttcaagtcgtttctgcttgcggccacgcttgagtggaggaggggcaggcattgctctgcttgagggtgcaagatcatgatgttgctcattcttaggggaaccattcccagtatagcctgctttgctgagattgttactgatggctacacttaagctacgtttcaggttttccttcctcttctcttcctctaaagccaatattctggcactttttcttctctgccctacaacttctacttctccttccttagacatttttctgtatttatactaacattttaatactactacataaaaaataattccatgttacatactggattaaaaccagcaattacctgtgccacagtatgttcaaaataggggaaaaaaaaagaagaaacaaaactgaagttgagaaagtaagaaatccagtccttttgacaaaatgaacttctggttgttgacaattgagaaaaagaaaaaacagacaaaagttacttctgttcagtacgcatacaatttttgagctgcaaccccctcaatttcgccttctaatttatcgatcatctagcatgcttttgtttatagcacaatggctaatctatcatggttggaaattcatgctttgtatttttttaaaaaaatgaaaataatggtaatatctgatataagacagaaaataaagtctttcttctaaactcataatataccataaacaacagccaaaatggggcagaatttgggggctgatgtgaatgacagcaccatatgacatgtctcttcatcagtataaaaatgatgttaaaacatgttagtggtttctgcagggttttttgtatttttttataatttcattttccttctcacaaattggtacaaagttacaattatttcatgaagaaaagtaaaggagaaacaagatcagattattattattataattaaactaaataaaacttaatctgctaaggaataaaagagtgcagcttacagattctgcagaaacacgattgaccagccaaacgatagaggaaaaacctgtttggccgattatcttgttggtgaatagtggatcgccatgaacaagagaatgcggaataggaaaaatgactagactttatctactccaaaactgcgaaatggaaatcgctcaccccttcaatggtagacctgtgatgaattggtaagaaaaacaaaatcttctctcttctttttaaggggatatcataaacattcaaggcacgctcaagaattcactcaaataagcctttaaatacaaatggtaagcacttatgtcggtggcggagttagcgttacatgcaacatttaatttgacaactgtacaatgttcgatttctccggcgaaaagtaccggtaacttcccatttggtttgacattaaattgatgtgccacgtattacaaaacgccaacgcatctgatactgtcattatcaatactacaaaattacttaggtaggctcaaattattttcgtaaccacatttaagaaaaaaaaaaggaaaaaaataaaatcacaggatcagaaaatcctactcaagatatgcaattatttgaaatatgcttttgagttatggatgcattcaaagccaaaatcatcactcatttacattgttggtaaaggtatacatagttttttccttcgtaaaccaatctatcaattcaactggtatcggattgggaaccctatgctaagtttaacaggcttaaaacaagtgtttttttcacctagagtgcaacttctgtatctatcaacttaaatataaccactgagacgaaaaaggtagcaaaattcatctgttataaattccattttcattcttgttctgaatagagatagtacttggagagaagtagccatcatgccctcaatttgactgcagaatcaagcacatccaccgtgttattttgttgtccccagagctgtgcatatcttccggccttagataacagaacgtcatgcggtccttgttcaaccacctttccattctcaataactactatctgcattatcagcaaggagatacggagaatgagcaatgctggatatcggacatcatatatatataatcccaaacatcattagttataatttataatgcattaagcataaataaaaagagcaagtttgagaaacttcattgagccagtgaacttcagaccataagtgacactttttgggagggaaaaaaatagaacctcatcacactgcattgcagtggtcagtctgtgagctatgaagatcgatgttcgattagttgctaaggacttcaatgcagttaatatttctgcctctgttgtgctatccagtgcacttgtagcttcatcacacagcctaaagataccaaataaaaggaaaaatcatatacagcatgctatgaattagttgaaatgctcttttcattttctcctgaaaaagactataatttacaagagaaaaaatttaaattgcattctctatgagaattgtgtacatgtgttgcaaatttttagcctaacatgtgagacaataatgtatcggatcaacaactaaaagaaagatcgattctttggaaagtatgtatgtgaatttatatataaaagcagaattagttgaagatggagataaaaatattacagaattggaggtgctttcaaaaatgcacgagctaaggccacacgttgcttctctccaccacttaactgtacagaaaaacacaaaattgtcaaaattttgatactattgtttgtccactccatcgagaaagttttggtcaaaatattttaagggaactttacagatacatttaatatactgatcttgctctggagggtatgcataagtcagctcatcaagaccaaattatttaatgcatctctaataactttcttttgagttttagtttaaaaagttttcaaaacttaatgtcattgtagaaaatttcacctggtacatattaactttcttcccacaccccaccccttgccctaaagagtgttgataacactgtaactagtcagtcaaatatacactacacaaaagtctaaccttgagccctcgttcccctacaacagtagaatacttctcaggaaaattcatgatagtatcatgtatagctgcacgtcgagcagcgtcatgcacctgttagaaaatagctatttaggataagactttggtatcatccaattgaattcataacaatgtaaataatgatgggacaaaaagtagaaataaacctcctcatctgatgctgacatacgaccataacgaatattatgaaatattgtatcattgaaaagtacctgagcatgaaacattgttactggttttaactttgtaactagtaagattccacagataaaattcatcatacaaggaaaatcctagagggagagaagtactaattgactataccgtatcttgaggcacaacaccaattgacttccttagactcgctagtgtcacatccctaatgtcttgatcatctatctttatctgtaagaaaagtcacaatataaaacagcaagtttataataaaagtaaaagcacagcaatataagacactgcaaatagaccgctaattaaaattctctagtgataacagtaagcaactgtagaggccagaaagagtccttacacttccagaatgggtgtcaaaaaacctgaagagcaatcttaaaatagttgacttccctgcaagtatccagcttaatacattaattatgatgcaaacacttgataacataatgtaagagtggatagcctgtaaaggcaaagattcctcagcactagccttaccactcccactagttccaacaatagccacactctttccagctggtacgctaaaagatatatcatcaagaatctttctctcagttaagtagctgttttgagagcgagaggggaaatgagggtacatcatcagcattatgtcaaatagcaaacaaagccacaacatgtaaacatgtacataactctccaaaacataaaattaaataaatatataaataaggaaaaaattaaactgcatttgtatttccactcaactataactcttaatttccactacatttgtctataaatgatggaataaatacagtttttttccctatacttaaatgtctcacaaatgtgcacaatttgaatgttgttcatgttttttccctgaataaaaaaaattaaaaaaagttgacagaaaaaagaagtacgaaaaacctctatagatcccttctctgtatcaattttctcatacttaaccggccatcattagatcccaaaaaagtttttagacaaattagaaccacaagatcatctatagttgttctgtaaactacgctacgtaatgccaaagtacaaaatgactaacccaactaatgctgtttaaaattgcattgaccacccaatagtagtactaagaagcactaagatgtttgatgctcatttaataataactttttatattttaggtttgttatcataaaattgataaagaattgcatttaacacctgaaatgaacattcccaaattgaatgcttccgccactcaatttcagaggtttagcatcttctttatctctgatgtctgcccgctcctgaaaataaagttggaaagaacaaactataagtcagaagaaaagactgcacgtcttatctgaaaacacttaataagcagcaacatatatttcatttatcttaataaaatatccatctccaagctttactttccattataaattagcagattaaaggggtacatgtcatgaagtgttaatctcaaatacaatttaactgcaataattagacattgatggcaagtcaaataaattgacaaagacatactaatataattctggtgggcaagcagagaaactaaaattgaagaatatttcccgaaattacctctagtaactgaaacatagatttcatgtcaacaaggctttgtatagtctcacgataaacactaccaaggaaattgagtggaagtgacaactggaagagaagtccattcaccatgacctatgtttgaattatcatccataattttatgtgagtgttaccatcataaatcaaaactggaaatcaggttttacattaaaaaaaatgatattaaaaaaaaagccatcataaagacaacttaccaaatcaccaactgtcatgctaccattcataatgccatttgagcacaacaccatagctgttgacagagccgtgctaaatattatattttggccgaagtttaaaaaggcaagactgcgttgcgttttcaaagcagcatcttcatactctgtataaagaaagaaagaaagtcaatccccttcaaaaaaaacaaagtcatcaaacaagcagcaaaagcagctcttacaagctaagacaataggtatgctagatcttcccatatctacagaaaaaatacacagttcttacaagactccaaagagtaagtgcaaagacacagcaataggagaagcgccacacaatgaaatgcaggggtaaatatttcagtgccctttaaagattccattcatacgtccacgaagaaaacaaaaacatacaagtgttaaagcacaacactaattgacatgtaataataaatattaagcggtcaagttttaaattctcttttgaattccacttacataaaaattcaatgtcaccttgtactgtacaggaaatatatgcaaacacaccttaacacatgtaaggcacttgttattttgtttcttaatcaattataactataaaacaagtcataaaaggtcatcaacatctagattctacaaccaaaataagtcataccgcaaattcaacatctaatagaaatataattctctcaaatcttgcaatttaataaatctggtttcttcagaattgaatttgaatgagacaagagaacacatgaacttactctttaagtactcatcatatttatcagcttcaaaagcttcattgttaaaatatttgacagtctgcataaaaaaggaagaaaaaaagtgacatcagatgaaaccacgcaaaaaattaaacagcatcaagtaacacatatagaacaaagacaaaagacaataaggtacatcacgacctcacctcataattaataagtgagtctattgcccttgtacttgcatcattatcagccttattcatcgccttcctaaacttagtcctccactgtaaaaataaggacttcatgtgagattaatgataaagtaactccagaagacaattaggctacagttgaacatatagagctgaagcctgaaggagttgaataaaacaatttaaacacgacataagaaaaatctatacatatgaatagcaaaaaagatgcatcagtagattcctaaattaaaatttacttagatgagtgaatgaaagaactggtagatgatatagtacctgtgtcacagataatgtaaacaccacataagcaacaactgagagtgatgtgatccacgcaaaagatgctccaaatttgtaagctagaatacctgaaaccatggatatctgaaagtatacatgttacatctgtcaaacctttcaagtaagaaaaatccaaattcaggctgaacatgttattgttatttttttaaaacaaaaataccaaagttgaagaccttattttattagttgtccaaacccattacgcaaattacgaatctagtctttctatgcatgcaaatagctcaacaggaagaaaagaaaaagaaaggcatacctctaagattgtgggcacaacattgaacaccatggctgagagaataaaatttatagcacggctaccacgatcaattattctattcagtgcacctgtttctcgactgcaaatttagttgccaaaatggagaaaattaaacaaactaagaagtgagtttaatctagcccacgagagcatgctctattatttaattaagtacagagaataaaagaaaactaaaaaagatgtatggtgactacaaaactgtttcattgttcttaaggagttctctgtttaaaattctgggcctcggaggtatgttgttttacagcacaagctacacaaataagcattaaaagaaataagtttggaggcaacaaaataccttagatgataccggaggtcaaggtcatgcaaatgagaaaagacctgcaaagaagataccaatatgtatgtcaaacagaacaatataggatatgagccaggcaaaggacttgcttgaaatatttaatgttttatgttcttggttttctaaagtgtcatggacagtgttagatttttttatcaagatggcaccttaaaccttcattttaaccttaaaaacaaaagagaaaaatgttgtgaagaatcttcaaagttggaaagctgcacaaaaataccttcctagatagcgagcgaattgttcgaagagcgaccttagaaaaaacagcagtgcgaagttctgccacaacaaagttcaaaaatagtttcaagaatcgaacaatacaatcaacacagcacaaaaaatgaaaactgtgtggagatacaataacacttgcaagcatggctagacctagaaataagtgaaagcctcaacaatagtagcagcaagcaagcaattacttcatttgtagtaccgttgaaagctgaagatcctgttcgtgctatcccatatccaattaaaaccgatgcaggggttgcaaaaagagctaatgcagtcgggttagctgcggtaaaggaagcaacagctccagcattaccagttgctgtggttaaccaatctacagcaagcttgaagaggaatggcacctgaacatttataacctgaaattgaaagataacagtgtaagagaggccacaattcgcattagatagaaaacagaacaatggagatttaaccataggaaaagcttgaccatataactgacctttgcgccaaccaaaaaccccaaggcagcaatgaccctccaacggaactcgagattatccttcatccacaaataaccggcaagagttcggaggattgtgatgtcagcaatttgctggtctgcaggtcccttggtcacaactttggtagctttgctctgttcctcagcgggcttcgatggtgccccattctttttatcactattatcactcgaagatgtcgaatataacgaccgcccatctacaaccgagccctgtcattcgaacaattctagttaaaccaaagaagaacagaaaaggagtaacaattctagaagtagcagctgtagagaaaatgactaactggtttcgatctagaattaggaacggaaaatgaagaagacgaatcagagaggaagccattgatacgaggaaagactttactacgcagaggagctgttgtggagccacaactgcgtaaaattgactcgccgttgaaaccaattttgacacttccacgaagcaagcatcgtcttcgccctactcctccacagtcaatactcaaatggtttctacagacgccattaacgctaacagcacctaaagaatcggaaatccgactccgacagacacgattcgacataaccgtgaaacccctgctctgctgaaccagaaactcaccagctctgtaacatctcgatgccgtagcacccaacattttcgattcttggtattcgatccaaaataagaaaaaaaaaatacaaaattggcaacaattggggaagtagtcactccaacaatttacaatctttgaaaatgaatcaaaacaagtaaggaaaagaagaaaagggaggaaaaccctaatttgagagaagaaagtttacgtctttatttgcatcacactctgttttgggtctttaacggcttctgtgatgaaatcaatcttattgaggttgtcattctgtgactgctaattatttaccagatttaatgcactcaacccaatttatagaccaaatgcatcctcattttcaaattttgtgtaattattaacacgttggttttgttgtatattaatgttgaacaactccttcactcttcacttcagttgactatttttgatttagggatgccaatttgatgagaatcatatcatccccattcattccttgtaggtgaaaaaccaaatcacatattattaactctttttttcacttttaaa

SEQ ID NO: 218520 - DNA, 3032 bp, Cannabis indica
tagttccctagtttcttaataaacgaaagtcatagggattacaaaatgcaagtcaatcaaaacttaggtacattaattgaaaaagaaaatcaacttcttacgaattaatgattactcttgtacaatattaaatattgttaaacaacccgagacagacatgatcatgtataaactacttggataaccaaactctgccaaaccatatcaccatatataacgtaaccctcacacaaaatataaccttttacaatattcttggtttggtctaacccctccaacaaattcacatgctatattctagtcctcagcagctgttaatcttcattccaattataattatatcaaaactccatttaccatcatcttaattattccagaaaaaacataggcaatctattaatatggcaacttgttttcagcaaggaaacaacgttgttaacaatggtgacacagattccgtcatactcttttccaactcagatgatcattactctcatgaagatcagacgtcaaccgctagtccttcctctttcaacaattctccactgtctgatcatcatgaatattaccaccgatacaagaagaccaattacaatctcacagtaacaaacctttcctattctacacagttaccatcacttccttctttccccttttctctaagcccaagattgttcccatactcaagtctatctccttcacagccaaaaactctgaaattatcgccattgttggccctagcggcacaggaaaatccacccttttgaggatactatccgggagagtagtaaaccacaaaaactataccaactttgatcccaaaagtatttccattaatgatcatccaacaggccattcttctcagttgaagaaaatatgcggttttgtagctcaagaagatagtttacttcctctactcacagtaaaagaaacactaatgttcagtgctaagttcagtctcaaacaattgagttggaaagagagagaatccagagtttcatgcttattaaaagagttaggcctttggaatgtggctgaaagctttgtaggagacgagagcatcgaggaatttcagggggagagcggaaaagggtttcgatcggagtagaaatgattcaagacccaccaattctgctcctcgatgaaccaacttcaggcctagatagtacttctgctcttcaagttattgagcttctctcaattgtggctagaacaaagaaactaactgttgttctttcaatccaccaaccaagttatcgaatccttcaatacatctcaagctacttggttctttctcgtggctctgtagtccataatggaagccttgaatctcttgaagaaaccataaggagtaaactcggaatccaaattcctgttcagctaaatgctctggagtttgccatggaaattgtacggacactcgaggattacacatgttcaaaagagagtaataacattaataataatcatcgtgaccatatggaagtagtgatgtggccagatcgagaagattttggaggcggctatgaagtacatgatcaaaatactgctactcatcattggtttttctcaaactttctattcgagattatgtttctgtgttcaagattttggaaaatcatttacaggacaaaacaactttttctagctcgaacgatgcaggccttagttggaggatttggcttaggaagtgtatacataaagatgagaagagacgaaggaggagtagctgaaaggctaggcctattcgctttcagtctcagctttcttctctcttccacagtcgaagcacttccaatattcctccaagaacgacaagttttgatgaaggaatcctctagaggagcgtacagaatatcgtcctacatgatagccaacactctcgttttcatgccattcctttttgttgtggctattctctttgctgttcctctttactggatagtaggcctcaacccatcctctgcagcgttcttgtttttcattcttgtcgtttggctcatcctcttgatggctagctctctcgtactcttcctcagcgctgtttccccggatttcatatccggcaactccctcatctgtactgttcttggagctttttttctcttctccggttactttattcctaaggaaagcatacccagatattggatttttatgtattatgtttctctttatagatacccacttgactctttgctcgccaatgagtattggagcttgagaaataagtgtttcagttggaatattaatgacagtagtactgtaaatggtcaaccaaagtgtttgcttactgggaatgatgtgttgaagagtagaggattggaagatgaccctcgatggattaatgtggggatttggttggattctttgtctttttaccgtttacttggttggattatcctatctcgaaggtcttccaaaaccacactttaatataatttattagttagtaaaacaatttagattagaaagaggcagagttcgttttcattattagatctttgggttgtgatgtgtgatgttttgttgagtatgtgttatgatgttgaatttcgtaatgtctctgtttctgtaacttggaagaatcttcttctctcatctaacattggatttattgttgaagacatcaaaagtataacatttttttggtaaatagtccatttctattagttctgcaatttgtttgtatcatttattaaagagaaatgctaaaaagtattatttctagtacatttttacatgttaatattgctattggtctattggttcaattaagtattgagtttaatataatttaatataatgacttttagagagtatcgcaaggggacatgtcaagagatgctagacaccacttatttttaatattaatttaaaaacatgaagaaaattcatataaactaaatatcatccatttattttagttaaatactaatggaaaatgcttaagtagagtcataaaaaacgtcatacatacagatatttttttttttcagtcactcttacatttaataccaatattttattaa

SEQ ID NO: 218521 - DNA, 2446 bp, Cannabis indica
ttgttcattcattgagtgcagatggcaaatgtcacacaagaatgacagacaaggagaaaaacttaaattgcaaagcaagatagcataatcagtatttgagagttgttaagaatatagacatccattatattagaaaaagtatggaatcatggttagttaataaattgataaaggttacaactaaaagagatacaggtaacaaaatttaagcaagtgatttgatgtaataaatacaacataaggattatgaaagaatgatcatgtagatcaaagcttccactctttataaaataggaggtaaaatataaggaaacttgttataagaagaaatacaagtcaggtggcagcctcaccttgtttggatcaagagctagcaagttgtcaagcaaatctaaagcatggcgatcaaaactgcaacaaaaaaaaaatgcagttactagcattcttatagcctaattgttttcaataaagtggtcaatgcaaagaatagcctctatttacatactgtctgaaattgtccctgatacgtctcttcagtggtcttgaaggcttgaaattactataccaaggagtcttagaagcctctggccagttgatttcatcaggagatccacaaagctcaaatatcttgtttatttgttcaggctgcaacatacgtagagaacatatttaatatgtattggctaaaaaaatctccatttcataatatatcactaaaacaaactcagtggcagaaggatgagaaaccaagaaatccagatcaaatacatgactacaatctaccataaccctttattggatcaacttcttgaaaatgtcaattaaaagacttaaacaccatcaagaattaaaaataaagatgctggtaaatatgaagttctaatcgcctgactcctatatatccttcttgaaaatgtcaattaaaaaacgtgaaacaccatcaagaattaaaacaaaaaaaaacaagttgacagtaaatatgaagttctaatctcctgactcctatatatcctcagcttgcttccctcaacaagattgtggacttcagcaaagatgtttattataaataatgttgaaaaaaatacccagagtaatataaaagacacacagtagtggtaaatataaataatgatacttgtgcaacccctactctattgtaaaatgaactagatgaataagtgaccagttactacaatgttaaagttaatatcaaaaccgaaaaataaaaaaaataaagcattttataggcccaacctcatttttcccaggcaaaattggctttccattcaaaagctcagcaaatatgcaaccaacagaccacatatccacagctggaccatactttgtggctccaagaagcaattctggggggctgttcaaatcacacaatattaaggcaagctaagatgcaatgctttttagcaatactgaggatcacgactaaaaattgtaagaacaactcaatataattgaattacgtaccgataccacaaggtaatcacacgattggtaagatttcctccatggtccgtagcaaaaaatcttgcaaggccaaagtctgctagcttcagtttgccttcgttatcaatcaaaagattagaacctgcaaaacagacttcggtcaaaatggatccgactagcaaaagattcatattacttacggaagtttgctagctaataagcaacctttgatgtcacggtgaagtacttgaaaagcatgacaataatgaagcccagacagtaactgcttcatataacactgcaagaaatataagataaatattaagtaatagctaatcaaagagaaacacataaatatgttttattgaagaaaaaacattacaaaaataaatggcaccttaatctggggaattgtaaatctcagtccaggacgatcagaaaggccagtcaaatcatggtccatgtactcaaaaaccatatagattccacctttaaacttaccaccttctgtatagacaaaaaaattatatcagaaaaacacttgggtagaacacggtcagcaaccataaaagtaataaatactggaaacacaatatgtttaaaataaacaacaaagtaatttatgcaacaatttgctgaccttgactgttttgttcatccttttcagtaccttgaagacagcaaaaacaaaatatttaagcaggaatcaatacatacatagatatatgcattcaaaactacatcttttaagtaataagattctatatacaaaagagctttagaaagtacttgtggaggttacaatctctttcagcctaacaatattctcgtgatcaagcttcttaagaattttaatctctctaatggctgtaatagggaactgcattaaggggaaaaaacaaagaggaataaggtaaattagcaggcataaactaataatataaatcagttatgaaactataatttgcaagaaagaaaaaaaaaa

SEQ ID NO: 218522 - DNA, 3011 bp, Cannabis indica
agatcttgataatactctgcggcagaaaggatacaagggttagagatctgaatggaaggagtaatttaattccactgcacccaatgtaaggtttcttaaactttatatgtgtttatttcatcgttttagaaagttcatatttagggtgataatcaacatacttgtgagtagatctaagatcctggtaaaataatttccaacaattgcacagggcacggtggaggagacgtcgaagggctttgcgcaagggaagtggaggagacggcgacgggctttgcacagtgagggttggatcggggtgatcgccgaggtcgctccctctctcgttctcggacgagtcatctccgacaacaaaatccatggattttggcgggtccagttgagtcgtcgtcaccgtttatggatttccaaaatctctattggattcgtgtacaagattggtaaaatttaaacataagaatgaaattctcacttttaactaaatatatatagttagtttactgcgaatcttcttgactgtgtaaatatttctcccagcctttaaattttcagtgtgtaccatgtgctctcttttgtgtattttgtattaggttttaattttaaaagattttatatttttttttcatccatgtgaatgctctttgcttcggttggtctatttcgaaaaatctttaagatcttaggagaatgagatgaaatctgatgtgagcaagttgaagaccatgactgtgataagtttttttattgtgaagaagacatcactatgaagaagaccattgttttggccaagaacagtcactacttgttattttgtgggttctctctttttcagttcctaatcccctctttctttatgtggttcctttctatttacatggtacattctttcgattgcatgggcaaattgttgttttacctactctcctcttgacacgtgttctttctttctattccttccaccttgctacgtgtctgcgttttagccagcaactatttattactgctttctcttagtccgatggcgttatatcttttatgaagtgtttatctcttcctttgtagactatgtctctttcctccgtcggaattctcgtctgaggtggatcgggtttcctcccgtcggaggtacttgtccttgcttaggtgctgccttggtatttttctttattaggttttggataagtcttccattggaagactttggttttagccttccatctcctccttccttcaacttctgtcggtgttttacttctctgttttgtcatttagtgctttatgttcatatctattctttaagactcttgctgggctgcacagtgttgggccttttaatgtattcagacttcgaacttttgggtatccgttctgtttgggcctttcgatgtttattgggccttcgttctgtgctcgtattttcccctccaagcactactccccccagttccagttacaatcttataatctgaaactgctcgttgatagctgccctttttggacaaaagaatttttttatatgttatatatacatatgttttttatctgtcacgtctcatggcagtttttatgttagtatttgctcattattattttttattttcaaatttcatagtttcatgaggaatggcgatttttatgatgtgatcgtggtgtctcgagaactgttccctcttataaatgccctactaatcctctaacttccttctgtgctttggcgacgcactctcgagtataagatccccaattttgaaaatatattacatgctttctctctgctgctcgtttcaacttctctgtgctggatcttattgccttcaggtatatatatatatactctgctttcttaatttaacgatttttcttttttgataattccctctctttgttttccttcgtatctttttgtgccgccctcctttcctcttttcccactgtttctctgttctccgtctcatttttatttatcttttcttcctttcccttttttagaagtggtagaactctgatttttaggagggagtactataacacttagggtttttcgatgatggggttttactcatagttctaggtccgccttccttacgccattcggcctaactctgatattccccctgccgcatcttttcgggggttgtggttttgcatttccctcgttatgattgggtaaaggggcaatttttttaaggctggccttgttttaaatacatttcaagttccgagttttgttttatttatattataatggcgaatgtggattatccaggcacctcctctctggtttctgattctctttcctcgattatagctccttgattcgtcaaatccctgctggtttctgatactcctccgatggaggttgagaatgtcgatgttcctgcgaacccagaggtggagtgcttaggtagcgtttccatcatcccccgttctcgctctgggaatgaggcgggtatcagtggtcaagtcatcccttccgtaggggttaccctagcagttcctccactgaagaaatctaagaagatacaattaactttgggaagttcttatttggacgttaaatcaagctgtccgtcggttttgacacagtcagaactcgattttttagtattgtcttgcagttttctgtcgggagttgaagttagacttcccaacccgcatgagagggcagactcccctcaggttgagtgggtgtgtctgcactcctattggttcgagtcgaaaatcatattaaggctgcccatcactaagttaattaaggagttccttttacattactcaattgctcctgcacaattacttcctaacgtgtgggctatccttttaggtttgattgttttgggggacaaggcgggagttcagtgggaagtctccgacgttgtccatttttattcgttgatggaaaacgagccagggcgctaccatctttgtcctaggaagaatcgagctctcattaccgacttagagacttctcataaagggtggaaggataggttcttctttgctaaaggccc

SEQ ID NO: 218523 - DNA, 8655 bp, Cannabis indica
aggagtattctatttatggcaattgatctcctcttctcctaagccaataaggagtaaatttaaatttaaatttaaaaagaaagatgagagagagagagagaaagagagagagagagagagaggaaaaaagactattatcttttctttttctctctttccttttagctttaaatttcgaattccctatttcaactgagaacacaatttttgaaatccctaattgcactaggagtcgttgaagaacagaaaacagttgttgagattgtcaaaattaatgcccaccttgtagtttcaagagaaacgagcttaattctcgtcatcaagtcaacctcacacaagtataaagttgatttagggggaaaatctttacccagaaattgaccctagtcacatagacaacccggttggatcgggtcgaatacaacccggttggatcgggtcgggtcagacccagctaaacttctgaagtaatcggggcggggcaatgacttctcgggtcggggcacacccgccccatttgccattcctgactagatttgagtatcttgagaaaaataaaaaataaaataaaataaaaacatttcgagtaatatttcgagtaatagggaattattgctttgctgccatgttatacttacagacaagtctataccacttaaacatttaaacaaacaaacatcaaaaatccaccaaaattttacatttccatttttcattcattgacatgtaacaataattattcatgttcaaaaaaatttacactgcacctatgcatttgtgatgtcaattttctaactggaagtgccaacaacaaaaaagaaaaagaagaaaaaaaacaaagttagcggtgtatacttgttagaacagctaagtgagtagccaccaaacattggccgaatttccttcattaaaactttgcagcttgttgataccaccaataagattcctggacaaatggtattcaacctgtgagatgtaaactgaaacggactcgtccagttacaaagaagttggtcgatcgcaacatgcaagtgttctatgaaagtgcaataaatttctgagaccatttttaaaaaaaaaaattataagaataccttcacaagcctgtaagctggaggaccaaatggaaagtggttatgttttttcaccaccaaacaagcatcaaaagccgcctctggtgagagaaattgtaggagttgattcaactaaacaaatctttctgcaatttcatccaacttccactctcaaccagaccgccctctcttccaattccttttcttttctttcccttttattcatatgttcacctgcaattttaatcagcatgaagtccgatacggaagtgtctctaattgaatgcttcaaactcttgggaccagcatgcagagcgctaatgcccaaagggcttactggcagagcaccaagtgtaccatccaagatcaggaaaataaaaaatgtcatgaagctcctagaagcacaacagaattaatagacaaccatctttaactacatctctctctttgccacagccccagaagaactttgcttcttttgaataccatattgccaggcatccctagatttatcacctgctgactgatcaaagtcgtccaaggaattatcaaactgtggtttaaagtgcctgtaacttccattcctagatattactgaggcacttgacttctcttcatcttcagatggtgtgcctgacctagactccatatgcatatcaaatgatttatgtcttggtccagaagaccttaaacccctcatatttggtagcatctttcctggcatgggattgtaagaaggtcccttcagtgccaaaatatctttggggatagagtccatgtccatgtaacagttccgggctttggcatcagcaatcaatgcaccccagtcatcagaatgtgttaaagcatttgcatttcccatgacctgtaaacacatatttagttttagggaaaactatatatataaagaaataaaattgttcataataaagcatataaatcagtgttataaagttaccaggtgcacaatcataaaaggagtaacacaacaatatgctttttttttgatggaacacaacaatgctttaaaccaaaatagaaaggtgaaaatggaaaccttacccaaagagctcttcttgcacgagtgagagcgacattcattcgacggatgtctgcaacaaagccaaccccgtggcttgaagcacgcacacatgacattataatcacatcacgttcttggccctggaaagcatctacagtatttatatatatgtcctttccttcttctgaattcagaacttccccaaacacacgttgaagacattttaactgcagcttgtatggcgtgattatgccaactgtgactttaccaactccaaaagatttcacagttttctgaagatgctcatacatccgaaggcaaatttgtgcttcatgtgtgttttcataagaagcagatccacctctgtgtgattcccgcccatgagtaatgtcaaaaaagatgtaaggctgaagtaaacggtccttatagtaaacctcatcaggtaaattagccacactctcactgtctgtaaggcgtccttggtagaagtaccttgaagggaaatcacggatttgaggatgcatcctgtactgaacagataacaacattgtgggacatcctgctagctggaatctttcgaaaagacttctactgtatagcaaagttccagctgccttgctaataacggttgcagggagctgttgaggatccccaacaagtacacatcttgcagcaccaagagaaagaggaggaagaattgccacttcacttgcttgagctgcctcatctatcaccaccatatcaaacccatgagtaagacgagaaaacaattttcgaccactgctcgagacagtagtaaaaacaacctcagcctcatttgcaaaacttgcctctagattagcacgtgcttcttccaaattgaagttgctgccaggacggaacttcccttctaatatgacaaggcgagacaattcaactaaaattttatctctgccttcaactgctgctgcaaggctctggagcaatgcatcacgattctgatccctggctacgagaacatcaggatcaacaccaactgacccttgggaacgaacagcagcagctgcaacagtaagttctctttgtagattagttatctgtgcagcaaactgagcttcacggcttcttaattggtgcatccatccatagacttcctctcgactcttgaccaaaagttgttcagttctccgctcaacagagacagcctgagcagctcgtgtctgtgaatcaaccccaacccgcgccacatcaggccgataaaccttcatctcaccatcgatgaatccacggtcaaggacacgagcaagaagctcatcagttgcagcattagatggggcacaaactaacatcctaggcttggggcagagctttggaagggtacgaaagagattctgatccatatttagaagaacctcatcaatcgatcccacagtcacatggtcagagctgctttcgttcccctgcttatagctctctggtgcaagtttcttgagcaaagaagtgtaataatgttgatactggacaagatggatgacatttagcattccccagacagtgtgtgtcttacctgttccaggaggtccttggacaagagtaaagggccacggatcttgcttttttgtaatcccaccagtagtaccagcagctgtatgcgttgctgcccactggattgctgctaactggggtccattgaaggtcctgtgcaaatgatcaacaaagttctgcgtgaaacagtctggcatggcaggggtttgctgctcatattttgggaaatgttccggactaggctgaagaattgcagcttgcatctgcacaaaaaggtcagtcaaatgttgaagaaaaacttcaagaaccaaaagacgttataaatgacagtcacctgtgaattcagacgacgaaatgcatgaagtgcaacgtactcccgctgagtagttgcaagagaaccaagcacagttaagtaccaagtacttttaggcagcagttttctcacaatatggtcatcatcatttgagctggaaaaatcaaccaaaaaggatagatgaaaaaagtcaacacgattgctgagagaacaatataaaagtcacaacaccaccacaacaaaaaaaacaaaagaagagcaaaagattgtgaaaaggagcaaagaaaataagttgcaaatcctaaaatacccattaaaatcatgcgagtcgccgatgtaaaagtgaaggatagcccctagaggatcacgagtatcaagaggaatgtgtcgcctaacagtacccgccacacgtccgctgatttctagatcttcatcatcatcagcaacagaagtgttgctacgcttggatcgagctaattgacaaataggaattataattaggaaaacttgactaaaggtctacaatctaataatcaatgaatggaagaaatatattgtccaatatgtaccagatccaggcctgggagatgaaagaatagctacatctccttccttaaatgtccatttgcactcatttgatggaaggacaactacatcataccatcctacaacaaaaagacacatgctttggttaatttagctaaaataaaagcccaaatcacattaaatgcatttaatattgcatgccaccgcggcagaaacattttccaaaaaatacaggtttcatgtaataatattccatcatgcttagagcctcataaaaacagtatgatcacagcaaagcaaatatagcctatatgcttcagctgtaaacaaagatatactttcaaccattcagtaatcgggtgtaccatggcatcaaccaacaggaaaaaaaaggacctgtagactttgcagtacctctttctctcctttcaatgctctttacacggaccattacatgtgtatctcttgatattgtttcacttaattcctcccacgtgctgtaaagctgtgctctgcattcctcaaacagcaaaggctcaaatactctgacatactcctccacagattcaaaccgaccaggaacacattggaggtcagtctcccctgagaataataatttcaactcataaaacaatcaatcaaagagagatcactaaatccccttccccaactagaataagaatttaacgattataaatagagatacatgaaatcatgcaatactaaggaaccagatcaccaaaagaattcacaacaaaggcagtccacataagcacaaaaggaagttatattaaacctaaaaaagcaattgaaccagtaatgaaaacttttcattataataagctggggagtgttataaatcatcaaatattgtcacagcactaatcaaaattcatcacgatggcaaaagtttctatcaaacatgccctgccaatggttagagaacaaactttgaaagggttattccagcactcctgagcaaaatataataaaatctgattgaaatagctaaaataatttcttcaaaaaaaggaaatagttaaaatactaatttgaccaaaaatatttatatttacttgggtagaacacaatcatcacatagttgttgtagtcaaaacaattttaccaaaacttcctactcttttaggtaaaacacaaatcatcatagcaatatatcagatcaaaaactccacgccctttaatcaatataccatgagattgagagcatgacattgacaatgcgaaaaaatggtgacaaaaactacatagtgaaattgagatgttacagtaaaatcatgttagctcaaatgctcgatttcacagtataattttcattaccttcgctagttctgttatcattaagatttagcataaaaaaaaaacaaaacttgtcactgaaaatagcccaaagtttccaagtacgatgaaatataaaggcaccagagaacaaaattataacaaaagattgtacaaatcatacctgggtgatgccaaaacttttcattggtgacctcccgtataagacgctctactgatgtgtcttggtatgcattactcaaagttgtttgcttcttggctggctgcggctttttgtttccaacttttgagtccatggaattataacctgaaagcaatggcttcctatttgaaccctgcaaattcttcggttgccttgtatctgtaggctgcttccatgaactctgtctaggaacaggtggcaaggcctccatagctgcatcactgtcaccagcaatttgcttcctagacttaacaatcccagaattgacatcaccgttggtttcgtattttgattcactcgattccaaaggatttccttcttcgccacaagaggcgtcaacttgtctatgttctttcagtattgattgattttgcttttctacaaagcgctccacaggtggaggagctgtacgggtttccttcactgttctagttccaatagctgaagagaaagcttgccttcgaggcgttgaagatttaatagaaccagcctgcttaacatcttccaaattaagaaacatggtctgcctactacgtttctttcccaactttgcttcatgctgctgatctatcttcctcttcaccggattatttgcacacttaattgcatgaattgcttcaatacccttaacttcccgttgctttggaatacaaccaggctcctcttgacaatccacagatacatcatcagtttttagactcccttctatgttacggctgactttcccactttcatcattagcaattggatctacttctaaagacaaatttttgatactttcatccttggcaatttcagaattttttacacaggacgaactaccatcagcagtagcaccagaagcaacatggtccattgctccagacattacctgctcttgtgaaactttaacctgtttatccatacgtctacttctatatactacggcagaaccctcaccctcagcatcagaccattctccttcttctctttctgttggtggagcatctgaactaccagaaacaggtactgctttcatatcctctttatttgacttagaagtagagggattgttggaaatctgatgtctcatcttctgttcaatacccccttcagggccatgggcagacctgggtcgaacaaagggttgaaaaccagatacagatgatgcgtgagaaaaagaattcttgtttgcatttcctttggcagtagctgacactgctaacctttccatagtctcgggatttgcagatggaagggccttctgtggctggaaacgtacgaccccatcgctgtcctcattgttatcctcggaagggagttcgttgagatcaaataaaagctttcctcgagaacccatctcatatgtaaatacatacaaactaaacttcgtaacgaacagtccaactcagtgccaactagctctttctgtcaaaaaataataaggataataataataaaatttccaaaattgcaaagcaataaatttaagtaaaaaaaaaatctcatgaacctgattgagaataagaaattaaaagaaaaaagtatgaactggcactaagggtttatcaaactaaaacaaggtctgtcagatcaccgagtaataccatgaacttcaagtcatcaagtaaaagaacttttcgggaataaatttaattttactatgtatcctgaatgatataacaccatagaatcagtgataaatcaaagtaaaaaggatatggcatacatgtatgtaactaagaggaatgatatttgaccattgcaacggcaccaaatagcacaatgcagagtaaggcccaatacaactaagaatattagtagagaaaaccctaaaagcaacatcagtaagcgttataatcccttaaaaagacgataaagtagatgaaaatatattgctaagaacaccatccacataacactatcatcactaacaattattcaatcaatccaataaacaaaactagatcaaaagcacaaacaacccctcataccgtccacaatttcaatcctcgcaactaacctaacattcattctagggatttcgacacacacacacacaatgaaaaggaaaaaaaatacttccataaggctccacaatccaatcctcgtaacactaattcatatgcccagtcctcaaaaccacaatccacacaagttctacacagatcgaacccaaactaacttattcaaattcacgacacacaaagtcattccaataagtttaagcattaatctataatagtcaaacgccaagattaaatattttcttcaatctcattatccatattcactgatctttctgtatgataaaaaaaattaaataaatttaggggaaaatactgtagctaacggaaaatttacctctttaaatagctttctcgtatagaaaaattagaaggtgaagatataaaataatatttgatttagaagttatagggttgagttaagagagagagagagcaaagccagagagaaagaacctaaaatgaagaaataaggggcttacttacgggtttatataggaaatatcgagccactctccccggccgggtttttctccgttcgtcggccggtctaattcattaatgaaatccccaaaatacccatctttctaaattgatttgtttagaatttgtgtgggcaatgtcggtagttt

SEQ ID NO: 218524 - DNA, 2606 bp, Cannabis indica
cgcaccgcaaacacccctagtccaatattgctggcagggtcacgggaacctcaagctcgaggtttggaccaacgttagaggccacagtggccttgatttcatggcagacaactagaggcagcttgttgaggttcagccgatagagataagagagcaagagagggagagttcgagagagagacgatatccggtgttggcttcgactgggcttgttgggaattatgggattcgatctcaatttatgaaagcacctttgaagtctcattgggttgcaattaagcgaattctaaggtacctagctggatcacttcactatggtaatcttgtggcataactgaaattacattgttgcagtctttaatttcaaaactttacattcccacatctgtaactccaactgtgatgatggctgctaatcatgttcttcatgcccgcacaaagcatattgaaattcacctttactttgtgagagacaagatccttttagcttcaagtgaagcgttcctacaactgaccaaattgcagacactctcactaaggcaatttctagcactaggtcccgtttcgagacaaacaaagtgtgttctcaacttcccacacttagtttgaagggcggtgttaaagaaaaggagtagttagagttagttataggttagtttctgttatgaggtcagttacaagctgtcagatctaaccaactcttagtttctatataaaggctactctatttatcagtgtaatacaattcttcaatcaattagaaacaaaacactgttatttagctctcctcttcattttctttcaagctcacatttattaaattgtgtatggtgtatacattttgtgttgaaatggtaactgaaaactgtcttcctgccaccgctggtccgccgctgtctagacaaaacacaaacgccatcaccaccgctgattggataataacgatgctcctccagcatcgccgtcgggttttaatttcagcaatgggtttgatagtggcagcactaacaacttggccaatatgatattagaagctctagtttcaagtctttttccttgctttcatgtttttttttaatgtgtttttttttatgttgattggcttctaattgcaagcatgatacctacatgtttttcacattcctacaaatatacttgaaaagaaataataatttagcaatattaaagagatatgtattagttaggtattgaaattgtaaagttttttttcttctttttttcttctaatcagccatttacaaaccaatcatcattcattttcaaaatttcaaaccttttactttctatatcaatgaacaagaaaaccaaaagaagaacaaacaggatttttactgtccatagaatagtgtaccaaattgatgccttacatgtttgcttcatctttacaccccttattactatctactcaaaaatatctaacagcattcaagggaaaaatggaataaatttcacattcaaagttaatacgttacatcgttcgtttatagattatgattctgtaaaattaaacacatatataaacttatatatttatgtaattacaaggtttatcattgttatttgcactttattgtacaaaagataacacaacaaccaaacagtgaaataattacatatataggtattaagcctaaaccttgtggagttggggacttgttggagactttgaaggttggtcatccacatgaggatgttcctgctcagttgaagaagctttattctcctcctttgggacattgtcatcacttgatgctgatgcagctgccttgttggtgaccctgctgaaagcaccagtcacccatgtggcccctgttaacacatacctgttcttcatgatggcagagccagcactgctcaccttctgctcagcagcattgaaagccgacttggtcttctccgaaacccgaaacttgtcatccatttccctcactttctcattcactatgcttgttccaacactgattttgtcagtgaaaccaatcttctgatcaagagagacaactttggccgtggcagtggatgataactggtgcttctcatcaaatgactttgcctttcccaatgcatctttgcccagagtgaaccctttggacagcatgctcatcaccacatcctctgctcttttcacagcagattgatcaccaccaccaccattaccaacaccttggtttgtttcctcaacctaatcaattcaagaaacaagtcaagtcaccaaaagaaacaaacctataacatatacacacattcatgaagaatagagggggaataatattactgttggagtgggggaaacaagtacagaagatgggagtttatactctggagctagatcaacagtgacaggttgatccactattgttgctccctgaaagagacatttatacaaacatgatctgatcaatacaagtaaacccttttattaatgaatgaaaaattaattataaaagaaaataaaaaatgtgtatcaccgaaagaagaacagcagtttctgctcctttgggatccttgaaagtaacatatgccacttgagaccgttcattctcgctaaaacatatttaacagacatataattatatcagaatata

SEQ ID NO: 218525 - DNA, 4741 bp, Cannabis indica
tttcagtaccagttttattattccgcatttaattaatcttttaattaaataatcaaactgagaatattaaaatacgaaatttaaagtactatgataatatgataatgtgaagagacatattatgattgctttttcttcttcttttatcttttaattaattagtatactcatacataaatgttgttaattaaatagaaagtgtggatgaagaaatgaaaagttttatgaaataaaaaaattattaaaaatcaaataaaatttaaaaatttgagaaaacaaataacaatgaataaaacttgtagaagatagataaatacataaattttaaattttaaattttttggttaaaaaaaaacgtccactaacttatttttactgttattacttacagaacactgaaaaaaaaatgttttaagacaaataatttcactaaattttatacccaacccactattttatagttgataaaatagcatgtttacacagtgatgcagtactgtgattaaagtgcccaattaattaaacatctcaataaaactcatttgcacactataaaatgatatcacacctcggaagacataagtagatacaaatcattttacctccacactgagaataatatctatcataaagagaaaaggactacttaagttatgagtaatgttaaactgtaactcttctttgaaaacgaaaggtgtaaaagagaatccttgcctactccattaaatataatattaagagaatcaaaagactagccaatacatgatacaaaacttggagaagacatcttcaaaattttcttactctcaaaaatcgaattacaaaacgctgtatgactcttccataaacattctgtaattgttttttcattttaatttagttctcttagactttttgctggggaaacgttgctgtacttctaaattaacctcaaaaagcatttgcgaccatagcccttcaaatttgtcactactcttacgataactgacttgaaaccagtccaagacttctgaatataattctctgggattctcagtccatacatttcctaacttggcacagctatctatgaacctcttctttaacttggcaagtaaattatccactcttctctgtcctgatgcctcaactctcaaaatgctattaggaggagctgccatgaaatttttgacattttttaagcatggcaacacctgcccatcaagcaaggcataagcaaaggctacaagtctttggttactatcagtaataggtgagctaaatggtgaaagcacccataaatgagggccaaaacttggtatgagataatgcaatacttggtcagttctaggatcgtaataaggtttggtatcttctgagggtgtagagaaagtgcattgagaacgagcatactcgacaagccattcagattttaccctagtcactccgtgcatgtatggtcgtttcgtttgtagtagttcgctgtaaactacaaattcaggggctgagtttgctacagtcgaccaacgatgaaggaacacagattctttaaccatgcaagactggtaccgatttgcacgaattcgttcttcgccttctaatgactttgaatttaatcttaagcgtttagcaactctatctgcccaaccagcacatatagcttgacccaagagctcttcctcatacagtgaaagagggtgtttattgtaggactggccccatgattgttctacgtcttctaaagttccatacgtccatgagaaatcttgctcaagatcactatcactgctatgactaaatacaagccgaagcaactgttttctcaacttggacatttcctccatagttttgagatgtaagcaatagtcatcgcagaattcggttggactttcagcaagctcaaaacactgcagtgcataggctacagacattgcatcactactaggattagagaatttttcccgagacaacttacaagcttctttgagtttcttcttccttaatttttcttgcttattatctgtaattttgttgttctctgaagcatcgaaacttggttcctgctctaagtcatttttattagtacgagtctcctcaaactgtaggacaaaaggatttgacaagctcaaagctgcagctgctgcaactgcatatgctagaacaagatttggacgagaatcgcttttcttcttctttattatctgaatgacagtaaggagcatcctagagtgacgaggactcatggggtaacgagccatggcctttcctaaagctgtcagtttaccatcactatcaagtgcctcaagaaccttcaaacaacgctctgcttcaaccagggcagacttctcaggaggagttgggaatggaaaattggcaacctacgaggatacacaatcagatcaccatgaacaaaaagtagaagtggtatagctggtaaaacaaaattttatttgcaccttgtacatatctcattaaaattcatttgcataaacaataagtaacagcttgaatattagaagtatggtgtagaacactaacacaccttatcaatacgcatggatttcatgagaagaacgacaccatcaacaggtacttttaatatttcggccagcgaaaactcatgaaatatattgttgaacactgcagaagaatatagacgataacaatgacctggagcagttcttccggctcttcctgcacgttgagcagctgatgccttacttatccactgaatttcatatgattccatgccgctggaagagttgtaatttttcactttctctcttcctgtatcaacaacatactttattccaggaatagttaaagaggtttcagccacatttgttgccacaacaacaagcctctcgccttctttgacatcttcaaatacacgtaactgtgctgctgcaggcaacatggcatacaggggaagaacacacagaccaccaacacaaaaaccatttctggctccatttgtgctcaccttgttaggattggattgctctaagcaagattcctgattaacaaattcaggtttttgcccattagatttagcctttgatgcagtctgtcctgataaagcatcaaaagcagctttcaatgaatcaaggttcccattatctcccaacacaagtgtggagtcaatttctgatgatttctctcccagtgaattttcattttcaccatcaaattccaagtcactatctgtttctgattcatatgaaaaatccaactcatcctcatccatattgcattgatcaccatcatttaagctaaacacgtcggtttgctcctgtgttgaatttccacgagtatcaaaagcatcattaatctcttccatgcttattccaccaacagatttaatatcagtgtctgttggatcagcctcaacactttctttggatgctttcataatcagttcttttgaagctctacgtagcttttggcacaaatactctacttctctctgcccagtgacaaacaccaatatacctccttgtggaagattcttgtgaatagctaagacttttttgtatgcttggccaatataatccacaatctctgttctttttgagaagtgtgtagtgactggaaactgtctcgtaggaacatcaagcacaggtggaggaacacaaaataacctattaccagaaatgaagtcctccactcgcaaagtagcactcatcagcacaacttttaaaggaaagacctgattttcaggacttatagtttgccccgacagcattaatttttgttgttgtgcatatattttctgtttgatgatataggtaacacaaataagaaaaaacaaaggcacaaacttaactaaacacaagtaacaacataaacataacaccatacctcacggccttgaatgacacgtgatagcattccaatcagaatgtctgtattcaagcttctctcgtgagcctcatccagaactatgactgagtaatgccttaacaaaaaatcattctgcaaaataaaggatttttttaaaaaaaaaaaactgcagaatacaatgcttatggtcatattttcacatgtattttactgaaccaaaaaattgcatgcatttctcttctaaaccaatcaccacacgtgtaagctaaaatgacataagtgcaaatgaaaaaagaacagtaaaaaaaaataaggtaataaaagaacctgtagttctcgcagtaaaatcccatcggtcatgaacttgattgagcaattttggccaatcttcttgtcatacctcacttgaaacccaacttgtttacccaaagatagaccaagttcatatgccactctcttagcagtggcaagaacagcaacacggcgtggttgtgttacaccaatagcaccaccacgagcaacatattgttttgaaccaaaaccagcttcataaagaaactgaaaagtgcgaaagaaaaaacaattagatgcttggaattttcaagtggaaattcaggtcttgcataaaaatccattcctcacctgaggaacttgtgttgttttaccacacccagtctctccacatataataacagttagatgatcattgatagcttccattatttcctgctccatcatgacaattggtagatccttcctctttttctcaacctcatctggcctggatacatgcactacagttggttttgtattactgagactgacttttgtgctctccattgacctgcctggcactaagtcaacctgccaagattcaattaaagtgaaatcatcataaaataaaaagcaaaaaaaaaaa

SEQ ID NO: 218526 - DNA, 2129 bp, Cannabis indica
ttgtgtctctgcattctctttatgaatcaataataaattaaattaaaaatttacattaaaaatcctgaaatcacatgcagctgatggtgttatatgggattgaagtcctgaagtcacacttgccagagcaccacctgttcacaccaccacaatgacattaacagttagatatcataaaaagaaaatattttcttggttagatcatccaaattaggctggagttttttctccctatatacctagctaacctagtgtttcttcccactatatatgaatgtgaatgtttaattacagctttgtacagtatatatacataaaagtacggtacataaaacaaaaattagtaaaatctatttcaaagatatgtacaaattcaaatatatatatacataatattttagttgctcaggtaaaggccaatctatatttaagcaaaagttaacagaagtaagcattgatacacatacatataagccaaaagtacttagtcacggtctctccctataaactcactatttatataaatatttatatacactccattattgtatatacgtatctacattttgagggtcaccctttatcatatatatatatacacgtaaaaaatttctcttaattatttctttcccactcaaatatcacctctctctctctctgcatggtctcatattatttcatgcagaaaatgcaaaccgtaattcccaaactacccctcgtcctcctcctcaaaccattcctactctccctcttcttctccattctctttctcactcttctctcctcccaaacgccacgtcaccccaaatccaccaccgcttcggccggctccgacctccgaatccgacccggttacaccacctacgaatcctacatccaccaccagcttaacaaaaccctcaacccaagactccgcaaaatatggaccacgcgcgactgggaccggaaagtccgagtctttaccgcattcttcgctaacctcacgcgccgtaacctcctctcaaactcatccaaatcgctctgtatcggggcccgcgtaggccaggaggtttcggcccttaggcgcgttggcgtctctgattcaatcggagtcgacctcgtccctcacccgccgctcgtggtagggggtgacttccacgcgcttccattcgcgaacgagacgttcgagttcgagttttcgaacgtgttcgaccacgcgctgtacccggagaagttcgttggggagatcgaacggacgatgaagggtggaggaatctgcgccctacacgtgtcgattaataataggggtgataagtactcggctaacgatctgtttagtgtgggccctttggttgagttgtttaaagagtctgagcttgtggaggttagacccgtcgacggcttcggcctcgatactgaagtcgtttttcggaagaaaattattcatcaataaaatgttatatattattaattgtaatatttattctaatttcttatgttttagtttaatgtatgatgattgtactgaagtacattaattagttagtttcatatatgatctactagagacagattttaactgttatatatttcatttataatttatttatttgtcatcattttatcttatcttatttacccaaaaagatatcgatccttccaactgactatattattgaaagaggagtgttggtatatatgatatgcagaaagaaaaacgagtgggaaataagattgatattaatggggatattataattttgagatattgtttacttctatcaaaatagcgttattacatggttttctagtattgctaaaattgatataatcacaattgtgccatgtaaaagatgtaaaggagatgttgagaaattagggtttcatctcaaaaatacaattaattataagaaagttttatataggcaactaacataaaataaaagactaaaataaaaaagataaaaatgttatattattattagataatataatacatagattaaatatgtgtaataaactaataatatgtaacatatgacaatttatattatttgtcattatttagatctaccattatcaccaatattaaaagtgtgaaaggtgtacacattttaatttgaaattcttaactctataggagttatggt

SEQ ID NO: 218527 - DNA, 5769 bp, Cannabis indica
atatatatatatatagtacttaacaaaagtttgaggcatatatatatgacgatatagtttcttttggtagggaatgcatatgatatatagttaattataataacatgcataccatgcatgtttgatgtactgcagtaatataacaaaataatgatacacacatatatatgtagtgtaaatcaagtaatatagcaaatgtgattatactgccaatcaataatgtcgtatttggaaatagctatctacctgatttgcttcataaaatcttagaagttagccccaatatagctgagaattaatgtagtgctctatagagatatctttcggatcgaaagtactagtccaaacagattataatttcgagtctttttttcaaagctgggtaggtactaatcatggatattaaagagattaatggagttcgcaaatcatttggaatacgaaagaatttctaaaaatcatgaccttaacaatcggcacgattgttgcttcttgtctgggctactttaacaataaacgacttatggccttacatgaaaacatatagtgttgctactaatatatttatatttattataatatccatatcatatcaaaccatatcttattataaattaatttattacttctttcccttatacagtataataagaacgatcagacacaaagaagtgagaagagggttcgttcttaacccaaaaaatagcatcattcaaaatttcagagtcattattattgattgatcacttattattattatttgtcttttgagaagaatttatcacttattattaattctgagacttactaaaaaggctagctagttgatcattcatatactaagactttataatgccccttgtaataggtaaacctggtcaaaatctagaacaactatgtaagtaatcatgagcgtaagtaattaaggagtagtatgttttgattgaaaatggtaaagatccataattataagtagagatccaatatatagaaagtatacataaaatatctctctcatcatatatatatatatatttattaaaaatcttcctcccgactgatgatctatttccaaaacaagaatataaggcataaacatgagtagaaagagtactagtacttcttctttcataaacatatatgtatataatatataaatatatatatacatacagctactaaatcataaaaggttagcagcaaaatctcctgcacgtgtagctgcccagctttacacgtacggattccacatacattataatcagctgcaaaaatccagtggtgggcaaagaaggtaataatagaagaaccccttctcccaaaaaacaaatacccaattccaaaaaaaaggcaattaagggtagcaaaaatcagagaaacacacagagaataagcaaaaatacaaaagtaccagaaaaagaaaaaaaaacatacccgtacctttttggtctttcaataccatcattttgcatcatatttaatatattgatgccttgaatctggatcatttaactggatgatgatccataaatatataaaatatatatgtatcatcaccaccatccatcagaatatataatgattttgtgcgatatatttattaagtatagctccataaacattctccatctgaatttccaggtgagtcatcagacgacggcgtattgatccttggtggacttactagcattccctcagccatattcactagcaaattcggcatattcaaaagggcttcctcatccataaactcacccccacctgaactcaactcactattatttgcagtagtactcgaacaactttccccattgatcacccaatcgtctacagctttcgaactctcctgatccccacagtttttatcctgcttattcggtatcggcttaggctcggcttgctgttggggttgtttagactcggctgccttagccgccgccgcacgaatatcggcggccgaagtagaagccggtactgggtaagaggaaaccaaatcagggaagttcaaggcagtgtcgtggcctttcaaggcgagcgccgcaacgtcatatgctgcggcggccatctcgggagtcggatacgtaccgagccaaacgcgtgtcgttttctttggctctcgaatctctgaaacccatttcccactcctacaacggattccccggaaaaacgggtgcttcctcaccgaagcagaccctgttcgtggggaatgaaacgggttttgcgggggcgggtcttctgatggccgggccgtaaccgggcttggtagttgattttcagatgatattgggctcagctcagactgtgggattactgatggtgatatggatgggttgggtggttggtcacttttgggcaagtctgttggaggattagccatacgacttcatatacaattatttatatatatagtgagagaatgtcacaaatggggtcttattctttcaaatatttatatatatgttgagttgtgagatttctaaagagagagagacagagaatgtggcaaatggggtcttagtctttcattttatatatataaataatatatatatatttttcaattttagttgagctataaagtgaaacagttagggtggagcgtgggaaaaatcgcggaccatttttaatattaagtgatgtgaggccgcagtgggcacacgtattagccagccttctataaattataaggcgcaagcttagctagcgattagctgtaatataaccatgtacatctcatactctcggctcggtcgtctttcaatatgtaaacaaaatatactacttagtaattggataaataatatttaattcaaatgttgaaattaaataaagaaataaagatagatagaaaaaaagaacaaaaacgaacaaaaataacaataaaataatatatataaatattaggttaattgagatatttagaaaagtatcccgattatgaaatttaaatatgctagtttaatttcatttaattttattaatatatatagtaatagactatgtatcaaattatttttcttaaattatgatatatatatatattaaatcatgaacaaaaacttttaacgaattaaaactttaaaaaatataatttagtatatgtaaaatttacttgaaaatcttaattagcataaatattttattatagtagaatagaagatatcatcactaacaacttttttgaataagtttttgtgttgattgtacatatatagtatatttgagatatattatttgtaagtactgtagctttgacaacaactattctagattcaagtcaacttgacctaagaaaaggttttttaaaaattaaaaaaaaataaaataaaaaataagaagtaataactcccatgttaaaatttacttcattataattttaaatggttgctttttaaaagacaataaaatataatatctttatttgtttttagtgtaaattgaattatctttctcataattagtttggatgttgaaaaattatatcgtcgatatagttagcatattaattgattcaataaaaaaattaataagaaagaaatcttctctgtcagtacattttttattcaaaaatatgtcaacataaacaggaaaattaatggaaaataagatgtgtaaatcgatcacaaaaatatattttttaagttgggaagcagcaaaaattagtacgtataatgtaaatcgatcacaaaattatacatatttttcttgtttggttttaattattgcttatttattatttttgttggaataaagctatatttgagttagtttgtcataactctagctaattaatcgccttgatgagctaatgttatttatttatatttatttttctgaaaaataagccaaccaaagcatcttcctaaatggttgatcttgacatacatatatacatcaatgaagttgtagaaattaaaaacaggaaaatccataccattaccaaattaattttacaatttcaatatatcaattataaaaagttatgggcataacactgtggatactaaatgtttgttgggaattatagttgtgcattccagtaaatttaaatcatgcccatatgtgcatttatgtatgccacaaaaataataagacatttttcaacacaccaaattgaatcaattatacacaacatcaaaattctaacccaaattaaattattaaggttggtggaattaaattacaattactttatcatatctctctcaagtctaaataaatacataaaaagttccccataaatatatatatatatatacgaaattaattaaataattcaaaattataaatctttatttgtattcattattttttttttcttaattatgattactttttcttttctttcaaaactatttagagattgaataatattaaccaataaacaaactagagattgaaatgcctcccactatatatgtgtaattctattatagagcattgtactctagagaaaaaatcaatgtcattatgaactgttatataaattaaagagggatgagtaagtagtagagtactacatattcttagctacatatatatacataacaccactattcaccaaactagtacttatttgtaattttatataaaactttgacttgtattttaacacatcgataactacagaaattaaaccatgaccatagtggatatatattcactgcaaaatatatacagtttattacctcattatctacaaataaccaaaattgataaactcagcaataaatacggcttttttcgttggaagcatcgtaatgagatggaggccttccacagtcaccatcattcgtcttaaagttgctcacatgtaccaagtttaacaaatgtcaaatcactatcataaaatatatcttttatctttcattaaaaaatatagatatatcttttattttatttttccaacttgttattggccattttgacaacaattatcatctaaatccgaccctacgtaccattctcaatcgatattattagtgaacgtttttttttaattagtgtacttaatacaaaatttagttttaaaacatagaatttatacaaccttcattaaggtaaaaatgtaaattgaaaaatttatttaaattgtatattaagaaaatcttattatattttaaaaacttttcaaaatgttaattaaattagaaaaaagaaatacagtcaaaaaaagctttacaatttattgaattttctaacaacaaagaaaacacatcaagaggagtagggagaaaaagaattctatttaatttgatttaatttatttttaaaatataaataaaattaattagtagtagtagtaaggatattatagatacgctatgaaattatcctttgttataatcctaataatgaatgatcatatataaattaatgatctacattgagtagggataaatttaccgttacacctttaaatgtattttatccttaaaacacttagctaccgataaatgatatttcagtaaactaatataattattgaaatgagtactcgaccatttatcttcattaagccaaactcgaaggaaatcatcattaatttcacttttatattcagattgaagctatagatttcatatctatgtttagcgctcccactcaattaagctaccatgttcttaatctatatctcacgagaagatccattggttgactttaaggaacagattgaagaacataaataatacaactgaactagaacctaaccatcttaagattaagataatttgatctaagatcaactaggtgatattgaattagata

SEQ ID NO: 218528 - DNA, 7223 bp, Cannabis indica
ttttctttttgtttttgtttttttttttttttttgaatttttgagtgttctgtctaaattcttaatatctttttaatatgaattaaagaaactagaaattatttagtttttaatcaatttctgcgaagaaaatggggacgaaaaggtttatataatagggaaggaggaggaaaggcgtgttaaacctcgagcaagtttcggggatcaaaacgaacagatctgatctcaaccgttgatttagagagcgagagaaaagcaaggcaatggtacttttgaaagatggaagtgcgaaatttgtgtggtcgtggggtgggaaatgggaattggattcattcgatcccctccctcctctttttctttttcttacttaagcctccattagattagaggctatatttttttaatggtgaaattttaatacaaatcaaataactattttctaaaattatttgtcagaagaattttttacaaaaaaaatatgtttaataacttattgtaatttctatatgacatttctccagttttcgtttttatataatattacaattggacgatagatttcaattggggatgtagctcaaatggtagagcgctcgctttgcatgcgagaggtacagggttcgatcccctgcatctccattttttttcaactataataattatctgacaaagttgattaaatgtgatatttattcttctattaaatattttagttgactaacaaattgattaaaggtgatagttattcttctattaaatatttcagttgcaccaacctgactgatcatttattttagtagtggtagcgtttaatgattgtgtttattatcacttcatgtaggtttgtctaaaacattgtatgttgcacaaaaagtataactatactcaaatactcttattgtttgtgtagggttatatgtatttacattctcttcaattgaattatattgtctaaagttaaagaatcttatatattaattttaaaaataaaataaaaatattttttattatctctattaaatgttaaaaataaaataattatttagaataaattaataaatattaaagaaatagtaccaaaaaattcccttttattttagctaaattctaatttgtactctctcttaaaaataagaagcgagagagtacagaaaaataggctcgcccagttgaaacaagaatattgaagatcattgacaaaactacagaggttgtaaaaaactgtttcacaactagagttgggtatatgctttttgaggtgcactttttaaacctttaaacatatgttgttgacttagaaaaaaaaatatgcaattgtaggagataccaacttcctggaatctcatatggtcatgcgttgtattatatatatatactggtgaggggtttagaagttatggactttgtccatgattattacaaaaaagatgcatttttgacagcatatgaaggaattatatatcctatgccaagccttgatttgtggccagaaaaaggtaagaatccaatttattcaccaactccaactaatttacctggtagaccaaaaaaacatagaaggagagagaaggatgcaagtgcaacaaaagttagaagatttaaacagataaagagttgctcaaattgtaattattagctgatatagttgtccgttaagttaggtttagttagttacaaagttagttaattctgttcctatatagtcagttgtatataaggttgttagaccttttctttagcttttctttctttgctttgttgtaattcaaaattgtaacaaactcatctaatataaatagcagagccttaatcataatgaattgatcaagcatttccaattcttagtactgttttctaaactaactgatttctataatccttcatggtatcagagcacattgactcacgtccatggaaatagcttcatccgatgattctcaaggtcatggttctgccatgtttggaaacaacaactatactccggcaagctctgctacaccggcaacaaattcttcatggaatccattctcaaattctctcacatcatcactcaccattaaactcgatcgaacgaattacttagcttggaaatcgcaagtcgtaccaacggttacaggacatgatcttgatgagattttgttcagcaatgttcgcccaccaactactctggttactggataagcaaatccggccttcgatcaatggaagagacgtgaccaactcttgttgtcatggctaagatcatcaatgagtgaaggcattcttggatctgttgccacctactccacctcctttgatgtttggagatctcttgaacaaaaattttcaggccaatcaaaggccaggctactgcaataaaagggacaattaacaaatattcagaaaggtaacatgtcaatatctgactatgttgataaaataaagtctatttgtgataatcttgccattgctggatgtgttgttaatgatcaagacattgaattgcaattactcaatgatcttggacctatgattcagtggtctctaaaatcacttccagcaatgaatccaagagtcttgaagaaatccaagccctgttaatggcccatgaatgtcgactcgaaaggcaccactccgtttctgatatcaacaataaaatggctgctaatcttgttgttggcaattcaagaaccgggtacaacaacaacaggaataataatttcagaacttcgtatcagcaagggcgactgaattcgaatgaaacagcaagaaactcaacgaattttcctcccagatatccaaactccaactcaagaccgatttgtcaagtttgtttgaagattggacatactgcattgatctgtcactataggtttgacaaacattttgttacaccaaagaacaactttcactctccaaaagcctacattgcagaacaagaatcacctgaagttaatgaccctcaagcctactcaactgcatctgttccagaatttggtgatgatataagatggtatgtggatactggggccacaaaccatgtttctcttggcatggaatatctagacagtgctacaccttatcaaggatctgagacattagcagttggagatggtaagcaactttatatatctcatattggcaaaaaaatgcattcactctaactcctctccatctctaaaattaaaatctattttaaatgtccctgctattaccaaaaacttggttagtgtctctaaactcacccatgataacaatgtatttcttgagtttcacaaaaattgttgttttgtgaaggacaagtacacggggaaggtactggtttgagggaaacttaagagcggcctgtacgttcttgaggaaaacagctcaaaattttcacaagctgccattcaatgccaattagccaccatttcaaaagcaaatctgtcagtggaagctccttctagcagtattaataatgattgtaaatctgattgtataatcaatactatgagcattagctcaccaacaaattgtaacaatcaaatcatcaataaagattccatttcttttgaatttgaatctcaagcattgttaactactgctggttgtgatgttaatctatggcatagaaaattaggccaccctgcaccaaacacattaaaacaaattttatctagcctatctatccctacctccttgaaagatctacaattttgtgatgcatgtcaaaagggcaaaagccacaaacaacctttccctctgtcatatactagagccactaaaccattagaactaattcatactgatgtgtgggggccctctcacactccatcattagatggttttaagtactacattcattttatagatgattttagcaggttcacatggatattccctcttacacttagatctcaggcttatgatgtgtttacccaattcaaaaaactagttgaaaaccaattttccttatctattaaatctgttcaatctgactggggaggagagtatagagtgtttgctaaatttttgcaggaacagggtattcattttcagcatccatgtccacattcacatgagcaaaatggtcgtgcaaaaagaaaacatcgacacattacagaaattggtcttacactcctagctcaagctaatcttgatatgtcatactggtggcatgcattttaatgtggagtgtatactatcaactgaatgcccacaagagttcttggaaatgaaagcccctatcaatgtttattccaaaaaccacccgagtatcagtctctcaagacctttggatgcatctgttatccccacctcagaccatacaactcccacaaactaagttttcgatctgaagcctgcagatttctgggatattcaccaaatcacaaaggtttcatttgtgaaagctctacaagcagaaggtatattgccagggatgtcacattcaatgaacaacaatttttgttccctaccaatccaacagcaacaaccacaacaccagatcctgcatctcctgccctttcatctcaactgcccagtcacaagttcaccactgtcatgccatctgctcatccagaaaataatgacccatccatctctccacttccccctgatcaaagagcatcaatcgaccatcaacaacacactacaagttctgcttcttcctctgcagttgcatctgcaactcccagcagttcacaacataatacagaccccatcactgctgctacttcagaaactccacctcctgttcgcactcatgccatgactactcgatctcaaaggggcatcttcaaaccgaaatcatacatggccacaaaacatcaacttccctctagcttgcttccatatgaaccgagaacattaaaagaagctcttgctaaccctcgatggaatgcatcaatgaatgatgaatatgttgctctcaaacgacaaaatacatggacccttgtcccttatacaccaaatatgcaagttcttactaataaatgggtgcataggataaaactaaatgcagatggtactgtgaacagatacaaatctcggttagttgcaaaggattttctccaaactcatgacatagatttcgaagacactttcagccctgtggtaaagcctgcaacagttcggacagtcctcaccatagttgtgtccaaaggatgggatgtcactcaactagatgtaagcaatgcattccttcatggcacattaaatgaacttgtctacatgcaacaaccagctggttttgttgatgcttcttatcccaatcatgtgtgcaaattaaacaaggctctctatggcctcaagcaggcccctcgtgcttggaatgacaaactcaaaatgaccttacaacaatggggattcactcaatcaaagtcagacaactctctctttatctatggttcgggttccacacttgtcttgcttttggtctatgttgatgatctgctaattacatcaccaaatactgaactcaaacatcaactcatccgagatctaagcactcatttttctctcaaaaaccttggctctttacattatttcttgggtgttgaaattgtacgcaattcagttggcatgtacctctctcaatcaaagtatatcactgatctattagttaaacttcatcttgatggtatcaaaccgtgtgccaatccaactagttctgctcacaagctatctctcactgttggagatcctttccgagacattcatctctaccgaagcaccattggtgcattacaatatctcactctgaccaggcccgatgttgcgtatatcatcaataagttaagtcagttccttcatgccctaacaacaactcactgggaagccactaaacgactgctacgatacttaaaaggcacactcacagagggtcttctcatcaaaccaacaccctttcttacattgtatggctactcggatgctgattgggccagctgccccgatgatcgtcgctccactggaggctacaccatattcttaggaggcaatttgatctcctggtccgccaaaaaacaggctgtggttgctcgatcaagcacggaaagtgagttccgcgccttagctaatgcaacatctgaaataaaatggcttgtttctcttttgtccgagcttcagctcaagctgcacgaaccaccaatcctttgggttgacaaccaaagtgctgcggccctcgccgccaatcctgttttccacgcacgcagcaaacatatcgaaattgatatgcactttgtccgtgatctcattctcgccaacaagcttcatgttcgatatgttccctccgttaatcaagtagcagacctcctcaccaaggctctcacaaccgatcgttttcactatctcaaaaccaaactcaatgtagtcaccactccctttcgtttgaggggggataatagctgatatagttgtccgttaagttaggtttagttagttacagagttagttaattctgttcctatatagtcggttgtatataaggttgttagacccttttctttagcttttctttccttgcttcgatgtaattcaagactgtaacaaactcatctaatataaatagcagagccttgatcataatgaattgatcaagcatttccaattctcagtactgttttctaaactaactgatttctataatccttcagtaagcaatctggccatattcgacttacttgcacaaactccaccgtaaatgaggtatgtcatattttattttaataatacaacaaacacttgagtagaattggttaatgatcaattgtgtaaatgcagcctcgtcgtgttaagacgagaggtcgtccaccaactgccaatccaactcatgaaacttcaagaggaaggagcggttgagaaagcaaaaagctaaacaatcttaagcaaattccacacctgtaattaggcaagctgcaagagaagaaggcagtagctcacaagttatctagatgatactctgacaatgctttttgttttattttgttttattttggggcatatatgctcaattagaaaattgctgagttatagtacaaacagcataatgttagtaaattattatattattagtcattttttaattatttatttttagtttatattaatcaaatgaaaattatattaaaaaaatgacatggcctattattatgtggcaatattaagtgacgtgcccatctgagtagaagcctccgtttagtcattaacagcaagtactattattgctccattttcaaaacaaaatgtattattaccgcaaa

SEQ ID NO: 218529 - DNA, 3895 bp, Cannabis indica
tactcgtatttaggattaatatgttttctttttctgtttttattatttattttaaaatataataatttgacaaatttgtgattacaagcaacactactattttgactattatagtagaatttttttttcttctaattttttatatgtagtaaattaactttttagttctttttgtggtacttaattaaatttgggataaaaatatatttatgattatcattgtatttcaacatctatataagaaaacgaaaaataacaaatactcaagtttaatttttagcggtaataatacttaagttatatttctagaactttgtaggtacctgaacattaaatgtcaaatcattatctatgtgtcattttcttattggtacatataaattattttttttaaaaaaaaattaaaactcatgacttggaccaattagggattgacacgtggtaatttacttaatatttatcaattaggtacctgcagagttctagaaatattacttaagtattattgtcgccaaaaattaaacttaagtatttatttataactaggagttaaacttagatatttatgccgcaaattactctttattaaattttataaaacaaataatcttatttattaatttcattattactctactataaatatagaattgaactcttaataattatagaattatatttattaatttttactgcagttagccctcttagtattggttcctaattagttttggtcaaatactattttacccttctaattacattttttaatcaatattattaattcactagtgaaagtataatttagatctaatctaaatttatgtgcaatttttcagttccagaattaacatttaaagggagctgacattcgatcttttaataaagtcaaaattctataattgtagatcatgtttccactcatcttcattgaaggatgcatgccgcggcccatgtacaaaatccacacaccaaccttttaaatcttcagcatagtgggtcgtgacgttggccctccatggcacgacttctgaagaagaatttttggcagaatgacacgatcgctccaatgccttaacatgagattccagtgttgaggctcgccttgatacctttgaaacatgacctcgctgtccatttttggtattttagcgctctgacattggtttttttgccatgacagtactcatttttctctatttcttcaacttcaagggttccgatcgcaccgaatcctttaaattattccatggattgttgctagcgacaaaactttaattgattcatcatttttctttcaacttgttcacttactcttttttattaaacttgaaaaccttaataaattaaagcataaaattgcaaaaaataaaattaaaactaattaaaaatactttgaaaacacacttataatatcacaaattaaaacctaacatgtttcttaaagataagaacttgactaccaaaactagaatatcatctaataatttactaattaaattatcatagtgtgataatttactgattagattatcatagtgatggtggtggtagtaatccattattagatcttttgccctaattgaaccatttccttttagaattttcttacttagtttcttgggaaacaaacaatcaaaatcacagtaaaagaattaaaataaaaaggttacctttagcctatctatgcttcttgaaaggaagcatattagttttttcccttttttttcaactattaaaaaaatcaaaaccaaattgtttcttcaaattgaacaagaactacaacatgacaatagtataaattataaaatattagattttttaatctgattgtcttactcgtatttaggattaatatgcttttccttgtttgtttttgtttttttttatttatttattatttattagttatgtgttttgattttgactgagaatatctaaacattctttgtagtattttaaaatataatgggatacaaatttgtaaaataattaaataaataatcagattagaaagattcattcttccaattatttttaattaaaacaaacaaaattgaatatacaattacaaacaactaccattttcacaaatctacaatttcataattaaatatataattaggtaaagtcccacataaattaaaaatacacagcatcatattcctaggcatataaaatgcaaaagtaattggataaaatttgtactcatgcatgttaaaatcaaaataaaatgatttagaaattggaatagaatctacaagtctctcaaaaaaaatattaccataattaaaattgatctaaataatagtatatatgtggttgtttcatttagcaagttttccatttttaacaaggaagttttattcaaggttgatcaaaagcaagagcattagaagtccagtcaataaattgcattcgccaacgattcgaaaagagcattaagctcaaggctcacgcaagagcagggacaaacactccaaaaaagtacacaacactgaaacaactcaaacaaactaaaaattaaacgaacaacaataaaaatagaacaacttcaacaaccatctccttaaggcatacgaggcaaaatgtgagcctgagactggcggaccacaggcaccagagcacttccatctttcgacgagaaacatccacgctcgacctcctataatggttctaaacggtgaaagtgatgggacaaggataaatctcaatccccttctacatctataaaactcggaaagctcattacgaatcattgcgcatcagagcaaggacccttgaatagtatcctaagtaaggaagaacaacatcacagccgaagcacatgcctataaaagatctttacaaaacgccaacccaaaaatgagaggaagagagccgccaaaagcccaccaccattgttgtctcgtgacctaaaagatcgattttatctgctacccccagccaagaacgatagacatctcaccagagacacccaaccaccaagaatggccaccactcgcctaaaaaaccagggacgacaaaaccaaccccaagatgcgtgaaccaacaccaacactcgccattcaaccatgaacctcatttgttgggaccttctacgttgcacgagaaccaggaagaagaggcaaaacactatgagagagaaaatatttttgtcgaattatcgacttagtcatcttttatttttttattttttatttttgtagttatcaaaataatttatttatttatttatcttgtcatttaatataaagtgaaagttaattgtataatttaggaagtccaaaaatattttcttaaattataaactagcctattttatagaggttataaactagactatgaaactatcatagctcaatttctataatctttgtcaaaaacatttaaatttaattatttatattatttttttttttttttttttgtacgcggtgaattatttatattattatttatcagtatataattatttaaaaatagtaataaaattaagcagataaatctaatttatataaatctaaattttatatatttaaaaatataataaaactaccttagatttaatttttcaaggttaagcaaatatgttaccaatacctaatattataaaacaacctcaaaacaaccattcatatttttgtaaaagattataaaaaattcaaattcataaaaatattaaattattttggatcggtatctttttttttaaaaaaaatttgccgatagaataatctcagcccatatgatataaaaatgagagattttttttaattagatagaaaaattaaacataaaaactcaaaattttctaattttacccattcaaatggctaataccacccatataaatatatatatatatatatatatatatatatatttacttaaa

SEQ ID NO: 218530 - DNA, 5784 bp, Cannabis indica
gaagcaggtacttatttcttttccctaatcagttttgtaatttttcatgagtattataaaagttacaagatatgataatgggattatttttttttatttatttaattgagattgttttggtttggtgctgtaaggtttggtatgattaaaagaatttaatgaaaactcttaacagagagatttcactttttttgttatgaaattctgagagatttaatcttgttgatattataggatctatagcagttttcaatgtttcatggcgggtttctttatactgctgtttgaatagacaatatgaacattgtagtggttagaatatttgaggtctccaacatttctgtttttctcttgtctggattacaaaaattggttaagcttcaattattctaaatttggtaatcatgtgggtactgttttaacaattttctggaccaactttttagggttaatatatagataggcaattttgtaacttcaattttcccttttcaggatatcgaggtgaacaatagaactgtcaaagtgagaaaacaagatggtacatttggttctactgaatggaaaactctgaaggtgggagatgtagtgaaggtggaaaaaaatgaattctttccggcagacctactcttgctttcgtccagctatgaagattcaatttgttatgttgagaccatgaaccttgatggagagacgaatttaaagttaaagcaaggtttagaggtaacttcatttttacatgaagattctaacttccaggattttagagctgttgctaaatgtgaggatccaaatgcaaatttgtactcatttgttggaacttttgaatttaaagaggagccctatgcacttactcctcagcaacttcttctcagagactctaaactccgaaatacagactacatatatggggttgttgttttcactggtcatgacacaaaggttcttcaaaattctactgaccctccttcgaagagaagcaaggttgagcggaaaatggatcaaattatctactttttgtttgctcttttgttttttatggctactgttgggtctattctctttggtattattaccaaagatgatttggaggatggaaccataaaaagatggtatctacaaccagagaattctacaattttctttgatcctaggagagcacctgctgcagcaatctatcactttttatcagccctgatgttatataatacctttatcccgatatctttgtatgtatcaatagaaattgtcaaagttcttcagaccatcttcatcaaccaagatattcacatgtactatgaagaagctgacaaaccagcacatacgcgtacttcgaatttgaatgaagagcttggtcaagttgacaccatactttctgataagacgggtaccttaacatgcaattcaatggagttcatcaagtgtagtgtggctgggacagcttatggccgtggtttttcagaggttgagaaggctatggataaaagaatcggttcgcctttaattgaagaaaatattaaggtttggaaaaattcagaggattcatctgaccaaaaggtgcctgtcaaaggcttcaattttaaggatgaaaggatcatgaatgggaactgggtaaatgagccacatgcagatgttattcacaagtttcttcgtgtattggcaatttgccatacagcagtaccggaggtggatgaagattctgagaagatcacatatgaggctgaatcaccagatgaagcagcatttgtaattgcggcaagagaactgggttttgagttttacaaaagaacacagagtagcatatcaatatatgagttagatcaagactctggccagaaggttgaaaggtcagtattattctctgtgaaatggttaacagatagatgaaatagaaatcaaatcattatgccatattctattggtcctttgctttctcattcagttaaaactaaaaaaaaagttttatctatgctctctttcttaaaacaaattcgatcttcatttcaaagtgggctttctcactctctcttataagttctgctgatcctccgtttactcactgactgaagtatttttcacttttgtttccagggtatatgaacttctgaatgttttagaattcaatagtgcaaggaaacgaatgtctgtgatagtaagaaatgaggaaggaaagataatattattttgtaaaggtgctgacaggtatgtgatttagtccctttaacttaatgtttcaaggtgtttgaaaagctacttaactttgtattgctaatgttttaagctgtttgaagaacaactttactttttcctgtgcagtgtcatgtttgaaaggctagccagtaatggtagaaagtttgaagaattaaccatggagcatgtgaaagagtacgctgaggaagggcttcggaccctaatactagcctatcgtgaccttgatgaacaagagtatagacatttagaagagaaatttttaatggccaaaagttcagttagcgcagatcgggaagcactgatggatgaagtagctgaggagtttgagagggatttaattcttcttggtgcaactgctgttgaagacaaacttcaaaatggggtgagttggaacatgccaaagggcttttaataatttgaagtgtatgtgatagaatgaggatatattgtgtttcttcttgggtttcaggttcctgaatgcattgacaaacttgctcaagctggaataaagatttgggtattaaccggggacaagatggagactgccattaatattgggtatgtctctagttacttagggcacagtggcttgattattgcagcgaatttcttgttttgggttattaactctatagctcactaaccatcttagttgaatttacagttttgcttgtagtttgcttcgacaagaaatgaaccagattataattagtttggatagtccagaaattctagcactggaaaaggctgaagataagagtgcaatttccaaggtaattaatttatactgtgctcttctctttcgttaaatttaagttgaggtgggcacttaatcaagatagcattttgtcgagcatgttaattgacaaatgtctgaaacttgtaaattttaagcattgataaaacagtggtaattgaaatgatgatctctatatgtgttttacaaactgaaaagataataaatacgtttatgccagtgaatgaattgcaacagtgctttcatttgtacaataatgtaacacattggaattgcaacaccatgacttgttataatagtagcaaaagaatctctgttctggactaggggctgaatgttgtcatatgttggaagttctatacacacacacacacacacacacacacttgcattttgattgaatgttgtcactttatcttttaggcatcaaaggagagtgtccttctccaaataaaagatggaaaagcacagataaatgctgcagcaagtgttggttctgtggcatttgctttaatcattgatgggaaatcacttgcttatgcactagaggatgatatgaagaaactgtttctagagcttgccactgcttgtgcatctgttatttgttgtcgttcttcaccaaaacagaaagcactggtaggttacttttcgtttgttgtaatttcttatgtttcccttggattagcttatgtttattatttttcaaaaaaattaaaattgtgggaacaaataggttacaagacttgtgaaatctggaactggaaaaacgacactagccattggcgatggtgctaatgatgtaggaatgcttcaagaagcagatattgggattggaatcagtggagttgagggaatgcaggcagtcatgtcaagtgatatctcaattgcacagtttagatatttggagcgtctgcttcttgtgcatgggcattggtgttatagacggatttcatctatggtaaaaaagttctcagtaatttaaggcttaagaaacttgattttgaaaatgtatgaatcatcgattaccttgtataacaaatgattgactgctttattcatcttctggcagatatgctatttcttctacaagaatattacttttggtttcactctcttcttatacgaggcacacgcatcgttttctggacaacctgcctacaatgattggtttttgtcgctttataatgttttcttctcctcacttccggttgttgctttgggagtctttgaccaagacgtatctgcacggttttgcctcaaggtttgtcacaccatctgacattttcattcaattaatcccatacaaatggttggtgaaaaaaatcccaaaactggtcaatgctggtttctcatgtagcaactttatgttgtaaaagaaggaaacaagtaaaacagaagagctgcaagagttttagccatgtaccattgagaaaaaaattgttaacagaatgccacttgtttaaatttaaaataataaaatcacaataaaaataggccatgtgtataatatcagctgtaatgatgtgttaagtttcattttattcttaaatgcatcttgtgacgcttgcttcttgttttatcttgcagtttcctctattataccaagaaggggtgcagaatgtcctcttcagctggcgtcgaatactgacctggatattgaatgggttagtaagtgccgtgattattttctacttctgtaccaaatcattggacctgcaagcgtttaacgaggaaggaatgactgccgggagagatatattaggggcaacaatttacacgtgcattgtctgggtggtgaatttgcagatggcagtggctatatcttacttcaccatgatacaacatattttcatatggggttctatagctttttggtacattttcctccttatatatggagccatgtctcccaacttcgccaccactgcatacaaaatcttcatcgaaactcttgccccaactccgtcctactggtttgtcacactctttgtggtgatctcagctctaattccttacttcacattctctgcgattcagatgcgcttcttccccatgtatcatggattgatacaatggattaggcatggtgggcaatcaaatgatcctgagtactacaaaatggttcgacagagatcgttaggacccacaacagttggtttcacagcccggttggaggcaaagagtaacagcagtaaaagcaataaaagcataaataaaaacctcacatgaaactagtggttggctgtgaagtgtgaagggctacctatatagcttaatggtcagggattccttcagaattttgattccctgatcttatagttgctagatgattatgtacagtactgtagcatatgttagattggttaggaaaactaggaataccttgtaaagtttgattctttttgccttcttgggctgcaaatttgtgttgttagtggctatgcatttttgtaccactgccgaaatgtatgtaatatagaaatgaggaattcatagttagaatatcacaagtattgtatttctttgacagtaataagaaacggttttccattggtgttcatatggaatcttttctatgtactttttctttttgaatcaatctatcattgtttcatatcatttattattaatggaccatgcagacgttgtacgtaaagaaaaaaagtacatcatgaccgttgatagacctggcataactaccacttacattggaattaatattttataacgatgcatctgtgtgacatatttggaagtgttttttcttctttttcttggagtacggcttatttatctccatgtatacttgatttctt

SEQ ID NO: 218531 - DNA, 9540 bp, Cannabis indica
atggtatcagagcgggaaaaaggagctttccccgatcgatcctgatcttctccggtcatcttctccgaccttgacgtatcgcgtatcttctctgttttcttcattttgcttctgcttcttttcttctctccatggcaatggacgatcatgcttccacacattcagatactgataatcaatctgctggagctcttgaaactcctcaagttttgattcagcatggaaatcagaatttccaaatcaacaattccagaaatccaatggaagacccctcaaatccttacttcctccatcacggtgataacccaggtaatatccttgtttcccaactccttactgagcaagataattacgtttcttggagtagagctatgcaattatccatttcagtcaaaaataagcttggttttcttgatggatctattcctaagccccctgttactgatcaaatattgtacaatgcgtggattcgtaacaataatatcgtaatttcttggatcttgaactcggtttcaaaggaaatatcatctagcatcttatatgatgaatccgcagccaccatatgggctgatctcaaggttcaattccatcaaaggaatggacctcatatatacaatcttaaaaagggtctaataaatctcaggcaggatactcaatctgtgggtatgtacttcaccaaattaaaatcaatttgggaagaattttcaaattacaaacctacttacacctgcaatggttgtacatgtggaggaatgaagaaaattcaagaatttcaacacatggaatacataatatcgttcttgatggggttaaccgattcttactctcaagtctgtagcagtattctattgatggaacttcttcctgaaataaatcgggtttttccatctggtgtctcaagaagaaaaccagaaagggaattctgctggaactaatgaacccaattctggtatggcctttactttccaaaaggataaaaatggtcagaacaagaatgaaaatcaaggaagcaaatcttaccctcccaagaaaggaaggcctttctgtactcattgtaatattcatggtcatactatagaaaggtgttataaaatacatggctatccactgggattcaataaacagaacaagtccaaagaggccacggctaatcaaattcaaacctcaaatgataacagtggtactactgaagaaagtaacacccttcttcctcaattaaatgttgtcaaatatcaacaactacttaatctgttagcaaaccagcagcacaacacttccaccactgatgcaaacacctcgacaggtaatacaggtacaattctcacttacaactctgccatcataaaagaaaattgttggatcgttgactcgggtgctactagacacatttgtaatgatgccaaactctttcagtttatttgtaatattcctacaattaaactcattttacctaacaataactctttagttgtgcagcaaagtggaaatgctactgtttccaaagatattgtacttcaaaatgttttatttgttcctaatttcaaattcaatatcatgtccgtgagctgcatgactaatgataatcatgttgatattaaattctgcactaatgagttttatgtctaggaaactctcagcaagagagtgattggcagaggtaaggaagacaatggtttgtacattctggacagggttgatactcaagccttcaactgtgctatttcagctgatgtgtggcacaccagaatgggacacccttctcacaagaggcttgttttacttagtaataaactacaatgtaatatgagtaatattcaaaaagatgaaccatgttacatttgtcctaaagccaaacaaaagaaacttccttttgttaataaaaacaactttgctgaaagcaaatttgatttgattcactgtgatatttgggggccatatcacattccctctcattctaatcatagatattttcttactcttgttgatgataaaactagatttacttggctttacttaatgaagcaaaaaacggatgtttctttcattgttcctcaattcctttcttacattcaaacgcaattcaattgcatatttaagtgttttagatccgataatgcccccgagttagtctttaaggatctttttgctaaattaggcattctacatgatttcacttgcgtggaaactcctgaacaaaacgatgtcgccgaaagaaaacaccaacatcttttgaatgttgctcgtgccttattatttcaagctaatatgcctattaaatattggagtgaatgtatcttgactagtgcctatctcataaaccgaacacctactcccaatctgaataattgttctccctatgagttgttgtttgaaaaggttcctaaatatgagcatctcagaaattttggttgtcttgcctttgcttcaactttaacagctcaaagaactaaatttgaaccaagaactcggacttgtgtcttcatggggtacccacaaggtgtaaaaggttacaggttgtatgatataaataacaaacaattctttatttcaagaaatgttgttttccatgagaatatttacccattccacaaattaaacaatgacagtaagcatactgaccctttttctacacttgtttttccttctcatgatattactaacacaaatgttgaagattttcctatacaagaaaattacaatgcagattcccttgattcagctcaaaatgatacttctagagaaccgggttctgctgcaacatccactacggattcaagtgtagtagcttcagatccctctctgtaacaggatgttccagccactacaataaggcgcacgaatcgaatttcaagacctccttcataccttcgtgactatgagtgccactctattattcaggataagagttctacacctcatcccttacataaacacatatcttatgaacatctttctcctgcttataaaacctttattcttgccttgacagcctatttcaaacctagcaactacaatcaagcagtgcaatatcgagtgtggaatcaagctatgcagcgtgaactctttgctcttctcaaaaataagacatggacatatgttccacttcctcgaaacaaacgtgccataggttgtagatgggtctacaagataaaatataacatcgacggatctgtagaacggtgcaaagctagattggttgcacaaggttacacgcaacaggaagggttggatttttttgatacttttttacccgtagccaaaatggtgacattcaaactattacttgatattgctaccattaaacaatggcatattctgcaaatagacgacgacaacgcctttctcaatggcaacctcaatgaagaagtgtacatgaaacttcccaaaggtcttactctaccagattctgtagacaaaggatccaacatagtttgtaaattgaacaaatctatttacgggctgaagcaatcctcacggcaatggtaccgtaagctttctgacgccttgtttcaagaaggattcactcaatcaagggctgactacactttgtttaccaagggaacaaatgactcattcattgtgttactcgtgtatgtcgatgacatcatacttgctggaccaaatatctcgctactgcaacaacttcaagacaatcttcacaaacgcttttccttaaaagctcttggtcctctaaaatattttcttggatttaaaatagctcgtggcacagaagggctgtttctatctcaacgaaaatacactatcaccttacttgaagacaatggattcataggtagcaaaccagccaaaacacctatggatcctaagataaaacttgatgatgaacaaggcctaccccttgataatccttcacaatatcaacaattggttggaaagttgttgtacctcactctttcaagaccagatatcacatatgccgtgaacaccttgagccaattcatgacaaatccaagaacaactcatttacaggctgctcatcacttgctacgatatttgaaaagaagccccggccaaggacttctgtattccccccaatcgactctccaccttcgtgcattctctgactccgactgggcagcatgccccaccacacgtcgttccacaacaggcttctgtgtcttcattggggactgtcttgtatcctggcgcacaaagaaacaacccacaatttctcgcagctcagccgaagctgaatatcgtgctcttgctgccacctgcagcgagttaacctggctacagtaccttcttcaagacttccacatacctcaaaccagtcccgcttttgtttactgtgataaccagtccgctatacacatcgccaacaatcctaccttccacgaaagagcaaagcatatagagctggactgccattttgtgcgagacaaaataagggactccaaaatccatttagttcatgtcaacagcaacaaccaaatggctgatgcttttaccaagccactttcttcgagcatcttaacttcgcacattaacaaaatggctatatatgatatatacagtccatcttgagggggggatattaagttctagttaatatactcttcctattttgcctctctattctgttagctttcatgtttgttagtcaaccgttattacagttattttgctaactgttttgtcggttaattctaactgattttagctgttttcttggctgctctttctgtaaatatacgggccttgtactctgttttgtttttaatgaaaattacttcttttttctttcttttctttttcttttctttttcttttattccgcatttatatacatatgatattttaacaaataaagtaaataataaatattattatgtaaacttcatgcttaaaataagataaacgataagtattattaggtaaatttttgttccataaataaggttaaaaggaaacataatttataattaaaaacataattttcattagtgaaatctctttgatattattttccaagcttatgtattattattcatttaaaaatacttacacttgaattaatcatttaacaaataaggtaaatgaaacatcttattaggtaaatttcgtgcttaaaataaagtaaacggaataccttattaggtaaaattggtgtcgtaaattaggtaaataatatggtttattaagcaaactccatgttgcccttgtagagtcgtagtgttgatgttcttaatggagaaggtagaaggacgttggcaatggcagaggaggtcgagcttgctgggttgggttactatggcagaagcaagactctttgcactagggacccaatatggtagcatatgtgagttaggatatattcggcaatgtgcttataaaagtaagtataatttaattgaatttaaaatgcaggtattttggttagctcacaataaaaaaaaaatagtatttatcaacttcttccatgaataaatttaggtttttaaaaaaaataattgtcatttttactaaaggactttttaaacctaggtaggaggcttgggcgtgggccccagctaccccactcttgggccagccctgcggctgaggtggcagtagaggagggtgaataggaggaaaagatggtgggcggataggggcagcggggagcttggatgacttgatgctggaggtggtggctgataaggatatgataggaggaaaatatgaaaaattcaagttggtttgagatgccatattgatattctcataacaaatatggaagctgatggtttagattcttagctgttgtgtggagcagtgactttaaaccaaactaggagctacaaattagtagcaggttttaagtgacttcccactcgaagatttccaatctgttgtattgaaaaacacttcacttctcagatatgactacgtttctcaggaagcatatttatatttagtatattgctttggacaatataaaattaattcaggtgggaaattttattctgtgctacaagtataacacgatattgttttttttatatataaacacaataatatgcaaagaatttaatacaacttagccacaaatcatactagaaagaaaccatgagcagaaatagagatactagtaagaaaaaacaagagatatgtgcacctaaaatattcagccaaaaattaaccaacattaatctaaagcgagaccggcgagaaacaaggtaatgttttaggctgaagatttaagttgtgtccacaatttttgaagacggataaaccatactaaaataacccttatcgagagggtaaattcccagtttagccgaaacttataatgaaattgtgaagaataaaaaataaaaggattgtggctacatagagatgtgaagtttggtattaaatgcaactagcaaaaagtatttagctcaggaaccaaattgttacaagtctaaagagttaataagccagttctataagcaatgggtgacagaaacctcaaactttcaaagcagccttgtgaaccatagtttccttgtgtatctggtggcaactcttctcaacgagatcaagcagcttctccaagtttgaagaccatgcgttaaggatttcgttgctatcctttgcagtttgaaaattaactacacccatgggcctgtcaatctttgaaactagggccttggaaacaaccatttctgaaagatgcttctcagcctcctgcatttatagaggagagaaaaaaagactccaagttagagataaacaccaatatcaatgggtacataggaagcaactaacagacaacacgattcaacaacatttaattccattactctggacagaacaactagttattagtttaagtctgataaattaaaataagtcatcaacaaacctggaatactgagacataagagctctgcaagtcttttctagtgtaatcctggcgtagtactttgaaacaactaagatatctgaaatggaaaaattaaaacaaataaataaaaaggtaagcagaaacagatagctgctaaacatgctagtgtcaggagaaaacacacatgttctataaccctctgtttcaaatcttcagctgctttgtcccccaaggaacctccaagcatgttcttctcattctcaaactcatccttgtatgaattccaaagagctgtccattgtacaacctccatggtaaccagttgtttcaacagcaacctacaaagaatagatgcaacactcaattgtctaattaaaataggcaggtatagcatgttacataagcagctaacagacacagcattaatgcaatgaatacaactaccagagtcatacctaaaatttgaaagttcagagagattcttatcctccagggtggaattaagaagactagattgcattggatcatgtggtgccagaaccaagtaccaacatattttccttaagatctgcacatagaaatatatcagagaagctctaaataaatcaaaaccaaaaaagggggagagtgatactttaccggtatccagtctgaaggattttctttgacagcaggaatctcatatattgctttgtagcatcggcaaatttcaaggtaatcattgttatgtgaataatacctggaaaagacaaagccagtattaaatcatgtattttttaacaaattaaaatagaaatttagcaaagttataatgacatagtcaaacataaatgtgaggctcttgtgcaaaccctcaaaaataaaaagttaatacactatgaccgaaatttccaagtaaattttcctaaaacaaacggatcagctcatggcccaaaagtgatcccaaatcttctacagtagccaagctttataccaaatcaatcatagtatccaatcctaacaatcatgaacaagtaacatttacattgaaaattaacttttaatagttaaaacctataaggaacacaaaaacgatatcaattactatgtagttatcgaacctaagatcccgtgggagcaaaccacagacctaaccatttgagctatatagcactcttatatatttgaataattttcacaaggcctctgatgactatatgaacatcaaaagtcaaaagagataatatacatcacattttaaaactatactgggaaaccataaaatattctagaagacactgagtactatgcaagcatataatattctagaagacaatgagtactatgtgaatcaaaacttaagaagctattcaccatactactgcagcactatatcactgcacaccctgatggaaaagtaaaatattcctgacgataatgaaataataaaagtgcagcagttgtccaataagcaaacctcaaatcccaaattcaaaaatgccaagactaaccataagatgagatctcacaaaacctcaagataattacagtagtgacttcatacatcaacaattgtatggtatacaataaaatacagacaaaacagtaaaatgggaaaacttcctcgtgtaccttatcattagttcataataaatcctctttaactctaagagtgatggaatatcagcaggagcctcctcaacaacaccatcaccttctttaggttttttcttctctttcgagatgtcaacatcaaacacccttggactaatcttccttgacaggatttgagcacgaacataatcttgacgatccaaacacagtcgaacctgcagattttaatggttggataaccggtaacttatgtccaaatgtatcaactacataagaaaacacttttgaaaaatactaaatgcaacagtggtaagaataacatacttgttcaagaatgaaagcaattttctcagtttttgccatagcaccaaaagtttcaacctgtaaagttaaaccatcaaaaaggtgtgcttgaaaagggaatatcaaattggtgaaaatcatgcaccaaccgctatttcttgcatcaaatcagcagcttcagctataagtccttgttcttcctttatctttgccagttttttagtcaatctggctctctcaatctcaacatatatctacataacgacagaaatcattagaaaaaagtatgatgtaaactaataggagccttttggttggagtttgaaaaacatattacctttccagcagcaacattattaagggtttttataagctctacacgagtttcaacgtctggcgtctcatctatatactgcattgcttgttggaccatagcagttacagcctgtacataacacccacaaacagcattgacaaatacagttttttatatgagaataagattgttttatgaagaaagagtacattcacccaagggccttgacatcctagattgagaacaacaatacaatcgaatagagaaaagaaaaaaaaatgaaatgaactgaaatgagattcgcgatgatatgaaaaaaatgagtgcaaagttgaaccctctctaaaactagaacaaaagtatgtacttgactaattccaagaaactagagatggtaagctgtcattaaatgctttgtccttcaatccctcggctatgtttggaagtggggaaaggaaagaggtaaaggaaaagttaaaaaaaaaaaacaaaa

SEQ ID NO: 218532 - DNA, 5619 bp, Cannabis indica
gaatcaaaaaaccagaaaataaaacaaagtcgcttgagattaaaatgtttggaggtgtgagcggcagagcaataagttatacacataaacaataacaaagttgccaccttacgtcgcgagatgccttgagttgagtttcgtggttggtttgagtgtgaggctgtgttggctgcatttgcatgtgatgctgaggttgctgccctgaactattatttgcataaagagattgatagtgtgactcggaattgcttccttgtcgcttcatttgcaatttgcgagtttcttgaataatatctgccgtcttgttctccacaattgttcgaccttcctgaaataagaaacataatacaatacaatcaatttcaaagcaaacaaattgagtattttggtttaaagtaaccaaacagaggctacttctatgattgaaaatacaagtttctttggtttgtattaagaagtttattcaaaatttgagatactcttagactcatgacgtaaaccgaacagaatcatgaaaggtcaaacaataaatataccttaattttcataatatttaacattgttcataaaataataaatgttgaagaatataaactgaaaaaaaaagtaacaagacctcagaaacatcagaatatgagatatttgtatatacctcaaatgccttctcaaatgtgtccccaagctgattaagggaagtggtgagggcattcaagcccttacggaacttacgattatcccctttcttcatattctcattcgattggtctgattgctccggaaactgtttttctcattcatgttcaaatcagcacattttaagattttattgatggggttatgaacacttttaagtgtatacaataaaatttgtgaggaactatttgttatataattcgtatatacctgagattgagttgtgggattattgtaggattgtgaagtggttttgggagacatataatgttgttgggaaccgggatcatcatcatcgagtatggctttggctttccgagccagaacaccccaaaacccatttgtcgactcatctccaattgacccatctccatacttatcaaattcctacaagcaaaataattgtcttcattcattctatactaacaatttcgtcagatccaaaaacaattaaggaaaaaaagaaaagaaaacagaggatcacaccccatcttgaaattttcaacgaatataaacggaagaaacggatccatgaaaatgttaaagaaaaaaaaaaccttaggatcgatcacggtgacgatcaaatgagagggaggtttcacgaagagcagaggaagctcgaatggctttagcagcaagagacgaagaagatgaagaggttgaagatgaatgattctcgacgacatcgtttagaggatgatgaatttcttctttaaaggttgaggctctcgtgattccttgccttcttctgtacgccatttttggttttctatgaaactgccacaaccaccaccttcaaaagatgttatttttattattattattttctctctcttccttcctcctctcctcctcgactatttctaatgctacaaataaaataaaactggagaaatgaaataagatgagaaagagcgcgagctcttaattttacaactatatgtcttaactgctttttcagccgctgatcaatgctcctctctctaccattggatcccaacattccttaatactttattttttttttatattaaattattaatttctaacagggtcatttgaaacttgaaataaaaaaaggaaattttatttacaccccaaaaatttctaagtacaccccattttaataatttttattttatataaaatttatatctttaattgtactaagtatttttaactttttttctttcaatttatattcttaaaaaatatacctatcaaacaaaattaaattatattttaaaaattatgacaaaaaaattaaaataaaaaattatatgaaattttctcagaaaaaaataaataaatatttacatgagttagaaaaaattatgaaaatgaaatcaaaataagtattaaaattaacataaaataatgtgaggaaaaaattttaaaaaaatattaagaataatttttaaaaattatttaagtttatatttttttaataatagggtgtatttataattttatggggtgcaaatataattttccataaaaaattatgaataaaaaagaattgtattctccccacgtattcttttgcactaaacaaataaatcaacttccatcatataaataaatacatgaccatggtagaattaggaagtgtataagaccatctctgatgattatattaatttggtatacaatttaaattaattttgtgtataatattttattttttgtgcaataattttaataatttacgctaaatatctctctaaataaatatattttattaaaaaaaatctctcttagtgaacacaaatatgtggatcacatctgcttatttgattggcgagaataaatatataagttaaaaatatatgtgagagacacaagattttatagtagttcattcactatattgcgacagtgatgaaattacgtctacttcgagttttatttctcacaagatggattacagaaaaataggtaagtctcgaaactctaatttttaaaaatagaaactagagagagatgctctgaccttatgactacttttctaaacttaaaaaaataagcttatggagctctccttttatagggaaggaagtcctattaaaatgacaataaagtaatctaaaaaaaatatggaataatacatttaggtgatttttgatcgtaaatgatgatctaacagtgaaattgactccaaaggtcagtcgtcagtttttggagcttgagtcgcgcctgcaggacctatttcaagtaagttgtagcttaactttgcaacttccttggggtaaaatttggagtcgatactttagaattgtgatttgagtgtgagacatgacttgatcataaaggattaaaatagcttcgaaacgcaagttgaatcgcatcaattagatcaatattgagtgagttatgatcattatactgggcccaacacttaggtagacatctagggctcaggttgacatgtgacgtcaacttggatgctaggtgagtaggaaaacgtatcgggatgtattttttgatgcctaagtgatatttagacatcacttaacttgattttgtgttcagacaaagttggtcaccagttcttggagatgctgttattctatagaaacgggagactcgaaactacccaattttcgagtaagttactttcccgaaaaagtgaaaatataaaattgtgaaattgactcttctaactttatgcctttcaattattatgaaaaactaaaccaacgatcaagagggaatcaaaattggataagcataacccagcacatcaagttatatgtcaacctgggcactggtgttagttttttatggtccatatcagagttagaaaagtggaagcaaattttattaaaaaataatttaatccaatataaactataatctcaaggatctcaacataatatatataaattaaatctaaacaacatgaaaaggaatcaataccttttttagactatcaagagatcctcgattcttctcataataaatatcaatcatcaaattctttgctatgaacagtggtgaagacttcacaccagagtcttccagaccaaccacaatacttaagataagagtgggcttataaatatgatcagaagaagaatttctatcatggtgtgtctcaactcatgagacactgtgattatgagatgaagataaaaatctctcacaaggaagagagagagtgtatgttttcaaaaatggtagagagagaaactctttatattttttcaccgtatattatataataagttctattgttatttttattttattgttatgcattactaatatatcatacatatatatacagtattttataattaggattaatagaatatattatatttaatttaaaattcaaattcaataatatcattaattgaataactaaattcaactaattattttatattatctttactcataaatattttatccaataaaatatttaattcaaataattaaaagataatttttattttattttgatttatttaattaataaaataatcaaaataacatctattgggtcttatatgtaaccatacacttgtgggcctatagccccatacatgtgggtcatattttagagtccaaaattgaattattaattttgtcttttaaataagatttattatttacaataaataataattaattaattctcattaatctcctatttagcttggattaaataactattattttccactaaaataataagcttctctctcataatatgatttaacaataatattatatttaactaattaatatagttttatccaataaaactaaatagctaacttctattttaattattcaattcacaattgacatatttatacaaaattactattttgtcctcaataattatttctcttaaaaattaattatttctcaattcatcttacaaattatatcttctcatgtacagtgttatatggaggtgattactgggaccatggatcttgttatcccaaattttgtccacatgacctggcgtttttacatattcaggactgaggacacatggaatacaactttttaataataggacaaagtctccttacacaacatgtcaactgttaagggctttaaagcaatcaagcaaaattgtcaagcaataagcgaaaggagtaaagcgggccgtcatgatcctgaccaaccatgtctagtcggccaaggaaagtgtgaaggccgaccagaggaagcttgtaggccagccagggtttgagcacaagctggccgaccaaagagttactgtcacgacccgagccctaggctgtggcagatgtgtaatatccataacttgggtggtcaaaggtcacactttgacccttgtaggaaaataaagcttataaatgatccttttatttatattacaaaatactaatttaaaagatatggattaactcctatattaataagaaaatattagtaataaaatcaggaccactcatcaatataaaagaacagtaatatccccacagttatgtaatcaccaaatagatagatttaataagtcaataaaataccaaaataatacctagcatccatcatttctcatttctaactagtacatagctaatttaagtcatccagaccatccatttgttcttaaatacaaaatcagtctcattagaaggtgaaagagtaaaatatgactaaactaataacgacattcctttcccaacggtaccatcctcatccactagcatcaaactgagttcctggaatgggagaaaatagggggtgagcttataaagcccagtaggaaaacaactaatatcaaaggacccttggtttaataaaattcctgcatggttagctttataaaaataaaatgtctcatcaacagtatcaatatgtacaaataaaatagagagaccacaaataatcacaaatcaaacgtcaaatgcatatcacaccgtccactagacccct

SEQ ID NO: 218533 - DNA, 3165 bp, Cannabis indica
ccatggagataatctgcaaatctcctccaaaatatcgagcatacaagcgacttatagggagcccatatccatatccagccatggtgaccactgtatcagccatcccgagatcagcatgctcgtccagagggtttttagcagtactgtaaagataagtgaagattttggggagaccacttctgggaatgccacccccttcatctgagacctacgaaacaaaccacattatcttgtttaagcaagcagacaagcattaaggcactaaagttggctttcgtttaactttttagagctaaaagctgaaattacccgaccagcaacatatgtgctttgggagctcgataagtgcaaaaacagcttttaaaagaccagcctaaagttggtgttttataatgtgggaaagttctgaaatttgagtaccttaatagtaacatcctcaattccatctgcaactataattctaatgggaggtggaagtttgtctgagtccaagaagcgttcttggactgcacgcaatgagttcttgaccaactcaaacaccataagatgcaagtgtgccgggacatagctggtataagcaggctcatatcatatgttcatatcataataaaatcaccagagagcataataagatttgattatgataacgattttacttacgggaaagtaaaatcaggatctccatagatgttaacatcaggagcagagccatactcacgtaggcatatgcaacgggcatcttcactggcttgctgtgcaacctcaacaggagacattcttgtgttaatataacccacacaatgaggtggtggattcggattgtgcaattctacatgctgacctgagtatttcagtttattattattattggaaaattctttattactcaacaataaaatatgttgacatgaggagaacaaatttactagttatatcatccgcaattgcctgaatctcaaacaaccaaatattttcaacatattataaataatttacagatgaaaaaaatcaaaagcgaaatttgcaaaactaacaatgtgaaatactaaaatttgtcaaataatctcacttaatttacttctttagtagtttaccataacatagtgtaattcatgatcgtttctgcgaccatataaagatattttgctaataaaaagactatttttacaaaagctcataattgaactatattttggacattataaactattatttctgaaaatttaaagttaatcctaaataatgtacagcataagtaatgcaattattattatgaaaaaattgaagaaaaagttttaagaagaagatgataccaatgagcattcgaatcccaattcttgacatgtaaaagcgatcaagaaattgatgaatctcatgaatatcttgattaagagtccgagtaggaatggagatttctttcttcaactgttgaacacccaaagccatcataggaaccacattattgtgtctcactttgatggctttaatcatttgtgtaaaatccctttcgtcatttgcatcttttatctccggaaaagatctcagatcacggaacgaatccaagtaccaatctcgaacctattttattaaaattcaattaggaagtgggtcagagaatcatcacaccaaattcacaatattattattataataataatgaattaattattaaaggttgaatctttatctcaccttcaaaacagcaggcttatgagaaagaccataaggaagagtatcaagctcaatagctcgtctagcaatccgaatgggaagctccttgtgtagaaattgagcagagattagcaaatttcgttgagtgggttttgacccaaattccatcatgtacctcaaactaacccctgtctgtttcatgcaaccccatttctgtacttcctcaatcaatctcttcgagaaagactccaacgccgccatttccgacccaaaaccagagcttcaatatctcttcactactaactatgctaccaacatgagatgagactcaaaagaacaaaaaaatcaatcgaatcccaataattcaagggttagatagataaagtgagagagagagaggttctcactgggtggtgtgggtggtggtggtggtgtggtgatgctctgtggtcatggtggtggtgccatgaaaatgacaagtcttcctttctttctttctttctttcttactttgaaaactgtatttaaaaacgtgtccctaacggatcgacacgtggcgtacttttcttgtttaagggccggccttgtaatttttattggattctaagctaggcccatccaaaaacttgtggcttagttaacttctcctctctctctctctcctcttcttcttcttttggtctaattttcaaaatgtgtggtgaaaagtgaataactttacttgtttggatttggtttttaattttatcttccaaactctattgttactcggtacaatagatatgtacaatcatttagggtatgtttggttgtagggttggtaatttgtttttatcgggtttttttcgtattgtgttgagatttatgtgttataagtataggattgatttaaacacaattcgcttaataattttgttaaaaaatgaaatccaaacatgatttttgtaacctatattattttaacacaccatattaatgacttaattaatatttttataacatatttaacacatttataatttgttaaagtgttaaatagctttaaatgggttattaatatgttgatttcgtaaaacttgcgtcaatccaaacacgacttatttattaaacaggttagacaccttaattatttaaaaataactcaaactcatgtaaaacgagcattgaatcatgttatcatgtttgacctattttttcatctctatttaatacttggtagtatgtgatgaataaggtgactagtaattttttactttcttgtttggtattgaaacaaaaagaaaatgatgagtatagagtttaaatatataatatgtaattttaatttattctttttgtcctttattcaaatttttatttttatttttattttcagaataattcaaaatacaaaaataggaggaagagcttatctttctatctattcccttcattgtattttttttcttaccaaacaatgaagtatttctctcctcaatctcatttccctcctac

SEQ ID NO: 218534 - DNA, 2718 bp, Cannabis indica
aaaaaaaaaaagaaaagataggtaataatgtgtacatgtaataataataatggggaaaataaacaaattttataatgttattttataaaaatggcacttattttatttgattcttaaggtacttattttttaccacgatgtatagtttatgttgcttgtactaataatgtggtgtaaaggattttattatgctacatcaaattaaaatttgagacatttaaaaaaaaaagaattgagaaaaaaaaaggaaaacttatttttttttttttattaataaaagtaagtttagattaatactaaaaattacaccacacggtcattacataaaatgttatctgaaatctcgacaatattgactatcacagttacattcttagcaaaagcccatctagccatttagctataaatgtggtgtattgttattttttagaatattttgctaaattttttttctaatggtgatgtaaaatgtctgctaaatttgatacaagctaaaaattgtatcaaattcggcacaaaagatagtatgggccaaattttagcccaccataaattctacattttgtaaattacatctttaccactttaaatcagatattaaaacaatataaataatataaattattttgtttattttaaatgaacattaatggtaatattaatttttatagttaatttgaatcttgtgcatttgagcacaaatataaaaaatagactaaatataactttatggtatattttagattaaatttaacctaaaatatacactatctattgaagattgtcttatgaaccatatgattatattatctagaaataaaaataaaagttacaacttattaagagatttgagaattgtttacattatctagaaaaaaaaattggtagaatgtgagttgtatatatggtaaaaagtatttcagtatttacccttttttgaaaattaataaccgaataaatttataatcttgtaaataagtttataagctcttaacccaaattaactaacacaatttcgataaatttatttataaatgaaatgttatgaaagtgatgtacatattattaggtaattttatagtagaattttcttaaaaagacattttagtacactctttatttatttcagcaattaaaaaaactttttctttttcttaactgtgtattatatgttgtagttattttctatttttcataaaattttaaatactttataataacaaaataatttttctattgaattttatttttaacattgtataatataccaaatattataaaatttcataaatatgtgtaaataacaatgatatatataattatatataaaaaaaaattactcaaaaatttacctaattatccaaacaaatagataattgatgtgatcaatgcatgatcaaacacctcgcaaacaacacaatacaaagaactcgattaagaacagaactatacaactgaaaattaaacaatacaactgtgaaataaaatcagtaaaccagttgcagaaaaaccagtaacaagaacttgaatttggcaataatggataatcaattttaacagtaaaagaattaaagaagagagatcaaacacaatagatttacgaggttcgaacaagtgattgatagtcacttgtctactcctcggccagaacagccccagtggctttgagtctttattaatgctagattgagagagaattacaagttgttttacaaagtgttcatgacacacatacactcgagaagcaaagcttcaattacaacttatctcaccagaactctctcactgttttacagtctaaactagctctcaatagtctatctctcttcttcttctaaaagattgtaactcatggctttatatagcctttggcctttaatcttgatcctaactgtcataactgacagttaggtaagttagttagagttagttgctaacttcttagctaaaaatagacctctattagtgaccaaactccacaaataaaatcaaaatagataaaaaagaaaatataagagtttttattttatatattttaaaatattttttttttgtatttttataaaattttacacaaaatttttgtggtaattaatgaaataaattaaatgggaaccaaaattcttataacaattctatatgaaattatacttggagaaaaattagtaatgtggtatgtgattgtaaagagtaaaaagtaaagagcgtgagaaagataaattgcaatgttaaaggaagaaggtagtgagtgagagtgtggtgtaggggggtgggacccagtgatcagatggccgcgtttatcgggatgataaggctggttcgttcatctctatccaaactcatccgtgggacccattccaacccatcacgcgccatatatccactctcaaaactctaatccaaacctattttccacctcactccccaaatccttttaatctttttctctaaattaatttttttttggtaagaattcggtttggcttttcaatccttgtgcatctgacgtggattacatggaagaaacgagagtcctggtgaagtcgccggaattaatggtggttctctttcttattacattttcgtttcgattacgttgggttgctgtgtagttgcacgatagtttcccaggaagtatgtatcctaagttgaaggtgtgtaagtggtatttgtgtaattttttttttattagattgtatattatttatttagccagtt

SEQ ID NO: 218535 - DNA, 4415 bp, Cannabis indica
ctaatatttccaagctactttgcaaccaaaattaataataggtaactacgtgttgaaactttacaataaatataaaattccttcacaactccgagtttaataacaaaaaaaaataaataaataagaataatagataacacatattaagccgtatagaatcagaaatctattggaacataattacataacgaacgtcaaacataaacaaccacacctaatcttaccatattataaacaaataataataataaatccaccaattttctaaagaaagcaatgacaaaaaaagaataacctaattccccaacaaatctgtatctgaattttcacccaacggctcaattttcatggttttagttaccagtgggaaactcgcagcgaccgaattctgcaaaagatataaaataaatgaccatcagttaaaggagataaccttttgagctagaagtcaaaaatcgaattaacaaaagtgttgacataaaatagttgaaaatattggaaacttttttagtgattgtgagccgtgactattaatattatgacatcctaatacgtcttattctcaacctatataatatgaattatatgtagttttagtcagatttttcagccacatgatcgatccttcacttattgttttgaatttcttttcaattgtttctactataaaattctcacttgtccacttggatgtagaatattgtttaccctgttattttattattgtatagcccttctaagttttaagttgtcacgtatagataaaggagcacaactttatgtattattactctatttcttataattaactttcactttcaagcatcatatatggtattcatattaatccaattgcgtcgtccacttggatgattttatatgcaatttaagatatcaattaaaattgtatacaataaatcaacaataaaaatgacattcacacacacataacttaaaattatcacactggtgtaatctgtttttcaatttttttttttaaatattggtaaaaacctctaacttataaagctatgcttaaaaaaaaaaagaaaactacttattaagttcatataacctattccaaatgataattattagagacataatgtgtaaatatttgaatttcattaccagttatcctatgttctaataattaattatcgtcattattgataaaatattgaaaagatttgacacaacgtcaatgcctataatattagctaagaccaatgtaatccgaaattaattgatgaaaaaacataattaaaaataaaaataaaagatgagagagagagagagagagagagtacgtactagggggttgagtgacaacataagcggaaccaccaaaatcacaagtgccagtaccacgtgctttcttctgataatagctattgaaagcataagaggcgtgggccacaagcgagtcaggattgtaacacgtggatccttcctggatcggacggcaatcagcacctccctcaccacaggcgtaatccagtgcggcctggagtttctcattcccagctttttcattcgccacgcaccacgtcgcaccagaggccgccgttgacacgtcaccggtggccggaacctgctctttgctgccgttaacgggcgctgtctctttgccgttaagtgcagcggcagttaacggaatgtcgtatactttctgctggttagggtaaaacaatccataatttctctccgatgtgggaccgggcttctggttctcgttaaacaaagcgaataagtaaacgttaagtgggtccttgggcctcaatggggtcccatttccggtaaggacacgtcggactaagtttccgttatacgccgctgcatttgactggctagctccaacctcgttttcgtcgcctttcgaaggccaacctgtttcagtaacgacaacctttacatcgtcgtatcccaaagccgacatggctgcgaacacggcatcgagttgagcctcgaacagactgtagtaacgcaacccgttccccgaatcaacattgcctgaatttgtccgaaacagcgcgtagtctagggagattttatctgcgtttgctgcgtaagcgaaaaaagggtacgcgttgaccatgaggtaggaccctgtttgacgcaaaaaatccagcatgggtttgatcacgggctggaccaattcggatttgaaggatccagatgaagacgggtatgatgattggagagcgctgagtgctatgggggaggagagctttatggaggagtcgaggttaagcttttttagagaagcttgaaggtttttcatggcgggcacgaggaatttggttgtgttgttagggtcgacgaagacttcgtttccgactgcaatggcttcgatcttcgtcgcagggtggtattgagagatgttggcttgtacccatttgtcggtgaaggattgatcagccgcggcagaggagagaagctcatttgggagagcaacgacgacgtttatgcctgagttagccaacgctgttagaacagttgagtcagtgtcgtagagcttgatccggttaattccctgagatttcaatagctccactaccttcgatggttgtggtaagtcattcgcaatccgaccgtaattaatactgatggaacctccctctgtacaccgaaacaaacaaataattatggtcaaacataattgtaaatgcacaataatggaaaattatgcaatagataagaaaataattatacctgctaaaataagaaatgctaatgagaagagtaagataaaagggtaaaatgtgagttttcgagccatgctctttttcagaaagttagaaaacagagcctaagataaagagaggaatagaggaggaggagcgagtttttcttagatatctgtttcttcgtggggttttatatagagtgaggagcgaagaagaattattatttataattaattatataaaataataagaaaatggttatacttttttctttctctctcttttataatataatatataataattaaaaatttgtttagttggtaaagtgggggccaaacgtggataaaaaaatgggaaaaagatcgaggccattttcttcttatatttcgcaacagataaagagcactttgtgaccgtttttccttttaatagttcgtgtttaacatttttttgtggttttttattttgtctgtcgtcgttctcctaactcatctgttatatcttctccttttattgatgaccctacacgtgtcctacacagtaaaatcaaacgtactgtttatgcttaatagtttggtagcctaatgtttagagggagaaaatgaccatgttggggaaaatttcaagtacttttttatttttttgccaatttaagtacttagagcatcttcaggtattatttagttttttcttttattttttctaaaaaaaatactttataagtttataatcaattaattttttgagaaaatatatataattataaagtttaattaaaaaataatatgtgaaaccatagacggtttttaaattagttgcttactattagagtaatttttataagaaaaagtatcaaatttttctaaataaaaaaataataatattttaagatataatatacattttataattactccactaaatatattttagttacttgttcatttaattctggaaatcatgaatcttgggtggatccaatttttgctccttattttacctctcaatgatgaggttttaaggcaattctgtcttcgccaagaaaaagaaaagctaaatccgaacgttgggttttgccagctaggctttttgtttggtagtgacataattcttctaaataaaatgtaccaattgtcaaaacacattgataagagcaccacttgtacatatgactcaaaaatttcagttttgatgtttattattgtattaatgatacaagattaagttaggaaaccgcctctaatttgcagggaatatatagtcaggaatcttatatagtactttatgtatgtatgttacatacaatttatctgatgattatgtcaacatcataaacacgatttttgtatgaatataataatagattaattggagttataagggtcatggagttcatacttgaaactcttaatgaacaagttttatagttttgattgactaaattgtgaaatcgacacagttgattgattttgatgtatttggatcgttaacggatattattgaattcgttttcccatctgaacataatattgttggattttttggatttataattttcaaacttgttagttaaggaaaaaaaaatcaagtttaaagtttacattatgtaattttatacatgtagagcatttttactaataactaatgagaattaataataaataaagtaacctttctcttatatttgtttacatacattcttaaaataaaaaaaaaaaaaag

SEQ ID NO: 218536 - DNA, 3330 bp, Cannabis indica
tttttggttggattgaatgattcacatagtagtgcgagatctcagattctcatgagagatcctttgcctagtctaaacaaagcttatgcagctgttgttcaagaggaaagatagagatgcgtaacgagtagtgcaattagcagtttagacattgacaaacctgcttccaacacctgaggacaatttgctggtaatgttcaaccttataagcctaaatatagttgcactaactgtggaatgacaaacatacgatttatagatgcttaagaatcattggctatcttcttggacacaagctccatggaaaatttcctaacagaaatgctaagggtcctccactgaaacatgcttctactaatttgaccactggtgaagaagacaaatcaaaggataatgcacctgaaaaggacttgatgtctagtttgtccaacactcaatgccaaaggctgatgaatttacatgcttagaaagttgcagataattcaattaccaattttgttgatgatcaacctattgtctcccacttttctggtaaggattttctcatccatacctctaattggatcatagacacatagccacaaatcatgtgtgtcctgatctctctttatttcaaaatactaataataatcccgttctaaagttgtcattttacctactagtttacaagctaaagttgattgtattggatcaattcttgtgaaccctgaccgtactcttgaccatgtgttttatgttcattcttttaaaagcaatctactttctgttaactctttgacaacaaagactaattgcacattcatgttttctaatgacaaatgtgtcattcaggacaatatgaggagcaaggtgattgggatgggtagaaaagttggcagtctcaactacggaaacagtgatccatccaagagcaatcacatcccttctatttttttcctctatttcaaattctaaaatctctagtgaaactgtttggcactataggttaggccatcaatcttgtgtaaaaactcatcatttgaataaagctttaaaattacattcagattctaattccctttttcattgttctatatgccattataccaaacaataatgaaagctaccattcatctctaatcacaatattggtaaatgatgttttgagcttatacatgttgacatatgggggcttttaataccttaaccacagagggatataagtatttaattactatagttgatgattcatatcattaaacaagaatctgatgttcaaatcgttatcccacagttcataaaactgattaaaaaccagtttgacactactattaaaggacttaggtctgataattctaaggagctacaattgaatgaaatttttcatgaacttgggatcatacattatcactcttgtatccaaagaccacaacaaaatttttttgttgagagaaaacaccagcacttactcaatcttgctagagcccttttatttcaatcttatgtaccttttgtttattggggagagtgtgttgctacgacatcatacttgattaatagaaccccaacacctaacctaaagaataaaactccttttgatatccttcacaataaaccacctacttatgagcatctaaaagcttttgggtgtctagcatatgcatctacattgagtcaaaacatatcaaaattttctcctaagtcagcaccctgcattttttgggatatcctacaggaatgaaagcttataaactccttgatttgaatactaataaggtgtttcattctaaggatgtttatcttgatgaacacatatttccttatgtgcatgctggtagtgttcttgttgactatgagaatttttttcctacacttcctagtggcaatcatgagcctgtttcgaacactttccccatgccatcacttcccgtttctcataatcatgaaccagtttctctcactcctcatactagaagagggagaaaaatcaacaagccatcttacttgaataattatcattgctatttggcaactcacccttctattttttcatcacagggttctttagtcagttcttacgctttatctcaagaagttaattatcacaggttatctcccactttcagagcaactattctcaccatttccagcaattttgaacctgaattttttagtcaagctcatgcatacctgaatgggacaatgctatgggcaatgaaattgatgcccttgaaaagaatcacacatggatagttgttactctctctgaggatcaacatgtcattgggtgcaaatgggtgtacaagatcaaactcaatgttgatgggagtattgaaagatttaaagcgaggttagttgctaaaggttacaattagcaagagggtgtggattacactgacacttttgcacctgttaccaaattggttgctctcaaattagtcttggctgaaaggatggcatttacatcagcttgatgtgaataatgccttcctacatggtgacctaaatgaagaagtgcatatgtctctatctaaagggtatagatctaagggggagttgccaccaaacccagttcgcaagttacaaaaataactatatggacttaagcaaggctcaagagaatggtttgccaagttctctagtgctctcactgatgaaggcttccatcactctgctacggatcattccctattcattaagcactttgatggagggttcatctttattttagtatatgtggatgatgttatattagctagcaataatctgcaacagttggaggccttgaaaattaggttgaatgacagatttaagctgaaagatttgggggaactcaagtactttttggggctagaaattactagatcaaacaaagtaatacttgtttctaaaagaccctatgcacttcagctccttgaagatcttggattcttaggcagcaagcctatgaatacaccaatggatggcaatctgaaacttgggcaagatgagaaagaaaacttggctgatcctacattatacagaaggattgttggcaagctgcagtatttgaccattaccagacctggcatttcctattctgtaaataaactaagccaattcttgtccacacctccggtatctcatccaaatgatgctcaaagggtgctccaatatgtcaaaaacaatcctggacaggatttttttttttttgtactagatacagaggtaaaaattcatgcatacactgattttgagtgagtagcttgccttgatacaaggagatccactacagggtttttgtgacacctgtacttgaaaattaactaaattcaaaattaaaattttcttattaaatttataaaattacgt

SEQ ID NO: 218537 - DNA, 3817 bp, Cannabis indica
tttttctctttttttacattcccgacggcttaaccgtcgcctatagtacaaggcacggtttaaaaccgtcgcctataccctattataggcgacggttttaaaccgtcaggaagttcacaaaaactgtcgcctattttacccattttgcgagttatagaaaccgacgagaatgctttaaacggctatttaaaaacatcgggaaaatctacttttatagtagtgtcaaaaagtcaaattttaagactttgaccaagatacaagaaaattagacggagtcaaaactcgaacgatggaccagatgacatcttaattgagtgccacatgacacaaaagaagtaatatgtgagtaatactgacacatttttaatgtgtcagtactcgccccttataattttagccctagagttggtattcttaataaattcggggaagggttacttattccaaaatcctaatttgaaaagaaatccaacaaaacataaaatacttaattggttggggatacaagagcacaaaggacaaaatagcatcaccaaataccaagagagatagtcatatacaactactgacactttcctaatatcagtagtcgcattccaagaaattctcaacaagaattggcacttaaagaaaaatatcatatgcatgcactaagacttggaccctaaagtcaaaattacacaataaaaggaggaaattagtagtaaacgagtattggcactctcttagtatcagtactcgtctgaatggcagtacttgcataacacacgtgtattgacactcaggatgtgtcagtactcgcccaagaagagactaaaggaatctagtggccaaatggttctttcctacatcactgatcacataacaaatgttggagtgtcttacacgagtaccggcattctctttgtggcagtacttgtgtaggctagttcaaggagaaattttgggtgttttgaagctcaaaaccctaaggaatctctaccaaccttgaaggacttgtcaaattcaactcaagatgcccaaatagagaagtgccacactagtactcaccaacatagtgtttgtactcaccaacctatgtaccacacgagtactaacactatgttggtgttagttgtcgcccaaggccatttctctccaatgggagaggacccttcagcatattctcaatttatctctcgaagatgaagcttctagaagacagtcaaagcttaaccacctccgggaatagagaagatatttcttttatgtgtaattattccattatttattaaatgtaaagtgcaaaataaatgtgacattctcactactacaaaatgggatactcacagcggttaataagagggtcaagtatgaaaaccattggaataggtaagcggaggttttttccatcggtttagcaccgaaggaaagaaactgttagaatagttattgctaacggtggagaaccgtgggcaatactaaatattttttattaaaaaaaaaaactatgaatcctaacggtttaaaactgttgggaatactaagtagatccaatagtttatagttgtggggaatgcttagtattcccaacagtgataaattgttgggaaagattttttttagtattcttgttagcatattattttacaccagattttgttttgtaataaataaataaataataaaataattaattagggtaaaattaaatatggcatatatagaaaatggtgaaaccctaaatgagaaaaaccaaattttgaaaaccctaatttttctccctctttcccggcctatctgtttctctattattgttatgcgatataatgtctgcatagttaaaccatgagaattagcagataattaaggatttaattaattaagttatggttatgtgatttttggtagaaaattaggacttattgtgagaaataggccttaagaaaatattttctcaaacatgtttgaattctaggagtattacatatgcaatatgtgaatttcatgacttttatgttttatggctagtgatagtggaatgcaataatttgggattagagtcattagatacgattaaatatcttggaattagcagagcaagataattagacatttagaatgtcgagattattcggagttatgactttggaccattttacccctaagtggttagattacttcatgactaagtaagggaaaatttttattctaagttagtaagttttgtctttagtgtttttgtgtagataaatccacactaaactgaatattaatagactttattaagttatttaccttgtgataaagatcaaacagatgataaaagcaacccacttcttcattctctctctagcttctatccaagcaagaaccaaggaaaaaagaatttcccgtcaccagatcaaactaggtttaaattgacatcaattcatagcagctaggaaggagacaagctaaggtaaactcctttcttaatttcttcttaaatttcaagtaaaaagttaggtttggatatgtctttctataattcaaatctgttaggatttgggaagtttgggagctattttaaaacttagttttgagttgtttggggttattttggctggttttgaagagggtttgatgtttatgagctaaatttgagtttatgagcttaaaattagttcatcaatggaaaaccttagttcagaggcttgttgggctattttttggttggtttatgtcttatatgtcttaattaggtgttctagaatttttagttaaatttggaataaaattgagcttagggtgaatttttgtgaatttttggctaaaaaatggtccaccgttattccagaaacggtgaaccatttctccacgcagaaccccaaaaaacggtgcttgataagaactaaaacaaaaaattgttcaactttgtacattaatactttaatttatcctgatcacatatatgtaagtaacctgaatcttttaacacaacctcaaaagtatgaagagaacaagacactaagttaattatcacccaaaagcataagcatgttttgtttaccaaggatgaaagaaagatatatgcaagataagaactactcaaaaattttgtacaaaatagagaaccaaatgaaaagaattaaataatgtaaaccccaaaaattttctgagggagtcaaatcgacttgaatctagggctttagtgaaaatttagtatcaacatatttcaactgtaatatttgattatcaacaagttccctaataaaatgatgtctcatattaatgtgttttgcacaagaatgttgaacatgttttttagaaatatgtatagtactggtattatcacatgcaatatgataagtaaaattagaaggacatttagattcatttttcttaacccaaataatcttcttgaattttaatctcttttttctaacagattgtttttcataattattgaaatttttatttttgaagagatttattatggtaaaacacttaggtcgaatgtgacctttaacaccacaaaagtgacacgtgggaatgaatttttttccttcttttataaaaattgtcattcttacctagctgctccctttctttaagaacaggggttcagctgtagaaacagattcctgcagtgttagatagaaaaaccagaaggcatatttttagatttaacaaatttagtgttcaatttagattgatattcaacatcccgacccaacatgatttgtttgacctatatcttgaacctcttcaaaagctgaagaacttagatttggcattgttgtattcttcacaatatgctcaattttattggccaatcgtttaatttcataatttt

SEQ ID NO: 218538 - DNA, 4234 bp, Cannabis indica
attgttggatatttcgaaatcccaagccaccagcagatttgggcctgcaaataaattcccatgccactagtccaggtccagatgcctcttgagtacccttccaaagaaaggacttacaagttgcttcaatatccttcaagagcttcttgggcaaaatgaaaatctgagcccaatatgtgtgtatggcaagcaaaactgagttgatcaaagtgaccctgcccatgtaagataagttccttgtaccccagcttcgaattctgctagtcattttttctaacaaacactggcattctgctctagatatcttccttgaacagattgggatgccaaggtatcagaatggtagtgagcttctcttgtaattggatgcctcaagaattctggatacttcattttatggcattcgtgaacagtaaattgctgtttttttatcacaagtaattttttgttgtgactttaaaagattgtcactaaaggtagacttttttttatagtggaaagtaatttatgttgtagtgagaattaagaatacacactaatgttaattataaacatttcaataagcttcaaatcaaagagagttctttattaataataattttgttgaagacaacaattattaagcatcatacaagtacagcaaaaggctcatactcatagcacaaaaattattaggaaacaaaagaaagacaaacaaaacaaacataactttggtaacacaacaattatgagaaataaattaaagaaagatgaaaaaattagactaatcaattatgaagaagaacaacacaatgaattagactatttttagatcgagatgctattggggattcccttagccgtaatccctggttcacttgtaggaaagagcaaagtgtatgggaattgaatcggaccacatcgatttttctcatgattttgattcttagtcgtaatgtcatcttcaatttcacgaagttgtgcttgaaaatttttgaaagcatccaaagcttttttatccgaagtccaatcaacatcttcattcttaccaagataaacctcatctgattcatggcttgacaattgcgcaataaggtaaatcatctcaaggctttgcttttttgaagtaaatgtggacaagaaataactttcttcgtcgtcagcgccaagtgtagtgccctccgtaggcatgaactgtcgacttaatgtggggcgattcggatagaatgctgcaaaagagtactgtccaaagttaacagctgcatgaagagcggaagaaatccaaatgattatggtgcatgattcgacaagttcatcaaaagttttcatttctggccacccatcatattctttcttatcaccatgaccaacttctttgatttctttccaccaattctgaatctctttgtcattttgcaccttcttatcttcacccttgtagtagatatcacaatactctttaacccatttattgatagcattccatatctctaacccatctacagcataaggatagttctttactagctcacaaggttgtttagtctcttcatctactaatcccctatgtagattcatagaataatattacataatgttagtaaaatatatcttgtaatttaagctaattaattatagataatggactagctatctagtacttgccttttaataagatctgctgggagtccttgcttattaaatgcccaattattcttatagacggctgacgatgattccattgcatactttccttgaaaaaatatgcgctctatctttccatcggcattcacaagaatagttctagctcgtgcatttatgctcatggtaccccgaaaatggggatgcaatagtttgtagattggatggattacacttagctgtctgtttgttgctatcacaaatggctcaatcactgcatgtgtattcaacctgtaaatcaattgattgtgtgagatcatgattggcatgttatgtttttttgtttcataatagttattaaattgaaatatgtgttatattaccaatgactgtagagctgatggtagcctgaatcgtttacagctacataacctttagcgagttgccaagtggcatatttatgaggatcattgtcacatggtggggtaaatactgtgctatctgcaccgttttcatcaggaccatcttttggcaaacttaattcaatggcgacaggcatcaatttctcttcttttgtcaaaaacaagattgttcgagttgcataagcctttgtcgaagttttatttattctcttcaagtatggcataaacgtatcgtggtgatccaatataaataatcttttttgctcgatcgcctatacatatatttatatatatttaatcagacaaaaattaaacaccttaaagtaccaaataacaatcctcatttaattaaatgcaagatgaataatataatagacatgattaatgtatataccttatctacactagtgaaatcctccaacatgtttataatatcgtcctcactaattttgctatcttgatcaccgtactttcttttgtctagcttgctctttggtgggaatttctgaattcatcatcaaaatttagtaattattatgtaatgtaaataattaattactatatgtaatttaaataaaataaatggtataatacatatatatttgcttagtttttaataaaataataaaatgtaattactttgagaagacgaatgtggagagggtggacaccagcaatcatttctcttccaaattcttcatcatctctccatgcattttcatcacctataaatatgcatatactcaaaatcattattgaaaacttgaaattaaaaataattaataaatatttatataaatacatacatgcatgtaattatattacgtatgtatgtaggtacctgcttcaattacaccagggacaggtaattttgtaccctgaaacaacgcaagtacttctctgaagctaccgtagtagttatcatcatttacagtaacatcttcagacaatgtcgtaattattttagcaaccgcctccgatgatggccgtggttccgtcttcaagtgattgatttgttcatcgcgtggaatgtatataacttggtttttatcaggccttctctcatgaccatctaaataaaataaaaaaaatgtatatagatcattacatatagtacttatttggatgatattttttaacctataagatattgtataatattatagttaattacaaggttgagatctcctatagatacaaaaaaaaaaaaaaatacaaataataatttaagatgtccaaattaaaataatttaaacttcctgtataacaagtcacgcttgtttaaatatttttaggtacatgcaatatttaatcatgacatccccattctaattaattatttctaattttgtgaaaaccaatatagatagtgattaattttttaattgtgttaattagatttaattaatatataagaagatatatatacatttatataattggtcctaattaattataattaattaagtaccatgagttagtgatcttccagttcttcctctacgagggtaaggtaaatctttccctccaaggattggacgatcatcgcccaaatcattggacgtcgcatagtcatacactctgtcccattctttcagctcgcctttattattctccgatctcaaatgtctaagctcaccttctcttaacctatgtagtttgtgacgttctgaattacctggaagatatggctaataaaaagaaaaaaaaaacaattaatcaataaccactttaattattaattagatattattatttgcgtaactaagtaacaaatatcagttattggttaattataacataccttgtttgtgaagaaaacacgagggtatgagtatctttcttgtgggtaaacccaagaattgcacaagaactttaccgaatcttctgcaccgggaacattatcgagggtaatatacttgagcaagaactcatccttattattgttagtgattttcaatgctggagggactcccattttaatttcattccaatttgtaaaagttaatttaaatttggagtactctttatgattaggatcatcatcatgatcactacatttctccaattttgatgagtatccgcccaagagtgcatcctctgcatgcatgcaacaaattaaattaaatacgtgtaattaactataaaaacaattatcacgtcattaattatgtgtaatattatttaattat

SEQ ID NO: 218539 - DNA, 5066 bp, Cannabis indica
tattttattcattatattatatttagggttttttttttaaacttatttttaacctatgatgggtaagtggggatctgtaatatacagtgcacatagaaatgaataatggatggaggattagttattatatgttagtatttttggtgacaaatataaaggcaaaatcagtaaaaggaaaagttgtatattgtggcttttttgacctttacatatgtacaatgtagtaatgtgtatataacaacatattaaagagagttatttgagcagtgacagagcttatcattaaccttaattataataatagaataatctcttcaaaattataaatttgcatggggttatacaaattagtaataaataattatatatatatttatatataccatgacaaatctaggagattccttaggaattagagctaattcacacacatgtaccttgttttcgtttataaatatatataagttccttttccacctcaccatcacatgccttggtttaaaaactttttttttgtttaatttgagggtttcaaaaacctttctcattgcttttatgtataaaaagaaaaaggaatgaagtttttaattggagcattgtgatttgtgggttacacgccatgccactatagctatatatccttttcaccactttttttttttatgtcactaaacacctagaaaaatggtttaaaaagcttctttcaaaagacaaatcacaaagaaaaaacaaactaattatgcaatatttgaaaaatataaagaaaaagggttgagaaatttcataagcacttatataaatagtggtcctagtcaaaacatactacattctttcatttttttcaattagttataattaatttactagctcttcttaattaattagtttctttaataaagagatacatatttatgcaataaaacctctttatagtcataatgttgggaccaacatggaaaatgaagctatgacttgatagaattatacacataagatattcaaaatatacataataaagtctaaattaattattaatagttcataaaagtatggataccttgtaaaaataaagcatatatagtcatgtatgaaaatgcaaaattaaatcaaatatatacataatataactataagatcgaaatactttcagttattgattctttgagctttagtcttacacgatctttagttttgtaaaagaaaaaaaaactgattagtgtaggtaattaggtttccaagctctctctactctctttagatgaatttagtgtatttcacaaaatgagtaatgagctcggagaccgagaccctatatttatataagtgataccttctatcatggtctttgccacaattaattattagaatattgtaacaattaattcaaaaaatttaatatttagtaaatcgtaatctaaccatatataaaatatcaactaattaattgtgatcaaatttaatgagtataaaatattcattgtatcatatgcatgtataaaattattaattgattttatacttaatatataaaatattctaacattctccctcttggtcaatatttatatttatctcttaaatccaatatgttcctcattacataataaatatatgaatcataacgataagacctcattatatgtcgagtattatcttccatatattacgatatattatataataatgtactttatgtagcaatgtacttaggcgaataagtcctaaactttatgtttattttggtcatttaaagataattttcttagatgatcaaatgaaggtgcacataaatatgagaaaatattgaaattagagttttcttgaataattttagttgtataaccacaaactagggtaattgaatctcatatttattttacgatccttgaatttgtgctgcgacatgcctttagtcaaggatatgtgatcactcaatttagtattgtgtgtttaatgaccacttatcatgcctctttatgaccaaatacttaatgtcgatatgctagctgcgacaaaaacttttagctataaatattgtagatgaatttgtcgcattttaaaagtatgtcttatctatattttcagataggtgacatgtggcataaaaagaaagagataatctcaggatctcattagttaaagtctttcaattaaaacaagtcacgaagaggcttaactaatctaggacaggtcaagaccatgaggtatgcggagatccaccttgccttattttggcttcccaaacacagaagacttattaccacttcaggacccggagtggcctaaactcaaagtctacccaaatgatacccggacgggtacttgaagggcctatcttgaaagttgactctccaaaaggatcgcgaacgtctaccttggatacaaacacggttcacctaaagacgattatgctttttctgacacagaatcagatcttgttccctatgccaggacatggtagtgcgctcatctcacacacctttttcccaagcagttattccagtcatttacttttcaaggttaaatcttttggtgacatgtatccattgcatatagtggtcctctattatccagctgcttcaatgtacgagcacaaatccttttaaggagcccaatagttagctactttttgcatgtatattaccttattagtgggtgggtcatggggatgttcatatacccaccctttagatatcacaacctataaatatctttctattcctatacgaagggagatcacaacctagatagccgaagctctgctaatattattctaagctttcttcttcttcatgagaaatacagaatatagagttagagtttcctatataaacattgtaaaaacatcatatatgccttctaaggctaatagactgactcgtggactagggttaattaactgaatcacgtaaaaatctctatctcttttattattgcaacttatttattttttagctcttattatattagttttaaaaatctcgacaaacattttggttctttcattgagagttgaagaaagatctaaacccataatgctactgtaaccatggtgtttagcctaaaaaaagttcccaaaaggactcctcaaggcggccttgacactgtcatggaagatgtaataaaacctctctcgctagagcacgcccagtcgagtgaggtgaggggaggagatacatctaatgctgacaaccaagagggtgacttaaacaacctaaatgaccgcatcgacgaggaccgagatgttaaaaatgaggaggaagacaatgatggaaaatatgtcaaagctagacagatattacgaagatggctatcagtacgagcagaacctcgaggtggtttgagcgtccagagagttgctcgagactaaatagaaattggcccattaagagaatttttctcacagaatggagagaatcatggcgcacctctaaggtaagtttggagatcttgacgagggagattcagatgatgaacccttagtggaatgtgttagaggaactaatagggaaatcccttctgatgttggaacctctgctcctctacaagacaatagaaaagaaaaagtaggtgactctcagataattcatctctcatacctcctcagaaaaatacgaatccaatcggtagacctactaggcatagaaggccaccgacacctccaggcttagattcccttttcctttgaaaggtcttactatgcgaaaatagactggtacgaaagtacctgagcctagaggaaggaaaaatttccctagtgattctgtaagctgggatggagggaccagagagcaatattctgatgaaagttagtccacagtagatctatgaaggcgttttgatgccaagtatgaaaaggctaaaagtgaaaaggtgatgccacgagggaatgacctcagagttcatctaaatgacaaagtttgcggacgagatgtccaagataatgacaccaaaaggctagatgagaaaattactgctctgatgaagttggtttggaagcaaagtggggccctcaccgactctgaggatgcggaccctgagccgtatgttagaaggaccacggaagctccgctcttggagaactttcaaatgccctatatcaggttgtatgatgggcacacagatttgaagaatcacctggccaagtataaaaaaatgatgcaagtggtaaaattatatgaaaatgccaagtgcttatgcttctccctggccctcaccaagtctgctaaggactggtggaaaaggttagctcgcagatcaatccatagctggaaggaattgcagtatgccttccgaaagtaattcatagatgctcgctactatgatatggaaataagatccatcaccaatattaaacaactggtaggataaagcctaaaaaaattcattcaacagatgatagaggcggcaactaaaacaaaagtgactgatgacaagaagcttgtggccttgcaacccgaactcgcagtttgtggtactcagtttaagcatgttatcaattgagatattatttatgtcaataatgatttatgttagtgatttgttaatgtaattaattattaaaattgaggtaatataatatatataataaataaggtaatgatatatataatacatacatatagattaaaatttaagtgtgataatgactgttatttatatatatatatatatatttgttttgcaaaatattaagatacaatgataatatctgttatatatatacatatatttgttttatagtatattaagatacataaatatatatatatatatgtacgtggtacagtataaaatatatatatattataggtttgttttgtagtatattagaatatatataatatagtgtttgttattaatgttactaacctaataggattagtattctgattttagtgggatatatagcaaaatttaacatttagattcctatataatatctaattagttagtcatattattcttctagtcttggttttttacatttcaattaaagcctgaacacaaattttactctctactcttaggtttttccttacaccttagattatttcttaatgaaa

SEQ ID NO: 218540 - DNA, 5626 bp, Cannabis indica
aatttttctctccttcaaattttcctcttccaccctaactctttcctctctaccaaacacagggtaagagtcaaacgttcattgataacttgagttttacatagataataagtatttgacaactcttaaacacacacctctgagattgttgttaggatggcagaaatccggtcataggcaggatatctatccttcatagatttcacacctgctagtatagaagcaacccattcttgatcatggatgggagcagaccatatagggcctcccatattgaatttcttcccgcagtcaccacactcttgtggaacaacaggaccataaccaggtagatatcttaagttgttgttgctctgaaaagatagaaagtgcagaaaccttgttcaaacattctcaatttccatttttttatataaacaatttgaaggaccattagttcaagataaagcaagaccaccattttcttgatatgttttttttttccactcctggaataacttacatgaacttattaaaacatgcaattttgatccactgtttattataatagaaataaacagctgatattgctggtctaattcagaagaaaaacataaaaatctgaatataagctgtccaagaacttgtttcatcaaacactctcataccttggacattgtccttccaatgggctgtagatgaaaagaatcacagccagtgcactgataaacatatgagagcttgagaggagtgttcttcattgcacttgcagagctgtaaccaaacatttttaaaagctttcaatcaagaacagaacacagaataaaaaataaagctaacttcgaacacaatttaatataacttagccacctacgagtagacacggacgaatactcgaatgtagaagttcatctgaactgataacacaggaactatatatcgcttataccgattggcatgactctgcagaaatatacaacacccatgtatcaaaacaaagtaaactgtaggtgcacgaaaggaaataaaggttttataaaacaaggaatgtgaggaatctaacaacagattattgctattgaaaaaataaaaacaaatatataacagattattgtatcttgaaatgtatagaaaaaatttcttctacagaaatttgatcaccggtcacttgaaatgaacaatgaatggtccacaatgtcactaaaaaatttaaagattaacaaaaagtattaagtccataacaaaattggacactttataaagcacgagtgacatgcacatagacagaactgaagagcctcaaaaaggaaatgtcaccatatattgaaacttcaatatagtaatgtatattaaagcatataatgaacacattactcccaatatcagttcagctctcctgaaatgatatggtacatcggggatgtagcaggtattaacatacctcaatgctggctaggaggatcctcaaggccatttcatggcaatatttccctctcaatggataggaaccatatctaataagaaacataattttgaactgtgagaagacagaaaaaatcattgctcaaacaaatagtttagtaactataaaacctactttgagtagcaaacctccccatttcccccacaaagcactgccatatcagttgctgtacacatcagcaggcctccatcaacaactgactgaactgcagagtctaagaatacagaaggtgaaccataaggatcaagatcaacctgcaactcaacccaacagagcatatgaattgttgttcaaagttataacataaataaatcacatccgtgcaggcaagaagtctctaaataaatataagaaagaaatacataccacatcgaattcattggggtgggtgagcatgtacacacgagcatcagcaagatgtgattccacctttttacaagccactgaaccattgaactttatgttcctcctacaagcttccactgacactgcataaaagccaaaagtaacaatgacgtctctgatttacatatctagattatgtgacagaagaaaaaatgtaaatcataaacacagttaaatatctaaattacaggctgagtataaaataaaattatataaaagaagaaaggaaaattcaagcacaaggttttattttattttttaataaggactctcctggaagtgtaaaacacataaatatatacatttctatcatgtgtaaagtttgacaataacctttatcgttgtcaagagccacaacttgaccaataccctccacttcccgggcatatcttagagctcttaaacccgaagctgagagagcctagaacacatagatgaaacagtaaaatgagcaggacacaatgaagatctctgggttgataaaatgcactaagcagtgtgacaaaagacaggaaacaaagagcatcaaataaaaaatagcacaattttgtgaacctcgagaacttttggggccttcactactactggtccttttccctctgtagccttaaccacctcttctgaaacagcacaagcttcatcttcttcatcatgggccttttcttgcatttcacaatctccattggacaccccaccatttccagcagatccattaggtgcctcttctggaacatgttctgaagcatccttttcaggaacctttgtgactgctttccttctttttgacaactttgcttcacgttcttctttttgtttggctataaaagtccttaagacagcaatggaaatgtccctgttgttaacctgatcatttaagtatgacaccattacaatccttaacgttgagcaaaaatgataagttgaagatagagcattccaaaagccaattataacaaatgttttaaagacatactttccacatttaacatcttttcagaaagtctgaaagtgaacaagggatttttatgatgtttcaagaccaactgtacatatttaacattacagagtttgaaatgaacaagggctatataggcatcaactgcagcaagtaggttgtcccaaaagattagcacagcatagaataatctgacaaagcagagaacttccactaaggcagcatcttaagtcccactttgtattcccaaattcccattacagtaataatgttgcaagtaatgatgacacaaaatcagaagagctatgtagaactctctctctctctatatatatatatatattatgtacaatatgtataagaggtgaataattaaacgtgagcaatactttcaacaaagttaaactactgttcattatgctgccatagtaccaaaccaatcaacttcatcaagcctaaatgaactaatacatccacagacatcatatatttcataaacattttatacctgctgagaaagatctggcgtttgacaagcactaatcctaatgcgcacaaaagttcctcattagtcacttgtgctccattgttggcagcaaacaactaactagatctacgagtcacaagatcgcctaagcccaggtaatgactaactaaacataatgaaatctatgccaatgtcatttccactaaatttcacacaaaactaagtaattgaagttcttccacttgctgaaacatacttgccaaattaaactactcacgtctaggactaaattctaaaatacttattaaccaaattttaagataagtaaacatgtctttctcagtacaaaactagatatttttccacatatacttttatttttaccaaccagagcacagattttgaccaaataacactaacacacttttaattagcaaacctcaaaacataaaacccgtaaaagaaaattagggaaaaaaaatcaacttcaaaactccaaattgatcactcaatcgatttccatcgcacgcctttttctttaccaacaagacattggcttttaaacaaataacactgaccctttctaattttcacatctcaaacatataaaatcttcgtatatactttcaactcagaaactcaatcaaagccgttacgaaaacgcaaaatcggttataaagagaaagtttgcatacctgggatttattgtaaaagacttcattcttagcgtgcatcaaaatctcagcctctccttccttgacaatagtgaaatcactgagatccattgacatggcttcaccactttcatgcaataaaaaaacaaaagaattatgggtctcaactcaactcaactcaactcaactaaaaatacaaaggaccggccttgtgttctgagagtttgtgctgttgttataccatgaaatgaaattaagtagctttaaatattatttatatatatatataggtgtggaacaaggattataacaatggtaagcccccaacgccgaaagaaaaccctatccgaggtctttacttgcttcctgctcttcgaagttggaatttattttttcttcccaataattaatttgaatttatttatttatttttattttatattcttttccttaaaccctaattctccaccctggtgcacgttagatgttgcaagtagttttatgctaaagtgggcgtttaaaggtcataataaatggggggcatgcttgcggatactgattttcaattcgcgaatctaaaataggatttttcctttatttctctctattaacatggaattgaaaatagatttgataattaagtgggtggttggtgcatcgtgttgtaggtttttttttttttttttcttgtcaaaatacgatattaagaaatacacttacaaatttaaaaaaaaaattgatgtttagctgggtaagttcataaatggacaaataataatcgtgattaaaagaccgataaaaattaaaagtaattaaagtaattaattatagtaaataataaatttaattttatctaagcaatcaatttgaaatgattttagaaaatttaaataaactaacaaagaagacaaataacaaaattaagttgagaataattaaatcaaaattattgtctagatttcgattttactctaatgtaactataattttaatcattaatgtgcctagtttattctaatatattcaaaaacctaactttattatatctttatgctctagtgtggcataaagaatgtataactaaataatagtctatatctttatatcactattaaaccataatttgttaagtctctccctagaaacaattctaaaaataaaatctcttgatttcataatgtagaattatttcaattacctaagcgaatgcttatctttcgatctcacaccactaaagttgatctacctgatgtctaattgttcaaaaattcccttgagtaataaatttcacaatctaaataatacccctaatcataatcacataaagcaaaaccatatataaatcatactcatgacaacaattaaacaaggtaaaattatattggactaaactaaactttacatcgaatcataaaatcaaagtcataattataaatccatgtaaaccctaataactaagaaaattagccacacatagtatggtttatcatctcaaaatattatttataatctaaataataactaagaaataaagttgaaagaagaagaacatatgaaaactcttgaatgcaggttcaaattacttatttgagctctcaatatatattccttctctaaaagtgtgtttctctatcgttgtatat

SEQ ID NO: 218541 - DNA, 3368 bp, Cannabis indica
tttttcctaaatagaatggttatttcgtatattatatttaccatccctaaatataactccttcctttaaagtgataaaatgacaaatgaataagttatacaacatattatagttttctttaaataaaaatgtccaaataaactagtacaccaaaccaattgaaaaagatttttgttaataaaaaaaatcgaaagtggtttgttcaatttttattttattttcttgaaaaaagatcaatattagaataaataaaaaaaaatgaatcaaaataattaaaacatgtagtaatattaataaaaaataataatgcggctattagtaaccaaccgagggaatgttctgagatggtgccgtcaaatgtataaacattcactgggaaatatttaacgcacacatacgaatccccacacgtgcctctcttctacattctcacctatatataaacaacttcctacctccattttccttcaaactcctcattccattctctctctctctctcttctctcaacaaaatctttacaactttttatacactctcagagctgtgatccgaatcaaattgaattaaacttgaaaaaatggcggcactatcaacacttccacagctcagcatggactccggctatggagtagacaagctcacttacgagatcttctcaattttggagaacaagttcctcttcggctatggtgatccaaatacaaaggtttcgaatccagagaaattgaatagtaaccttatctcatcaaccaatcgcagtgctggtcgcggcagtaatggtaaagtcagaatcctcagcatagatggaggtggcactactgacggaatcctcgccgccgattctctttcccgcctcgaggcttctctccgcctaaagtctggaaatcccaatgctgccatagctgactatttcgacgttgtggctggctctggagctggaggtattctggcagcgatgcttttcactcgcggaagagacggaggtccactcttcacggccgaggaggctctgaagtttctagtaaagaatcgccgaaagatttttcggtcttctccagccggattctttcggcgagtcctgaggtcgtcgtcgacggcggacaagctcttcgggaaggttttcggagattctacgcttcgagacacgttaaagtcagttttgatcccttgctacgatctctcgaccggcgcgccgttcttgttctccgcgccgatgcatttgaaatggacggttacgatttcaagatgagggatgtctgcaccgccacgtcagccgatcctacggcggctggcgcgttcgagatgaggtcagtggatcagcgaacgaagatcctggccgtcgatggggggatcgcgatgaacaatccaacgtctgcggcgattacgcacgtgttgaataacaagcaggagtttcctctctgtaacggagtagaggatcttctcgttgtctctctcggaaatggggagtcagaattcggtgcgggcaatgtaacttcctctcctacacccgcaagactccttagaatcgccgctgaaggagcttccgacatggtaagaaaaagaaacaatagaaatacatcatattttatttgtcattattattttattcttggcatattttttttttctaactatttctttttaatttttaatcattgccgaaatgcaattcttcttttaattaatttatgaatagtagtagtggttgaggggaccaggataaagtgttagctaccactattaaatgtttattatatatattaatttaaaaaaaaaatgagatttgtattcatattttgtacctgaagaatttgtcggtaggaaaaattagaattgtgaaaacgttgtcgtatatgcatttaattataatttacaacaatattttctaattatttggatttcctttttatttattcttataggtagaccaagcagtttcgatggcgtttggagaatatcgcaccactaactatattcgaattcaggtaaattaattgattaagtattcacacattcttattatatgtgatattatacaatacttatgtgtaatttttaagtgttctaatcataaattttcaacatattatttcagggcaacggcattatatcgaataataatgataacaatttatcagaaaaggcgaaaatgatgaataagaagaagaataatatagacatgttgagagaaacagaaaatatgttgacccaaaataatgtggagtccgtactatttcaaggaaagaggattgttgggagctcaaatgtagagaagattggtgtatttgcaagtgaacttgttgaggaacaagagagaagaaaaactagtattttaccaatggtggctttgaagcaaatgtcaccatcccctagatcatcatctgccacaactctctccagtttatcttccacctaaaaaaaaaactaaaaaaaaaattaaagtggaagataaaatttaagtatatggtttaggttctttattttgggcttttcatattattatatatgtagtttgtgaagaaaaacaaaatcaatagttacttaaaacttgtcattaaattgactcaataggatgggtttaattagttaaacttaattaatacgctgccgcttggattaatgataaatacacatatatatatatatattatatatatccgagtctgagctgccgagttcatttgtccttttaaaagaatatattatttctatttaattttagatgagtgtaatatattagtgtatgtatgattgtatgtaattttgtgtaaattgtgagaaaaaatttggaatattgttgcaaagttcaaattaaagttttcacctatatttttgttcgattttctttagatatattaaaaatttacatttatttgaagaaatgttttcaccagattgttcattgattaatttttgtttattcaattgtatacaaataattatcattattttatatatatatatatattaaatcaaaataaacataacattttatctaattatcaaaaaaaaattggagtgaaggtagctaaatgtatacatataggtgaatagaatttttactttattagatattttttgctcctgattctggtcaaattcaaatggtaacattcaattggttaggattaattattggtgtcctccctacctagtgaaacaaaaactcataaataaataaagaaaaataaaaagaaaatagaggtaggtggaggattgcactgtgtcacgggctcaccttttcaggcagcggaacacccgtgcggcaccttgacttctctaagccaaggtcagccttccaaccatccaagtaacaatgggctcatttttcgcgcgaccgtgtgcctcgggcacactcccgtctc

SEQ ID NO: 218542 - DNA, 5144 bp, Cannabis indica
agaggaaagtagaaggtttactatttctaattttagtaaataaacaacaaagaaagtactttttttttttttttttttttttttaaatgagtgtatataaaaaagagaattagatcacataaaatgttcttggacattgttgatagctcagctataccagttaagttctcagtaaatacttaattggttatattatgagtcacaaaatataaaaatctaaaaataaattaaagaaaaattacaatctaaaaataaattagaatctatcacattaatacgtatagtttccgatacttcaaacacttcactatttcgataactgtctcaaaatcactctctatcaacacaaaatgatgcttcacggaagctgccgtctccaaggctacaagacaagtcgcatcttcgccaataaggaaataagagaagctgagcctcttggtagcaacccatcaaaccgttcccaagtgttctttagccaacgccgcgacacatattgccccacttcccactttaacgtcacatttaatcttgatccaatcatccagagggaccaaagcagagagccgacaactagagaacatggaaacaaacatgagccataatttgcataacaatgagtgatagaataaatataatgtttgatgctactcatattattattgtgcaactaatcattatgggcctgtaaaatagtatccactataatcgaagcacagaggaataactcatctacattgacacccttcaacttttggccccataaaaatttgatccaatccaaccccaaaaacgagcacccaaatcaataacttgcataatgccatagggggaagatctccgtaaatggaatgctaaattgcgatagaggaagaggtactccatagtctcctcacccaccttacacaaaggataggaggtatcttcaatatgcattctcttagccgaaaaagctcgaatgggaatgacattggagagaatgctccaccaaataaccttatggtgctctaacaccttgctactccataatttgttccatagggaaggagcaacatcacaaggtggagcacggtctaaagcttggactaggtaagctaaattgctagagatggtaccagtaagttccttggtctaaatccactgatcttttctctggccactaggcttaaccaccttcaaaatattacaaactatttcagagtcaaagagggagtaaagctttatgaaatcccaatttccatagtgtaacaacatgtcagcaacccattgaagaccattgggtcgactggccactgggtttggacaaaactctttgtcgtggattacccacaagtcttcttaaattcccatcagtgataattttataggcacctttcttcaaaataactctggctttaacaacatttttccaaaattaggtttcaaaactcttgtgagagaatttcatgaaatgtctatcttttaaatacttagcccttagaaccttgcagcagagagattggttctcattaatcagaagccatccccatttttcaagaaagcctgcttcatctttattatttttgagaagcctaagacaccataggatttagggaggcacaactcatcccatgctttcaagtagaggcctcgattccccttctcacaactccactaaaagtctttagccatgccatcaactttcgaagccaatctcttagagagttttgtttcttgcatagtgtatactagaagagcaagcccaactgatttgatcacagtagcccgacttgctttaaagagtgttttaattttccaaccttggagctgggacacaaggtttttcaaaacaaagttatagtcaacatccttttgctgaaatttgaagagcgggtgaccaaagtaaataatatttccaataataccatcaatccccaaaacctcttaaatacctctcttcattcattcactcatgttgttgcgaaagaagatggaagttttaagtttattgatacgttggcctgaccaagctcaaaatttcttaaaacactcccaatatcctttagcttcaacaatattctctctacccacaagtatgagatcatcgtaaaaaagagatgggaaagatgccccattcctactcaacttaattcccttgatccctcctttgtctatggcatcctccaaaatacaagagaaaatttatgccgcctagatgaagagataaggagtgagagggtccattgtctaatgccacactcaagagaatttttacccaccatatacctccattgagataaatgttaaggaaagtagtatatacattgatagacccaattgcaaaacttatctagagccttgaaacttatgagcacatgatcaataaattgccaactcaatttatcataggcctttatgagattaattttaatcgcaaaaaggcattccttcccttttttcaattaaaaagtggataatttctttgaataaacgttgttatcttgttgttcctaccagggacgaaagcagcttgaatagggtagattaatctagggaggatttatctaattctatttacaataattatctagataaccttgtagaccttattacaaatagaattaggcatgaattgggagactttcttcggatagggaaccatcagaatgagaaccacgttagttgcatttatacccttatgcatcatcccagactggaagaaatccaccatagcttcacaaaaattagaacatattgtattctagtaatttttaaagaggagaactgaaactccatttgggcttggggctttaaagctgcccatagtaaaagcgtttgtctgatctccttatggctcgtgattctcaccatttcaaattattcaagggggagatgcgatcatatatgagattgtaaaaaactctccaaagggccaagcgttgaagttgagaagataccaccaagaaattttgcaaattctttctcaatctcacttctggttgtaacccaattgccattattattcatgatactctcaacaaaatttcttcgagtagtagccattttcaatttggatttgaggtaattaaatctttctatggacaagggattagtaagtgcatcttctacttggtctatggtaggcaaataacaaacaaatatctgtttggccataatttaatccctcacaaaatatagaccagtctcaatgggttttgttttagcatgaaacacagtgttagtagcaagtgtagcagtacgttggttaatcaacataaatgataggacagtgactgaagggaacttgaagatcaaccaaaaagagaagtaatcctcctaagttcaacaattgtattggcaaggctgtgaattcacttttagtttttgaacaagcaaccatgtgctgctttttagcataccatgagatgataatgccacctaaaaagacagcattaccccctattgaatgcttgtcataagcacatgaagcctagtctagatcaaagtaactttctaaagttaaaatgagtagcatgttgaaacactaagccctcttgttgacgtagaaatctagatacaaatatctggtcacacccccttgctagattggtgagaatgtattgagagttaagtataagtaagagagacacaataaatttatagtagttcactccccttgatgcgaaggtaatggatctacatctattttgagtttttatttcccattggctaagtgtggggctaaaaattatagagagagacagtagagagagatactctaaccttatgggaaattaaaatatgaaaaatgagctagaggatctttccttttatagggaatgatgtcctattaaaataataattaaaaaatacaaaaaatatgaaaaaacttattttgggctaagcttggccattgatgatgattcatgatgatccaattgttaaaattgactcttggtaaaatcatcaatttttaaactttgaatctcatgtgtttgatcatttttgggttatctgctaaaaaattgtaactttttttaggattaatttttgacctaaaatattcaaaattgcaatgtgggtgtgatacatgatagatttttgaaatagtttcaaaacacaagttgaatcgtatcaattggatcaatattgagtgagttatggtcattctattaaaggtagttcaacaccctactaccaggttgacaacccagggccattgttgacattctgacgtcaacctggatgccaggtgagtgccaacacgtcctagacttgtatttttttatgcctaagtgatgtgttgacaccacttagtcaaattcagtgttctggtgaagctatccaccaattcttgaagatatcactattttgtgaaatcgagaagactcgaaactcctcaattttgctgatatccaaccttgttaaaagggtaaatatcaaagtttgaatttgacctataataagttgtatctctcatttaccacgaaaaaatagttgaatgcttgaaacaaaatcgaattttgataagtaaaacccagcacactaggtcaagtgtgaacttgggagttgggtgcttcctgggatccttcgcgaggctttttctgatactactatgggattcaagatttagaatgaggtctcctaccctttttttttaccactttaagaagaattctcggagcatagtttgtgtttgaggagcgaaaacatgcgagctaagttgcatgtcaatttgggtgtagggcccaatgccttgtcaacttgggcgctagggccctgtttaggctcctttgaaatcttgttttctcctcaagagcacttgtatcttcattatttatgatgaaggaaaaaattataggaataattttttagtagaatgactagatataacccatgttgacaaaatgtcaacttgggtgctgggcctagtttctggccaccaaatgactctgtttgattcttggcaacactcatatcttaatatttgatgaaaacagagaatattcccataatacttttgagaaaaatccttgaaaatggcctagttgacaaagtgtcaacttgaacactgagtcccaggatagtctttagtattatttgttgggttttatgccctaaataaaactctatttcaatgtaatctattttattcaacatcaataaag

SEQ ID NO: 218543 - DNA, 3744 bp, Cannabis indica
atcaacaacaaggtcgtgttgaaagaaacaccgccatgttgttgatatgggcctcacattattggctcaagctcatatgcctttgagcttctggtgggaagcatatacctctgctgtctataccataaatagactccccacacctatattaaacaatgtctcaccttttgaaaaactgtacaaaagaaaacccgattactctctcctaaaggttttcggctgtgcttgttttcctctgttaaccccttacaacactcataaggttgccttcagatcaagcaaatgcttattcttggggtacaataatactcaaaaaggttactgatgcttgcaccccagtggccgagtctatgttgctaggagtgtcaaatttaatgaacatgagtttccccatgatgaattattttctgtgtcatctgtccctaaatccacacctgtcatagttagctcagattctttcacaattcccacttctcacagtaatcactttatcactcctcacaccactcagtctgatccctccacctcagttcaagcctccaatattaacacccctgaacctcagtcaccacactacccctctgccagttcacaaaactcgagtcccattatgtccacagactcatctctcccatatcccattaatgatacaagaacagactcatccaacaccagtatccctcactctcctcttccccaaaacaccaatactcactccatggtcactcggtctaaagctggagtttttaaaccaaaaagctatttcactcaaatcaatgacttgttagaaccaacaactgttaagcaggcccttgccaacagtcactggaataatgcaatgaatcaagagttctatgctctcaagaaaaagaaaacctgggtccttgttcctcccacacctgaaatgaaaattatcactaacaaatggttgtttagaatcaaatacaatgcagatggctcggtggacagattaaaagcaagactagtggcccgtggttttcaacaaacacctggtttggattatgtggagacattcagccctgtgattaaaccatgaaccatcagaataatattttctcttgctgccacttacggatgggatattcaacaaattgacattaacaatgcctttctaaatggagaactcaaagaagatgtttttatgtatcaacctcaaggttttgttgatcccgattatccaacacatgtatgcaagttaaacaaagcaatctatgggcttaaacaagctcctagagcttggtttgacactttaaaggctactctacttcaatggggatatcaaaattctacatctgacacaagcctctttttcaccaagaaagaaggcaagctgctcttgattttgatatatgtggatgacattttggttacaggtgcatgtcccattcaaatacaacaacttatatctgctctacatcagatattctctcttaaaatccttggacctgtacattactttcttggcttcgaagtttatcgtgataccaatgccatctatctcactcaaaggaaatatatccatgatttacttgccaagaccaatatgcttgatgccaagcccatgtcaactcccatgtgtgccactgccaagttaacattaaactcgggtcaacctcttgctgatgctacacagtatagaagtgtaattggtgcccttcaatatctcctcatgacacggccagatattgcctttgctgtcaacaaattgagccaatatttaaaagctcctacaacagatcattggggtgcttgcaagcgcattttaagatacttagcaggcacgtcaaacatcggcttgttcttcactgcctcctccaatttcagccttcaaggatactccgatgctgactgggctgggtgtagcgatgatagaaaatcaacatctggatactgcatgttcttaggctccaatcttctcagctggtgctctaaaaagcagtctgttgttgctcggtcaagcaccgagtctgaatatcgtgctcttgcacttgccacatccgaattaatttggttggaatccattcttcaagaattgtccattcctttggtgcagactccaattctatggtgtgacaatttaggtgctggttccttggcttccaatcccgtgtaccacgcccgcacaaaacacatcgagatagatgttcattttgttcgaaacagagtgctggaaaacaagttagatgttcgatatgttgactccatttaccaagttgctgatatacttacaaagccccttcacaatcctcaattcaattatctcagggacaagttaacactcactgccaatgagtgtaacttgaggggggatgttagagataacaaactcagttagttaatgtcagttaattctgttatttgctttctgttaaggggttagttagttggtaaagtgtgtgtcctttgtactctttctgttacactgtttgtaaccatattcatgtataaataccagcatctctctctgtttcaaacagagcttcaattcacattccatcttccatctctctctctctcattttcataacaaagtctttagactttcttctaaaccataatataaggtccataatataattaatataatttattaattaatgcttcgttctcattaccattacatatagctaatacttaatttgctcaaataaaaagctcataattaattaataagtatttatttatattatctcgaagacacacatctcatttctcataaatccatttggaaagtatggagactaagtctatatcataaccaaatcaactaatcatataactaccaagtcatcatctccatactacacaaatattttaaataaaataataataattagaaaaaaatcatatggatgtatactattgtttcctcttagaattaattacaataacaaactaattaattaattaacatgtctttttcatctaacaaggtctttttcgacgtctcacctaattatcaatgggcgtctcttaattattaataacttatgtcaaaatgaaaacttgttagcaaatgaaatgcttatatgttactaaacaagagtttcattatttattgttaactttgaaatatacatacatataaatataatattctttttcatttatatagtgatttaatgataaacttgccaatttcacacgtgtgatttcctcttcataacttttctttcctccactttatatctctcatgtgccctagctttcacaaacctcaccccactactactactattaatctatattttaagctataacactatatgatgtcttatgctagaaaatatttgatgtaatactatatgatgtcttatgcagggttgggatggtaattataccttcccgtcccgaatagggcgggagcaggggtcgaatttcgggggcagagtgggtatagatttaaatgttcatactgagtcaggattggagtggaacggcagaatagataccatcccgaacccgtcctgatatgatatatatttaagttttaaaatcatgactagtacaattaaaaaaacttcatgttttaagctttttaatgattatattaatgagacattaatttttatgaaaatacttgcggtaatacatattaataatcacacttaacaactttttaaaaaatgatatttaaccacttattttacgattactaattttgtatttattaactctatttactcaggcctgaccttgagcataggcaggctaggcttgtgc

SEQ ID NO: 218544 - DNA, 4331 bp, Cannabis indica
tacatttggataatttaaaattcaatataacagtggacataagaaataaataaagttagggatctagtctatcattttttattttttattaattattttatttcagtgagttactaaacctcaaaattataaatgatttttaaagatacattcttaatcttctttcattttataattatggatctaatttaatccagtcacacacaaatctttattttgaaaaataatttgacgtgttataattgtatgcccattctcacacctataattttagagtaattttagaatgtcatgtcatccctcatacttctcctttatatataaatattgatatgtatatattaagacataattaaaagcaaccttataaatcacaataggaggattcaatctgaaacagaatatatatatataaatatatgttcatgaaaaatacacaaaaacaatcatatatatgaaaacacacgacagcgcccacacaaaacagagttaagactcaaataaatcgatcagtttgccacaacacatagggttgaagaataccaataccatatatcatatcatataccagaaagggagtagagaaggggaataaattaaataagagatgttgagggtgaagtagtagtacaggataacttcatatttagcttcatccttaccttctctaaaaacaggaaggtaatgtaactccatggcagacaaaagccaataccacataaacaatcactagcaaaaggatcataagagcaatcctgcaagaatgcataataaagaattcagttagtacattacactccaaactagtgaataagaataaacattatgaaactgagctgaatttcacatctttattcaattttgaagagcttgagttgatgggcattgcattagttgtcattaaattagttacacattaaagaaatacgttccaacacaatttcttattgtacttcttattcaaataaataaagaagtaaaagtaaattagagaaagaaaaaaaaagggctttagattagaaacatacgtgagcttcacatttctccaccatactgtgcttctaaaacgacgagcttgttttctgaatctgaaggtgtttccttgcatattagcagttttatcaactagcaactctaaccgatcgcctctttctaataccttgtcaatattctctatcatgacatttcgaacctacgtttatacaaactagaaatttaaaaacatatcaataataaacaggtaaatttatttacccatcaacagttggtaataagctcaatacataaaactttacttgttttattagaattcagcaaaatcaaagattcaaaacgatgctattattcatccgttataaacataggtaaagtttctatcaaaatctcaacatgagttgttggattcaccattaataagaaaaacattaactatacctggctcatttcacctttaaggcggtttatcctatcggcatttggatcgcttgagtagtattctatctgttggctcaaaaccctcgaaaactcatcattcatgccataagcctgggctgaatgaactgcacggccataagtcctcacaaatctttgatgaatatcctctagaaaggcaaagggtattcttcctgcacaaattcaaagctgtacatttaaattcttttgatattattagattgttcgtactgttttcttatttaatttgatcaagtagagtgatattccgtacaaattaccagaccacacgaacaacttttaaactaagagaaaaaaaaaagaaaaagaaaatcaaattgaatacatacaaaataacactacacaacaaaatcacatgctcagaagtcagaacctgaaattcgactgtataaaaacaaagaaagccaccaaaaaattacaatttggaagagtgtagcatatcccagaaacataatttaaaaccaataaaatactaaaaaactataaatttaaatttcaaaattgctaagacgaataaaccaataaaccatagacaaaggaaattacagcaatcaaatcatcgaaagaagccgaaaacgaaaaaaacaaaaaaagaaaaaacttaagttgagtagtgattagggacttacgaccggcgccttcgtcggccatacagaggacggtgaggccatcggttctcctaatgtggaatatgtatcgatcctgagagtaagagacattggaatcattattaccagggattttctcaaggatttgcctggcgatggcgccagcgttggtcgatgtggcactgaactccgccagcaccaccgatcccctcgccaccaatgcaaacagtatcgccatatttaatctctttctctgttttctgtagattttttcctgagctcagagaatcagaaagaaaactctctttactttttcaaacctttacttttccttgacgaatcatttaaaatactgcagctttataacacaatatactctgaaagatatagaaaacttgtcaattcaaaatatttgagggagaaaaaaaaaccaaataaatttaagaggacatgaaaacacatgcataaatacaaacatacatctttcataaacaatagaatagttataacaaattagtaattagcttaccactaatatcaatggttaacaaataaatataattagtccacaaggcctattatttaacaatcgcattccatagcaatctagttaattttcgattaattttttagcttggatgtgatcatggactccctggaatctttacatgccttgaggtgaattttcattcgtggcttctaattcagtgtcctagatcagaagtttaatatgttgccacttatcgaattatatcatgaatttggacttgaccaaacagtctattagagtgtcctggtactttcaaacccattaaaagaatcaaacaagattgaattgataaccaaataaaaaactttgtccactttttatacgattttttaccaaagagaatgaaatgaaaagaagactaactaaacattatcataatgtccattcctgtactgcaaagtaaacatgaaattatataaatgcatataatggatcaaaatgaatatcatatatgcatatacttgaatatatagatatatgtaataactaaaaaatgcatcaaacccaaatatttcacataacaacttcaagggtgagaagagtaaaatatacattccaagtacaatatcatgcatgtgaccattggcaatgccatactagagatttgtcagctaatttggcaatacatagctgtctgtcttcacatgaagcaagtttaaaaagggcagagaaagcagatgaagcttaaccgggctaacttaccacaaaatacatgctttgggactgaaaatgatgaaaatgcagagcgacattacccttgaattataggcgaagaaacaaacaaaatgctacatattgacaaacaaaaagactccatggatgaataagttcccgtacaaaaagacagaaatatgggaaacaacccatgaagatgcaccacatgtatcaaccaaaaggacctcatataaacttaatttgcaataaatgaaccaagcagaaaaaaacaactcaaaatcttttgagaacataagaataatagaaaaataaaaggcgcactgaattcatatacgaaaattcctctggtgtgcaataaaaaaaggcaagatatgtaaagcctgtaatgatccctcataataggaggaaacacattcaaataaatatcagatgttttgagcagtaaacatacaaagtacacatattaatcgcctaaatcaattggtcctaaaatcgtttgaaatttagggttttaaactttgaaatcctaaaactaaacatacaaattttattttcataactcaaaattcgaaaaatcaattgaaattacctttgttagaggatctcacgcttgcgcctgaagcaatcgatctcagagaaagaatgagactgtcgccttaatcatggacggagctgaaggaactatcaactgaatttttggttggagaatgaaagggaggaagatgatggagtaggcgtgagatccttcctaatttttggttgtcctaatttcttttttattattttttgatcgtgtaacaattatttgattggggaaagaaggctctattattttattggacaatgctgagttgcagagtatctgaaatagactgtacagtctgtacttaacattctttcaaattttgtatacgtgttaaaagttttgtggtctctcattttaacatattttaataatacaataattatttttatttttaattttggatattatttcatattctcatttttattatttttttttt

SEQ ID NO: 218545 - DNA, 1423 bp, Cannabis indica
gtaaaatattaagttagggacttaaatttataaatataaaaaaaaaatctatatacatattaatttctaaaaagattttatttaataatttaattaaaaaattaatttatttgaattgcataattttgtacaattactacaattctaaatataaaaatttgttttttaatttatatatatgtatatatgaaaatttatttgaataattatctgtagcaacctattataacaggtaatgacaagatgtaactggttattcaaacctctcccatatatataatatactaagaaaactgtgttttctatacttctattaattatcactcaaacattgttaataattaatttaattcatagatgaaatgtatagtacgtggtcggcacaaaaagctgataactatagctagtacaatatagcatctttaattacaaattgtatggcaaactcaaagaccagaagcatcaagtgaattagagctgcatttttcattgcatattatatagaacacaaacttatgaaatctcttcacactcaataaggacagtacttagtgttcgttggcagatataaattatatatgtgctctcgtctactgtcacctaaactattagcaaatttaaacaagttgaatcataacgacgacatacgtgaacacacatcttcctgtccacatgtctggtcgcatataacggatcctaattactatattgtaattattacaaaatttcaggggtgaaattttttttacataatatatatatatattggcgcattatggggtctaccaatatagaaaaaaaaaaatagagatgaatttgtgtaaaaaggatagtgtagtgtagtgtaggtaggaatagctaggagtagagaatagaaacaaaaaaattccacactgaatgagatatatataatgaagagtttgtgaagtctttcccagtgcccaacccccctcgtgcgttttctgcacaagagtctttgctgcctaatagcagacaggtccctcttttgtttttaccttacttattatcacaacaactgtagccccaactctctctctctctctcgactaaaaagtttttaagttttggcaggggggcctctctctcttacacaggtcacaactagctatgaacattttccttcatgagttatacatgtgcatatatatatacatatcaaagataaggtgtaatcaacacaaattaacaatgtatcaaatatacatatataatagtacatgtatttcataatacacattattttcttttcaggttttttttttttcgctaaacttatttttatttgcatttaactctcaaagttgaaatttcgatgataaaaccctctaaactacttaattattaccgaatttaaagtttcatttctatttacaccattgtacacgtgttatatttatattgg

SEQ ID NO: 218546 - DNA, 3178 bp, Cannabis indica
tttatttttatttttacaatgaagtgtagtttcagtctactcttattccttctctctcgttccctttttttttgttttttttttttttgactatttcacaaaacatacccacttgctctatttattttgtgccttaagtggtccaaaaccaaattttatagagagacaacaccacatgccctggccactcccaccttgtccccccctattgccaattatatatactaaaacttgtcactagaaactgagatttttttgcaaggaagagtaattaacatgtttggattgtagtacattctaacctgaaatcttttgacccttctaagttagctagatcttctattcaattctaaatttttttactctttggtaaacatttcctcttcattcattcacattacatatatctactttttctctataacttgtaataacatgagttctgttttgttttgtttattttcaggtgtatcattaatcttcagaggaaaatcttagaagggtattttttgttgtttttgtgttattgatagcaatggaaagattgaactcgaagctgtacttgcagaactgttacataatgaaagagaacgagagacttaggaagaaagctcagattttgaaccaagagaatcaagctttgcttactgagctgaaacagaaactttccaagaccagcaacacaaaaaacaatgctaaaaattctatccctgatcttaatctgagctcaggtggttctggtcaaaatgcttcatcttcaaacaactgatcatatccatcatcatctatggtagctggtttaattaataaaaaaaaaaaaaggaaaaaaattatatatcatgaccccactaaggcttaattttttttttgttaaataccttagtcaacagttggtagtctttaagtaatttagtttaaatattataaatattggggggttttaaatgttctcttctatttctatctttattttttttttttggaaggagtttggatatgaatatcagaaaatacaggggatgtatcagcctatatatgctagaaagcaaatataatatcatattgtagttttttagttctctcatttattgtttttcaaagttttaatatccaaatatttaatgagatgtatttaactggtaattggatttagagggaaagagtttaaagtccaaataacaaattttatatgccatgtaagtgttgggagaattggatataataccaagatagttttgtcctcctcagaagaaatatgttatgttttttttttttataagttaataaataaataataataataataaacaaatatatttgtagatatgaaaggggacttttccttcagattctgtctgaagagagagtgatgggaggatctattgagtgtgtaacgtcatcaaagaatcagcataagaatattggaagtcaatgagtgaagggtttgtttggtttgaaaaaagtgtcacaacaaatatacaatacaaccaatatcaaactccatggatatgacaaaggttgacccatcaaaagagaagactcttctgataaaaacataaagaatgtctaatcagaattcttatatatgtatttatgaaaaatcttcatatcttcaattaaaccccttttccccaacctccaacgaaaaaacataaaagtgtgtttatttgaataatttatttatgacattttacattaaacaagagagatttttccatcttaccaaaaaagagagattttttcatagttaaatgatctccattcatgtttatctgtcttacatggtataaggatatatataataaacaagaatagcctgtgagttttatcattaaaatggtccagtctagatagcagaaaggagtggcactggcagatcactcatgataacaaaccaaatccttcaaagcaccagagaagaagagacaaaaaccaatatgtcatttgaaaacaaaaaaggtcatttcaagggattcctaaattttttagcaaatccaagattatactttgttttaaaatggggttagctctgccttttgactttgttttttatttttgggtataatgacagctatggatctcccataagtattatttttcttttcttccttctgcagagtatcttgtaatgtagattggggtcattataacaatatcttatacaaatgaaagcgtgaaggcttacataatacagactataactctaccaagaccaagtatctacaatataattatccctagtgttttttttttcccattggtcaggctgtcatttcatttatatttttaaacaaaatatttaggttgaaccaaaccaagattgaaagaagtgcttacatgatttggctcagattatagttttcatagggttagtagtacttgatcaatcattacacatgcaatgtctaaagatttgtgtatcttaaacttggtaaaaggtcaatatggcaaacattacaacataaaaggctcactaaagttcgttctacaaatgagtaagattagcttggtttctcatgaaataaaatttgagaagttataaatgatgagcacaaggtggggttagcaatgggttagcaatggtgcaatgttgtttcattttggttaaggatttacattgaagactttaaaggttcactccaagaacaatacccgtgccaacatttgcaattatttgttctatcattgtacaaatccgggtgagtcatgggaaaaagaagccacaagaaaccaaccattccggctagaaatgccgcactgactatgcctgaaaaagtaatgaaacaaataattgaaaaatcagaaccgaaagaattaaacattctatgttaaataccaccccgtcgagcaggaagaagaaatgtgcaaatgcatatgatcagaaacaaagttgcggaaattgataaccaatagagaattgttattcattagctagccatgtaagcaaaagttccaaatgactttcctactcatacctttgcttcttgagaaaagcactggcaatcccataaaattgcagcatacgtgagctactaaaggcgccagaagatttcctgcatagatgaaacaagacaagcaatagtttttaagcccagaaatcgcttatcagacccatgttcaaactagctgcctgcaccaacatttcttttggagtaaaagaggaacttgaagcttaggc

SEQ ID NO: 218547 - DNA, 6289 bp, Cannabis indica
taaccttaataatttttcccatatttttgaaaatagccccaagaacaaactctttgagaaatacctcttttttatctctattaatcaaaaatgtcctcgtattattttttattaaaatatacccatcttgagtgagttgcccaatatactcttactctttacttaagtctagcatataatttacattaacttaagggatataataagtagggatgtacatcgatcgatatgggtggtttatatattttctaacacaatctaaagttcgggtaactaaaatttaagtgaaacccgcccaatttaaaataataaaaaaaaaaattataaaccgaccaacagtttgggccgtttggtcgggttaacctgcccaaaccgtccaaactttttttttagtttcaaagttaataaaaattaaaaagaaaaattaaaaatatcaaattccaccaaagcacaaaagttcttaaatctaataatttcaatagttcagagagaatttttaaccgccaaaatttagaaagaaaaattactaattagcgaaacgattaccccaacccaacctcgcccacgcaggaaatgaagtcacatcaccatgaagtgaacttcacaatttatcaaaaaaaaaattaaaagtgtagcaagtatgccttttacacatttttaaattgtgattttaaggtagtaaaaccccccaatttttctaatcatactttcgaaagctatagtaaatgcaacataaactatcatattacaaaacaagtcgacgtgtaatgacacttgtaaactggggttattacacctaccagccatagtgttgccttggtagtatcagctccttcttctatttctaattcttgtatgtgaaagtgagacagtgaaacataactaccactccagtaaaccctctatggagtctggttttttcaactagaaactgttccaacttcacaatctaaaaactaataaaaactttctcaacccaaacccacttctgatctatcttttctgctatccagtttcctgtgtgtatagatatcaaggtaaagttgacacctttatctctttctaattcaacaaaattttacttctttcggtcgagatttctcaatggtgaaggaaaatgggggtaatctttaccggaatagaaaaaaacggtgggaaattttttaagatggggctctggatttcttgtccatggctgatctattatattttccaggcattatgagtaaagtgggtgtttaacatttttatggaactgggtattttagaaatcccctgcccctgtataattcttgtcggttttgttattttctgttaattttattgtgattgataatttaaatgtttataatgagtgagaactagcgaaatagttcttgtatttgttagggatttatgtatgggcagttatatgaacaataattctttggtgttcttaatgtagtgtcgaaggtaaggtgtttctgttttgggtgaacgtcttgacaaagtaattagatttaatataattgtagctgaatcatttgtttctctttgcttttaagcaatttcaattcggttttggggttcgttgatatgggtttacaactttacaggcactcgttttgattcttaagttatcgattgtttacaactatgagatgaagatgttcttttcttctcatctagggttctgttaaaactcacttggattgttgtttcgtgtctagtacgtgaattgcctcattcaatttgcaattctttttggttttcatataattttcatgatcaactttcaaatgagtttttttcccctttctttctcttatttgggtttcaaacattagcatatattttctatatttattagtaaaagcatgtttatctctcttagcaggtgctttggaggaggcaaaaagggaaagctgagaatactaaatactgatttgtctctgtgaaacatggatcaaagtactcaaattctactgcattcttatattgcttgtttttttttttcttattggcaattacttttgtgcaattgatagtagctgttgtatctttatgaattgtatttggacatacattttcaatcttgattcttgtttgggatgctgcttgctcctaatttcttttgtctgtgaaatggttattatgtctacagaaagtttagttgtctccaacattattgatatgagacttcacaacaatgagttccgtccaacctgttccttagaggattatcagcaatgagttgtcagcttagattacaggatagctagaatcgaaaattccttgtatttttatttgcatttcaaactaatttgaaaaatgatctttaaatgctactttggaatcaagagtggaccatttccatataaagtttgtataatagcacttctccattttgttatgaaatctatttttagataaaatgtatggtttagtttctgaaggtggtctcttgaacttcagagatttcaacagatgtagtggagcatagacgcggcaagtattctaggattcaagacgcagaggatccacagctgagcctgtttgacaaaccccttccttgttgtggttgcggaattggatggttttcgtgagttccacttttccttgctatcttctctgacatatcaacacactctcactatctgtctatgtctgacttataaacatttttcttctgcagttttctacttggatttgtatttccattgatgtggtactatgcaacattcctctactttcgaaactattatcagagagacccaagagagagagctggacttgctgcttcagcgatagctgtaagttttacactaaacaagtaaattttcaccattcattagtttgccatggataccttgtagcctttgaagaagcaaacagtgcttaaagaagctttccaaattggtgcatcataagatcctaagtcatatgctatgcaagactcttatgaaataatttttcctcgtgataagcattttacttcccattaaaattttgagtaatccccattctgattgtttatactcgggttagttggaattatgatgaagggtgtgtttgctctatcttcttggtttaataactaatctaatgattgttgatgcaggctttggtatgtacaatcgcagtgacaattgcggtactagttgttgttttataatccttgtcaatatgatgccacttggctcgtatatacatatttcagcttcctcaatgaagcttaaaactaatggtaagatgaagatcaagctttctttgcttacatacattaccaggcccaagaaaataatattgttatctcagtttcagtagcatttatgttatcaaaagtagtgtagtatttggatattctttcacactctggagaaactgccaatgctcagttcccattcactgggattttacatgcaagtcagtttggagtccaagcattaaacataaagctttttgtaaatcgtattgcagataaatctggagtcacttgtatattttggaagcaattggaaaagggtgatttcaatctttttacacaaaattattatagcctgtgaatcaggttcttgtctgtttataaaaatagtatagttatgtacagagaaaatgaaatgaaatgtataagtgtgaaactgagtaaaatgtaattgtgaaaaagggtgctggtataatgatatatgaaatgaaccaaatttggcatgaatgaagcgatggttcactttttagtatcatgcaaatttttcttgtaacatcaactttattctctagtatattccttaaaatccattggcataagagacatttactccagcttgaaagctaatcacaaactgttagtcagagaaaagtgtggatttgagataacatgggggcattttctttgagataattaattatactaatctcaaccttggattcctaaatattcatattcgaattactccctgttagcaaaaagaattaactcccactatgaaaaataaaacataaaatactattaaaagacagctatactaattcaagttataatcatacatgaaaaaagtatatatttccttccttaatatatccttttttttttatgtatgtatcttatataactgtacacagcaaatacttctccgtttttcttttctagggaaaatgtaaaaggtagagaatgacattttcataaatgaaacaatcttagtgagttttttgtaaaaatctgggcaacagccctattttgcggaaaatagagagcctgggccgggctgtccatattgggcctaactaggcccaccttctacaggtgtcccttttctctttttctgtaaaataagaataaccccaatcccttcttccccaattcctctctctcaccccatttccgatccgatcactctcttcctcggcacagcaaccactgctcaccacaaacacacgatctcgggggatccaccaacgccaactaccttcatcttttctcaagaacctttcttcttcctcctctccgtcaaatacctcttttaggtttttctgtcaccactgttctcacaggtatgaaaccttgtttatattttccatctatttctaaatctaaatatatgagaattgttttggtcattaatagatcttcatttgaatttgagattatgatgagaaattctggatttgttacattttgttcgtagatctaattacacaatctgaatttttgcttcttgcatgttgaaaatttgtttttaagtaatcctatttgcttgtaagaacattttattaaaactcgattcgatttcgctataatgttagtatttgcgtttgcttgcttcagatttttcaaattcttgtttataaattcgctgtgaagttttcagatgtaatatatgtatatctgagcattaatcgtgtgcatttggtggttttttaagtcctacaattaggtttcatctgtagggcgatgaaacacgaagagattggtaattcgcgagaaatataaagattatacgagtaatttataatttaagaattcggtctcagtttctgcaataaaataattgggtctatggaatttagttgaagaaactattttgtgttaatgtttttattttggaaaatattggaattcaggtttaactattaaagagctgcgagcaagggaacattaggcaagaagcaaataaaaaagtgacaaataatgcctccacaaaagattgaaacagggcaccaggatactgtccagggtatagccatggattattatgggaagcgtctggcaacggcttcatctgatgctaccattaagattattggtgttagcaacaatgctggttctcagcaccttgctacattgagtggtcatagaggtcctgtttgggaggtagcttgggcacaccccaagtttggatccatccttgcttcttgttcctatgatggtcaagtgataatctggaaggagggtaatcaaaacgagtggcagcaggcacatgtttttaatgaccacaagtcatctgtgaatgccattgattgggcacctcacgagcttggcctttgcttggcttgtggatcatctgatgggaatatctcggttatcacagccaggactgatggtggttgggacactaccaggatagatcaagcccaccctgttggggtaacctctgtttcatgggccccatcaatggcacccggttctcttgttggttcaggtgtaacggaacctgttcagaagctagcttctggcggttgtgataatactgttaaagtgtggaagctgtataacgggacttggaagatggattgctttcctgctcttcagatgcacactgattgggtaagagatgttgcttgggcacccaacttgggacttccaaaatccacaatcgcaagtgcttcacaggatggtacagtagtcatatggaccgtggccaaggaaggagatcaatgggaggggaaagttctcaaggattttaagaccccggtttggagggtatcatggtcgctcacaggaaacttattggctgtggctgatgggaataacaatgtaacattgtggaaagaagctgtggatggtgagtggcaagaagtgaccacagttgacacataggtttcaggttattatgattttatttccttaaactaatatgctatcctttcaccatgaactagtttcttaaatttgacatgatgattttcttgtgaatttactttttttgaaagtacttccatttacatatattggagatgtcttgagatttatgatttatcatgtattgctagtaatttcacttttatatatgatgtttgcatgatgaggttattc

SEQ ID NO: 218548 - DNA, 1262 bp, Cannabis indica
gctgcactcagtgatgcagttaggtaaaagctacaaaattccaggatgtgtatgagaatgcgcattgagcacttgatgtatggaattcttctcttagggatatgctttgtttctcagaggaagttgatgagttttggactcgatttggactaaccccaattatcatattactctggagattatagagtggcaggagagtagagcttggggattctgaaccctttcaaatttagctgcaaccgattaaaaaaaaaaagagaccatttaggagaaaagtgcaggttgccgttgtgcactgattatgcttgtttactgattttttttaattattattatagaatactgaatttgattttaaggtattttgtagttcaaataattagtgactattgttgaatgcgtgactagtacattagtgtataactcgagagagtttattttagtgtataattcacttgtaatactcgaacttgttaaaaccagtcattgtcttgcatcctcccaactgatgaaatttcaaccaaatgaccttttatttggtataacagttaaaatctagagctgatatagagaagctttcggattgtagattatccagccaaagctttggtcagaccccgtaaattttgtctcaaaatattgcgagtgattaaaaaataacggccaatcatagcaaaatttttttatggaagatgaattctgtacaatatatatgaataacatcaatagaagaattgatgttcactacatttgtctttttctcttttttttttagaaaaatgatatttgtaaattttttaataaataattttttgtattattattgctatgtagtatttaaggtgttcaatattatactaacgtgatacctatttttattaaattaaaatttataggagttgatattgaaatgcaccgttaataatttttatagtgcttaagaccttaatgtgactcttaatatttttattatttatatgtatatatttttattaacttcaattcgatttttttccttaaggtgctcaataatatatcgatatagtactcaataaatagttgacatttttcaaatcatttattaaattaaaatttgtaggagcggatatgaaaatacaaaaataacggtatactaccttttgtggtctttgacatcttaatatgccccttaatattttagttattaaaatatacatttcttcattaatttcgattaaaattttaaatttttttccttaaggtactcaataccatatcgatgt

SEQ ID NO: 218549 - DNA, 5749 bp, Cannabis indica
caggtaaagattgatgtgcttatggaggcattagagatggggaatgtcacaaatatcggtactgaagacaaggacaaagaaagtttgatggataaacagagtatgacaatatgttaataagaatatcgagaagtaaaacagaaaacaggtacttggtcattcaaatattacttgagagtaacatatttaaaaccattgaagacagttctcacgcttaaaattatagttgttccccaacactttttcaaaaaagaagaaaatgaagccaaaaattattaagtcactacaatgttttgaaaatatctgctgggggaaatagtactaataaaaaagagtacaagtttgagaatctgatcttttgagtaggtaaatagtcacttatgagtacaaatttaaagacgtcgtttgcaagagtgcctagaacttcagaagtatcaccacagtccaaaactaaatgattgatgcattaatgagagatctgcacaacgaatacgtaagcataaaaagactaatttcaaaaacaaaatagttacagtgggaagcagagtaaaagaataaaagattgtaattcaagctgataatccatactttcattaatgggaaaaaagaaatattattaagcttactcaactggaaaaagtattgtttttatacaaataagagcatctttgttctttaatgaaaagacatttaacccttctttcatatgtcaaagcaacttaaggctacatgatatgaatgataaagatcctcttaaaaatttttagactcatcacccttcatttcactttcaaaacaagaaaaaaaaaaggaacaaaaatgttgtcgagcaaattccttacggaaggtaaaatgtattagtaagacaaactttgaagatctagatgtcaaaatacatataaaccaacacacaaatattgactggaacaagttctccagatacagatatacaagcacctgctatggatgatacttactctgcactagccaatcaatagtgaaagtaaaaatagtactgttgatagaacaagaagactatgaaaatcttaatgcatgtgcatctattaggcagcaaagtactcaaaacatagatgccctcatgtaatctccagcaagtaataagagattactataaattatatttccaacttatctctttatgacacgtcaaactaaagtgactaaatttaacagatggcttgaactgaaagatgggcctcttgctgtccttactacatttacccccacaaaactaaaagtttctaaggattctctgctaggaagagacattgacatttgtcaatcttagacatacacatattggccaattttatctcccattatataaacattgatgatgtagaaaagattgcaaactgcaatcaaaattatcagtaacatctaaagaatatgacaagaaagggtccttattggaacagacaacctttaccgctaaaattacttagattccctaaacaagtaggtagaaatgctccacaaacaattacaactgacaacaaataaaccaacaaaatcaaccaaatgagagaaaatgtcattcgcatctgctaccaacaaagtatagtttctctcatcgataaatttgatctaaaaattaacatcaagctaatgttctattgctaaatactaaatacaggtaaaaatcctgaagtttactgaaccaaatcacttcaactacagaggaaagctttcaaaacaatattaaacataaaattactgggtatttcttacaataacctattatacatttccaaaaacaaaaatagtctaaaatactttcaaatgaagaatagcctacttactttattacaaaaggttaatacaaatatcttaacaacatatgcacgtaaacaacaataataattgaaattattgtaaatagacatattaacatgaatctagataaaggttcttcccacttttacaagatggaacttagaagatcttcttaaacaaaaatattgagaggacgtatccaaaaagtccaaattctgatacaagcgttttgccagattactagagtgcaattgatagacaagtagaagatttagtataaattttagagcagaaccacatgtaaattttcaattttcaaaataaaagtaaagcattcaaacacccacgtaatgaattaataaagaatattaataggaacagaaaatttgaacattgccggctcatctatatcaaccatatattttaccctcgccaatgaaatgaaaaatctcacgttaccttttagaaaaagaaaaactactttcttaatgagttatcgtttaaaaataagaaagggaggaaaaggttaaatgaaaaattaacactgctttcacattgaccaaattaaaatattagtaaaattgtacttaaaaaagttggcttatagtcgcacttaaaaaagacaaattgactgaatttaactaaaatgatattggatttcaacaataatatttgttaactcaaatactttatttcactaccaatggtgaaaatctcaatgttccctaaagtaaaccataaagcatgaggaacaaacaattaaaagtcaagcagattaacagttctgaaactgaaacctaaaccaaatgtagagacttccatataatataatttagttctgaaacctaaacaaagcaaaataactaataaatgattaaaacattttgtaattggtacaaaataaatcaaacactcacctaatgacccatgtaaggtgccccagggccaggatgaggcctaccactgccctgccccatttgtggattctggtacccaccctgcattacttgttggttcccatagcctccagctgcctgatttgcataccccccaggtggcccaggctgattaacaggcggtccgccaatacctccaagcaaatttccaatacctaaaccacctccctgggttgcaagcaatgcggataaggcttgtccaagagccgggttcagtgcttgttggcctgccactcccgggttgaaaccaactgcaggtgcaggtgccgaaggagccatcaaatggcctggtcccgtcccaccagttgaatacttattcttctctttcctggggtagtattgttgatgatgagggtgatgctgatgttgatgctgagtctgatgatgttgatgctgatgctgatgttgatgaaatggcttgccgctctgtttgggaccgtctatggccttctggcaatgtaaagtaagtccctcgaagttcttgtgaggctcctcgagagcccttttggcactctctaccgacctgtaaacgaaaagtgcaaatccctttggtttcccagtatgcctatcaagccccaatggcccttcctcaacatccccaaactgtttgaagtattcaagcagtttttggggatcaacatcggcagaaacattgctaacgaagattttcctctgagtgtactcagacacggacgagacaacgggaggtggggcagggacaggtcctgccgaggcgagctgacaagaagtggtccggctcccaatcttcttctggggttccttaagggccctcttggcaccaatccgacgcttgaagaggataaaagcataaccctttgattttccagagactctgtcggtcacagctttgcaatcttcgatctcaccgtacttgctaaactccgaaattagggtttccgcagtggtgtcccaaccaaggccatggacaaagatcttgcggtgggccgggtcggcatcggcgagatctcgaacacactcgatgaagtccgggtacttatcagcagcttgcttgacgagagaatggagttgctccttcgaaaatggttcaagaagcttctccaaaggctcatcatcatcatctaaccctgtttcatttcctcctccattagcttcattttcagctccttcatttccgactccttccgccgaaacgtcaccgtttagggtttcattctggccctcatcgtgttccctatcctcctcttcctcctcctctaccacctgttcttgtaattcttcatctacttcttcctcttcttcttgttgttcttcttggtcctccttcgactcgtctacaaccatttgttggggttcttcttcctcttggattggaacgcattgggttgggtcttcttcttcgggttggagctgcgggtccccatgaggagggtccgtagatggaggctgttctggttggggctcaggtgctttggaggtttccggctctgaaggtcggagctttcgcttcttggccatggcggtccttcaggttagggttgtttttttttcttcttttgttttttcccagagaggaatcaatagatacccgttatttctagtaacatataattggactaaatttcttttgatatatatataattttttttggttaaaaaaaaataaaataaataataagaagtgttttacaaagtcaaacgacctttctaagtttctatgagtttatgctaattgttgtgtttggcgtgtttttatagacaatgacattagtgattagcgagtccatgtccgtggtggcgttagctagtaattatatggggatagttttgtgagtagcagttaacatatttaatttttcggatttactaattggcgaagctacggcgtgtcggttagtgttagaatcagttatttcgataaaacactattttgtcttgattgagagtaattcgaaaaaggttatgaaagtgctaaaaggaatttcttatgtgcattttaagttttggccttgtagtttgacccgggacaaaatttcatatacttacacaattacacaattgtgaggaatgagaaaatatgtttgtgtaaattttagaaacatgttacaatttgaatctaaatttttgatgctagaggtatattgcaagcatttaaagaaaaggatgttgatcttagagatgcacattttttcacgggaatggggtcttacggggacccgcctttaatggggtgggaattccccgtctaaaaggaaaatggggtggggataggatcacactccctgttctgacggggatcacacttcgcgttctaatgaggacctatttagtattttattttatatttttagtaatattttataatttataatttatgtttactttttttagtatattagtatttttttttatgaactttaagttgtatattggatgataattagtttattaaataataatcaatgcataatattttaatttttatgtagtttatatttttgtatattatcaattttatttgttttaggagatttcacgccccattcccgctctcattaggggatttcccgcctcatccccgatggggattaaaattcttaatggagataaggataggagagcactcctagcagtttctcgtcccgtgtgcattcctaattaatctcgtgattgtttctcagtcacccgctgcagagacaactaagacgtttcttgacaaattcaattttagtgtgtgttttataaacattattttttttattaaagaaatctggtgtccttgaagttttacaatggtatagtgaccttttatgaattatgtattgcataactttttacaaataagacattttgtcattagtgctctagggaatacaatatttgttaaatggaatatgagtttattcttgtgcttttctatttttttaaattttaatgtattaatatcagattcagaagtttaggacacatggataagctgttagaaattattttaccagaatcttagatctactcac

SEQ ID NO: 218550 - DNA, 1643 bp, Cannabis indica
gatccgccgtgaaataaagacagaatctttgcaacagtggattaagcagaccgagatctgactgaaccattatattcctcttttgttcattatttttcagtcttttattaagtatttgtgttcctggtttgaatacttgttgttatgggtggagtactcgcacttattacatatttattattattattattataatctatttttagtgttataaaattccttcagcaacaataagtattcacaacaaaatatcacgtattgcttactctataaatggagaacttctctctcatctacgattgatctgatttcatttaggttttttgtccatttacaaatttttaggattggaagaaattaataattttgttttatagtattgtttgatgatcaataattgtattccttatattattgaatatgtatccttatcgtccttttcacattattttattagctttcttttatgaaaatggaatacagatcgatcatcatattcatgcatgctcatcaagtattgtctcagctcagctgtacgtactttaaggatatatgtatatatatatatattagtatatataattataatatgagacaagctgattaatgaagttaattgttattagcaaaaatgaatagagatctataaggaatattaattaattggtccctctacttggtgttgggcatgctttaattttccatgacaagcagaatctgtttgtagttgcagtgacaaacaatatatataatttaatttttcagtgctaggagaatcttgcacaactatctaataggaaaacgactttataaagtgtaatattccttcctttgacaaagaataaaatacttattcatgtatagtttactaagaacaaaaaataaagttagttaagcttggaaaaagaagtgtaattggtcaagctaaccggaagtcatggagatattatagatacaatagggggcataaggaatatatgttggggacacatctacaaatttgtattgtttctcatcaaaattattaccattagtgctttcaataatagtattgtttttcctttccataaatatatacataaacttactttaacaagtgtctattgttgtagaattgcacaatttcatattttaaagccccttcaaatgttgtttttcatgaataatattatgtgtttccttctagaattctagtgccatgtgagtgtttttataagtgtatgtattccatttaattagtataatatagtcactttaattcatattaatcggtataatatgtgtcaataattttagttccactatatatagtaggagcgttttatttcgatacataaaagaaatataaatatacactaaaaaaaatactattttagtgataattttttaatcacaacataaattttttgtgactaaatgtgacttttagtcacaacaaaaagttacttgtaactaaaacatagtatttagttacaagttgtcgctaatttaatttatttgtgactaatatttttaaccacggacctcttagtcacaacacaataataatattttataattagccataacttttttatctttagtaacaaattttgtaataactaaaaatacatttttttgtagtgatatttatatatatatat

SEQ ID NO: 218551 - DNA, 5678 bp, Cannabis indica
ttcattgtgacattttgcagagtacttggtgagcagaaaacataagttttggaagtgccatggttctttgttcaacacccggaatttgtctcctgcacatccaaaagaaactttgaataacccttcaccatattcagaaattatcacagagaatctccccttctaatgaccccccatttgatcgtagaatgtaggctgatgaacatagttctcagttagaattctagcaataagaatgtggttgttgttgacattggtgacaagatccacttcagtgggtaaaataacaacagaactctcttcctcagtgagagttaaggtggaatctatacggtttaacaagggatccataacaacgaaggagcaaaaaaggtagacaagtgcagaggatgatagcagttaagcacagaaagtaagaaaaaagaaaaggaaaacgaatctgggaggagaggtgggaaagaaaacattcaaaaaaacagttaaaatccaaacaaaggtggttaagaaactataactgcaacagacccaaaaacagggcacgacatcattttgacgttcaatatcttgctttattgaaggtgtttaagtttttttcttttggataaatcagaactgtgtattgcatcaaacaatcattttcaatctatacaacacctactcgtagcaaccttttaaatgaagctttagtacacaatcattttattttttggctcataatatgtatctacaaaaaaaaaaaaacttttacaagcctatttagaatgattgtagtattaacattgaagataagggcctcgcgtaaattaagtcattagccaaccgagacaaagcagttcaaaaatgaagaacatttattgaatgaaaaatattgtataaatcgcttctttgcatatatgttacaaactaaattcagcagcaacccaactgcatccagtatctttagatacgcctcttaccttcattttatcccttatttcacttacactatcccatttaccagcatctgcgagagtattagacagtgcaatatatgcccctggccgatcattagcattgagtttaaaaagttcattggcagctatgctggccatctctacataaccatgtaatctagatgaactcagaagagcagcccacacatctgagttgggtttctcaggcattgcctttacaaactcccaagcttgactcaaacgtcctgctcgtcccaaaagatcgacaacacaagcataatgctccatctttggctttaggaagtattctgcttccatgattctaaagatctccagacctttgtctaccagcccagcatgagaacaagctgaaagagcaccaaggaaggtcacaaaattagggtcaatatgatggtgttcttgcattataccaaagagctctagagcatcatatggatatccattctttccataaccatcaatcatggaagtccatgaaaatacatttttttcaggcatgtgatcgaaaactttacgcgcatcttcaattcttccacactttgagtacatgtctattagagcacttcccatctttatatgtgtgaaaaattcagtcttcataagttgactttgtacttgttcagcaacttcaaaagctgtcagcattgagcaggccccaataacactagcaaatgtagaaatattaggtcgaaaattcaatctttgcatttgaatataaatatcaagtgatttggaagcatgttcaaccagtttgctgtagccttcaatcattgcattaaacaccactatatctttatcaatcgttttgctgaatatatctttggcctcatcaaaatcgccttgattcatgtaccctgttatcaatgatgttgagcatacaacatttctttccaacattagttcaaatatagcccttgcataaccaattttcccgctcttaacataagaggccacaagtgccgtgtaaagaacattatctgaaccaacatcagattttattatctgggcatgaacaatttttcctagactactccggtatggaacataactagcagaagtggatgccttcaatatcatcgagaatgtatatccatcaggattttcaccagaaagaaccagtctgcgaaccaaactaagcgattcctccacttgtccttgcctaagatacccaccaataatgtaattataagcagagagagttctgtgaggcatttcatcaaacatttgacgtgcatatgtcaaacaaccacattttaagtgaagtatgagaagtttgatagagatattggtattgggctcgtacccagttttgataacatgggcatgaatctttcggccgtgatatggattatctgaatcaatgtagtgctgcaaagcagaagacagagtattggagtatggatgagaaatatagtcatgtactgccgataacgttttgtccaatgtgagaaacggggtacgtttacaggttgaagagatcattccatgtttcgtgatcaccatatgatcatgcgtctaaactctttgcttttattttctaggttcgtaaactgttcttctgactcctggccgacatataagaaccgtaatgcaaataatttttttgttttgagggacatttatgtcaaaataatgtattgggatagggacaatgcgacatgtaaaaaagggactcagtttttaaaagtctcacttagtacaactctttatagtttattcttttgaccacgtctacaaccattttctctgtcaatttaatgataaaataatattaataaaaagaaaaaaaattctctcgattcacgagtatagctttggcgatcacattgctcgatcagcttctctctctgttgaattttgcagaaagaaatggcgaatttacatagtaactttaaccagaatatcgattacgtattcaagattgtgttgattggagactccgcagtgggcaagtcccaacttttggctcgttttgctcgaaatgagttcagtctggattcaaaagcaactattggtgttgagtttcagacacgtacgcttatgatcgatcacaagaacatcaaggcccaaatatgggatacagcagggcaagagaggtagaactttcttttcatcatgtaattatttgtgatttattgatggggcttgaatctgagtggtggctacgatcactctattgttgaacgtataaggaatttgatgggtattatatattagcattggtgaattcattaccataagttcaattgttaattttgatatatttaacagaagctctttggcggtatttgaatttcatatagcttcttacgttatgaagttttcaataagcgaaaacactgtctattttgattgaagagtgtagtttctcaacgtagctaaaacaaacggactgggcttcagaaatctccagtcagtgttctcctagggtgcagtgcagtgcagcgccatctagtctagactggtgcaaaactgtatttgtttgtgctagtggatcctgtaagaccagttctgatggtagagtattccttttttctggtattgaagacttcaatgtttggactgttagagttctgctatgaaaatcgatctaccacatacgagggccaacccaaattatgggctttggtacttttgtatatattttgtcagggtattattaacattgacaaggtttgctcgatgtagattaatttagtctcgtagggtgaagatgaagtgcatttctttttggggaaatctgaccatttgactttggctttaaacaaaacagaaagctagaaccatgaccatcagttagttttaagtaaatgggggtggcagttaagattcaagttctggagtatttaaaagactgtttgattgaagattgctatgatcattaatctttatcgaaaagaaattaaggtaattgtttgtaaatttaaagtcttctgaggctgaggtgattatgaaatgtggaaacatcctaggtgacaacgaaatagctccttattttattgtagtaaggaagaatgagaagaaaagttgagatgccaaccaggaaggttcatcatatattcttaaattttttcccggtaactgtgtactccttaatgatgttgatagtcacagtgtagtgatgaacactatccgttttgatcttaaactttagggaggataaagaatgaattccaaagaatttcattatctgttatttggatttgaacaaacaaagaatggacaaatccttttttagaaaaaaaataaaatgtagtatatgtttgtgaaatttagaacaattattttacaaaaaactctcttaaaccaacgcatattcagagatttaatcactcgtaagctggaagcttctgcatgtagtttttagtttttctttacaaaagctggtaaatttgggaagcacggcttgtgaaacaataaataccaaggctccccaaggcccaagggggagggacaagatttttgcaaatatatagggacaatattcttatctagagttaactaatctgttctttagcataagttttgatcatttgcctggctattgcctctcaattgctggatttacctccaacaatttggcacctttggtgaggacgtacccagttttaggcaatggttcagtaagaaaagacaacaaggaactatgattagtatggcaagatacgttccgattgggtgtagatgtagtggtgtgtattcagtcttaaggttagaactggttttagtttcatgcttgacttcataactggtttactggttttaaagagctcctttggcatgtggttgagtgatagaaaaagaggaggcatctcactttactgatttgctgatttattataatttttttatccaccgtttgtcctctaagccatctcacttttgcataaacaaaggggagatgggtgagaaattgagagtaagctgaagtgtttttcttagtaattttattttatttattacactaatgactaactttctgccactaactagtatatataatagagtgatgcatactatttttggtgtcatctcatggtacttaattatgtttcgtaattgtttccttttacaatgaaaaaaaccagttaaacatgtgaatgtaactattcttgtgatgttttcatataattacagataccgagcagtgacaagtgcatactatagaggcgcagttggagcaatgctggtctatgacataaccaagcggcaaacatttgatcatgtggctcgatggctagaggaattgcggggacacgcagacaaaaatattgtcattatgctagtaggaaacaagtccgaccttgggacacttcgggcagtacccactgaggatgcaaaagagttcgcccaaagggagagcctgttctttatggagacatcagcacttgagtctataaatgttgaacctgcatttcttacagtcttgacagaaatttatagggtcgttagcaaaaaggccttattagctaatgatgaccaggagtctgcaggtagttcatctcttctcaagggtacaaagcttgttgttcctggacaagaaccaatacctgttgggggttatagctgttgcaagtattcatagaataatattcttttcctactgtcacttggatttttaatgtttatagttctggtaagtgccttcggtcattcagaaaattatcatttatttgaattgtgggttttgatttcgctgtttga

SEQ ID NO: 218552 - DNA, 2338 bp, Cannabis indica
ttttttaaaaaggtaaaaaaaaatatgtatttcagttcttaaaattttacatttgtaataactcataagatctatttattatttagtgagaaaaacatgttaatttctcgaccactacagattccatttatttttgcaataataatttggtctacatcgatattaatcgcagtgtatatgttccacatttatttattaacttttgggagttatataagtattcagttttaaacttacagtggcaaaaacgtttattattgcattcacccgatctatttaattatttattataaaaacgtccaacgctaaagttgctcaatgttaaaaaagtaacttcataaatttttatctattactttccgtgaaatagtaaataaagcaataaaacacatattataattaatgtgttgtcctatttatgccccttaattttaacctaaaaataatttaaaaataagaaactaaaagaaaaaagtatcaaacctgttgaaaatagtatcaaaataaatgttaacgcggctatctttgaagaacaacaccatttcggtttggcatgtgtgattagagaccacaatagttttcttttgaatgctcttacgaagctgtttcgtggtactattcatcctacggtggcagaagctttaagctttaagctttaagtatttcctttcttcttcatcatactttcattttcctacacttccacacaaaccaaaaaacaaatttttctccttttcaaaaattaaaaacctactcaaataaaaatcatacattacaatacatccatatttcaatttaattcaaattcaaaatcaaacattaccatactgatcacatccaaattcaaaaccactaacaaaataaaaaatttatccaaaatatctgaaaatggcaagctccatgaactaccttcaacctcccaacccaacccaacctcgtttacccgcacaagcccccaaacctgtcgacaatgttgctgaagtctattggaatttgggataagatgaatgagattttatctcaaaatcaattgacaatgagaggagtagctcattcatcttatatatggtaatttattttcacacattaaaaatgtgagactaattctaatactctcctcacgtttgggcctagaaaatataggtataacgaacgacctttaagagaccacatgaccaaacgtgacatttaaaagaatcccagaaggccaaatatcaagaaatttgtggatgtacacgtcgggaaatttgtggattttgaaacaggtcagagaccccaacactggaaactggcacacattggctgaaaggtcccaaatagagattaaaggggagacaacagaagtatctttttggaccgacaacactttggctcacaacatatcacaaacggctttttttttaagcggtggcatttgggctcacaacggatcacaagtggcgatgggataagatgaatgagattccatctcaaaacaattggcgatgggaggagtagctcattcatcttatatatgataatttatttctacacattagcaatgtaggactaattctaatagagtctcatttcccgtcagtacttctttcattgatatctcaaaccttccttttttcttttacaaattgatttgaagaagggaagttgaagaaaggaagaagggaagttgaaaaagaaaaataaggattaagagtttcttttttagataaactataaattcggaaaaataatttttataataatttttattttaattcataagaaaaaaaactaatgtatatttttttctaatattatttttaaggtttctaaattaaattaaattaaatgggcaagattaaatttatcaatcactcacgtaaaaaataaataatactaactttagaacaaaccaaagcaaaagaataatgatctatataatgtaaaagtataccacccacaatgatattttaaccatgttggacttttttaacatgactcttttattaccaaaagcataaaaaatattaaaaaatatgaattaaaaattaaaatactgaaaaatcaccactcgtcaaaggcaaaataaaaattaaaataaataattataaaaataacttttatatgaaaaaaaaattaaattattttattaataattattttaaaattgacaaatattaaaaaatacagttttgtatttactttgaaaaaattacatttatttgggcaagattaagtttatcaatcacccacaagaaaaataaataatactaactctgaaacattcctcctaaaaaaacacttagggaatagaatggaaatgtttttgggaataaacaagcctctcaatattttctag

SEQ ID NO: 218553 - DNA, 1630 bp, Cannabis indica
cattctgaatttttcactttttattctactagaaattcctacatcactccaatttatccatatacaaataggacagggatcacagatttgacttagacatagcttctgtatctgcaattcctgagactgctttcctttttcttgaatcaacgacataatcgtagcaaattttttcctatatctctaacttcttctactcacgaattaaattatgtgctaatcgatctagattttcagcttcttcatctgattctgattcagagatctacaccgcttcatatcccacaaatttagccatagattttgttaatggatctgacaaatcaaggcattccgccctccatcctgagccgaaaccttcccagcctttgctgccattctagggtcttcccctccctcccatggttccaactaatgttgaagaggagaacacatcaatatcgcaaatctgcaatcgtccattcactgaaatctccccgccctattagagtaaaggagaattttaatagaaaaattggtactataatatattttgtttatttttaattttttttgaacaattaataaacatgtgtttattcaaaataataaatcagtataagtattttatttttgaagttgttgatgaactaacataaataatattagtaaatatgtttatatattttctaaaaattcctattaaattttagtaacataatattagcaatatatcaatatataaatatttatttatgtagttatatatttaattttatgtgtttatttttttagaaaattaattaaaaataatcaacatgttaaaatagtaaatatataagtttatttgtaaatatttataaattgtataaaattatgtaattatattttttttacattttttttttgtatataagtgaaaattgtcctaaatatgtgatttgaaattcttcgtggtactgtgattgtagtttttatttttctcaaactgtgagatatggtgcgatatgtggtttagaattaaagaattaataaatgttcaaaaagcaccgcacacacttttaagaaaatacaaaaattcaaatgtaattttctataattatttcaatctatagatattaatatctatatatatattagaaaaaaagttatatgcaaggcacgcatgcttagttttaattatattaggtgctatataatttaattatatataatataataaataattatatataatttaatttattaatatggtctaattaaatttttttaatataaaatgattaagacaataaaaagtaatataattattttgtgaaattatttttatgtatattcaatacatgtaaataattaattcttagatgaagaatattctatcattctttataaaaatgtatcttctaatgcatataatatgctgtttgccaagtaataaaatgtttactttagtgtagtaatgtcttaaatgttctgtctaaaaagaaacacacagtatttcttaatttgtgcatatacatatacatatataaatatatatttctatcaaaaagaaatatatatacttttaatgaaacgtattctaaaagatgcttacattgatgttacgtgtaatacacgtataattaatttttttaattaggttcaatta

SEQ ID NO: 218554 - DNA, 12028 bp, Cannabis indica
gcggggaagagagccgcttgatgtggatttctgttctattacaatcaatggtagctcgaaccatgatctcttgcagcagcggcttcatgatgtgtcaagacaaagagaggaattgcaacacatggagactgagcttcgagctcaaataattgctagatctgaaatgatcgaaatgcaaaatagctttgacgcccaaattaaggagcattctagtgctgctgccaatcttcaggttttgttctatctacttcccttaggttgcaattataatgaaatctatttgaaaaaggtttttactgagagcaattgttctgtggatggtttgattttgtcgaaccattccaaattttagtagtttagcttgctgcgcacactagttttttttaatataatgtgctgtttttcagattagatacatattccaatgtttggaactattttgggattagatacataccaaacatcattgttgacaagttgatatagatatatagtcattcttaaaggtggatttatctgctaatataggaacaactgcgtgaaagggatcagaccatacacgagctggaactgaaactggaagataaagaaagagagctacatgctatcaaaagagacaatgaagcggtttgtcaaatactcacttattttgataagaagctattgtacttgtacatttttacattataataacttttctgatattattttggtttgctaggcttgggctaaagaagaccttctcagagaacaaaaccaagaactagcgagcttcaggttaatttatattaatttccacttttttattgctagacttgaaatttaccattttgtgcttttaagtatattttttttacattgttctgtgtttatgctggtttataacattggaaataaaatttacattgtttcttttgaatattttctgctggcagaagagagcgcgatcattccgaagctgaaagagcacaacacattaaaaagctacatgagcttcaagagcacattcaagaaaaagataggcagcttatggagttgcaggaacaggtctgtttcatacgtacgcttatgatgtacttatattgctcttggattatgaagctaatttgttatgccaaaaagcgccattggaaattaaaaaatattgaattccacatatttgagtttaaattaattgctactaaattgcaccaatagtgatatgccatgtcctagggtaccatatagcaatgctctctatttaataattttggatatccccaattgtaactctaaaattataaaatcattattcattttgtagtggacttagtattatgactaagtacattgcctaatattttattatcattcagcataggattgctcaagaaaacaatctttataaggatgatcgactgagagaagcccaagcatggataacccgtgtccaggaagtggatgccctgcagcaagctgagcgtgcagaacaatataatcagctctggcttagttgtcaaagacaggtaggtttcatgtttttccctttttccacttattctgtactatttatttggttatccctttttcattcgttatagcagatttgtgtcacacaatgagtttatgttaagctcaaattttctccctaatgtttgtgtgaaactttgacttttccattttatgtctggaaccgcacctttaaattttgtttcagttgctggtacagcgggtcgctatttgcttgattatagaatgggattgatggagatcccctttgatttttgtcatgtttcataaattcacttcattaatgtttatgtatctggattgttgatggtagtttgcagagttggagagacatcatatgcattcaatacaacagcttcaacttgagctggctgatgcaagagaaaggagtggtgctttcactcaagagtcacgagtttcacaagaaaattcaaatgatgcatctggatatggtcagaataatggaaaccaactagacatgaatggaggtggcacatcaagtggaagcaatgcggccctttcaaatggaaatgctgacaatgctacatcatttacttcaactggcaatgcatcaagtcaggtaattttatttgctttttttcaccccctctgccgttgtagaacttactgattggtgaaatgctgattaccctgcttgagggtttgtgattgttcaaaggatggagtattgcaaaatcatagatcagaaaccatgttcaatgcaatagcgataggaaagttcatagtcttgttgtctagtatgaagcacacaagataattccaaatattaattattgtttatctttaattgttaggttgatcacattgctggtgttcccattactccatcatctttacttgggatgccttctttccttcctcctggacagttggctgctatgcatccatatgttatgcatcaacaaggggttgcccactctgtccaaccacatgttcctcaatctcatgttgggcaattccattctgttcctgcaatgtcatccctgcaacaacagtggtcgaatcaacaggtgctgactgctgacagatgaacacattttttttaggtgcttttatacacgttaatggatcagacagactgacattctttgttatattatttaggccgtatcagaaggtgcacaaatatcaccacaaagtgaaatatcaccatcccaagctgatcaaaaccttgtgagatcagatgaaaattacaactacgagatgtctgttaatggacaagctctttctgcagattatttgaatgctcacattggtcatcaggctgatcccaactctgtgatctcgtcgtctactggggaacaacaggttatattaataaagatgctgctgatgcttttgctcatctttagtatctctatgtactaatgatgtaacattaaaataataatatatcaggttctcgagtcaattgataggggttaccgcaatgcccaatctgagcaggaactgagacaaatttcatcacagtttcaagatgtgttacgcctggagtcacttcagcagagcactgaaactaaggtttgtgtcttgttgctttattttggttaacctattttatggaagctgtggctagtgagagtaaattgatgcttagcttatcgaaatatttgaacagacaaatgagcaatctgttatgaatggtattggtggcttagaggaacaagtttcaaccacagcacaatccagttcttctgccaatacattagggactccggagaattttgaggaaactgcattaaataattctaatgatgtagtattgcccgaagcttttgtttctggtggacagacaaagtcaccaactgtggcaaggactgcagaagttgttcttctagatgaaagatcattgttggcttgcatagttcgtaccattccagctggtggtagaattcggataagttcaacggtgagcatttatgagttgctaggtgtttgtgggcgggggcattggtcttttatgagtattcttatatctattattgtttttttttgtgtgtactttgaattgtacagttgccaaatagacttggaaagatgcttgcacctttacactggcacgattacaagaaaaagcatggaaagcttgatgaatttgtggccagccaccctgatgtgagtttcttgaaactgccaggtttgcgtggttccattaatgaaaatatgaatagtaatgaaaatgtttctgtatctgcagttatttgtgatcgagggagattatattcatcttcgtgaaggtgcacaaaagatggtagcagccaatgctgccgctgccaaagttgctgctgctgccgccgctgcattggctccttactcatcgagtatggcatctgtggccgttactccaatggcacagaacagacataaaaaggttcttccacactgtctcaatatttctaagcccaacaatgctgtttcaaaatttatttaggcctatctcctatatataaatgcaactactagtactaactaattgacccaacacctgtctcttttgcagcagaatccgcaaccaaacggtgtgtattatggtggagcatctgagggtttaacaaatgttaaaatcttaagcaaatcgatagatgctcgtgacctgaatgtcgctgagaataggcccagtcagctcttgaatggatcaactatgagcgctactcaaagcataggatcgagcaatggcagatccagctcaaacactggacttaagcagcatcagcagcagcagcagcaggggaggtgtggctttagttaaattttcattcaaatctttttcggttatttctttcctaataatttcgttcgtgattgtctgacaggccaactggttctgcatttccctccagaagatgaaggagaaggtagccaatggagttttgcatcaataatgccatcattttcccttctcattgttttactaacagattagatattcttctgcatataactgttactaggtgttgaccggaggagaaaggtgttgtaaaccgaaagcggggagaaaatcttggaccagattggtgattgaatgaagcaatagtggacgatcacaaaaatttcattgcaactcatacaattgtctgattgaaattgtgatgatttttttttttttttttaaatatgttatttatcttttgaggaaaggcttagtttcttgtgcgaatggtctaaatgatatgaatctgcaactctattcttatctgcgctgaaagcaatgttcatggctcaactgcttgtttgcgttagatatataacttttggtgaattattttaacattttcaattctcatcacatttcatcttctagttctgtttttttgtattattatggtttggaaaatgtctaggaaaaaatattctagtccaactcctaactcaagtaaaagaaaaaatgggtcacctattgtaattttaatttgtcgactacttattattgcatgtcaatctattagggaacaagacacttaactaacattgagaacttttcatattgatggagtatttaccagaggtactaattacttatccctcgatgaattgtctttccagggattgtggaagatgttctactagaaattttcttcttattgcttcgaatcatattccctaaaaagtaaatctcactctaatgctatgaataatacatgcattaacatacaaagattttttatttcacaacaacaaaatcactttctatatgttaaggggttccacatggaacagaaaatgttccacattaatggattcagatttataactacgggtttcaatgtacgagacctacaaagcaaataattagactaatggcgtattgtgctacatagttggttctcacttcatttaaaattgtggtgtaatgtgtatctcccatgtttttgtcatgaaattgatgaacaaaatcaaagaagaatttttgaccaagaataaaattttattgaaactatccccgtccaaacgagtattttacaaagaattgtcaaggagttccgttaatgacagaccgctttgatactttggaacaactcgataaattaatcaacgaccaggaaatggtagaagaatgtgagctattatggggcaaacaaagactctttgaaattgttaagttgcaaatatttagtttcattaaattatattaaagtactttgtaaaattgtcaagttgtaaatatttagttaccaaaatctgattatgaatttttaaaaggtagtaaaacttcgcaattaaagaagatgttcataaagggcctaacgaattcttaatgagaattagtgattcaactttaattgattcttttatcgcattagaatattgtacattcttaaatggacaaaaaaaaaacgctaaaaaattcatcgctggtcatacaaatcaataaataatgttagacaagccaacgacctaattgaaaaaatgttagaaaaaactcctcaaatcggtcaagaaaatgtaaatgtgtggattttcattaaaaaaatatatattccaataatattatggttaaactttgcgaggaaattacattatatacccactttatttaacttgttttaactttcacctttattttcatattttttttagatatacccacttttatagatgatgtcctcattagaccccttaagttatgtaaattatatgctagacttaagagggtatattagattatccactcaaaaaagtgggtatattttaataaaaaaataatataagggtatttttgattaatagatacaaaaaaagtatttttcaacttatcccgaactttgcgtaggatttcgtattgttgttagggataaacttgttatttttcggtatttttttaaaaaaactattatagaagtgacataatggtgtaataattacaatgataattttgcccttaagtagactattttaacttattttgttttgactgttgtaatgttcataatttaaagaagactaattaggatttttaccttttaaattttgatatgaattttgacatgtatcaaatcatgttctctgaacttttctggccgttaaaaattccccctgaactatttagattgttagatttaagtacttttgtctaatttcatttaattttactaattcagtgattgtttatgcactaaatcatgctccccatactttgatgtctagcaattttttccccttaaactttgatatgtatcaaatcatgccctctaacttttattcatattagacttttcttactaaaattggacaaaaagtttttaaatccaacaatctcaataatttaaaggaaatttttaacagtcttcaaagttcagagagtatgattcggtaggtgttaaagtttgagggacaaaaatcctaattagcctttaaaaaataattttaatcaatgatataaagttctgtctcacttgcaataattgaggccaggactattttacaatttaaaagatacatatatttatatttttggctaatttatttttttaaatacgttggtgtgttggtaatggtcaagagatcgatgttcttcatgaaccttagttgccttgtgaagatcaacctttcgttattcaactcacccttgtttgcaatctaatgaccattgaaggtgggaattggaggacttgtttgaggatagagataagaagctcatattagacatttctctgaatattgcacaagactttgacaaaatgacttggacctaagaagctttaggtttatattctatcaaaagtgcatataaactgcttcagaaattacatggcaggtgggagtctaatgataatgctcataccgggccaacttttggaagctgaaaattcatcctaaggggaagaatctggtttggcgttcagaaaagagagtgcctgcccactttggagtagctgagatcaaagagagttgatgtttgagctcttgattatcatgaaaataacttaagggtctggaccatcactaaaattatcatgaaagggcatttatgctacaatatcatctgccaacatcataatgtttaattcaggtaacacatcgactgccaacatctctgcatttgtttctggaatgaaagtcccaacttcactatgagtatcctcaatagtacttggtaaaggattaggatcgatacaaatattcttcttcaccaaagacacaaataggggaatagattcatttgacttcttcgcaatcatagacaaatataaacttagacgcttatcattttttataacttctggtctatatgttagctttttcatgtacttataattcacttttaatttcaaatcatactacactttgtcaacctcgagttcttcgtacaaaagctcaactaaatgtgagtaggttatgtttgtatcaatctcgaatgtcaaattttctgcttcattgaaaatctattctctaccttcacactcataaataccattatacatcaaagacacaaacatagttaaccttgtcatccacaacaaaaacaaaattctaaaaaataaaaacaaaaacacaacataaagaaataattgctaaacatgtgtaatatcggacaactatcaaacacaattgggctgtaatcatactcaaataattatatataaaacaataacccatcatacctacatcagacaaaccattggtctatatcagacacataaccttaaccactaaactaaacaaactatcagatcccctatcatacctatatcaggcaccatcaagacattacccctaacctttgaactgaacacactgtcggacccctattgtacttatattgggcatcattggacttaacaaaaaaaacccaaaaaccataaaatcgtagaattttccaagaacaacaatttccacaaccaattcagtaaaaaaacaccaacatctcacagatcaaatatttaaacaacattctaaaatatatataacaaccaacaacaaaaagaaacaaaaaacactaattatccatagattcctgtagatgtttcctatgattaccctcagcttagcgtctacttcattccacctccaattcgtgcttggtgcaacaaaaattttcacttttgagcaagattttagtgatatttagtaaagagaatgaaaggttgggggagatggtggagttgtggtggtgagaaaatagaaataagagaacataagtgatgttatgttatgagagagatattttaggaacaaaatgtaaaagttagcctacattatttatggtattgtacatgaattttagttatcaattttatcctaacgtaatcatagaaaatcaaaagagcttttacacgttcaagctatacctagttatgattagaaatggtatcaccatataattgacaacaaaacacacaacaaatgaaaaatgaaaaaagaataaaaacaataatagatcacaaatgaattcatatgataattaagaataaaattaattttaaaatagaaaatgtagaataatgaactctccatagcacttttattaatcttttctttttttttcacaagagagaacaaaaaaaatattatattttaataatattgagaaaccaatattttgagggaaaatggtacaaagagaatatgtcaagttcaatagtaaaaatactttgaataaattgttaatttggtgatctcaacaagcttgagaaagaaggaaaaatacaaaaaaatcacaatcttcttcagatttttttttttaaataaaaataaaaaattcaaaccaattagttgactacttatcaattcaagtcaaatgtgatccttcttacaagaatgaagatagagtagttgttgaaactatactataaactgtgtatgtcatggtgtttttaatttgacattttatagtgaaaaactctcctacaccgactcattctccaccgtgattgtacccgaaagacttccctagaaaattactggtgccatcatttccaaaacccggtttccctatataattcccggcgtgaccagctcctaagctctcttgactgtttcccattcctgctcccatttgcatggccttttgagcttggttgaactgctgttgatggaggaaaagcgcctgttgctgctgctgatgctgctgttgctgatgttgctgttgttgagacattgctgcttgaggatgatgctgcaattgttgcattgttgactgagcttgcatctgcatattttttttaagggatcaaacacacacacaaacattatgtttcagaatcacatttcttcggtcaactcacttggggttgaggaggagacaccacatctggttgttttgttagtgtatcagcaagattgcttagaaacatcaagttgttttgaagtttagctcgatacctaacatcttcaaaaatgtcataatattccataaccaaaatagtactcactaaatcataggcaagactaaaagaacaatggatatattcatgacttaataattgcttccatttctattactgtattttactcctttgagatgtcagatattccaaacaaggagggaaagaacatcaaaccaaataatcaagaaccaacaccaaatgatctattattactgctacatatattgaaaaatctctttcaatatcctaaacatcaacaaatatgtactaccaaaagccacacagataataaatatatttctcattcttacttgtcctgaaattcctctgttctaagaagcaagcattccaatcaatactaattagacttgacatgtcaatcttactttatcttttgctcaaaactgtaaatttaaaaattgcttttaagaataaacaacactagttttcaaaacaaaggaaacaaatatactcacggggcacattcgttgaattttccctgattttgattctccattatagctagaatcaactctttattctcctctaagcactgcatcaatcaatcaatcaaacacaatgtggagtctctccaccttttaggttacaaaaaagaaaacaaaagactgattttcttttcttttcttttttccttagtctataagaagtttcaactttcttcatccataataataccctttaagcaatcaaacaataataacataaaccaagaacacaaaagtaacccaaaatccaagattttgaaacatattgtatatgtatatgaatataacatggctgggctaaacataatgcaagcatataacaaatatgtatatatatattacttacatatatataaaaaaaacaaatattgataacacataccatttgaatcctttcggtgctgaagttgaagttggtaataggaagagaaggtggtggtgtagccccattcaacatttttgtgtctctctttcaagaaaagatcaaaatgaaatctttatgagaaccctttagagaaataagaaggtagccctagtttcccaaaacccaaaagcaagaagaaaacgaaatagctcttcttcttgactcgttgtcttgttgagttgtgacaccactattttttgttacgttccgtacaaatacaaacccctttctctctttctctctctctctctttggcgctaacccagaattttattacgtcaaaataacataaaaacgacacctttttctacgacagtctttgaaattgaaaccccaaattttactgtcgttttgacttttgagtgtcgtttttggtgcttacattagaattagaatagaatagaagcccaaaggtgaaaacttgcagaggaaaaagaaaggaatttgggacgagaataagaagaagatgggttacgttctgagagtacgagctgcgtcattctttgcaggggctgcggcagcgtcgtttttggggatttacattcttcataacgattacaaggttgcccatgaagcaatttctcaacaggtattgctttttaaatatatgaattttggggatttatttcatttagtgtatacatttttgcatctggttgttcttgaaattgatgggtaattgatcgtttttgtttggtttgagagattttcttgtattttgtagttttaattttggggaagttataattttttttgagtgtaggatgaaattttaggaaaaatcgaactgtctagatagtgggtgtaatgcttaagctaattgggtttgtagatgattcttatggttgaaaatggaagattggaactttgagtttttattgtggtgttttgtgagtttctggacatggtgcttgttgtgatgagtaatggcttagttaattcggttgagattgaagtgttcacctattgtagagagagaattactaggcataaatttctttaggtcatccattgaagtgatgagaagtgatgatagtgtaattaggtgatatcttcccatggaaaaggttccattttggtccatgataggaataattctatgttatttgaagaaggtcagaggagttagaaaacaaaatgtttgatggggaaattggttagaagattgtgtgctatggttgctactaataattttggtttctcttttgttgagttgggtccatatactgtgcttgcttgct

SEQ ID NO: 218555 - DNA, 3250 bp, Cannabis indica
ctaataaagtaataaaatcaagattagcgtaactaagtaggatttaggaaagttaatataccacattttgaaactgatatgtgaataattttttagagtacgtgcaaggtataccaatacaattactaatattataaatttaattttaaaaattatcaaaaatgtctatgtttctcttatatattttaacattataaaaaattattaacgattcgcaaggaactaactcatagcagtattgggcaccactaatatatacctagttctaatattgtgggcaccactaatatggagcactagaaatctatcatttgttggtagattagtgcttatttattctgtgttactcacaatacacatatattggagtcaaattatgtttctgcctaagaaagtcatcaaggagatagaaaccatatgtagaagcttcctctgaatagggaaggacatgatggcaggggtaggatgtatagcatgggaaagtctgtgtaaaccctaaaaaagttgggggcctgtgcttgttaaatattgccacttggcatgctgcagcaatgatcaaacatatgtgtgggcagttgcaaaaaagaaggacagcttgtggattaaatgggtgcactgtatgtacatcaaacaacacaactgttgggagtacaatgctcctcttcacagcagctgatattggaggaaaatagtcaaaattaaagacaaagttaagcttttggtgcagacaaatatgttcactgctaatgagtataaaattgcagcaggttattgcttgtttgattattagatgcgtgaaagagttaaatggtgcaatgaagtctggtctaggcttaatacaccaaagcatagcttcatgacatggcttgctatgctgaataggctaaagactcgagacagaatgttcaagtttaagatgccagacacagcttcctacttattctgcaataatgcagaagagataggagaacatctttttttcagttgtcctttttcccaggattgcttagtgcaggttaaagcttggttaaagtggcataccactgctggtaacctacaaggcctgctgaagtggataaggaaagctaagcattctaaatttaaaaacagtgtaaagtcggctaaaatagaaaccttagtttacgtgatttgaattgctaaaaatgatatgttatggaactcgaataggatgcaggttgctgagtcgatgcaacagctaaaatggatggttaaaaatagagtaattcttgtaatgccaaaaaaagtaaacaaaaaaatagagaatggtttcagtttttgtaaatatcattgtataggtaaatttaaggccttctacttctagatgaaggtgttttaggttgtacaaaaagttattagagtaataaaaatataaatctggttcataaaaaaaaaaaattaattagtggactcaaaatcctctaattctccacccatattatataccaattaaaattgtaagaagtactcattaattaaattcctaataaattacaatttataaacttgctgatatatattttttttgcacatttattgatatattaaaagtgtctttcttaatttaaatgttttattatttaattgtaccaggtcattataatttcagctgtaatataaggataatgattactggcaagctagggttccatatgtgtctctgaaatttcagttacatatatttatatacaggttagtattatcctcgtgcactcagtaattaattaatatatattatacaataggcaacagctatatatcattttttcccatacaatatgatgtgtctatatctatagttaccattgttagagaaaaacacacaaaatatatggaaagagaaattaagagaatcagcttatgaatttacataattacccatactatcacattctatttcctttttggattgcacaaggtgagggtactttcggcattttagggcttatttttctttgaaacaaatgaaccattagggttcgagtacgtggagggtatttttttggtaaatgaactctactttacctatataaagagtgcaaataggctagtaatcttcactactacaaatctcagatcttccaaagtatattgtctcagtatagaaaagtagtacagctctaaatttcttcttcctagttcttttcttttctcttttgggtatcttagtagtcatatatatatagtcttgtacttcttataaataatacaatattatatatatattttgtgattaattcttctattttgttttgtccgcagggctgagaaatggaagaaaagggaccctttggaggtgtagagccatattggaaaaataaaagaccattcgaagataattataatgatgatgatgatgatgagctaagcaaaattttgatgatgaataagggtattagttcattaccagtgtggaaaaaagcacacttgatggactactttggtgatggtggtgttggtagtagtagcaatgaagtccccactaaggcttttaatactaatattactgctagtagtactactaataatacccttttctcaaacctaattaatgaaaatcaagggccaaaagtagctgagttaattccaagcttttgtaacactaaggaaagtttggacaatagggctaatgatatccagttcagattaggccataacatagaccctaacatggaccccaggaaaatgaaacggtaaacacaacagttatatattatataatttcattattctagctatgttgttttgttaattttctttatttcatttttgctagatctgatttcgtttgaagaaaataataagttaccttgttatttcatttgtatatgtataggataatttccaaccgagcttcttcacaaagatctagaatgaagaaggctcaatatatatctgacatggaaaacacagtgaaggctttgaaggtgtgataaccgtaatttttttatttattaaatattttaatataggattaattactttaattatttatccttgtatatttaatctagctatagcaacattattggcatatactaattattataacacatttaaatgcatatctttaatgacatgatttttttttaaaaaaaaataatggatttgaaatgacatttgtatacattttatttgtacataagcatacgtttcaaagaattagtacataatagatttgatacaaaataatatataataattttaggaattatttcaaaaaaacacaaaa

SEQ ID NO: 218556 - DNA, 5558 bp, Cannabis indica
cactgcgccgagaacgagtcgactcatggctgtaccgagtaagcgtgtggtctgtcccatctgattatctctcttttgaaaatttggacacatgtgaatttggagttttaatatggcttttattatcattattattattactattaatattaatgttactctcctttttcttttttaattttgatttcctttttgaaaaaaaaaaaatagagaaaatttagatgagaaaggaaaggaatcataaaagaaataataattgaagagaaatcaatatatgtgaagaaaaaaaaagttggatattctctttattgtgtatatgatatctctttttttatttgtcttttttatcatataaatttgtataaacttttattatcttgtattttcatttgatgaaaaacaatttgaataaagttgaaccacacaaaatgtaatttgagtttgaagaattaaggaaattaaaggtgaattgtgttattattcataagtgcaattattctttgttcttgatgattaatttaatattttttttaataatgaggaaattaatattcctaaatatataatatccttataattattacttattatttttcagtgggattttttaatttatttagttttattatgcatgtaatgttgtataagagattaacataacttatataaaatgataataattaatctacttacatatatatatgggatatgattttgtcatgttattgtactttcacgaattgtaattcgtgatgtacggcagccgtcagatgagggagttatttgatctgacggctgagattgatttagaggtaattaagattaaaaagtagaaacgtactctgacactcatttaatgtaccttgagactcatctaatttgccacagaatacattacgtgaaagtacaaaatcatatctctatatatatatattaaactcactatatttatatttttatttatatatgtgtatgtatatatatttataaacgtatttttcaaaaaaaaagtatatatatattaagaaagactagctaaaagagctggtagaaactccctatctaagagcatagtttttatgataactttttgattatagtctttattgaatatatattttttggtagcttattgtatataatcagaacttttgttttaattatattaatacaaacaaaaatatatggttggattggatcattaacttttagtttagtttcttttatcatgatgaatttgattattagctcaaaaacaaatataaaactctaagaacaagagtcaagtttgtcgactttggtgtaaaaagcaccaactcttttattttatttgtatttggacatatattaattattaaatgcttcctagttttttccttgtaggatttgcctttatcaaatatttttatttttatacatttaaatagaaagttataggtatttaaggtagatagatgttgtacttgtatgaagtatccaaaaataatggtgtattttttggcttatacaaaaggtattttagcactaattgttttaacccatcaaaaatagtaaatgatagtttaaaaatattgggaatatttaattatagtctttttttttatttatttaagcgtttatatattacaacatacataatctgagactcaaacctagaacttccaacacacacgtaccccatatggctacttgagctaacctcaagtggttatatttaattatagtcaacgttcttaaataatcacttattttaattagtgacgttatttaaaaataaattaatttgagtacagatgaaaataatactttttataatagtgggcaatttatttcctaaaataaattgtcattgttaagtcattatttatttagaaaattcttgtttttaattattttttctagacaatatctttcaaattgttgaattttttttatgtcaacattatctgaaattttgttttaaaaaattaattagtaagactaaattttgtcaaaaataatttctcgaacgctaagttgtcaaaaaaactcaaaaatatttatgttaaaaatatgaaaagagtcgattaggtttgtttgatttattattgtcaaaattcaagttttgttcaaactctaagtgagcgaagtttgttttatccttaattactattattggattgattagatagaaatgcttatatataaaacatcttttaatgacaaagatattgatttatagggtcacaaattaacattaaacaatttttattagtggtaaatatattgggttggacaggtgtttggctatatatttcaaagagttgaatgttttttatttttttgtgtgagaagattgaaagaaaattagagaagctgtggttaggagtttataggtggtgaaaatgacttgaagccttttttcaattaataattaattgtgatggtaagaaaaagaagagtacaactgcaaacaacactaaatgattttatcaccttaaatattagatagatagtgacatttctcatttataatttcaatcttttgaaaatgaaaattataaatatatatatattttaatgtttttgtttctacttttatgatttaattcgtttgatggctttgtgatatcctcatttcaataaggtattacttagggttgttgattaaattgtttaaatcgctcaaacttcatgtactgcagaaaaaatgatctttaaaattttttgcaatgcagtcgcggttcgaatattttctaaagtgcgcagtgtggtgcgatttgtgattttaaattgttaatatgcagttcaaaccgtaccgcatcgcatattataaaaataccaatttttatatttatttaggtccaatatagcccaaagaccactaattagtaattattgtattgttgaaacttgaaactttttttcatatttcaagccccatggtatttttgacaggtgttgctcaagttttattgtatttgtgatagtttaattatttagtgatactccaaactgcgaaaactacaccgaaccgcaccatttttttgtgatgaggtttctacgattttttagtttcacggtgcgagtgtcgtttgaaaaattgaaaaaactacatgtacagattaatttaaaaaaaaatagttaaaaactacaccaatcgcaccgccaaaatcctaatattactattctagattgttgtgaggtgtttgaattgtgttttgtttcaaattattagttttggtgtacttggaccaactcaatttaatgtgtttcacaatccgaaaaggaagtatatgaaaataggacaaatagacaataattgggtaatgtcggttacatatttgagtgaacttttgaatttaattaggtaatttttgaattcccaagtactgggtatgggatgtctttaatacgccatatttgagttggtttaaggtgttccgaattccggagcctaacactacgataaagtgttactttataattagttagtaattttttataatatttaagataggctcttaaaatttttatgaattattgagattattgagaaagtgaagtttttttagtttttaacaattttatttttatttttttttaataaaaaagtaaaatgggaagttcatataatcaatgaaattaatttgtacaaattaatagagggtctaaattttaattttgggattttattaaaggcaaaaaatgaaatttaatgtgagactcctagtaaaaatgatgagctacaacatgagtatagtatagaatgaagacttaatgttactttcaaatgactcctaaaccacggcacccaaactaatgtgactcactcattgtaagttttcagttttcacacttattaacccaacaaatctaaaaacagttggtaattttttcaccgatttttcatttattgtttttttttaaaaaaaaaaaaatattatttcacatagtaacaatattaaaacaatatattttgaaaacaaaggaaaaataattatttgtatttttgtataaaaaaatattataaaatcgtaaaaatgtaaattttttgtttttataaaataattcttttaaattaaaacataagatatgattacttaattaattatactaataaggatatcattttgtttgttggctagtgttagaaattattactaataaggttaaaggtttgtttagctaataagaaccacaaaatgggatttcgtatttattgcagagatggatttttccttagcaaaactgggaattatgggatcctctgagtttgtccaatttcaataatagatcatacatatatgtttggaaaatatatacatattttcaaatttattaatatttaaaatttctgcaaatacttgttaaaaaaaatagcatatacccacttttaattttatttattttttaaacaggtacaatagatttttttttttttaatttgcggcaaacttctttatgttttagattttatatatttaactattttttttttgtggcaaaacctcttatgtttactttttctggtaaatttaaggcgtcaattagataaaatcgttaatgccaactgaattaacaaatgtattgacttcgaagttttattgtcacatatacacatccagttgatatttaacaataatatttaacttacacctcaaatttgcaaaaaaaaaaaaagaagtaaacttaagggattttaccactaaaaataaaaataaagggttaagtgtttaaaaattgaaacataaaggaatttcgccacaaattactcttttttttaaaaaaataaaataaaatatagtttaggtagttactacattatttgcaaatattatatatttatttagttatccattctgaaaaaaaaaataaaaaagttatatatccatttcattttaaaaaaaatgttgtataagatatatgtttttttcttaaaacaaaaggcaaaggctatatatatgtaatatttgtatagagcaataaataaacttttccatttcaaaataaataaataaacatttatttattatttttggaatttttttcatttttacattcaaagcattttttttttttataatttttacgaaattctacatacatagaaactctattgcaaataacgttgcatcctaaattgcaacaaaaacgtatagaaacccctattgcaactagcgctgcaaccactttagaaattcaaaccgtaaatttgaaaagttaaaaaaaaaaaaaaaacagtatatggagtaatctccattatatttttaagtcactattttattagagcatctccaatagtacttattttttaactaaaactagttaaaaaagctaaaataaagagttatttaatttattgttgctccaattatgctgacatcttaataatattttatgaagatatttatattttttattatatttatttttaatattattatatttagaccatattttaatatattattaatgtatttttttgaaaaataatatttgtgttattttttttattttatttttatgtatgagatattaatagtgttgattgtgggttatttttggtaagtagatat

SEQ ID NO: 218557 - DNA, 2336 bp, Cannabis indica
atagatacaataatgcatttgaaaacccaacttttaatattctgcaacacttacaaattaaagtaatatactaaagaagcaaacttgggtatcatatgaatggagttattctactattatatgtctagtataccttgttgctgactggagggcttcaaagctggatagacgtctaagattagctgcatttttttttggccaaaaaagtttgagcttgaattttgaaacttaagttgtataaattaaccaaaggttaatatcaattacctctgtccttcctttgtgtggaaaccccctctatagcagtaaaaatttctggtgtgaatacatagacaccacagtttatcaggtcactaacctgaaattcattatgtgagaagtagattagctatgttatgaaaagaaattgaaattcaatatgctgatctcttgatctaagaaagctagtaaatttgaaagagcaagtgaatttccagtgctgagcttacaaaagtctcaggcttctctgtgtaatgcaacagttcattggtggttggatctgctaccagctccccgaattgactggcggactccacagaaacctgtaggagaaaagaattaatgtcataaggagtaactaaggaagggaagatctctgccgtgacacttgtacatgtgttcacataccttaatgactaggattgttcccattccaccataacttttatgagcctcttaagatataaatgaagcaaaagttagaaactaagattttgtgatcttataaacatgtattgcaaatttccttaagcatagttaccaagcatttctggcaatggaaaactgcagcaaacatcacagttgagcaagaaaatgtgtgactgccatgaaaggaacaagcaaccaaatcaaggtttgaacttgaaaacaaattggtaccaccaacaagttaatgtgtttcatttccagagccaaaaaatgacaaaagttgaaataagaaaggtgaaaagaaaagaatataaaccgggctgtcttccatgattagatctctgaagttatagagtccaccagctgaaccaagtggcttgtcttccctcagatatctatgacagcataacagaacagaagaatgatcagaaaattaacaatattttgagttctctttagagggtttaaaggcattcaaaaagtatattacctaacagggactttaagctcattagagattgcagatacatataatgcgaattcacgctcctcatagaaaccaatgagaaatatttgtgccaggtttggaatctgtaacaagcaacaatgagttatttgactattgttttgatgtttagaaattgcacaaatccaaatccaaaatcatttcatttgtttgtattattcaagaatattatacccttttgcaagcagaaatcggatgatggaccattggttgccctgccaaaggaaagagtggttttgggacattcaatgacagtggtcggaatcttgtacctggaaaattcagaaaatccgagtggaaacatgtttgagtaactgatcaacattatcaatcaatcaaattataggagatacgaagaactataataatgcatttggaacaaaattctagtaattaaatcacaactaaagaagacacaaaaacgaaagggatctcattcattgaacgaagattcaaagcaccatgaaaagagaatcacaaaagaaaaggttgagtaattgattccaaaacaaaagaacatatagtttctttcataatagaactgaatctaagaaaacagagactggttttctatggaagaatggtgatcttcttcaaaccttttgtgggtcctccaaccatgatcacagcaacaaccttctcatctgagctccccatgatcctctaccaaagcaaacccagatcgccaaaagatacaaactttagtatttcaaatccaaacgcttataaaactcagagaatttgacacaatagaaaagagcccagatggaaatttatgaagtatggcgtatctaaagccaccaaataattattaagaaacaaaaaaacaagtacggtctagctaggcagcagtagtgtgtaataattagagtgggttttataagtaagatccaatgttaaaaatggactaagctaacagttcaatgccactcgctgccgataagtactcacaaacagccaatgcggggaagtttccacttctctttaaccacaaaacaagagaagttttgtatgtgacaggtaaaactatcttttttttttttttttgttaggaaaacaagtaactatctcattcagagcattgtgtgttgttgtctgtactggtttcacttttctcgatgag

SEQ ID NO: 218558 - DNA, 13153 bp, Cannabis indica
aatgtaaaagtaaaaaaaaaaaaaaaattaaatcaattaaaaaaaaaaatgaataaaaactcaaatttttttaatattatgtacgcatacgcatgttaatgatctatattctataattacctctcctatagacggacgcatttcagggcttccttgtacacatgagcttgcaactttagccatacggtataattcattagtatcatatgaatcaccaattcgaggatcaattagttcatgtagtgccaacttgtagattattggttgcgcctgagatttttttcatacaacagatagtaattaaaaaatatatagttgcgaatagagaaaaaaaaacaaattgttattagtgagtactttatgcttccgtgaactcacaacaggaaaatacgtacccattgccgtagagactgtgttttttcttcaccatctacatcaaacacaactttgtgtcctgatattagttgcaacaaaacaataccatatgcatatacgtctgttctcacagaaaccatgccattttctgcatactctggggcaaggtatctgtatttatcagtggcattaattatcttcaaaatagaaaaataatgaatattttgtacttgaaatataaatcaaattgaagaagcaaagttctcaccctaatgtaccaagtatccttgtttgccatgaataatcatcacctgttttccactttgctagcccaaagtcacctaactggagattgcaattaaagaacttgaataatttatttaataatcaagagaagttatgtgatattatttaaagagaattgtaccattggaataaagtcatgcgtcaacagtatattgcttggtctcatgtcccgatgaattatgggtcctcctcgacattcttcatgaagaaagcgcagcccttttgcaatcccaatagcaatagcaaatctttggtgccattcaagaggggtggcagtttcatcttatgaaagtagttttatttaacaaattacaaaaggcaaatgctacattaaatttaatgcataacacaattttaattaaaaagattactacttaccaaataaatgccaatcaagagacttgttgcatatatactcataaaccaaaatattgaatttctcctttgaacaataaccaagcagcatcactatgttcttatggcgtgcaaaacttaagacgtaaacctcagaatgaaactcagtaaatccttgattgctttcttctttacgtacctttgctgcaatgagttgtccatctttaagtttacctttatagacatgaccatatccaccctctcctaataaattttccttggcgaaatcatttgtggctaactgaatttcagagtaattgaacaacatagcatccttgatatagtacgtatcagtccttgctccacaaattgtgcacaaaagtggtgcttctgagcatttatgtccgaatagaactctctcatatcggctatgtgtagctctataatttattaaggaatttgtatcttctttgaaatgcataactggatgaaaataaaattcaattattatttatgaaacaaatgtgggaaatattttctaattcttattcataagaagaatgagtatatatatatataaatcaaactctaaatttcctaaataaagaaaatgcaataaataaatatatatatatacagttagaatgataaataatatatataaacactaatttctagcttaatttcctacactccacctcaagctagatgatatatgctaaatatttctagttttgagttgagttcactacaatcatgaagatggagagctttgattaagatgtcagcatcttgttgccctaaggaacaatgatatggccggtcttgtattcaatttcctcacacatgaaatgacgatcaaatcgatatgttttttcctattatgatggacttgattctttacaattgctatgacttattcattatcacagagaacatcaattaagccttcaagcccgattttgagttcatcaagaagatgtttcagcaatattcctttacaaattccatgagctaaggcatgaaactctacttttgtactactatgagctaccacgtgttgcttcttgttgtacgaagatacaagattttccaaatgtatgagagtaccctgaagtgatctttatcagaaaaggaaccaccccaatcagcatcagtgtagattttaagagccttttagagagttttcctgaacattagacctattttaaggtgatcccttgaggtacctgagaatctggtagatagcatccatgttttcctcagagggattactaagaaattgactaacactaacaacaaagcgtgagttaggtaaatcaactctcccacgagacgttggtaccttcctcgatcaacttttattccatttgtttgaactccaagttttgtattacgacccatcgttgtgtcaactggcttgcaccagatcatccatgtttcttgtaaaaggttgaaaatatgtttttgctgattgaagaagatgtcaagtctcgatctagctaattacatccctaggaagtaccttaattgctctagttcctgaatctcaaattcactagagtggagcgatgcttatgatgagtaatttcctccattaaatttcatgtaaccacgatttcaccaacataaacaattaatattgcttgtctttcaccagctgaataatttataacaaagtgtgatttgattagcaatgagtatagccatctcccttcaaaaaatttgttaacctgtcaaaccaggattgaggggattgtttgaggccgtagagggatttcttggtttttcacacctttcccttagtgaattttccctcaaatcctagaggactatccatgtatacttctttaattaggtcattttaagagaagtattcttttctagaataaaggccagtcattattcaaataatagacaaaagaacttaaatagtttataagttagcaacaggagcagacatcattttataataaatgccataatattaggtgaatcatttcgccactaagcgagccttgaatctttcaatgcttccatccaccttatactttatataaaaattacatttgtacttaaatgtgcattttttgagaggtaaatatgtgatgatccatgtttcattcttgttaagtgcactaagctctccattgtgtcagcattctacttaaaaatctaaagagtcttgaactatactgggaatctgaacttggtcgaaggaggtgataaaggatctataagtaggagataagtttatgtaactcagataattgtgaatgggttgttgagtgtaagagtgtacccctttcctacgagcaatgggtatgctcagatcctctatcatattttcttccataataaattttggtctagtatcttcaaggatgaatgggaccggatcacaatctttaccttactaagtttgcgtactagcttgttcaatgcttgggagttgcttctttctccttgtgtaaacatggaattcttttcttgggatatggacaggagaacttggatgaagatttcgtggctgatttggctcaatagggtgatttggagtatgagaaacatgaatttctttgcttaggatatggatagaaggacttgaagagatagaatgagaatttattggctcaatggaaagatttgaagtataagtaacagaaggagttggtattatttctgtaaatattatgttgtgaacttggaggagaaatagatgaatggtcaatgagacagacaaagtcccaattttacagttcttgactctcattctctccctgaattgtagaattagcatgtattaaggtttctcttcaaagaagtgacatccatagagtgaaacaccttcttacaaagagggcatgagtatttataacccttcttattggatgagtagccaagaaggatacgtttgttggcgtgagcatcaagtttgcttcagtttaaggaataaacattgacaaattcaacactaacaaagacataaagggaaatttgagacacaagatgagagttaggatatgattcaaggaagatttgaagctaatttttgaactttaagactcttgatggcattctatttatgaggtaggtagcaatgaggactgcttcaccccaagaactttttggaacatgtgatgaaaagactaaaattaagataccttatgaaaatgacgatttttgtgttcgaacacaccattttgttgtggtatgtcaacacaggaactttgatgaataatcccttttcattgcaaatatgttctgaggatagaattaaagaagtcacaaggattgataatttttaacacctttgtttatttgaaattggttttgaaagatataacttgtttcatacttttctttcataagaaatgtccaactaagatcgctatgatcatctattagtaacaagaaccaacacgcccccacttatattttaaatttttcatggttcccaaatatccttttgagtgagtgagaatgcatgagagggttcatgagatcttgggacaaaatagtgcttagaaaattaaaaaaaaaatatcatacttgagagactgaggatttacattgataaataaggatggaataattatatgagatacacgaaatttagatgacctagatgataatgccataacatgatagcactaattttattggactgatttacttaggaaagatattaaccttgggtgaaagatcattaatttccatggttaaacatggagttttcaatttttagcagataaaagcctttactgaactcatcgtagctaatcatcttccctgattccgcatcttgaaaagcataaaattgagcaacaaacttagcttcacaattaagatctctactcaattttcttactgagagtatattacaatcaagcttgggaatgtaaatgacttaattttagacaagacttggcgagatctttatggttcgaattctatcaactcttgaacacaggaaatctactacgtgaacagtcttttcattagagtgcttgctaaaaaagaaaatagtgatatgtcaccggtcatatggttaaaagtatcagaatccataatccaagatgcatgagaggcttgaataacttgaactacatgagtgttgaattgtcttgccactaaagtgatggcttttatggacatttcttcggctatagatagagataatgagaaaacaagtgaagaaccacatatgaagtgaatagaaagagaggatgccagaaaaatgtcaccggagatggagaagaaccacaaatgaagcaaattgagagagatgacatggaagatgtcattaaaaatggccacgcatctacatgcacctgcatgtggagaaggtgatagctattgaaggtggtgcagggaacccaccagaagcttagatggggcaccaagtttatatgttttgtggataagaggtaggacaagctctttgggtcagaggtgagaatagaaaactcctcaaaagtagtttttttaggataaaacttccaaagtaccacattctaatatttgagaggggactgagaaaagaaaataacttttaaggagctttaaatgctctgatgaccattaaaaaaaaaatgagagaaatattttttaattcttattcatgagaagaatgagtatatatatacaaatcaaaccgtaaatctcctagaataaaatcttgattttctatcattcaagattttattttcacccatgatatttttattttagttttcttgccactactataacatgcattcattgatttttataccattatatgtacgatattatatctatgtataggcgtaggtatagttttgtaatttatatagaatgtcataattttgtataccttctagattttgttgtgttaatttgtccgaagatgaagtccccaagttgctgctatctgagctatgaatatgtctactacttgatacaggaacaggcttggatagagatataaaatttttgtgttctgtaatatcttcctcacttttataagtctcaatttttactatttgtattgataagccatcttgaatgaatgccaccttacagggtatctgactggcatcacgcctcatatctaatctcaagtgcctacaattaaattaatttgtatttatatatagtctattataataaataaataataatagatcacgagtataattgaatttctatgaaaaataaaacatataatatttctcatatgaaaatgaacaaacagtttgatataaaaaatataaaggataaatattattttggatcatgtgttttacaaaagttaatggagcctctattttgttaaatgacaaattggatctagtaatttttaaaatggtacaaaatactaccctaacaatttttttgttaaaataggacttaataataacatgatcattatgtgttatgacaagactgagtattttctgtctctgttcatgctaaaaaatattatcttcaagttcgttaaattaaaaaaaaatatcaaaaattgagtttaagaattttgtattattttggaaaatacaatatttgatttgtcatttattaaaatagagggataacttttgtaaattacaaagtcgaaaataatattaacccttcaatatggtcctttctataaaaaacatcgatagtaggattatctaagttgtgagttgttcactattaagatattgttaagttattatatgtttgttgagcaatttgacaatatcaagctcttataataattattattggaacttaagaacagtcaagtgcataataagttataaaggttagttttttattaggtagccatctaatagtttttttaaacaagttatctaatagttttacctttcatttaggtacttgatttattcaatagaagattttcttcccacttcaattaaaagaatttatggtttcatctaaacacaaatagtatgtgaaactttactatatttatccatacataggtaatatgtgtagataattaaagtgtgggtgatagttaagtatcctatagttatatataaaaaattatctttacctacacataaatttggcaataaatttttcctgtttcattttttctttcttttgtgtaaaattctcactttctttttcatgtgttggtaggctagtgtggcaataaaaaaatttcgagcatataattgatgcgcctaaaatttaattaaactactacaaaaaagcctattttatagttttaagtgacacataaaaaatttgcaccaattgaaaaaaatgacgtaataaacatatatgcaattagtaatatttttttttgttagttaccaacagatgcataaggttgtattcttcggttgatgatgctaacaaataaaattatttttttagcttatgcgacggttctacactgacacaaactaaaaaaaattacatgatcgagcaggctcctcctccgcttttctcatatcaacatatcacaaaaattcagataaaatttttcgatccaaaaaaatcaaaaataaaacaaccacctaaaatcctcaaatctaccttgtcattcctatcctcaaatccaccacttgcaaagaagataaaaaaacaagaaaaatgctcacatctgtgaaaataaaattgaaatgaagaaataaaataactaaaaaaaaagaaagaatcttacctcgtgatctctattttctcgctagcagctggaaaatttaaaaactttgtttgctcacaaattcgagataaagatatagtaagaaagagagggaagagattgtgggatagagatcaagagagattgcgactgtgatgaagacaacaagagagaggcggtattagttttgtgggatcttttgtttattggcggcgagtcttcatcgtggttggagaaaaaagatatatatatatatatatgtatatatagagagaggggtgttttgtgtgttttatatgttattagggttaatttgagcttcgggctatatttattatgggccttttttattaatattgtgtcagtttataatcgatgaaaataaaattgtgtttggtataaactaatataatgtatcatcagttaccaactgacgcaaaaatttagagaccaccataaacataagttttgggctttgatcattaggttgaccgacacaaaaaacctattttgtagtagtatttttaccacacttaagctttacatatattattttatgtgtggagaagatattttttttcattctttttaataattctttaagctatttatttaattaatatttatagttgaataatattgtatctttagtattttaattgtttattatatagcatactagaaatcttataacaaaatggggactattgtagggatggtgctaaggcacttaagaatattgggattatccagagtatttagttatgaccattttacctctaaatttaaatattacttggtgataaagtaaggacattatggtaaattgccatataagtttttattatccaactttgtggattttgtagtaaatagaataatatatgctgatttttgaagatgttttaagagattaaaaaagataaaaataaatttaaaaattcgttctctctccaaacacactatctctgtcttttgttcagtcacaaggaaactctaaagaaaacacaatatatatacttatatatcaaagcatcttcatcatttttgtaaggaattcagctaggtatttcttaacgctaaaaagtgaccaatatcagctcactagattggcgggaatgaataagttgtacgttaagcaataaataagagatacacacaaaatttatagtagttcaccccctatgtcgcgatagtaatagaactacgtctacttcgagtttttatttctcacgggatggtaattacagtaatagactaagtataagaaactctaaactctagagagagaaagtctagagagagaagactgaccttgtgggtgtagttttttgaatgtgaaaatgagctaagggagctctcattttataggtgaaggaggcccaaaagaataagagataaaattcaaataaagttttttctagcgttgatgatttaatggtgagaattggcttttgatggtgatggctgattttttatgtctgtcaagtcccacctgcaagttacccaaagcttattctcgtaactcccttggaggtgaattttcacgacaatagcttcataactattcctggtgtgtgaaattttacttaatagagggattaaataacttcaaagtgcaagttgaatcgcgtcaattggataaaaattgagtgacttatgatcattttattaaaggcagttcaggtcccaacatccaagttgacatccaatgcccaagctgacattccagcgccaaagttacatctgatgtcaacctggacgttgtataagtgtaaaaacatccaagggatttcctttgagatgcctaagtgatggtttgacaccccttggtccttttatatgttctggtgaagctggtcacacattttctgagatgttgttattttgtaaaaacagatgactcgaaagttccgacttccaaatgagtcaaaattgaagttatgaatctgacttatttgacttcatggatcattgcacttataaaaaacttgacaaacggtcaaaccagcttcagattcggataagcagaacccggtgaaccaggtcatttgttgacttggtcgctaggaactttagacccaacattcaagattctattttttgatacttccaaggcttctaaggcttcgaaacttggggatgggatctctacccccttcttttccatgccagattcaatggtcacatcagctttggcatttgaacaattgaaggtagcatcccagttgattgtcaacctgggcgttgggccttatttctagagactcgggtttgtggtgttctcctcgtgtttacttgaatctttattattttttatgatatttatgattcccagagcacttttagctgaactgaattgtaaacaacccaggttgataaaatgtcaacctgggcgcaaagtccagtcctaggtgtcaacttgggcgctgggtccctctgctgcccctttggaaatagtccccaaaaatagttgattctcaatgttttttgaagatgtagatgatactcagaactgggaaaactctatttttttgttgcccaggttggcaaattgtcaacctagacggctagtcccaggtgttaacttgggcactgggccctattttttccaccaacgaactgtgtttttcctccaaaaggacctatttccctacttttcattaatatgaattcaatgtggaattcagttcttcgatcggacacttggaaggcaccagattgatagattgtcaacctggggggttaggtgctcggggcccagtgtgctgaaaaattaacttgcttcaaatcttattctgatgcctcaaagtttgtggtatttcaagtcgatgtcacaatgtaagttttggtcaatttgcactaagacaggaccaaaaactaaaaccttagttgagaacgtcaacttgggcaccgagtggaaaccctagtgcccaagttggcttctgcgttgtaggttcgtgtaatttcagcctttcggccttgtattagattgctccacatcttcctggtatagaataaaaaaagacagtgagttggatccaagttattaaagtttgaacatccatcctggagttcccaaagataacctaggcgcagggctagggacccctcccaggttgacttgttatgactcgggactactccactttgagatgtcatatttcttgccacgtgtcaaatattgatgtctatgtcattagggctagtttccaagttaaccttttttttaagagaaatgattcttaagatcaaggtaaaccctaactcacattttctcttacattttgatgaggtttagttctaatgcttaattttgtgaatttggttgttttagagtttggggaagttagaaatggatttggaacttgatttatggttttttgtggctagttttaaagatttttagcagttgtagtttgaattgagtgagtttgagtttttaaactcaaagcttactcaacaatagttatttgtgattcttagtgtaatttttgtttttgagctacgacatatgtttagaactcattagtggactattttgaaaagtttcattgagtttgagcatgtttggaatggtttgagttagaaaaatttggagtttttgaactctctagcaaaacggtttaccgtttctagagaaacaggaaatcatttcatctagaaggatctaggtaaacgattaccattttaggatccagttgcccatctggggtatttttgggtaatccaattttgattttttcttgatatttaggctattatcacgctatttatcgatatggaaacttcgaattatgagtttaggtccccaaaagtgttttagtaagacacttaccagttttacgttaagacttagggcctccaagtgtcaagtagtttgtttacattcaggttgactagcacacctaattactgaatttaagtaagattagtataacagagacatatatacacatgtttagcatgcatgcttcagaaagccatcagattaacatatcaggatatggtgtacatagagttatactagaaataccaacaaatatatgttaggctttacagaaagtatgaactaatgctaccaaaactagtactcctaaaagcactgagtgcatgtgataataaggttagttgtacttacagtacgaactagtactaccaatactagtattgcaagagcactgagtgtatgcgttattatggtcaatcctactatagtcaagaatatttgagattcacttatacgcgttagatgcaagttatagactcatggtaattaggtctatgggcgcctaattacaagtcgtatatatgtttatgttttatgcttttcatactgagtctgttgactcactgatatgcttttatgtgtatgtaaaggcaagacaaaagctaaacattagtaagtttggagctaagtgaagattgtacatacctggatggttagacctatagtgttcaaatcttcggaacaacatgggcttagttttgttagttgctgagccacccttttgatatgttgtaatttgtatgtaattagaaaaataaacagatttaggatcccgagatttttaaactttatgtatatttagtaaagtttttttagatgacgacatgattattatgggaagagcaacatttattgacgaaaccatcagtttagcaaagtcttcagcatagtaatgtaacaagtaagaaaacacaataacataaataaactacaaatacaaatcatcttattagaatggtatcctaattaagctaacttgtcaattgcattgtagttaatgaagttagttcttagttatatgttgcatataactagcagtgtgagcaccataaaaaacggatatttatacttagtttttttgtattaaatcaaatatatggccttctcgttccaactcttgtcattcttagtgtgcatgtcgctaacaataaaaaacctaatatatatgagcaaacaacttattattttgcgcattatatatgagaatgaatggctaattggagaaagaagaaataaccaaattcttaatgcaaagtgcacattgtctatcaaaaattaagtaaaaaaattaagttaattagttgagtctattatagccaattcttgttgactgttttgtttcaagtagcagtaatagagttttcagtttctagttatgagttatatattgagcattatatagctcactttctttaattaacaaatcaatcaatacaatttaattcactttcattctatgttcgtattttctgttatggtatcatggccacgatcatagtgtgtcttttttcttccttttctattcttcttcttcctctccaactgttatacttcattactcatgatcatggcttgtactggaggtcaaactcaaaagaatagaaactagggagatggtttagataagagcatctccaatagagtgccgaaaaggtagtgtattgctatattttagtaca

SEQ ID NO: 218559 - DNA, 4071 bp, Cannabis indica
tttaaatttaacaatattaaaaatagaggtaaaacaaaattaactttgtcatataagaagcaaaataatactatgtcaaaaatgaagagacaaatctactaattgttcgaataaatattaaataggagtatgaaaattgatgaacaaaagaaattgtaataagactagcgagatgaatgagaagaaaagtgagttcattctgatttacttcttccctcaaaatacatcaaatctaattcattcattctccttttgttatgtagattcatcgactgttgacaatcttgtccatcatcggagatctccgtttcctgtcaagtgaaagaaagaactaactataaggtttttcagtgaataaaacattgtaagatcaaattgaaacccaactctttatttttatttttattttcttttaaggtaattgaaaccatccttattaccaccatatgttgcagtaatcttgatgcagaatttgtaagaatgtagacagcatggtaagaattaatacaaaaatcaaagatcatgattcatgactcattatgcaagtagaattattacatgttgaagcagggttttcaaattcaacaacgggctcttttttcatagtattattatcatcaacattcaatatagactacactgtgttagtagacagtttgccaaactaaataaccaaaaaagttgttaattaccaattttacttaagagagaaacatataaaaatgagatactgataaaccaatcaaatgagttatgcccttcgtcacaaagaaggccaatacaatatatgttctatcttgtaaaaatgttcctaatttacgattgaacacgtttgtgctgaaatggttccacattaaatgcaactattttcaatttaaaaaaacctacttatgttgggtgcagagaaatatagataactaccgaacatttgatacaaaaagagtgacagaaattatctaactgcatctgaaggtgatttcctaagaatttccaacttccaaacataaccaatgaaggaaaagggaataaaaagaaaagggaaagaatgaaatcaccacacaatttaccttctgaacttcactaagatgacagaattgctcctacataatctgacattcgcaattcatatttttccagagcaaatattcgaagacgaggctaggaatgcatataaattagttcatcaaccccacattgtcgaatgttaattatcattgaattgttgaaagcaggcaaaatgtcacagcactggcgacgtatagccttcatctggaaatgaccaagtagcatgtaagaatgtagtaactacaaaatgattgaacaaggaacaaaaaacatgcatgaaatttattcgtttcaaatttgtatttgtaattcgaaatttacctgttcaatgtcaagctctagcttctttgaatacactctaatattttgaagattttctattgcattagctttggggcaattccgttccttaaatctggcatagttgctttgaattccatcgtttacagacgtgacactttccataaaatagacaacaggtctcttacatgcatctctgggatagtctctcgttgtaaacatatattggcttgcctctacactaccactcctccgccatggggtaaaagttttctgaagagagaaaagatctgggaggagcttgttgccttcaattacctgaatagcatatccccatgccacagaaacagtcaatgaatttgaactatcataacagactgtttgctgcaaaatccgggtagggtcaacatttacagcttcaaacaaatgttcaaaagcttgagttctgttcattttggggaagattgaatccacagcatcaagatgatgcagtgacaacaaaggtgacagtggatgcgcagacaacattccaagcagattcccacggagatcaacctggtcagatgcagtaagaccataaaatatagggacactcaacccgacttacaaacaaggtttgagcataaatcaaggaaccaccaagctgggatcagataatatacacaacactcgagttcaattaaagaaaagaaactgcaaaatcgagccacactccaatcttgtcaaagtgaaattgggtaaatatcacaaagtcccaaaactgaccatctaatatgcccacgaacccctaaacgcctaaacagctttctatctttccagtgagacagaaaactaggtgctgcatagcaagcagcaaatgtaagaatatcagcttatactgtaattgtattattatcctttcccttgttgatggtttagtctgtaaatgtttgaaaaaactgttcttcccatattttctacatccaaaagattaaacccttttttcttaaatctttaaccttcatttccatttacacttcagaactccccaaaatcagtagataggactaccctttccttttaaatatgtaattacccaagttgtagaacctttctcatccaacaaaagaaatgcatcagcagtcaacaaacttaattgagctcattaaaataaataaatacaaagaagacagaaaatctaattttaaaaatcaaatatttgattttgtcaaaatactataataaaaatcaaatcttggataaagaataaaaccaaataaattcttatagtaacataaaaaaaacaaataattaatgcagagagaacacaagtacatttcacaaaataaatgtgtacctgatgaaacccaggttcatgggttatcccaacgccaagctctgccacgcacgagaaaatcctagcatcgcttccatacaagtgggcatacctcaccaagcaagaatcaaaaaccttagccagagccttagccagagagtggctaatggcgaagcctccaccgccaaacgccatgtcaaatgagtacttcacattctgctgatagctctccgaattgctcccgacgtaaaaccaccgatcatggtcgtatttcgacagagtcttgaccaaattatccacaaagaagaccgtgtcatcatccccaaacacaaaccacctaacatccggctcaccgcgatcgacgacctccttcaccacacgtgcgacccggatagcagaccggagtcctccccggaaactgtacggaaatcgggaagtatcctcggacacgattaccggcggcaaggaactgtcgagtccgtcaccgagatctgactcagcaagtttatctaggaagacaaaggcacgcgtcgatttaggggagtaccattggcggacgtagggtttacggagtggccaggagcgggaggaagaggcgacggctatgacgaggtgtcggcgctcggtggggccgagggagacgtcggaggaaggaagcgggagctgcggtgggatttggcggaagagaaggtagaggaggaagaggagagagaagatgaagagaaggtctttgaggcgagaaggagtgagggctttcgataatggattgggcattactttgcgtctgagtgtgatcgtaggattataatttctgtactgatttcgcatcacaacacatttattttattattttatttatttttcaaatatataaatatgaccgtttatcgaaaaaaacaaatatcaaaatcaatatgaccggagaagacggtggcgatggcgaggagtgccgaactctttgactcaagagatttaactgttgttgtcgttttcggaaggatttatttatttcacaaataacccttcaaatattttttactgtactactttgccactggatttttagtttacgcattagtgcccccaaattttcactttcttgcgaaaatagccaatttttttttttttttttagaaaacaatagcattagccaattcattctgcgttggggatttcttcataggaataaacgctattcgagtccacaaaaaaattacaaacccaactcaccacctttggccccactatactctaatatttctgacaaaaacttgggatcatgcagacttatcaggatgtagatgggagatttacctcctattatatctctttgtaatgtgcttcttaagctgggttctaaagtgttgttgataggatgaaggtcgtgtgta

SEQ ID NO: 218560 - DNA, 3903 bp, Cannabis indica
aactgagagttaaatttaaatataagagcagtaaataaatatgtggggtagaataaaaaatgtataaaattagaactaaagattataaaaataatggttgacttttgtcctcccaatcccgatataagaagtaatgaaatttttttcgatctcactgtcacaatgcttattattgtgttgaatggaacaaagtttaagatcgtattaatttgtcaagttttctttattttccttgtctgtccactcaatcaggttttgctaaatcaatgttaagaaatatataaatacactaatttctaaataatcacgtaaaaaacacagacaaataagacggaaaaagaaaacgacattattactacttattcaaaatgagttccaactattactgatcaatactgacctttagaagaggaaaaccatgtgaactgtaacatattattcatgcatgcatagtacatttttaactttggctctcttttcatcgaaatctcaattgaccatacttaccacgaatcaaattccattatttttattcatttttccctatatactatagttgtatttatatatatgtaggttgctatagggcataggcctaagctagtatgactttttcttattcttcttcttctttcccttttatatattctatctcacaatcattatagttttttttctttcactgtacataattattctcgaaccatgaagagatcaatcagcaattttttttttttttttaattcatttaatttttatattttattatttttaaaaatagcataccaaaacaaaaacaaagggacctgaccctactagtttggcattgttctaaacgaagtttcatgcaaaaattgattgaactcgcgtcaaagaaattagggttttaaatccgccagctgtggctatttgtacctgatatgatgtactcttatgagtataatatattcagttctaactaaaaattttgatacaaaagaaagagaaaaaaaatggcacctattattgaagagtctctgttttaacaacagaagtagaacactactagctatagtactattttggctacataactatgtctttatcccaagattattcaaactttgatttatattgtaacgaattagaagctagtgatgatgattatgatgatgtcgtttcatcacatcaggtttccagctttaatgaccatattctttcctcaaattcagattttctacacaatgaggcgacttctattgttaactcctttgattctgaagttgatcaacttcaagttttggattctgatatgatcctacggtttagaaacgattctgggtttgtctcagctcgagtagaggctgtcaattgggtattaaaggtggaaatatataaatctctctctcttttttatggtaaaatattcgtttgtattgttattagtgttatttactctcttactactctgttaggttcatgcttactaccagtttaggcctgaaacagcatatctttcagtcaattattacgaccgttttcttctctcaacgacattaccggtaattatatataaatatatattatatgtatgagtttgatagtatagcatagtatatatcaaagttttttgtatcaatgcagaaaggtaaaggttggccttcacagttgttatcagtgacttgtctttctctagctgctaaaatggaagaaataagtgttccacttctactagatttacaaacaaaagagcccaaattcatgtttgagcccaaaacaattcagagaatggagctcattgtaatggctaatctcaaatggagattacacttagtaacaccttttgattttgtccattacttcatatggaaactttcaagtattgggtttcaatcagaatatcaaaatcatcatcacattctaatctctcatacctcaaatatcattgtactaacatgccaaggtaaattaatattctaaaaccaatactctgatttgaataaatttcatcactattatgactatatgtcgtatcattttgtaactcaaaacattgaaaaatttcttcaccagtgatagaattcctcgagttttcgccgtcgacgataggtgcagccgccgtgatctgtgcagctgagcagtacattgatgagtatgatcagatatggggatgcttccaccacagagtgagcagagtaagttctgtttgttgctcctaataaatgatagtctaactctgctgcctcacatggttcacattagcttagtctaattacaaaacaaaaattggattcttgtgagttattgactaaaatcaaaataaaatattgcaaaaaaaaaaaaaatgatgttctcatgttcatgatcaccctaaactgacaagtatcaagaaaaatgtaaggtaccacacattacaaatatgtgaaaaagaccttattgcatggttttggattttaccttcacattcacatatttaccatatatagcatagtatgttttggtaaaagtacacatacatgtagaaaaatcaaactttttaacttagtgttttttttttaagaaacttattagatattggataagttttgttctgagtttagttctgaattggtgcaggaaagagttagaaaatgttacaaccttatgaagcatagtatctgcccattgccacagatgaagaggccgaaattgaaaccagagcctacttgtgttagcttgcttgaggttgaaccttccaagattggggtgacaggaacttgatttaagaaaaaaaaacatttgcctttttacaattcttgaagttaatttcatttttttgtgtgtttaattttttttgctaaaaattgagtgtgacccctgaaaaaaaaagtgtgacttttgtaaggtgattttgtgaggattattcaggttaatacatcccactttaactagcaaaaagaaaagggaaaaaaagaggattttaatgtttttgttggtttcaaataattgattggtgtaagaatgcatatgttgacattgttctcactctgtaaatcaatgttgcaatgatgcctacattgttctcattccttcagttaaaagtaatgtatagtgaagagtttcacacttatattaatataaataccgcatctcatatattttaatttaataatttttttaaaattatcaatcagtgaacctttcggataccactattacctaacaacaatactatacttatattaaatgtgttttctgaaactctcaattgtatttctaaaaaaaaacgtttacaacaccgcagtgccttgccccatccgattaaattgcatccttagagttaggggcagataaatgcctttgatttcactctgtttatgtgaaaatacactactaatttaattcatcatttatttctccaaatatttaatgataagttaagctagtttacaaataataaaaccttcatttatcattaatagtttttaaaagctttaaaagaaatatagaaccgcgaaatatcatttatgatcatcaagcttaaaacaagaataatatgcaaataaaataaaaaggacaaaaaatcctacaagattaaggaacaaaattagaaattatatcaagtgagtgagtccaagaaaagagtttcatgtgacatattctttgcatcaaattaaaagcatttaatgccttcatcaaaagagtgacataaatataattaactttaaaataacttaaatgattttgaaattgaaaaggttcaaagagaaacaaatatatatgtttgaaaaacacaaattgatataagattaaaaaaccattttaagaatatgtaggtagttgggaaagtgcaaggatataaaattatttccacgaaggccctaaaattggttgtcttttatcaaaacccttttcttatggtgaaagggagatgcaacaccactt

SEQ ID NO: 218561 - DNA, 4052 bp, Cannabis indica
ttttttttgaagttattattataaataataattgaaaaaggaattgggtaggaaatagcgttcatccatcatctttaaaagaaagaaaacaaccaaaagtgggacccatataatcttatgatctaattccaaataaatgctccacctcagctcgtgataacccgacacgtcaggaataacaaccactttccgaaaatacccacaatcaacaaacaattaatacctgacaatatccagggtaatttagtcaattcaaatgaaccgaacgactagtatatttgtttttttcacgttttcgtctcactttctctaatctatatcttctaagcccatccatacttatttgaagcttttccttctttcgtcttcttcttatttttcatttatttattcattttttttttcaaacgattcttcataatcgactcaccgagctcaggaatcggaccctaaaccctatcaaaacgaggtagtacagggaagaattcgaagaagctctggagtcatcgcgcaatttgggtcatcttggtacagttatattacatttattgctaattcagccctattttcatcaattaggtttctctttgactgaatttttgtttttgttggtggagcagagtatggaaagaagtagatggcttatattggtgatatttacatgtttatttgttttttcagaaggaagaggtaatttttgggtagaatttcattactgtttatttttttcttttaacgatgtaaaaagctttataagaagtgcttatatctactgtatatgtataaatttaatatagtttttagtttggtgaacaatgtttcctgacttctatcctggattactcgaatgggttgtgattgttttctctattctgcatttatttgtggaatttcatttttttagttgaacttatatattagggatttttaaaaagttgggtttagattattggtatttccagtattattggaggaacttatattcgatcattttgatattgttgggtaggtgaagaaaatgttgaggttttgctttatctgattgcttttcttacttttgtactgtatttttacagaacatttacacccactatgggtatctttgagttcgagtaatctatatattactggtttagcttagtctttttagtttgttgtgattcgttttataacaaagattttatgtttgaattgcagaattcaaggtcaagcatacgcatcatactccagtctataatcatacccttactactatattagtgcattatgcttctgcggtaactttttgttcttctttctttaagttaattgttttccaatgcatctggggggtttagtttccaaattgagtgtccttaaatacctactccctatcattcaccttttaaattgccatacttgacgtggatagaagcagcgccatggagttttttttaatgttgtttcaactttcaagtaacatagaaagtaggtttctgacgtagtcggttcctttatgctgctttagaattatcatgtcatttatcatgggtaggacaactccattgatggtctgcttgtatttttgtaagcttacaagacaagagtcaaaatgcaaaatgtgataaatcattctggtttagttgctgggttcatttgaaactaggcgtgcttgatatttggtttgaagaattttagtttgatttagcaggtcatcaattccatcagattttaatgactaagaacatgctttgttcttacaggtgtatgtttccgatctgacagaacttttttcttggacttgcgaaagatgtgacggggtaactgaggtacttggatttatactgtaactttttgtttgcttatatgtaaggtagtgaaatctaaggttaatacttctctcatccttagcttgaagagggtgccaaaacatgtcttattccaaatttgtttgtctaattgtcattccactgaaaacagggatttcaaatgattgaactggttgttgacatccagaactgcttacaggtgtgttatcgctgacttaaccttttttgtttcttttgattagaaggcttacctggtttaatgctgtactgtacttagagttcttttatctgttaaaaaacactctcacacttcatgctctgatatttgttctgagtatcttctacaggcgttcgttggagtggcagaagatcttaactctatcgtaattgcattcagaggaacgcaggagaacaggtagaattttatatgctgcaaatacaaattccattccttctgagctacgcctttgaaggacagtgggagacatactgatatctgttacaattttggttcttttgtctcttgttcaatgaatgcatagagagcttgatttctcattgagattaatagaaatttgatatgtatgaaaattagtaaatatttttaataagtttggttttgaatctcatcttagcttgtgttcggtttattggttgactgtgtattacagcatacagaattggattgaagacttattttggaaacagcttgatattgattaccccggcatgcctgatgcaatggtgtggtttacatgaaatttctcatgttttgaagtttttcctggacttaatggtgcattaattcagtctcatttttttaggtgcaccatggattttatcatgcttaccacaatacaagcatacggcctgcaatcctaaatgccgttaaaagagcacaggattattatggagatattaacatttatgtaactgggcattcaatgggaggagccatggctgccttttgtggacttgatcttatagtatgatgacttatctatgtctacaatcattagagctatgttccagcatttttgttcatctggaactttttggtttatgctaattttctgatgagtgaattcctttattatcaggtcaattgtaaagctcagaaggtccaggttaccacatttggacaacctcgcattgggaatgcagtttttgctacatactacagtaaatttttaccaaacacaatacgagtgacaaatggacatgatattgtgcctcatttacctccttactattattatttcccccagaaaacctaccatcactatccaacagaggtaatggtttgtcttgagaagtaaagtttgtctatgcagtgcagttgcagcatggtggttagttggtgaattaggtcttggtagcgtagttttaaattctctaatgtgtttattaacatgcagaacaaatacttctacaacatcattatagaaaatatgtctagtatttatgcatcacactagtgctcatcaataacagcctttttatcattatgatgagaaagctcttttcttctaggccagaaatagtatacttttatttaatgacgtatttaattgtgtttattattaggtgtggcttcataacgttggactggaaagtcttatttatccagttgagaaagtctgtgatagttctggagaagacccaacctgtagcaggtaaatttctctacttctttatatatttttctttttttctttctattaatattagttggtagactccacaaattttatgcaatggtttctaattcagatctgaatacccaacatctttacatctttcaatattgggatttgctagagaaaaaaaccaaacttgaatataagttcacataacaattttatctgaaaacatgcttcaattttatgggaacctgtacaggtcagttagcgggaacagtgtcatagaccatgtgaattattttggtgtggatttaaagggctcggcatggcgatcctgtagaattgtgatggatcatggtttggtagactatggcagaacagatgctgaaggaaattttgttgtgtccagagaacctgcaactcctctgatcaaactgaatacactgtcggctgctggagacaaccatgtttaaagtcaatgatctggttggtgattgatttctctcttctgatgccgaagactcatgagaggttggttatgggtttatccttgttaagttttctaacgtgtgggggcagaagggaatttgtatatataatc

SEQ ID NO: 218562 - DNA, 4326 bp, Cannabis indica
accgaaagataaaaccaatccaagaagttgagatgatgatcttggttgcatttgtgtaattagctaatatagttagcaaagaatgtaggcagaaagactcaataggttttcagagccttagcttatatggaggagagaaaaaaactaagagaaatatatagagatttttgttttttttttttttaattaaaaaaaagtaagaaaagaaagaaaccctttggtaaaaaaaaaaaaacaacaggagatttaaactcttctagttgaagcaagtgcagcaaaattggctgactcttctatggcttatatataccttaccagcttgcaggaagattttacttttcttttataattattggttctaaaagaaagggaaaaaaaatgttcttaggagaagcaagacgaggggttctatgagggtctacttctatgattttattttataacattttttttttgtgaacataattatatatttttttattttattaatgatttccaaatgaggatagaaaaatgattaattaaaccttatctaatatattttttagacatctttcatgctatctttcatgctacgatatataataatttttttttttttatgaaatttgaaattgaaaagttttatcccaagggacatacacatgtaatgtgccactgctaaatttgatgtaacagtgatgtcatgtctagcttcttttgttaaaggtaactaacattaattagattagaaatataatttattttaatgtatattaagggagaggagagatgaaccatgagatatgaaattaaatgagtgtatatattagtatcgtttagattatcatgaaatcaatataatatgtgtacaatcatttacagtgaacaaaggtgcttttcactcttaaaaagacaaagtaagaagtgtttttcttattatagagacagttgtatttttttcttcttttttttttttcaagagcctttgatatttatttcaggggtagaagcaaacacttttcaggtagttacctttgattccttagttaaaggagaaaaaaatggaagtgattatttcatattttatttatttaaatttgaaaagcaagtggtttttttaaataaatgaattatatataatgttaaaattataattgattcaaaaattagaaagttgaagcaaaaagctaaaatgagctgaaatatatgttgggaattgggtatatatataactaaacgaaacaaagcaatataggtaggttttggtaaaggactactagccagagatgagatgactagatgagtagtaccatcatatatggacatgcttgtcttagcttaggattacttatgaatagaagagaaatgagttggctgtctacttggtttttagtgtaaagggcgggccaaacaaattgtccatctaatcagagggagagagagagtagtcttgaaattaagaaaggggggattgtatttggaagaagaagaagaagaagaaagaaagaaagaaagaagttaataaagagagaagcaggaatctagggtgatgggtccaacttgggctgagggggcagggtttgctacctaacccaccaacagctatcgtgcatttggacgaagccctttcccatcacaatttcacccatttatccctttccatcaatttcagtttcaaaatcccaaaccccaacctcagtcccaatctcaattatctcaatcttgaattcatatattgtattgtatatcaagttttacgtgtagcaaaagagaaagagagagagaaagagaaaggattttaaaagggccaagctagcgaaaagcaaagttttttctacaaccctactagagctggtcttttgtcttggtgcctcgatttatatttccaaaaaccaaaacactctcactctcccactctgtaatttctcaaactgccaaatcctctttccaaattaaaaatggccatatttaatttgcaaaatgtatatatattacatacataaatgtatatatatttattcatttagtatacgtcatgatatacctattaataatttattataccacctctcgatatctcacaccactgtacttctgcactagctagcatacacgacgacatattcaattaataataacagcaacagtgttcaatgccaataatttattgttcgacaaatctatgcgaaagctacagtacatattaaatgtatacaaatgaccaggcgaccatgtaatactaatatcgatcgaactgtagctcaaaagatttcaccttttctttcgtacgtgtctctgtttttttatctttctcaactccatctattgtttattacttaacatgtaaccaaacatctgattatgtatacaattactttctagctagcaatagcatatataatattcatataaatatatactgtttaccattttgtatattattaattttgtaaaatacggtttcactttaaacaacaaggtcaatggtaaacaataataatgtataggtctttctagactgagatttccccttgtgctgtaaaaacagacagacaagacccatgaaaagaaacttatagtgttcaaacatataatggtcccaaacttgctaaactcagtcttagtttaccatttagtgccatggcaattgtctctcactcttttatcaattcaatgattatttaaaagaagaaactaaaagaaaataaatgtgaattaggctttggaggatgttccgggtgaaggatgacagcattaacaaggattaacatgactagttagttggtttaattaagctaatttcacacaaaaaaacaagaagaaatacgtaatgaaaaaataatattaagtaattaacattagaaacagtactacttcaattattatttaataggggagtcaaatatttaactagaagattatgaaatgaaacgggaacatttactgacactacggagaattttgtagtttcaagtacgcgcaacatttagcttacttataattcttttgccattggaaattttccaaccattaagccattgaggaatacaaagggcctttaaagctgccaacaccctataagaggggctatattaattattattatttagaaatatttacatgaggagacacaaatcacattttatttgttataaatgcgggttaaatttttcaacaatgagcatagcctgacacgagaaaatataggcttaggcaggacacgatacgatactgcagattgacacaacactgcaaaaaaaatgagtttaagcacgacacagcacaacaagcccaaaaacatggcacataagcaccaatagaatagtctaaaactacgacacattaaaaattcctataataataataataataattgacctcataaagtgatccaccgatagcgaggttgtatagatctgatgcttgccacgtgttacacaaacaaaatgaaaaattgtaaaacacacagatttgttatagatgttcggtccccttgtgatagtaggtaagacctacttcacttttggttgtattcatacatagggttaatactaatcggatcactataggtgggaactaatatagcacccttaaagatacaaagtatgtatcaagtaggcatatccctaatgagaaacaagaatagcttagaggcgtgcgagagaagaagagagagagagcccttcgggcgtgtagcagagagagaaaaagagagactagagtttttgacttagagtaatttggaggctaaagattaggcttagtggcatatgttttctaggttagaggtaagacctttatataggaagcctaaaaatctaacttacaatcaaacccttagatatttacctattgaattgattaaataaaaaagactaaattgcccctcaaaagtacatatcttccatcagtttgttgggcatttaaagggcctaatttgtaggtagcttgttgtccacattttaagctgtacatagagtcctgccacgttaatcctgacgcccgtagacctacaggggaggtctggccagccatggtcttgtcaggtcaatcatggtcgggcatggtcctactatgtcaatcctggccggccatggtcctactaggacctggctggtcatgtgcctgtcaggatcctactggcactatcgctttaccaagaggagaccaacctttggatgtagaggccagccttttgcaagttgaggaaaactttgtgcactatttccttgtagtgggttcccttggtcgaacaaaagctccctttatccggaagtcactttttggtcggctagcttatgccaagatcctagcctgcctctatgctctgttgggttttatgcc

SEQ ID NO: 218563 - DNA, 1111 bp, Cannabis indica
aattcagcaacaaaattactacttattcttaactaaatatatcattaaatgaaagatatatatctcttcacatcttaactccattgaattctatggtattttttaaactaaatcaacacatttttttaaaaaaataaattaaaatcaatgatcacattaaatgtgagtaagaaatagaataaattggtgtggatgaacaattgacataaacaacatcagtaggtgacgtgttaataatagctgtattaatttttattttaagaaatattaaatccactaagatttgacgaaaaggtagatgagaaagaaatataataagataaatattttggtataagcaacgtgtcagacgctggcacaatctaaaatctgcctcaaaataagggaaaaactgagccactagtccatgttcacacgtgtgatgatatggacacgcgtggaaaattgtaaggggaagtgaatcataatcaattggaaaagaaaaagggaaaaaatcgttggattgatgtaaggtgactttttcactttaatttctggtgggtgggacccacttaagaatatgatgctgacatggcacacatctgaaccgctactaattttcatggcctgggtgggacccaacccacgtggtttcttttacggatgttgtaaagttgattatattacctattatacccttcaccacaaattactcggccaaaaatcggcgaccgctttcccaatcctaattccacccaaacatacgggtctttatgtttccactttccaaagtttccatctagttttatagtgtggttcaaaatttaatcaaataataataataataaaaaagtgctaaaagataaggcaaactcgagttaataatagttataaaaaaatagattttttgtttctaaattcataattttaaaacttgttttttttttctactataatttgatttttattaatacaattagtcttgttattgttatataattttaagtgttttaattttgtctttgtgatataattttgaatgttttagtattattgtatgacatgattttattttgttttgttgttagttcttctttgttattcatgtacttacaccaagtctttgtctttg

SEQ ID NO: 218564 - DNA, 2759 bp, Cannabis indica
tttttttttttgaaaaagaaatagaaaccaagatcagtatcataaaacaacgccattgtttgaccatgttgtatgttgggcgaagtttgctagttatcgttgagaaatgccaaaaggcaacaaagctacccagcacattttgtggtattatagcattgatccaattaagtataagatgttatataatttattattttattatataaacttttatagaatcttttcacaatattggaaattgatatgagattttaaaagctttttactttaatatggcagatttaattttgtctatttttcgagctttttatgggtttaagttttccataatattgtaaatatttttccaaatcctatatttaatgttttcattttaaagtttctttctttgtttgaaacacaaactagatcatatgtattctattatgaaaactagaatcttcatcaaatcattttttcttccaccttttcgatatttttatttattaaccttgggcccttctttctctaattctttctattctgctaacaaataatcgataataattcccaaatcctgatcaactagttgttctctgatagcacctgctctagtagaaatttctcaatttcgaaacgcatcaaagctatgagtagtaaaaaaaaggaatgctatatttccagaattggtaatcatactcgaaggaacttcgtaatcgtaaaaaaatagattttttagctatgggctcagcaaaagaaaaattcggataggatactataggatctccccctttcaaaatcgaacgtgaaagtttcctttcatccgcctcaagtagttacactcgaattaaaaagccacgtacagacgctttacgcccaatcaattcggataacgcttgcatcctctgtattatcgcagctgttggcacagagttagtcgatgcttattccccagataccgtcattgcttcttctacgggaaaagaatttcatgagctgtaggccttctacctccacgcagcattgctctgtcaggcttttgcccattgcggaatattccccactacagcctcccgtaggagtttaggccgtgtctcagtcccagtgtggctgatcatcgtctcggaccaactactgatcatcgtctggaccaactactgatcatcgtcttgataagctattgtctcaccctagagaggtggtaaaaactaccaagctggagtacggtaggggcagtgggaatttctggtggagcggtaaaatgcgtagagatcggaaagaacaccaatggcgaaaacactctgctgggtcaacactgacattgagagacgaaagttagggagcgaatgggatataagttcatgacctgtaggccttctacctccacgcggcattgctccactaggctttcgcccattgcaaaaaattcccctctaatgcctcccgtaagagtttgggtcgtgtcttagtcctagtgtggttatataatacttcactttatttatattattattcttttccttttaaaatagatatgaatttgagaattattattgattattcgttagcagaatgaaaataattaggggaagaagggcccgtgggtaatgaatgggaagataagaagggcgcacgggtaatgaatgggaagatcgaaaagttagaaggaaagaattttttggttagacgcatagagttagctaagcattccagtagtcctagccgtaaacgatggatactaggcaatgtgcgtatcgacccgtgcaatgttgtagctaacgcgttaagtatcccgcctgaggaatacgttcgcaagaatgaaactcaaaggaattgacgggggtctacacaagcagtggagcatgtggtttaatttgatgcaaagcgaagaaccttaccagagcttgacatgccacgaatcctcttgaaagagaagggtgcattcgggaatgcagttttgaattgatgtcgatttcttttttggtaacctagtgtattcaaatcttaattcaaaattcctacaagtaactaatttatgttttactaagagacatcccagtgttgattgttatttagtcattcaaaggtcttttttattttttattactttaaaattttaataggagaaaaaaatatattctttattttatctgtattttgtttattcctacgaaataccaaatgaagtagaatgattttagaaaggatataatgaaattttgtaattggttctttccatataaacaattcttttatttgattgataaaaacaacaatcaattaattataacaaatagaaaaaaattgaaaactaaataacattctatttagttataataataataaaaaataaaaaaagtaattcttattcaaaacgcccgtaatctttataataataaaaaaataaaaaaaatattactcattcaaaacgcccatctttaaccgattttgcgcttcaatatgattaccaagaataaacactcttgattaaatataagtaaaatttatatatagtgctcttaattttttttagtattccttcttatctaataaactaatttctttatcaaaaaatagatttttttatcaaaaaactaataatgaaaactgattttgatcataaaaaaataaaatctatatataagttttaggtttttttatggtattctttcttgtctatgtcttattgcatgacatatatatactaaactttttttccattatttttgtaaatatatatatgggtatgcttttaatgggtattacccatgtatgagtat

SEQ ID NO: 218565 - DNA, 7500 bp, Cannabis indica
gtattgttattttgaaaacttctgggataaccaaaaaattgtgactctgctttgtggaaagggattttgggtgttcaagatattgtattttgtgtaatggtgagatggagactcccctgcatattttcaaagattgccaacttactaaggcagtgtggtttggaagccccttccctgtttgggttgatttgattcctggggatacgataactttttttgaaagtatggtggtgagtttccctggttctaatcgggaagacttcatgaccttcataggatgtgtcttcaataagatctggtatatgagaaacagagtaagttgcaacatgattttagccaaggtggaccaacttattcttaggatacacgactctttgagttgtcgaggtacaattataaccgtgagttaactccttctgcggggctggggagagatagtggcataaggtgttccgttccaagtgatacgacaaattatgttatctttacggatgcttcctagaaaactggtgttgatggtatcgctgtgataactatcaattgctccaactcaacactttacagatagagtggaagctcagtcggctattgaagcagaacttttggccctttccctgaatcgagcgtttgctaacaggtggagcaacattcatattctttctgattgccagttggcggtcaatgctttttcttctaaggttgctccccctgtttggagttgcttaagtttatggctgtctatgttaaatgtagtggatcgtattcctaattgtagtttctttttcattaaacactgttttaattttgttgcgaatggactagctaagagtgctagagtttctagccaattgactggtttgtgttaagggaagagaaattaccctatgattcccatctatcattctattaatctatgaacttattgttccttcaaaaaaaaataaaaaaataagctctcacatagtataatttccgatttataaattctaaaacaaacacaaagtacccttggaagaaaatcgtggttttgctttttattatgttcgaaatattgctcattgtttctctggacaattgaaatgatgaacttaaacaataataataataataattaaaaaaaattccaagcatgtaatggttatatataaggacagtaaatagcgtgttaataaaactaaacgagattttatgcaattacaggctctgcattttacaataattattggtcgaactatggttgatatagtcgagaaactaatttaagattattatattaatgtgagtaagaagaaaaaagaatagatatttctaataatctcttgtcactgcatctggtcatgaaagaaatacattcatggatcacaacataaacgcagtaacataggctctgcattttacaataattcgtgctccaactatggttgacagttgagaaactaatttagggattatattaatggagtatgaagaaaaaagaatagatatttctaataatggggatcaataatctcttgccactgactgcatctggtcatgaaagaaaagcattcataaattcacaacataaatgcagcaacatacctagggccaaatcttctgctctaaacttttttacatctctttctcaattttcgggtttgctatccccccgttttctggaaattgtggaatcttaggaagttcattactaacagctgcaactgccgttgaaatcgtttgtgttgttttggtagtaggtggaacaatggttttcaaaacaccatttttagcaggtcccgagtggtagcttatttctgttttgtgatttgtaatgccaatattggttaaagtgtctttatgagactctggttcactctgggccagtgatgaatactttgtctctgcaatgtgaaacaaaaatgttattgactccatgcattagtacttactaaagaactagcaggacaagcaattttcagattgctgatccaagtaatggaaacgcggggtcaaaaaaccaagaaacaaatgtgtcaaaaaaacgaaaattgatgacatgccagagtatagaaccagaatagtatcaccagagtatattagggataaagaaagcaccaacagaatgattcctaaaattttgaaagtacttgccttttatttctcctaaagcaattaccattttaaggcaatcacgaaacctcgacaaaacaagtctttcttgctctgcataaagctcgggcatgccttgttcatagggcaactgagaagaaatgttgcatccatgacctgtcccactgggggaagctggtgccataaacattgtatcttgttcatcacacatcagtgccaaagtgtccggagacattggcctcccttttggcaaatcagcaccatctgaactagagtcgtcagctccagttttatcagcctgatttgcactagagcaatcatcaacagatttctcaagatcagattccttctgattctgcaacctgtcttgagtcgttgaagcaagggaagtttctgactgatcttcggtacgcttctctgttgcacttctttgttctggaaaaattaacacaaacaattaacataaaattgttatctcctttaatggacaacaggaaagagataatactaaacattgttgattaggctttttatttgaaattttatactatattatgggtatatatctcatctgaggcgacaatcataaaacatgtcaccgcaaaatggttgaacaaagatgatagccaatgcccaataccatacatacggaaagaagtaaatccattgcaagggatattcaaagaaaattaagtatatgaagcaattcagattacagcatagacaatggataatcacattaaaagagccactgatattttacactgatttacttattgtatacacaaacccattcgcacctgcaagtgttttggcagcttctccagatacgacaaccaagactgagcaaagctcttttaagtcctggggttggatgatgtctgctaatagagaccttcaacaaagtgcacacaaattagtcctgatcaaagaaagcatattagcaacatgttcattaaacaagaatttcaacctgtatgtaaatttggaagggcccacccctgtggcactaccaagtcgagcagcaggaactgaaggcaaggaagggggtacaggtgctctatgatgatttacctgaatatcattaaaatatgctattaatgcctgtcctggatttaagcttaaattggattgagggtgtccatatattaatatataaagccactactacaaagcaagacaaagacaaaatgggatttcttaacctgtaatctgaaaagctgtagccacccacaaggcacaattacatagattatagtagaaaaaccattcagttattctcttccctaactacaaatgaggcctttttcctccatccatatacaaaaagaagtaaccagtgattgcaacaacaaaacaaacaaaaattgcttcattgaataacaaccacgcagctcattgtataatcatgaaagtaccagtttaagtttacctgttgaaattgcccaatcctgttaacagatgtatccttcggtgtgactgttgggccaaagaaaagttcttgaccttttctttttttggatactggaggggatgtatagccagaggatccaatggctccggttatggcagcattagctgcctgttgaatataagccatgttgctgccatggtctccgtgaaatagtgcttgtctctcttcacttccttcaaaatttttacagtccatacatttacaattttcagagcagagaatgtttgcttggaaacattcacagtatttcttgaggcatcctgatttcttacaatgacatcctttattgtgctttcccagaatcataatctccccagcatcctcctacattataaaacacccatatcattttcaacaacatccaatgcaaaaatattggcagaactgcaagaagaattagtagtacagaagaaacaagagaatctgcttcattaaggtactgtttcatttgatataacaaaattaattaagttaatgaatcaaggaaaggggactttaaaaagggccaaagaaaaatctctagcaagttggaaataaactcgtgtgttaaaaaattcctgaaacttccgttgtgacagaacacaaaacccttctgttgctatcctttacgaacagtaacagattttaccttgaccttgaatccctcaaaaaagataagaaagatgctataagaaacagaggataagaaacaatttgagcagagctcgttcttcatgctagtaatacaacgaattgtaaaggaaaaattatttttatttttgttgtcgtagttgaatcctaattatgtacatttaacacaaggcattggcaaaaccatacctagtaaagaattaaagatgcaaattacacagaagctgttcaagtagccaagaactacataccctattgtccctcacaccatgtgggctgctggcaatttttggccggaatgcattcgggttacgctctaaagtagcttccactgcttctcgtcttgcagcttcattttcaacattattatagcaatttacacaattgcaaccatcacagtatattccagatgcaaaacactcgcaatacctgattgtttaattgccaagtggagctcaatattaaagatcttatatagcaattatggccttccatataagagtaactcataattttactttattttatttgtgcaagtgttaaagatcttaattgccaagtggatctcaatattaaagattttatatagcaattatggccttccatataagagtaactcataattttactttattttatttgtgcaagtgttaagaggtactcaataaattgcagatgagtcagcctcatgtatttaaaatgcattaccaactttcttatcaaaattatattcatgaatcatgattaatgttgagacttttgcacttacaacttcaagcaccgtgagtgtctacaattgcactgtttttgcttcttaggtgtaccgtctttcacttcattgggtcttgatctcgatttcggggaatctggctttctgaagaaagaaattaacattcataagaaatttgattcatataatgtaacaaagcttttatattaagactttcacatagttccatatctttatctggacatctgccagttcacaagccaaaagttttcagcttttacaaacatttatttagtaaatgcatcgaagacacaagacagagatccacacaaataactgcagtggaactgacaccaaaacaaggtagaaggaatagcaaggaccccggcatatgctgtatgcttcggttttagttatgattcttctctgaactatgagccctaagggaaactattttgtttagtaaattagtatgagctcacattcactagccactaatgtaaaaatatgaatggaaatagaatacagttaatagcttcctcaaacatccttgacaagccaaaaactttggaaagcacatacatgtttacgctgtccttggcttggaacacttgttcacgaattgttaaaacagatatcaactacttcaatataccaacaaaaattccttttttaaaaaaaataacaaaaaagacatgaagacagaagattttcaaatcttccataccaccacagtatagaaataaaataacggccattgatgtactagagcctaaagcacaaaataaccaaattttaacttctggaatagatggacaaaacccagcatgaaattccacggatataataccttcactatttaagatcaaaacttcaatgttagaactttttcaagaaaaccctcccataatacaagcacatacatttgaaagtccataaacaaatactgtcaactcgaccacaaatttaggccgaaaaaaaaaatcaatttaaatttgaagttttcaacttttatagtctttcctcgaagaaatcacgtcaccagaaaccacacttgagctaattaagagtataattagcttaaacaagaatacttacactatcctcgctgaaggaaccgatggttgaggcatcactggcccagtcactaccggcggctgcggctgactctgcaccactggctgcggcagtggctgcgtcaccgtcactggctgcggtggcaataccagttgcgactgatgatgctccggtaaaaccacactacccggggccccaccataacccgtgaaatcgagttgcctcgccagtttcttcgtcggagcatcagataacgctatactgctccctcccgcaccatccgattgtattttctttggtggcaaatcgccttcctcaccttcccccataaaattcaaattcgaattttaaaaaataaaatctccaaattcgaattttatttcaaaatattaaatactaagaaatattcaatccactgattgctcccaaaataatcactgaaattccagaaatcagcttaaatagatatggtttcagatccaaatgcccaaatatgattcaaatttgccgaaaccacgcgatttcacagttgaaggctcgtcaaagaatggccgaaatccaagaagtaagtttcttaatacagaacaaaaaacagagtaaaacctagagagagaaacactcacagggatagtgtgtgagtgaagctgagattgtagagagagagaaagtttcgaacgatagaggaatggaggagaaagagaagaagaaagggaagagatgaccaaaggcccttttgtttgttcttcgtctctcctccctctctctcccgagcttttgaaattcaattttgtaaataatggacggtcagatccgcatgctgggcccaatccaacggcgaatattgattaaagtcatctcacggtccaaattcatagaagtgaggttagtgagtgattgaccgtcgattaggaacgataaacaatgaattttccactagagtggcgtgaatgggaaatctcgaatagaggggttatcaagtagtctcgtccccatgggagaggctgttcctccatatatgttttgccacgtaagagatagctcgtctcgagctgatcgcttgccacgtagatatattttattggtggaatatgtactggatcgcgagtacatgaaaaacgagggaaaatttaataagattccgctccgttaaaaggtaaaaaaataataataaataaagaaaataatttggcgctaaaaagtcacgtcacaccatcatttgttgaaattggattggtgtttggttacagggctaaatgaaatataaaatacaattatagtttctacaatgcatcaactagaaatttagaaaaaaaattagtttatttttttatattttttacgttatagttttttttttttgagatatgtttatacgttatagttatttttataaaatttggaataatttataatataaaacagtcttcaaacaatctatttcacacgtgtataaaataaaataatcacgcatactacatac

SEQ ID NO: 218566 - DNA, 3535 bp, Cannabis indica
atttcttgacctagcttagattttgacatagaaccattcttgaggatactacagtgggttacttagtttgtagagtatgtttatgtgtaccttctaaagataacctggttataagtatgatattctcgaaaagaaaaacatgttgctccagacctgttggcaattgacatcttactttctagctatgataattagacattcagtcgctatatttatgtcatgctttcttcatcatcatttttcatatatgtgttcaagttatggtaagctatttaaatattgttattttatttgaccatgttttatttccaacgcaaactgcttggtataatattacataaatgttagccagaagctttgatttagtttacatcctaaaagtcaaaactagaattttattggttccctcaataaactaacaattattcaatgtattctcatattggcagttacagctgtagaaaatggcagacaagcttggaaagtcttagaagatcttgtgacagatgttgatctcgttttgactgaggtagtcatgccctgtttatctggtattggtcttctaggcaagatcatgagcaaaaaaacatgcaaggacatccctgtaattagtgagtatatttcctttattttggatttaaaataatacttttttctctagtatctttttgtaatttatacttttaactaatacatttattgtgtgtgtttgtgtttgtgttttcacagtgatgtcttctcatgattctaggagtatggtctttaagtgtttatcgaaaggtgccgttgactttttagtgaaacctattcgaaagaatgagctgaaaaacctttggcaacatgtttggagaaaatgccacattgtgagttgcaatctatttgatttattatatcatggaccaattcaccttgaggttcaggtttcttctcatttatgcatttttgtttttcattaagcaccaattgtcgaactataccaaagaaaacaaacaaaaaaatggcttcaatctttgcttgataaaaaatatgttttatgtaatgcaaacatcacttaattgacataataccattaaacacagaaatttgctcgagttgtgcattaatttttcatattttcatcagtctagtaatagtggaagtgaaagtggtatatggattgaaaagcctttaaagtcaagaactgtggaacattcagacaacaacagtggcagcaatgatgaggatgatactgacagcattggtctaaatttcaggaatgaaagtgacagtggaacacaggtatttcactaaatttcatgaaagagttttgtttttttttttttggtgggaatgaagttttatgtctttgtatttacagaaatattagcgaaatgttagtttccacatgaagttttatgttttatgtatcaagaaactactataattatgttagtttccacacacctagtttggaatttgtctatcacagcacccatatatctatttaccatgtttgcatattactcatttgatcttggtggaggaatattcatgtaagagtttttaatacttttatgtatatgtaagtggagaaggaatgataattagcaagataagaaaacaagaaaaagaatgaaaacttactactgagcttttacagagctcttggacaaagagagcagaagttgacagccctcaggcagtgtcgtgggagcagtttgctgatcttcctgatagcactaatcatcaggtcaatcatccaaggcaagaagcctttggaaacaactgggtacctgaaaatgcaacagtaacaccacgcccacataatgatgagcttggtaggcaaattttcctaacatctttttttttttaactttcttccattctcgatcattctctaagttatgatttatttaaattgtttagacaaaaaagtcatgggaaaagacttgaaaataggattacctagccttcttgaagacacaagtgaaaaagggctgaccaacatggaaggtactaataaagataaatgttctgaactgaactcaaagaaagatgatcaggagcaggagaaaagggaattagacctcaacaatgaagaaccgagtgcagaaaagacccaagctgttgatctgatgggtgtctccaattatagtattgatcctcacatggaaagtggagttcttgatgtcccaaacgaactctccaaggctgcctgcatgagagataatgccaaccatgagaataaagaaacacctttttttgagctcattttaaagaggccaagagatatccaagatactggaaccagcgcacacgatcgaaatgttttgagacattccgatatttcagctttttcaaggtatagaaatgttttgtgttgatataaacatgctcaaccacaattaactctaaatttaagaatataactaagtcccattaccatgcaggtataacattgtttcaactgcaaaccaagctccaacagggaacataggaagctgttctcctctagataatagctcagatgcagcaaaaacagaatcaatcccaaatttgcaatctgattcaaatggtacacctcccaaccagggttccaatggtagtagcaacaataatgacatgggatccactacgaataatgcttttaccaaacaagtggcttttgcagagaggcctacaaacaaatccacaatcaaactccaatcaaacactggtttccaacaagtgcaaaatggccaagcctcccttcagactattattcaaggtaaatactcgaatatgatgcctcagtaattaattcaaataagacacaagcaaaggccacataccacttcataatatcttttcatcgatgttgatttgttttacaaaaactatggctgcagatgcttcacagtgtggttcatccaatgcattgagagcacccatggaaggcaatattagtaatcacagtctcaacaggagtgggtcaggtagtaaccatggtagcaacggacaaaagagaagcaccaatgcttcaaactccagggggaaaaagacagaaagtgagagtgtggttactggaagagggaaaaccattgaaggaagtgaatcggatggaaatcgatttgcacaaagagaagctgctttgaaaagattccgccagaagaggcaagaaagatgctttgagaaaaaggtaaacagaaaatcaccccccttattttctctaagaagtaaatcatggaaacaaacaagtaggagtctgaaagaaggaagtttcattttcaacactacacatttgaaccatcatctttgggatccagttagtatgaagttttttgggaaaaaaaaaaggaaaagaacagaaaattgtttccctgaaatataaataattgatctgtttcctttgaagttccatattgctgacctgaagcattaatttttactttttcaggtgagatatcagagtagaaaaaaactggcagaacaaagaccccgaattcgaggacaatttattagaaagggaatgaatgaaaacaagggaaaaggcataaattacgaacctgaaccaatt

SEQ ID NO: 218567 - DNA, 7120 bp, Cannabis indica
cttgggtttccgtaatagtgtaaaaaagaaatgcttcgaatcatattgctatttgactcggatctgttctaaaaaagtctaggcatttcgaattgtttgtcgacacggacaatgtcaaggaaaatctctgaaattatttcagtttgtgttgcatcatgctcgttgtaattttatgtgtgctttaatttgttttttctgagtaggttgtgattttttctgtttagttttgatttggtgatcttaatcatttgaaatttgactcatctatgaaaaaattatgaaaacagtgataagcaatggctctgtttgacaaattaaaattttcaattccccgatgcgatgctcgatactatggttggcaatgttattgtgttgctaataatgaagtaaaatatgttatttttccaggaatcacatctttctacgattcacatggagaacttagagacttttacaagattagaatgtctatcctcaatgttttggttcaggttggaatgttacctgcattgccgaagttggttcaagctggtcctccagaagttctttctgttctattggacggtcgaatagttggttctatatcttctagtgtaattgagaaagtagcggctcatttacggaaactgaaagtctcacctgtttccggggtttgttcttattcttttctgtccttgtttttctttaatacatgttccatgatgctgatatgatgattgatacgtttcagattcccgatgatctcgaagtgggatatgtacctttaagcatcgacggtacttatcctggtttatatctgtctacatgtccgtctagatttgttcggccagtcaaaaatatttcaatcccttctaccgaagaccaaaatattgagcttgtcggtccatttgagcaggttaatattgcactatagtgtgtgtattaaactctaaaatactaacacacgctaacaaattacaacgtgtcgtgtcaggttttcatggaaataaaatgccctgatggcggggatggtggaagaaaagaagcgtttcctgccactcacgaagaaatacatccaaccgggatgttaagtatggtagctaatcttacaccttggtcagatcataatcagagtccacgtaacatgtaccagtgtcaggttcttattcttttccgaaagtcaagatgaagttgtttcctgttcttgtttagaaattttcggtatctgcttgtttttccattcttattttccttttatgaaaaattgtagatgggaaagcaaacaatgggtttcgctatacaagcgcttcactgtcgtgctgatcaaaactatatcatcttcaggtttgttcttctctctctctctgtctaacaatgataacttttatcttatgaaccttctttttgttgttgttgttgtattcatagacgccgcaatctcccattgttcggacgagtacatatacgaagtacaacttggatgagtatccaataggcacaaatgcaatagttgctgtacttgcatataccgggtgaggatgtatatatacgtatttttccaatgaaggatgaatatttatacgtatttttcaaagttgtagatttttatcatttatttcttatgaaattcagatacgatatggaagatgctatgattcttaataagtcatctgtcgatcgtggaatgtttcgtggacaaatatatcaggtttgtttcttaattggattatgatagttttatcgttacgattcgtatgagacatagttctagtcaaactgttctagattgtaaatcatgaaaaatatgtgtaaattattgttgaatgtgaagcatgttttctagacagtattaaattgttcttcaattacagttgaatgtttatgaatactaatttacgcttatatatggcagacagagacaattgatttatctgatcaaggaagcaggtctgaaaggaatcaaacaatgtttagaagaagtaatgttgataaatcaatgcattctttgattgattcagatggcctcccttatgttggtcaggttagttttatctcttgacatagaaagaaggtgactttatatccttacttatacatagtataatctgttcttgtgcaattttaattcaaagaaagtatttttggctagacgatgagcttttctggttggaagaaactcctcctcccatatgtaattctgttccagtataaataaagagtgtatttctcctttagaacagataattgagacttagtaacttgcaagcaattagcttaagcaccagatttaatagcaatgtgaaatcatattagtaatacctttggatcttatcagagtcccgtggttaagcgtgtttaggcaagagtagaatatgagtgtagtatacacattacatttcggatacaatgtttatgcgaaaatggttgttaggctgacctcttttttttctctccctctttcgtttcgtgttcagatgataaatccgaacgaacccttttgttccatttacaatgaggtgacaggtcatacaagaaccagcaagcgaaaaggtgcagaacctgcttttgttgactatgtttctgttgacatgaagaccaagaaaaatgttcataaggtatgtagtaatcttgactattgtatattaccaaattaagttataaatcatgatattaagttgtttaattcaaacaggccagtatacgttttcgacaaccaaggaatcccattatcggtgataaatttagcagccgacatgggcagaaaggtgtctgctcgcagttgtggcctgatatcgatatgccattttctgaaattacaggaatgcgtccggatcttattataaatcctcatgcatttccttctcgaatgacaataggcatgcttatggaatcaatcgctgcgaaggtttgttttgcatttccttctgtcattatttttgtttttgaataatctaaagaatagattattcttgtcatagggaggtagcttggaagggaaatttgtcaacgcgactccattttctagttcggttaaaaaggctgatgatggaactgaatcgaaacccgtcaagacacttgttgatgaacttggtgaaaagttaaaagagaagggattcaatttccatggtactgaggtattatacagtggggtttatggtgaagaactcgaatgtaacatctttatcggtcctgtctattatcaacgattacgacacatggtctccgataaatttcaggtgtgcaacactacaaactctacctataagaactatatacatatttatatcagctgaaattttatacaattttatcattgatggtaatatttgttatgttatgaaacattggggagtaattgaaaatgttgttttgtttgttctccttttcaatatttgcatttgaagaaaatgaactaattgttttcatctctaagtgaatgtttggtaagaaggaaagaaatttgaagggatggaatttttcttaccttctcttctaatttttctttccttccatttttccaccataccaaacataggataagttgggtgtatctttttgagatttctatttaagaattgagagttgtaatgcaggttcggtccacgggaactatagaccaagtgacccgacaacccatcaaaggtcgaaaacgtggaggtggtattcgtttcggggagatggaaagagactccatgctcgcccacggagcttcatatttattacacgataggcttcatacatgttctgatcatcatattgctaacgtgtgttctctatgcggaagtctcctcacaacatcctttattcagaaccaaaaacgagttgttcctcaggtgggcgggttacctcctagacaatcgtcgagaaagatcatatgccattcgtgtcaatcgagtaaagggatggagacggtcgcaatgccctttgtttttcggtatttggctgcagaattagccgctatgaacataaaaatgagcctccagctaagtaatagcgccacagcctgattttcgagcaactaattcggaaagaatgagtaagaaatattctcaattttgttgtacatatctttttattggttccttcaaatgtcttatatagccaaattttactctagatgatgatgatccttaattttgaattgaaatatggaatgaaccctatttgatttattagagattggagagattaggattcttcctttagtcttaaattttcaatttgatctttgagtttttgaagttgtatctcatttttatggatgttatggaaattaaatatcctaatatatagattcatattatattcttcttttttggtacttactaagtttaaggagaaaagtagtgaattttatggtatagataaaatggcattttcctaataatattagtttaattttgatctaatattttcttaaaaagaacaaatacaattagttacaaaattctaaaacttgattttacaatctaaaacttggtgatgaaatgtagcctaatcaatttcatttcaataattatcatttgtattcacacccaaacaaaatggatattttttggagacaataagatatgttaataatacatatttcattaatcattaaaagtcattggtactccaacatgttcatacatacttagttcatttcaaacactagttaaacataacaaaagaaacccattaataatatcataattataataatgttaattaagtagagataaaagtactattatgtatatatattatgtgatcatcaccatcttcaccatgtatggatgatataaactttcatttccctacaaatgttgaatttgggattgatgagaaattcaaacaaacacttgtcattgttgttgagattcttcctcttgagaaaatgactccatttacttgatataaaagcttgaccatctttatcatatgttattccaactccaaacaactcattattcttacaatgaagtagtattttttcctccaactttaccttactcaccacaccactaggaattttctgcaaaaatatatgtagacatattattattattactaaataaatataagttattaatagttcagaaatcatttttaacagattgaaaaatttaggaggctcaatgatgcatatgtcataattcgagagcaaagctcgtaaatagccataaatataaaagagaaatgaatgaggaaaagaatatttaccactttttttcttgtattatcattgataatagtcaaaaagtgaaggttactactaatactattactaggaggagttgtagtattagttttaacatcaccatattcttcttcatttgaaaaattttctccaactttttcaagttcttcatcagtaggtttaatatcttcatcatgctcacctacacacatataataagatgatatatatatatatgtgtgtgaataataaattagaatgttaggaagtataagtatctaactttatgcatgtattatacttaaatatttgacctttagtttatttaagtgcaacatttgtatagatttaggtatatatgatgtccccatcaaaaaaaaaaagtatatatgatgtcaatatccttaattaaaaaattaagggttaattacaacaaaaattaaaagttagattttaatgccatgtaaataaaaaattaagtatgatcataaacataatcgagtagttttacacttctcctcacaaagggatcttaatttagaatcatccctcccccaatattaaaagaaaaaaataattaaattatttaagtacatgcataaacttaacttatgtatttatactattaatacctctctattaaattaataaatacaaaaatgtgaaagtacatatatagggagtagattttgtcttataaaaatgattctgtggtcaccccgtggtaaggccaccaaccctgaattttaaagagccttaaaaaaaaaaattgggccattattttaaaaaattatatatttttttgagccctaagcgtgggcctaacccgctttagcctaaatttgtgcctaaggccaaccctgtcccatagttactataactattggatcaaaatgaagttgatttaacggttgaaaacaaaagtacatcaaatccaatctattatacatgccatgtatatttatatgaagtacatatatattatattacctggttgagtaatagtggttttgtgatgaagttgtttcttgttgcatccattgcaagcatagattttgacatgaaaaaagttgctattagcaatggaagtgtaatatttgaacactaaaaagtctccacgtttaagcttgtgctcctttacaaactcttcccattgacattttccattaacaatgtacactttttcttctttctttttcatcccaaatgaccaattctttccattctcatcttttactttcacttcctttggaattctcttcatgaatttttcagcaaactttggtggtatccactgtaaatttatatgacaaattaatccttaattaatgtacattttttttaaaaaaaagaataagaaattaatagagatgaaagtagttgctattaatccttaattaatgctcaaaatatagataaagttagaatctttatgtggttagactcgtgaagacaatttttctgtggttttaaaatttaacaaaataatagattttaataaataaataaataataaatgatatgttacgaaagagaaatattaaaatacactagtagtgtttagtaccatttaatatgatatattgtaatttagggtcggccctaagctaaggcgggttaagtcagtgcctagggtcaacctattttaaggacctaaataataaaatatctttaattttaataatttttaaaaataccatttgttcttatcataagggtataatttttttttaaggcctatttcaactcaggaccgactctattgttattgctataattaagtatccgatcacacataatttaataagaaatttacataaacaattatttttggtaaaaaaaattactgttttacgtttaaagaattttttttatatttttacggtgtttataaaataacacaaaataacagaagaaaacattaaaacaacataaaaaacaatatacaaataacaaaaa

SEQ ID NO: 218568 - DNA, 3937 bp, Cannabis indica
tatgtattgtgtatatgtatttacatgttttagtgaacaagtgtgtcaattatttgttaaataaagaagaaaatgatttatgattaatgttttattcatctctaaatcgtttccttgtaatttttcttacatgtccattttatgattatcccatcttaaatctccatttggcttctgcaaacaaaataattcttatattttaagcattttgagattgaaaagtaatgttaatgtgtgatagggtggtgatgttggggaccagtatcgatctggaatatactactacaatgaatctcaagctcgtttggcccaagaatcaaaagaagctaaacagttggagttgaaggataagaagatagtgacagaaattctgccagcaaagaaattttacagagcagaggagtaccatcagcaatatcttgagaaaggaggtggtcaaggctcaaaacaatctgcccagaaaggttgcactgacccaattagatgctatggctgagaatatttcaataagtccataaaataaagctcaacacataatcctgagttgtgttatgtgttatatgttatatctgtttggatactagttttagtgtctctgttctgtgtgaaaattcctatcaatgaatgccagcactgtgtttgctatgaataataataaatctagtgctttatactgaatgattgtatcttcattagatatatatatatatagttgaaacaattctgaaaattccaaaaaaaaaaaaaaattattgatgtgtgaaactaatattattcttatggttcatgaggccatgtcccatgtaacctgagagcagaaaggaaaacaaagaaaaagcatctaaaagggcttgaaaccattagtgtgagcggtttagagttcatctttgggagaaggtgaagttgcagtaggattagatgatgatttcttgatgggatatgaagcctccattgctattccacaaagtccttctttctcagaaatgtttctttgcatccttatgtaacccttctcaccccactctggtccccaagagtttcttactgtccagaacttggtaccatctagtgctgttccatagccaactactgcaactccatggttcagctctgtgccacagcttccattgaacactccctgatgatacaccatactcatacagatcaaaaccaagacaaggtagtttctatctttatatattgatcaatatatgtataaatgcatgtgtctgaaaatataaataaaataaagtgttacctctgagtagaactgaaaatcagaacttccagcatctatggctacagaaataggttggtgagcagctgctttcagcagagcatcctcatcgttttcgggcacattctcatggccatcaattgacactgcgggtaagttttcctgccatgtgacatgtcaactagtattagaacctgaacctgagttttaccttttaaacactgcaacatagcatacataaatgtactcatgtaccttagcagcatcacaggttccatcttctgctttgtaagggtagtgagtttcagttgttaatcctcctcttttcttgatgaactcaaacgcatattccataagccctccattgcatccttcatttttttcagtgtcacaatcaaccaattcttgttcagacaaagagactagcttctttgtcttaatctggtttataccctcaactgctacaacggttgagaatgcccaacaactacctataaaatcataagaagaagattcaaattacaacattcaaaagctatatatagatatatacataaaagattatgaagtaaaacacttttatctttatacataccacaactgccttggtcctttacagcagtgacagcacctttctttctccaatcaactgatgtggggactttctcaacattctcatacatgaacttcccagtaccatgttgtgatccccggaacatcctgtgatgcttaattttcgagccagcataagtgctcctgaactcatgattggtcatgtctgcaaacttgtttagtttcagtttgaaaggcatgtccttcttgttggtattgtgaacatgcatggcattagccttaaacacattgaaacgctttgccttttcgtcaaggcttcgtgacacagtgtgatggcttctccacctctcgtacagttcccacaagctatcctcggtttccaactccttctcatggaaatcgaaactctccacaatcccaagaacaagagcaagtgaaacagcaaccaataaaaacttcttcatgtctagtaattgtgtgttgaatttgaatatgaaaatgttgaagaccttatagctcccttttatagaagtaggaatgaacacagaagaagaattaagagtgttgaagatgaagaagaatacaaaataaaataaatgttgaagttagaggtttcttgtggatatcaacaacttgctgtaatgatattaagaaaatggtatttgatgagcatttccaaatgaggataattgtgtttggtttttttcatattcatagtaagcatgagttaagcatgagttagcttcattagtaagaaagctgaacttagagaagggcacacttaaattcttaatcaacagttactatatgtgtatgcatatttaggatgctattatcttttctgcatttcatgcttgccaacacgttacaacttaccaattttaatgtgattgagcctagttacaactcatatatgcatatggcaacaacttggaaataataaagttccataactgcttttttttttttacctgtaactgaagccaaaaatgttttaaggtgttacttatggtttgcctagagttgttcttgatttggtaatactctagttataacatgtaccatatacacacaatcaatacaccactaaaattatatgaatggtaataacatttaattatacagccattatatttgtgggtcctaaatttgttggttggagagttcaactttgttgggataagttgagtaatatttcttttttgtattcattaattaaaaatactctcatattatatttcattaaaatctacgtacttttatgagtgggttgcttaatatatcttatcctctacttaagtataacacatgatttatattaatttaagggatataatgggaacattatttataaaatgagtatattttaaaaaatatggaaatgaaggtaaaaatgaaaactaataaagtatgcaaaaatttcacaactaactttggtggtgttgcataattagtcaatagtcattttgaaagtaaaaatataattacattttgtaggaaaatgtctttaaacaataatatgaataataatcatcattattttaagtgtttaaaaattatagtttgagatctgatattatttaaatgtttgaaatataacaatttaaaggagtttataaacatttttttttagtttttatttggttatgctaaagcaataagaataacatggtgaattgaattacggaattgtataacattggttggtaaaatttattttactttttaatatttcactaaacataattgtgaactttatgacatcttaatttaaagatttttctagtgctgaaattataatttacttgataatggagggataagaatacaataatattactggagaactattgagcaataataatcatgggaatggatagatgagggatgacataagaatgtgataatagtcctacttagctccatgtatgaggtctacccagattgtaaaagagaggaattctaggaaaagccacaaaaaagttcatgtcacaaactaaagatgcattgtcttttagtaatttggctatccaaccatgtgaccaaaatcatataactgacaccttgtctagtatttcatttccacaaaaagtgatatagaggtttgttggatttgaatccagtaac

SEQ ID NO: 218569 - DNA, 2377 bp, Cannabis indica
aaaaagcaattgtatcgatccatattccttttatcttgacacgtgtcccccactgagatggtagccgaatttcgggtataacaatgaggtatgaaaaatactagattttgagcctttccaagttgtcatgacagagtttgctcagtctttcaagctctttgatcatcatatgttgcagtagctttggcttgtctctatttttctctcatcatatataggagaacaactatggtaaccgatacaaaaatagtcaaacccaagccaataacaactaagatgatcctataggagaccttgtgatggctttattggtcagggctatcagcattcctacataatgaatccaatggctctccacatagtcctttattaccaacaaaacttgaatttggactcttttgaaatggtacaaaaactggcactggtccattgaacatattgttggtgttatgaatttagttatgaaaaatactagattttgacccaaatattgttggtgttctcatccataacactatccacaaacaacacaacacatttttaattgagggaaccaacctgtatagtttccttgttaaaatcttgttctaatatcagagacttcactctacttcatgcacacttgatcaccacaaacctcattcgtgatcctatcacggccaaccatgtcttatgttttttcctctcaattaaaaatttgtgttatgctcattgtctctttagtcagacctaagagatttccccatccttaaggcttttgcaccctattactctcagactctcaatctccttccatgaaaggatcactgactctaaacaatttgttgttagcaatgagcacccttctaaggaaagaaaattcaccctcctataataacaatacataactactctatcagttttatacactaaagtaataataagtaatttgtttagacagactaaggagtttagaaacctttaccagcaaatacttgccaagctcaacacatcattctccaattcccaacaatcttgaaaaacaatctccctaacagcctcacataaggtgaacaaagcttttactgtcttcttatcccttagctgacacttgtgcaagtgtaaacgctccagagttggacatatgcccaaatactcatctagctcaggactagagtcaatcattgtgttatgaacacttaaaacactgtaaataatagtataattataaaaatatacatctaagcttttgataaaaaataaagtacttaacttatgcaaactttacaatttcataattccaatataaatcaaaactataaaagataaaactatatttcatgtaaattcctcatattctaaactaaataatcaaaattcttaattctgtgtataaaatgataacaaatattataacataaaggaaaaaattacaatgcctagggactaaaggagtaatctaacaaaacgttagtaagaatgtttattacaccttaaattgctacaaatatacataatttaattatattatcaaactacaagcatgatgtgtatcatcattctttctagtgtcatttaccccataactatcatttcaagctttgtcctaattcgtttaaagaaggaaatcactttgttgtcttgtgccccattctgtaaaactttcttctgcctttgggtgacgccaagttatatcatcaaccaattcaaagaaggggttttcaaaatttatccatagtcatttttacttcctcccttcttttccatgccataactgtaatctcaaaggtcataaatctagagatgaaccagttgtagaaaattagggtaagttataaatcataatcagttgaaggctgagtcttttaaactttggaagaatatgttatagcaggattgatgttttccattgcatttgacttaaacagaaaattcaccttcatatttctcataattgaaatgtgagtgatgataatattatccagaagaatgacccttttgttgcatctctctccttagcgcatcaaattccgatttagtctccagtggttataaaaccatatgcagagtcagtctgcccaaattcacccactactattttcagtaacatgtcatattgtttgtgactgtgatattgtttgttatgcaatatagttcatgataatatagtttttgatttaatgcctataattgttaaatgacatttttttatatacatggaatgcttaatagatatggatatgcaaccaaaaaaattatgatatttcttttcatgtggcatttacaaatgatgggcatgtgtatgatattgcaactattattgtataaaatggtatgcaaccgtcataggagacgtatgcttcaagatcgtacttttgctagacatgagactcggtta

SEQ ID NO: 218570 - DNA, 10207 bp, Cannabis indica
cattaataagcaaaaatgatgtcgtaatcaaaaaaatataacagaagcaatgaaggttttgacatgtaatttacacaaaacatatacctccatgggagagaagtaactgcaacagtcctttccaggcccttttttgcagcgtgatgtaaaggagtaccagcatgacgacctaccacaagacaatgaaaacttttagttcagatgttaaagtatctactttgaagctaaaaacaaagtcttttaaaggtatacttagcaacctcctcaatgacaaaatctattagagaattatcatttttaagcttaccaggacggtaagcattaatatttgcccccaactcaatcaaggtttttgcagtatcaatcaaattgggattcatacacgccacaatgagaggattttttccatctctatcaatccactgttacaaaacaccactcaaatcaaaaacttaacatactatgttgatatgttgcaaaaatagcaagtaaataatctaaattttcagacaaacccatgccaaaaaacttccatactttccagtcaaattacatcttccaactccaaatgaatacttaagcatacccatttatcaatttttctaatcaaacattactttgtcacaaagtctttacctttatcccaatgttgagttcaatccaaattttcatcaaaaacccttatcgaaattttttcataatttccagtcaaattacagcttccaactaaaaatgaatacttacacactcccatgttatcaattattctaaatgaacagtaatttaccacaaaatctttacctttattatcccaatgttgggttcaattcaatccaatccaatccaattgttcatcaaaaacccaattggataaaaaaaagtactaataattttacctcaaggctagcaccctcttgaaagagaaccttaatggcgtctacattgccagtggcaaggaccaaatcataaagcaactcagctttggagcgttgtggttgttgttgttgcggttgcctcattgaatcaagactttgacccatcgattttttccttttctgtaaagatcgaagtaaattgaaagagcaaagaaaattataagaaacgagattggagagagagagagagacccaacaagctcagaagaagcttaacagagaaggtttgttcttcttcgcggtatgactgaaccattcacaagctgccatctgttcctgtaaaaatacaccttaattttactactaattttcataaaaataaaataaataatttgactattttgttataattttttagactaattagaattttattgtaccaaattatgtttcacgaattttttaagctggtaaaatttttctcaattattaagattgttagatttaaatatttcggttcaatttcgtttaattttactaacatagggatttaatatttctgacaagccctagaatgcaaagaggaactagattcgattaacttcccatgacaattcctaatgatcatgctcgtaccatattgagttgttgcctcaaaaatcgccccatcagtgttgatcttcagcttcccaacatgcagttttatccaacaaacactactgctaccaacaacagtagcatcaaacaacagcagttcaaacctattctcttgagccaacagccaactagagtgacacgaccttgccacgcgaaccacatccgcagcctgagaagaacgaccctgccaaagaagctcatttcgagctttccaaataccccatgctaccatcaagagctcatccaccaaagccactctaccccctgacagaaacgccttaaaccaatctgcgaaggtagattctgcagaaaaaacagccccacacccgacctatgccaacacgattgtacaaaatggcagccaaccaaaacatgaaaaatggtttcagaattacaaaatactttaagctctattatattaaggtaaataaaaatgtaaaatagttaaaatttagttcatgcaagagaaacttatttctataatttaaagatagagaaattggtaagtattccattgtgttgttaattggaaagaagctgtttataaattggattaaattatcttagaatttttgcataaattataataacattaacccataatcactcctttggtttttgaaaatgatcttttagaaactagttaaatatatttggctcatggtaataagtaataagaaaaatataattggaatggaacaaactattttggtatactcaaccttagcaaattacattctttaaaagttctgaaaggttaataaaacactgaaaaatcaaaggtaataacataaataaaaaacaacaacaacaacaaaaatgggtctcagctccaatctaactaagtacagagagtcatgtcatgagttttaaccgttaagcaaatcgataagctcactcttcttcattttggaatacccttttaaaccgcgagacttggctagtgcccgtagttcgggtagtttccagccactcaaatcctcttgctcggtctgaacctgttcatcttcatcctcttcttcctcgttaatatgagcttcttcatcctctaacaattgaacaatctctggctcatcaatgtgagcttcttcaccttctaacaactgaacaatctctggctcatcgggttcaaggtctgactcgggctcatcatcatggtcaacggacactggctcatactcgtccaggtccaactcggttttaggaactgcctcaacctgatttttctttcctctcccgcctgaattcacatatggcattgaattgaccggtttgtcatcagaataagcggacttgaatttcgtccgggggacaggagatctgcgttgaaagtttgatacaggtctagtaaaagaggcattgggcggctcctgacaacatcgtcgtcctttaaaccgatgatggaatcaaacgagcctgtgctttttcctctaatgtattggccattctgtacttgctgatcaaacatgaactctttgcttgtcccgctgttgctaccacctctcctcgattgttcagttgagtgctttcttaataacttaagaagcgaatccacagtttcgttctctttaccttgcccttgcacggcttcagtcttcttttcttctttagctgcagctctctcccgaagctgagcctgaacctttctaaaaagctcaacaatctccttttctctaggtcccggagctgcagtggcctggaatttaggagaattggatagtgaaaaatacggcccgtttttagaggcaacgatgtctgaatcatcaaggttttcataactgtccctgtcttcattttgcctattcctacctcgagagaagctctgcctgttatgccttgagaaatcggggtttctcttgtaactaccggaacttgctttacaaacatgggatgaaccagcagaagcagacctgagtggtccaacattgacctgtgaatggaagctgtaatgaaatcgagatgagcaaggattcaaggtgactgttttttgtgaaactcctcctggacttaggagacctttaccttctgatactccatagcctgcaataaaccaaagagaaaatacaaaaaatcccaaatgttaaaacctctaacatcatcaaaagaaattaaaggcagcaaccattcagtagctaaacctactgtgcaatcatcaaacgaccataataccataaatttacattgtgtgatgaccacagtagtttcacagtataaattaattcgatgtggttaaggcagcaatcatagtcattatgaaaaaatttgtcagcaaaataaccatgtttgatctataaacgaccgaaaattacactgtgccaccatataaaaacaaccataatactattatggccgttttgtgaccataaatctacactgcgtgacaatcacaacagtcgatgtagttattttggaacactttgatgtagttattttggcaactttccgacctatttgtgtaaaagaaccatttttgtttcccttaaaacgctttgcacatgaaattttctataaaacaatttaacaaacacatggtgagcaaggctaaagttctacaaaaaacattaaaaattacacataatacccagaaacatttcatcaaacaaatggtaggcaacacaactatcttagttcctataatcatttcataatattttcaaataaaaagcaaaactaaaaaaggttaaaattcaaccctgacactatatatgactttataggaagatgttgttatccaaaaccctcaaatacattaacctaaatcttccaaaatggaatctaaaccctttgcacacgaaattttgctataaacaatttaacaaacacctggtgggcaaggctaaacttcaacaaaaacatcaaaaattacacacaatacccaaaaacattccatcgaacaaatggtaggcaacacacgtaaatttactaaatcaaaaatatgaaattcaacactgacacaatatgggagatgatgttatccaaaactctcaaacctaaatttttttcccaaatggaatctaaaaagcgtgacattcaatcacaaactatacaccataaaaacccaagcttccaaaaaaagattttgtcccacagtttctcgagaaccaaacagagggaagaaacttacctgggaaacacttggagacgaggtgaacagcttgcgacattggtggggagatgaataacagagttggaactttaaggggttaatgaagatttgccatttctgaagctttcttcttcttcttcttcttcttcttcagaaatttacagtcagctctgaaaaagtattatttatatatttatttacataaaatatattattgataagggactttttgggtaatattgaatttcagtgagggtaatattggaaaatcactctaccgtcgtcttgtgttttaaggcggcaaattgcggaagttggtattgttggatccgacccggtacatttcggactcggatcctctaaccaccaaaaaaaaataaaaattacatgtggtatcattttttaattagcttttgtcctttatctaatagttattttcatttttttaaatgggaaaaagaaattacgtgtacaaatctcttcctcactccttcagtagcttagataatatcaatgactatctgctagctataaggatgttatacctccacattctactaagaatgataccgccacaataagctagcctcccaaaatgtcaaacgtaatctcatttatgatggactatggtgggattcaaactcttaacctaagccagtaaagacatccctaccactacaccatacaacacgtggtaaaagatagtcattttagtttaaatttgatgtttgtaaaacgattcatgaattgtgtcgctcatctcttagcttcacgtgactatgttgattgtatctcttagcttcgagtggctatgttgatagtcattttaattcaaatttgatgtttgttaaaatataaaaagtctctaatgctatgtttaaagtagaaaaagtgattgaacataaattataagaaaacaatgaaaaaccaaacctaatattttaaaaattagtgtcatgagatgataagtatcagctctaaatttgatcaaatagtgtcaatggtagaatgttgttttagagacagattgtctagttacagtttcgttcgtcaatagaattgtttatattttactaaatttaatccctttttttttctaaatggaaatttgaataggaagatattcctactaatttaatgtttattttgttagacaattactattctaaatgaagtttactattcagcccaatttgcaatataattctaaatgatcaaatctaatttgtaaaaaattgggtggtgtaattacatggaatataataattttttatatatatttttattaaattatttaataagaattacatccaaacaatatttgtattttaaaaaataaagtaattactaattacttccacataagcttatattaagtgttaaatattaaattaaatggacaagagggattcaaatattgaagagtctacaacctctgaattaacactctttcaaaggacaaaaaaatataaagacaacttgttcatcttacataggaatgaaaccaagaaaatggcttttccaaaacataagaacacagaaattactaaattagagaggtttacatatggatggattttcttctcttctcataagttttccatacaacaataattgttattaggaaagcttattacaaatagtgttttaacttaaatttttcgatacacaagtcgctttgtattcatcggtatggaaaaagaaaaaaaccccgtttctcaaaccggtcagccataaatcgaccgccattctctgaagtgatgaccaacctaaaaatcccatatttgtttatttactttttttttcttttcctttcaaatcactagaggaaaaaaaggaatgaaagaagaatgaaatttatcccataagaaaatggggttgggagaaaagcaatacatacaaactgattgagcctgagcgagcttcaggctttgtgatttttggcgagctcatcgacgtccaattcaaccatcaatacgggcatatcttttcgcattccatagggactggagaaaaggaatgcagaactttcatgttaggcacaagtaagtttgtaacgaaacgagaaatttgagttgacagagaagtaaattggaagcctacctattcttcacaggtccatgatccacggctgttcgtaggcaatacatgactctaccaactacgtctgtcatgggaactggaccgaattttcgactgtcattggcttcctgcccaatacaaaaatatggatcagcaaaaaaagagtggtagataagattagaatatgcattaacacccgaaaatgcatcccgggcatttaagtaagttatgtatccatccatacattctctaaacacaattcaatgagaattaaattgaactaatttcatttgccttatgtccattttcaaagggagacagtttatgtagaattatctactgatttcattactgctcttattctatgcaactatgtcccaatatttcacaatgtggctaaatttatactaaaatgataatgcgtgtaataatggaatttttcgaaaaagaaaaggtttgcatataccttgggcttcaatttatcattgtcagccaaaatccagcactcatctttttcaagaacaaaaggttcatcatttgcatcagtagagaccatttcgtacccttcaatagcagccactcttcgtactatataactttctgggttctcgggatccttcaatactactacatctccaacaaaaacatgcctgtcaacataatttgacaacactaaaataaattaatcgtagacaacaagagaattcaagatttataaacaagtaattctcaaaatggatgatggatgcaacgccaaagtccttcaatagaagcgaggaggtaacttaagtcagatttaaatctataatcattatcgatctatggttcacacacaatgttctccccattttaccaaacatgataaccatcctaaatagcacaagtttcatgagaaaatccgacaaggtgacaactcaaagaaaaagcatcgaagcacctaaaattacaaataaagacatgttgaacatgacaaggtgcctcatcattgacaacatgcaccccgattaatcatcacctaacatcgtgtaagaatataaaaagaatattgaaattgggttctccagctgaacccatcaatatttatgaaacaggaaactccagcatattgctacattgatccccatgaggaatgatgcaaggtttacataatcacatagacaatgcatgcttctagagacttaagcagaaaatcacctagagttaactggcacctttcgaaaaaattattacttaaaccgataacatagctgcaagcaaaactaagggaaagaataatagctacagagcaattgagactaaagttatagtcacttagaaacaaatatcagaaatttatgcaagtgaatcgaaacattgtcacagatacttaaaacaatatacaataaagggccaagcacactagttgacttttatcagcaaaataatcaaaattcctaacttaacaactcggtgatctacgaattgataacattcatgttattcttcctaagttttaaaatctcagaaaaacgaaaaattaaagtgaaaacaagagctacaataaaaattataaattacgctggatcggtagctggtagtttccgaacaagaagagttcctccgccaacagtcggggtcatctcctctcctttgttccaatgcaagtatgataaccttccttgaagaagatttttccatacagcatcacccacttctctgtcagtaatttgacctcttttataattctacatcacaataaaaaatgcaacttaaatttaactaaaatttgaggaatttgatcattgttataatacaaaaaggcctctattattctcactatatacaaatgctatatttagtacaaaaaaattgattaaacataaattacaaaaattaatgaaaaaccaaaccaactttttagaaactaagttgtaaatatttcattgtatttcttgcaaaatatgacacatcatacttatgaagattcaaattgtcaaaaatcaataagtcaacaactgtatagatataatatatgacgttatgaaaatagagcattgttattggtaatggtccttatcacgtatcgttttatgattggttaacaatattctctaaaacctatttccttaagttatataattacaccaatatgtgtgaagcactgccttttagcatgtcccattaaaatatatatatataatccaacaccacccagcataacattaaattaagaacaagaccccaaaatggctaagagaaataatgaacaaattgctatagtacaagtaagaaagctctatcctttaattgaaaaacttcatgcaaagtcaaaattctaagaatgaacaacaataagccataattctagtctttaaaaagttcaaataaatcttttatcaaatcaaagtatcaaacccattaccaaccttcaatagattctgtcactgaaacaacaacaacaaaagtagcaaccccaacccaatgcgaatagttacacaaatcctcataaacccacaaagcaattcaaaccccaaaagtaaagtatgaaacttttaatcatttcaagcaccatgaacaatgaaattcaagggaaaacacagcacagaagaaaaccccaatatgagaattgaacagagaaagagaagaaccttccagctaagagcgacggaatactcaaacttgtgggctatgtagcgaaaccaggttgagagggagaccattgcaatgggaattgggtgggtttttggtgtcaatattggccacgattcgattcaaagtccttactcttcaccttccaccttctattctatacccttttttatttccttaaacccctaaaaattaaatagaaagttccttttttttatcaagaattttctttttttttctttttcttttcaatagttataatattaataataaaataaaattacagacaaaaaatttaaaaatatatatatttttcttattttttctctttgaatttttatttataaaagtaactcctcaataaaataatattttttaattgttttataatttatttatatttgttaaaagtttatttttctaattattttatagttattaattttttattattttttagtttttattttatatttttataatttaaaattttacaaacgtatttttataattacaaatattttgctttaaaattataaataaaacataaaataataaaaaatttagaactttctataagagaagcacttattccatttttttttttcattaaatttaatcacattaaacactatacttacctaattatcaaaaattaccaaatatgttaagacttagtagctttttagtataatataaaggctaaagctccacaaatataacacgtacaagtctttccttttatttacggtaaaaccactattgtctttctaatactagtaatatataatgttctttttagcctaaaaagaacaatatcaattttttttaatttttttttcttaaaattatatatgta

SEQ ID NO: 218571 - DNA, 6973 bp, Cannabis indica
ggtagagagagaaataggtggaagaagtggaagggtatattcccaaaccctataaaagcatattaacacataacaaataagcaaagagagtatacctttcatttcaaattaccaaaacacaaacaccaaaaccatatcttcttctccataatcaaaccctaaccacggagcatcaatggccgaaatcaaggccaccagctccaccaccaccaagaaggaaatccaaggcttactcctaggtcgcttcgaaatcggcaaactattaggtcacggaaccttcgcaaaagtttacctagccaaaaacatcaagtccggcgaaagcgtcgccattaaagtaatcgataaagagaagatcctaaaaggcggtttaattgctcatatcaagagagagatttcaattcttcgacgagttcgtcaccctaacattgttcaactctttgaggttatggctaccaaggctaagatctacttcgttatggagtacgttcgcggtggagaattgttcaacaaagtcgctaagggaagactcaaggaggaacttgccaggaattactttcagcaattgatctcagccgttagtttctgtcacgctcgaggagtttttcatcgggatcttaagcctgagaatcttcttcttgatgagaatggtaatcttaaagtttctgattttggtttgagtgctgtttctgatcaaattcgtcaagatggtctttttcatactttttgtggtacgccggcttatgtagcgccggaggttttggctaggaagggttatgatgctgctaaggttgatatttggtcttgtggtgttatcttatttgttttaatggctggttatttaccttttcatgatcagaatattatggctatgtataagaagatttacaagggtgaatttcgttgccctagatggttttcccccgagttatctcggcttcttagtcgtgttcttgatcaaaaccctgaaactagggttactatacctcatattatggagaataggtggtttaaaaagggtttcaaacatattaaattttacattgaggatgataaactgtgtaaagttgaggatgatgatgggattattgataaggaaaaggctgaggttgagggtggtgatgatgggagttgtttttctgatcagtctttgtctgaatctgattcggaaattgagatgagaagaagaacagcttctttgcctagaccagctagtttgaatgcttttgatataatatctttctctaggggatttgatttatctgggttgtttgaggagggttctgaggaggaatcgaggtttgtttcgagtgcttcggtttctaagattatttctaaacttgaagagattggtaaagttgttagctttagtgtgaggaagaaggattgtagggtgagtttagagggtactagagagggtgttagggggccgttgactattgctgctgaaatatttgagttgacaccttctttggttgtggtggaagttaagaagaaaagtggtgatagagctgagtatgagcatttttgtaatcaagaattgaaacccggattggaaaaattgagacttgaggaggagtctgctcgtgctgctgatactgctaatgctgctgcatctgctgcatcgtcaaatgtaccatcagatcctgaatagagtttgaaggaaaagagagaaaagagaaaagggtatgctgttctttttttgtcttgatctatttttacttttaaaagttaaatttgatttgactaggaatagaaatgatttgagtagaagtatgtatatagggactggattttgtctaattagggtttgcattcttcataattattggatcgagattgagttgatgtaacggttggaagtgaaagtacatcaaaccgagtctagagtatttactaccttaccttaaccaaagtacataaaacaaatcttatagtacataacgggaagcattccgtttctcttttataaaaggaacaaaatccattccatatgtatatactcttgagatcatgaattaatatggattcgggtaatgaataatatactatttatgtatgtttatgcatcaacgtatgcattacgttatcttcataattattggatcaagattgagttaatttaacggttggatgcaaaattacttccaatcgaacacaacggaatgaattccgtgtttgttttaattttcaaagaccattaattaagatggattcagataattaataatatactagttatatatgttcatgccttaatgtatatccattactactacatgattaaaagtgttgatagtcagtaatatagacatatatgaataattctttttttttgtttttctaaatttcagattagggttatcttcccaaggaccttcttcacttgatttttgaaaaaaaaattgtaaacattgaaagatggtcatttggtgctatttgtcatgagtggtatgttgtaactatggataaaagaagtgagctaatcaaattgaaatgtcataatatagtatcaaaacttttggtgcccaattataaaagagtgagtggttgtaaggttaataattcatggaaaatttttagtataataaactcatgaagaattacattaatattaataacaaacccaaggtattattacttccttcatatgaagaagcacatccttaggatggttagagactcttggtaaaaacttgattggtatttgatttgaatgcaacttctatttttgattggtaaattgtttttcaaaaacaaaaatctaatcagttttcaaatcttatgaaaaaagttgaaaacgagaaaatcacgttttttctgttttgggatattgtttcccccatcttccatcttctcggtgaagcttccacgaaatcaagactcttcactcaatgttcatctcatcttacatctcccactcgctccatatttactcatcgaccatttacacaaggtatttagatttattcctctgtaaaatctcatctaacattagaagtttgtttatgtgttaatattttattcggtagagcatttaattcggtttgcttgattaggaaattttttaataagttttctatgtaataagttttagggtttacggtgtttgatttggaattttatccaagatcttaatgagcaatatattttgtatgcttatttgggtaatatattttgtttgattggatctgctggttttggactctgctgttctgggtttatgtcttcttacgagaaatccacgatcttgtgattggggttttgagttccttgtctttgttgcgttgacaatattttttttccttgataatgttttctatgctctgtttctgttttgattattaaaggaacgtttatatcttctcaagtttcattctatagccttctttcgattggtttttctgttttgggtgagccttctttgcagttcagaaattggtttccgagatcgtggttcatcagtcatttatttctgattatgatatttgatagttgtttttcgattatagtatcttaggatcttcaggggtcataagacatcatcttgccaagaaatttattatagttttttttttcattaaaattctgatttgttaaactaagtgtctccaccaacaacatgaaatttactttgcgcttgataattgcttcttttgttagaggatttcaacttttaaatattcttcacttaaaactatgattgtgttgattgacttggattttacatagtgaaatcacatgtatgttaatatctaatttggactctctaattcacattattttttcaatctatgaatttttattctttgtttccattttacattcttctttgtttcacaatgtaatgtgaaattcttttactttgataacaggatgtcatatgagatttggagagaaaggcttggattttctgatcaaaataagagaaacttagatgcactctaattccaatataataaacttgcaaaacaaaagaactagctagtagttgttaataatatcttattatgctaatctcaaagcatgacttgtactttgtctatattacttcctttgaagaatatcaaattaactttttgggctctgtagttttgtttcaatggtgttaaactcaggttgcttgaattatagtgttccctttttgagactctttgccaataataacaataataataaatgaatggatatgagcatttgctttggaaagcaatgttaaataccaattgagcatgttgtgttatctattttggctatagattagaatacactctattagtgataggatgttagagcaataattcattgactttacaccattagaacatattgaagtgacccaaaaccaatttactatacaaaaccaaagaggaggaaggagttgaagcaaaaattaatgagatgttttgataggaaatttcttatcatttaagcataaacaatagcaaaatagaggaaattagataacatattgatagtggaaattgaagtgaacaaggtatagtattgggtattggagagacacaatgctctcccaagccatgagctctactagctctattacaatttcattctccccttttccctttcctattcactcgtacattatcaatgtcatactagagatttatttattcattatgcaaatactagagagattaattatatgacttagatggaagatgttagagatggaatttcaacaaatttgtatgagattaattcacaacactagaacatagttaatatagatatatatatgatgatgtttttattatgaatttaatcttgttactcttgcttcataatttttgaccctttaatttttaggagttttttcatttttacactttaaaataagttttttttttttttttttacaaaattttacgtaaaaattcttattggaactagcgctgcaacctaaattgcaacaaaaaatcgtataaaaactcctattgcaactagcgctacaactaccttaaaaaactcaaaacggaaaatttgaaaaaaaaaaaaattaaggtaaattctcctaattttttaatgaaatcacatcaattcaaattctagattttcaaatatgtcttggatgatttacatatgatgaagtgcacatcaggtgggttttgggtttttagatttttggtgtatagattgtgtatcgaactcgcccgtgtggtagaacaggcttttgggttttaggcttgggtgcaggttgggacggaggcgaagcaactggaccaggtcattgttgtcggaggcccgagcggatgaagaaggaaagaacaaataaaaaaacagaaaaaaaagggaagaaaaatacttgtgtggagtggtgggcgtctcgctggacttgagctggggcggtggggtcttgccggacctagtctggggttggggtcgtggaagttggggctttcgaatggggttctttagttttagaaattagaattaggtttttttggggtggggggtgtttgattcgtttccgtgtaagggtataaaagtatatatttaactaaacaaaatcgagttccaagtgcactcgggttttgaatttcttgaccttttctaacttgaacccaacccgatttggaactgggttacacccgaattggcccactaatcttttaaatccaatttttttgggtttttcgggattaggtcagtcaggtttgccaactgggtggattttcgggtgcaaatgttctgccctatcacaaagttatatctcttctcttgtcacccatcaatattgctattaagcactagtggttcttaacaccatctaaaggtagcactagcaatatttcataaaagttattatattaaaatatatgagatttgatacttaaatacactaatagcaatattatatttttgagagtgttaagtaccattgatgtcttttagcatttctctcgagaaatataactgactttttcttggtaggtatgattcattggacataaattcaatttttcaatttacatgacaaaatttacacaaatcaaaatttaataccatacactatttatttaaaattaaaagagattttagattcaattaaccaaaaccacgtagctgtcaatattttcaatcacttcatttcaaaattacagttcttaaatctgaagtttggtagttgaacataaactaatatgtgatccctgcaacactactcgatgaagaaatgattgttgaacttccagttgaaacatcagattcaacttcctcaagcatctgaaataattttgtgtatcaaaaatcatagtaactaactaatcattattcaatgtttgattattacttacctcaatggcttcttgtaaaaccagaaacaattcttgattacactttcttttcgagacaacctcgtcgtcctcgagcaatagctcttcaaataggtccccactgcatagaatcattcatttcacaaactcatgttactaatttctattgccaagactaattgcttcatgacactgacacttccaatgactgaaaaaatacagctcaaccgaaaaccatcagaaaaaatcactctcaactatattaaagtgcaacaaccgaacatataggtctcttttggttttaactttgttatcatgttagaatgcgaaattgtgttttaaaaactaagatgataagaagtacggagtatcatcataaaaataattaacaacgagtggagtaagctatactcttaaatgaaattcgacgtgcaatagattatattttctttcaaaactgccagacataaaaatggaccagtttaaggatcaaagacataaaaatggaccagtttaaggatcaaagacataaaaattgaattatttatacctataaagtttctgtgtaaaggtactctgaagtttcctttttgtatggttcacctaaaagcacatcaatcaataatcaagccacaaaacaaagaaaggttaagataccaaacatgagagagagagagaga

SEQ ID NO: 218572 - DNA, 7114 bp, Cannabis indica
ttaataataatctgatctaaaagtattatgacaaaactgtttacattttctgtatctgttcgtgttaggaattgtcttcaagttagttacatttactttttcttatggctaattatgatttttgccccctgaactttgacatgtaccaaatattacccctgaacttttaaggtcgttaaaaatgccccctgaactattgagattgttggatttaaagacttttgtctaatttcattcaattttactattttagtgattgtttatgtactaaatcatgctccccagacttttttatatctaccaaatcatacctatcgaactttgacatgtattattatacccgctgaattttcatccatgttagacttttttactaaaattggaaaaaagttcttaaatccaacaataaggggcatttgtaacgaccttaaaattagccttttcttatttgaaaaaaagttgaagggaaataagaaacgacttgtcgtttatgaattgattgctgatgagtccaattggattatcttttagtattctctcttttacacaaaacaataaactgaggtcgttacttagaactagaagagaccctttaaactttcaccggagaaaatggcggccgccgctagaataaactgctcctcccttcacaacactcttgcctttctcaatcctttacactattccctcaattctaaagctaaccatctccgaaccgtcctccacttccgccggaatattccctcgtcgttctcacaccgagcagtgttttgctccagcgccgccagtaatagtactcctctagaacccaatgaagtcgtatcggaccctttcgtcctcaccactccgctttattacgtcaatgcccctccccacatgggcagcgcctacaccaccatcgccgctgatgccattgcccgatttcaggtacttagcttttttatatatcaaacaatatcattgaaaagggtaagcagaataaggttttacggtcaaatttcgaattttgaagtgattttcttttattttcttccctattatttagaggctgttggggaagaaagttatatttgtgaccggtacggacgagcatggcgagaagattgccgccgcagctgccgccgctggttccagtccgaaggaacattgcgacgtcgtttcccaagcttacaagaaactatgggaagatgtaatgtgtggagctgattattcgattttactctatgaagcttatttcgttgattactcacattgtatatctttattgtacatttgtttggctgactactcaattgggtattttgttttgttgagtactcaaattgatgtcattcctttctttttctttttcacagttagacatagcttatgacaagttcatacggacaactgatcccaagcatgaatatatagtgaaggagttctactcaagagttcttgccaatggtgacatttaccgtgcagactatgaggggctctattgtatcaactgtgaagagtataaggtgattttgttttttattttaattttaatatcacaaatatagatttagggggcttatgtagtgctgctccagatttcgcattccattctggagtaatatatgacatcatgaatgcaatgttattcctaaattacttcaacacttaccgcagaatggatcgggaccactaattcgaaacctataaatacaactgtttaaaatatatatttgtataatagtacaagatatgaagataatgttgtatgtttgttgccttttctttttcagtttagtctaacatggataggttatgcaatgccttgtgtatgtttttgctttgtgtcatctgcaggatgagaaagaactgcttgagaacaactgttgccctacgcaccttaagccatgtgtagcacgaaaagaggataattacttttttgctttgtcaaagtatcaaaaaaggttggaagaaattttgacatcagatatggtgaagccctcatttcgtctaaatgaggtcagaagttgggagaaaaaaaaatagtgctaatatcagatgattcatttccaaagcaataattttaaaatttctttgattgaaaattcagttgcctgttttctttagtaattatgcattgatgttgctgggaaaatattaatagttgaggctctcaattagtagtagagaatatatgaaaccttcatacttttgttcttcttttttttttggtggaacattcacacttttaagaagcccttttggagtagtagcaaaaggatgatttaattgaactgacatcctttggggagagtttctcaggtctaatacagttaataatacttcacacccctttttatattagacttaaatggcaagtcatcctgcaaaatgaaaggaaaagttatctataaaatcaaaatgaaaggaattttagatggacacagtcttctcagtcatattgcaaaatcattatgtgattttcttattgaaaccactactcacaccccaaatacagtctatattaaaataattatggactttcaatttgttctgtaatttcatttttacttttaacaatttatgttttatcaagggagaacttaaatttcatattttcttttattaaggtacaaacttggataaaaagtggcctgagggacttttccatttcccgagcatcagtggattggggtatccctgttcctaatgacagcaagcaaactatatatgtttggtttgatgctttgctggggtaaaacttcttcttatgtaaatcctaaacatattatgtttaaatttatcagttccctaatagctgtaaattatataaatatatatgtatatatatttccaaaagtattattcataatgtggttgtgtaataaacttctgaaacttttttggcttttattgaggataggttaaagtattatatatttttgaatatgaggtatttgcattcagtaaaatattaatgagtatgtttacaattttaatgaaacagctacatatcagctctttcagaggacacagagaaacctactttgcaaacatctgtatctttgggttggcctgccacactacacttgattggaaaggtgagatatttcttgtcatttccatacttgcaagtccttcaaaattttcatttattttccagaaaaaataatatatatatatgtgtgtatgtatatatattcattcaggatggtactaacatggcattatgtttgctgaaatagttcattatatcttcaattaattatatttttcagttgatgtttatctgtttttagtatgatgctttcctcaggtattcttgtcaagaatttgtctttatgatcttcatcttgggactcttgacatataatttacctgatatttgaatgatagggagcaatttttattttttcctttgagatttattgtgtacattctgagatccaaagtgtcattattaatttattagttattacatttctggtttgtggatggttaattgagagttatatataatatttattgttctatttaatgtatatttgcttttaaattatttgaacaagaggaagacatagtatatatgttgttacacaccagaaattccatagagaagcaaagaagaagaagattttttattgaatcatttaaagaatttcaatcacagaattcctgcagttcgagtcgcttggatcactctctgagtatgaatactcaatttacaatttattcccccctgaaaaaatgaccataaatccctatttatacaataagaaactaagagttccttcttcctttggctaccacatcagctttgactaccacctcaccactaattattaaaacacttattacctccttgattaggctataataggtggtgtaacaataccctcgggtgcactttcaccttgtcctcaaggtgaaatgtttgaaattgagtcaacatggtcttcaaatatttttcagcccgtactacccagctgacggggtttgaaccatcaaggtgggaagctccaatcggtgaaggcataattcccagtagtgatcaaacgaagaaccagtcgtctccactaacggtgccagggaaactcccattttcgactggtgcacgagttttccagatttttcaagagttagagaaattggtggattagagtggggctccttgttcttagttgacccactctgttcagcttgtttctccattattttcccaaacattgctgtaatctcctcatagaactatcacatctcatttctgaccgcttcaatttttgcgtcaacgtaacctctatttccgttgtctcctccgactgttcttggtgatttcttgagttccatggtgtctcccagatgtactgctttgataccactttgttacaccaaaaattccacagagaagcaaagaaaagaagagagaggaagaatttttcttgaatcagttaaagaatttcaatcacagatttccaaaagttcgagtcgctggaatcactctctgagtatcaatactcaatttacaatttattcccctccctgaaaaaattaccacaaatccatatttatacaagaaaactccttgattaggctattataggtggcgtaacaatataccagaagtgatgtttataatatatttttttcccttctttttccatcttcatgtgctttatgttattggtagtggtgtgttgttctcatgtgcagttgttgattcctgtactttcaaaagtagtggcgactaattttatttatcaattttttgtacagaacttactttctacaatagtaattggtaatttgtctacaggatattttacgcttccatgcagtttactggccggctatgctaatgtctgcaggactagaccttcctaagatggtgtttggccatggattcttgacaaaggtacaacttttagtgtgtaacttgtagttttcttgtgaaaataacttagtatctaagtttccctaagagagctattagagttatgtcacagacctagcatttggtttctgggaataaagatgatacgtggtaattgctgcatataatatattctggtatttatggaatttatgattgtaggtgcaaggataattcctttgaagttaaattgaaagtagctgtggaagttaagaagtctcgtcttaaattttgtctcattcatgtgatttcactttatgcagcaaccctttttatttgtaatataggatggtatgaagatggggaagtctttaggaaatacaattgaaccaaatgagttggttagcaaatttggctctgatgcagtgagatactttttcctgagggaggtcgaattcggaagtgatggtgactattcagaggaacgcttcatcaacattgtgaatgcacatcttgctaataccattggtattctataatctggtggatattttggggttgccttaggttataattgttcggatattaaagcagcttactctttgcaggaaatcttcttaatcgtactctagggcttctgaagaagaactgccaatcaaccttggttacggattcaagtactgcagctgaaggaactaagttcaaggatgctgtagaaaaattggtaaaattgaatgaacttatcatgatatgtgtcttccaagtagctaggagtccatgagtcattcgtatcttgtagttgtaggtacatcaacttttactaatcagaaacctctctgaattcagttttactgtattgttcggtgcttggttagtgacataaaaagtatggtaagcagatcattttgcaggtgatagataaccataagccttgtgtcataagattttccattttgaatgtttattcaggttgaaaaagctcgagtaaattatgaaaatctctcactttcatcagcctgtgaggctgtgcttgagatcggtaatgctggaaactcttacatggacgaacgagcaccatggtctcttttcaagcaagggggtgctgctgctgaagatgctgccaaggttttacatatttaccttgtgacttttgttggcctcctggattattagtatgatagtgtcagtttattactaattatttgcttccatttgcggtagaaaacagtattcaataaactagaaagatttatgtctgtgtgcccatgtgcacgtacaggaaaatttatgtcttgatatgaaagctgtttctcatctttaaatgactgaagtgcatcaatgagatatagtgagttaaggttgtcaagcatgtctgtatagaattaataaatgaccaatgtttcaatatatttatgctttttgactttttggagcaggaccttgtgataatattggaaaccatgaggattatagcaattgcattatcacctatctccccgggtttatgctggagaatatatgcacagctcgggttctcgaagaatcagtttgatgctgcaacctgggtctctctctctctctctggatagataagtttgtgtcttctttcctaagatgcagctcctcttttgaactaacaacttagttttgaatgcagagtgagaccaagtggggtggactaaagaagggtcaggtaatgggccaacctaaaccagtgtttgcaaggattgaaaaccttacggaaggagaaaatggggttgaattgcctaagaagggagctaaaagaaaggagaaatcacccaaggctcaacaggcagtagaagcatagaactaatttatttagaaaaaacgatatacatcttggatcatctacttcctcaccaattttgttttatactgtattttctttttcttcatgccctcagtcacatcatttgtaagaataattattctgtatgttagatatttatctttctgttgaataaattctcaaatggagtagcatgccttcagctttgagcaacagattatggtgttgtacaattgtgttgttgtcatctaataaacgaaattgaaatcggtttgatcacaaattattgaaaaaggttaagaagaatcaaaacaagaagggtcaactgataaaactggctcatccaaaagggggtgatgaaatcaagatattcttcataaaagatacggcactctttccagtaataaaagaaaaaaacaaaatctttgaatgaaagcctaatatcgtcagaaccc

SEQ ID NO: 218573 - DNA, 7245 bp, Cannabis indica
agttcaattcaaagaatgtggtcacacattacaaatttgaaagcctgcctggatatcaaccccagttatttaagctaccaaaataactgatagagattattgagtgaagaaatgaatgataaagaataaaaaagtaatcattcaatggaaaataataatgtataaaaattgggatcatatatacaattctaaatgattcaaaagaaagataaaaagaacctggtgtatcaaaattcagtcggagaccccaaaacatcttgtagagtgaaaccctgaattgggcatccgaacccatcgagaaggccctcgaaaagctcatcgtcatccctgaaactcattccatcatccatatcctcatccacttccctaccattcaatattggcgtcttccccttctcgcttcgatcaccatcgtccattaccgccggcatgtgcccctcgaacagagccatgtgaccgaagagcttgtccttccgcgagaaggtggtcccgcacgtgcatcgccaccgaacctctccgcaattcttcatatggcttttcaagtccgccagaactgagaatttcttcttgttgcaacgattacaggagtacatcttcgggcaatggctccgccggaagtgattcttggcacagatagctgatttcagaggccggaacttcttgtgagtcttgtttcggttgcagccgacgtgagggcaggagaatcggaccggacctttccgatccggttcggtgattcgttcagacggtttgctcaaagcctctggagtcttgtactggttaccgtgcgccctcatgtgcatcctcaaattcgcatctctcttaaatcctttcccacagatctcacaaaaatggatatgttcggctaacaattcgactgaatcgagctcaacgacctcgaagtctccgtcaccaccgtcgatttcttcttccttcttcgtttccccctcgaacgactctgctttcacatctacgattggcttggaaacatcggaagcagcggcagcggcgattgggacctgagataaagcaataagcgccgaaccgtcgttgattacctgttgaatggcggagaagatctctgttgagaccatagtcatctgcccaaagctgagagaagcgttggcgttgaccgattccgataagaatcgatgtacagattccattctctcttggaccgagaaaagattcgcaagatggagttgacgattcgaattcacaaacggaacctggtgagtaaaatcgcctgaaaattcgtccggaatatgaatgggttcgccgggaaatgacatgattattcccaagcggttgtaagagaacagtacagtatacgagtgtggttaaaacgactgcgtattgtgtcacgtgtatggatatagaataagagtgagaagttaaccttatcatatagggagagagaagttaatatataaggagactgagataactactaactacactagttaaacctcccatggtgtttcggaagacgaggtctttgtctttacttttaacaaatattttattataaaatgtggtttccaacaaaaacagaggcttgtttttttatttaaataatagtaataacatttttcatggggcagagacagcagggaaaaagagtagtagcttccatggatatgaaatccgagaaagagtacttacttactcaattttgattacttctttaattatttttactgtgaatagtacatatggttgaaagatgagtgttcttgttgtataacaagacatggacagtctaaagatcgaccaacattcatgtatttaccaaaaacaaaacaaacattcgtgtatttaggggctgcgcgcgcggacagttaaattgagcgcgttgaaatttaaatggcaatgacatcatattaaatttaaagcataattacgtaagtgtgttaaaaatatttatcacctaaatatacatattttattttattttatttttttaagcaacttttgacatattctattttaaaatattgtaaagtaagtacctctaaaaattattaaaataatattattcaatatatattaaataatatttttttttaagagtgtctgccgtttgtgtgctcgacggcagttattttgtaccactttctggtttttccttcctgatcatgttcttctcttcaaccgctccacaccatttaagcttccctcactaatcactaaattcccatctgaagcatgaatcctttgactgacaagatgaagggaaagatgatcctcactgatgaggatgactcaattctgattttggatgaagatcaagacaacttaactactggtattaacaatgttctggttgcatgaattcttacaacaaaaacggtttggctttcaacactgcagaaacaaatgaaggatcattggaatgacagatttcagacaaaaattactgaacaacctcttgatctctttgtcttaactttcggatgtgaaggagacaagcaaagggttcttcttagggagccttttcattttcaaaatcatcacatcgtattgtacacaccaagtgctttacaaaatgtctcatccaatgatttcatttactctcctttttgggtacaatgctatagacttcctttccttagcaagtctaaatctttggcaaaagccttggggaacattattggagaatttctagaagtccatgatgattcagtagaagaaggttggggtccttaagatttcgcgtcaaattgaatatcactaagccactgctacggggtcgaaacattaaactccaacaagttagtgataagttttgggtggaattctgttatgaaagatttcctgaatggtgtatggagtgtggtaggcttggtcatccagtccagaaatgtttagtatggatggaaaaaattgacaatggaatagagcctgatctactttacggaccagaattgaaaggggctgcattacctaacaatggttatgacaagtacagaaccgacttctcaaagggaaatgcttggcctctcctaacgcgtttggcacgaaaatctttcactgttgcaattccaaacctttccaatagacaatcacctcatccgtggccactgttaccaggagaatcatctgaccaacaacataatgccaattctgatacaatgccctctggatttgtaccagaaacaaacaacactacacattcggttccactaaagttatgtttgcaccagccttactacatagtcactcttctctttcaactggtttgcaaaccactcatatggcctcttcaatctctgcattacaaagtccaaaaccagccgtggaaattcaagaagttgatgacctctctgaagtttatatgcgcgatattggtattaatcaccatacctttgcaacttatccaccaatcccttccacagttaatactatgtcaagaggtcctggaactcaacatacaccattgaggcaaattatatcaactgatgctgtcataagcacaacaatgcagcaaacaatagacaaggaaaacttctcaccaaatagacaaccaaagagacaaactaagagcacattagtcagaaaatttctcaagcggtgcaggggtatacaacacactgaatccaatccaactttgtcaactggacaggaatcaaaccagaatatttccaactctgtgatagatcaatctggtttttttgacaaatctgtggtggctgggactctgccccgcaatcaaccatgaaaaatcgtcagttggaatgcgcggggtctggggaatccgagcgcgttccgtcatcttcgattgcttgtcaaggagcaattgcctcatgtattatttattatggaaacgaaacaaggtcctaatgtaatttctcgttttagacaagctttaaattttaataatggacttgaagtccctagagtaggtttaggtgggggtttatttttactttggaaagatgatgtgtctgtaactttgttaaattataattttaatctgtttgactactatctcgcctttggcaatgatcatactttccactttactgctttttatggctctcctgaacgaggaaaccgttgtcattcttggttaactttaaagaggctgcgagatgtggcacctcttttaccttggcttgtgattggtgattttaatgagatactttccaacaataataagcaaggtggtgctttacgatgtgaatctcaaatggatgatttccgtgacactttagactattgttatttggctgaactaccttacactagcgatcctttcacttggattaaaagcagatataaagaagataccgttaaggagagattggattggtgcttcgtcaatgataaatggctaacaaatttcgagccgattacaacactccatttggacttctacaggtctaaccactgtgcaatctcagttacggttcagcaaatcaaccaacaacctgataatgtcaagaggaagacacggtttagatttgaaaagatgtggcttaaagaagatgaagcagcagaaatcattgcgcagaactggaacacacattgtacaacaacgagtatggatctttttcttaacaatttgcaagcttgtacaacttctctacaacattggcatgctcacaaatttggaaacatgaagcagaaaatcaccaaaatgcagaaagatattgcagcacttaataattctattacaaggacacaacaaaccatggcagacttaaaaaaatctgaatcaattttggatgatttgccttcacaagaggagctctattggcaacaacgatcaagggtggattggatgcaaattggtgatcaaaatacgaaattctttcatgctcatgccacttcaagaaagcgaaataataccattaaatcacgcacaaactcagcaggaattactcacagttccaagaaggaaatgacaactattatcacttcttattttcaagagctttttactgcttccacaattgatacaagctccctccaacacaccattggcaccattccaacaactgctactgctgccatgaactctcagcttacaaagccatttacaccagaagagacttctcaagctttaaaaacaatgaatccggataaaagtccaggtagtgatggaatgtcagccatgttttatcaacaatattgggagatagttgggccttctgttacggatgtgatactgggagttcttaaccatggatgagatatggatttaatcaatacatccatcataactttaattcctaaaatcacttctccggctggtatgggagactataggccaataagtctttgcaacgttatctacaaactcatctccaaagtgttggtgctcaggtttaaagatgtccttcctttcgtcatctccgaaactcaaagttcattcctttccaaccggctcatcacagataatattttgattgcttttgagttagtccaccatctcaaacataaaacatagggaaggaaaggttactcagctctcaagttagatatgagcaaagcttttgattgtgtcgaatggagatatattgaagcggtgatggtcaagatgggatttgatactcactggattgcacttatcatgaaatgtctctcttcaacaagtttttcattctctctaaatggtgaaattattgggaatgtcactcctagtagaggtcttagacagggagatcccttatctccctatttgttttttatatgtccggaaggcctttctcgcttgctgaatcatgaggaatctttaggcaaccttcaaggctttagactcacacggcaagctccaccagttactcacttgttgtttgtggatgatagcctcttgttctgccatgcttctaactcctcggcattagctattcagcgtgttctacatatctacaaccgtgcatccagtcagctcctcaacacatcaaagtcggtaatgtcgttctcaccaagcacaccaaccattactcaacaattttttcatgctagtttgaacatgcctattagcaaatgtcatgagagatatcttgggctacctgcatattctggtagggataaatctgagttattcagttcaattaaggagcggatttggaagttgctcaacacttggaaggaaaagttgttttcaattggaggaatagaggttcttttgaaggtggtggttcaatctataccaacatatgctatgagctgtttcaaattatcacaaaagttttgtcaccaaattgagtcaatgatggaaaatttttggtggggttataataaaaatggtaacaaaatacattggaaaagttagaatttgttatgcaaatcaaattttgaaggtggaatgggtttccgttctttcgtacattttaatcaggcattattggctaaacaagcatggcgaatcttcgaaatgcctaactcccttctcagccggttactaaaactcagatacttctccaatactacttttttggaatcaaacattggtcattctccttctctgacttggcaaggaatctgttggggtcgagattgttgctcaaaggacttcgatacaaagtggggaatggtatgcatatcaacgctaggtcagcaccatggatacctggccatgttgaccacaaacctatctcttattcgggtcctcccaacctcccagtttcttttttcataacagaaacaagagaatggaacttgactttgttggctgctcacttcaaagagattgatatagaacgaatcctctcaattcctctaagcttctttgcaggtgatgaaagattaatatggcaccacacaacagctggtgcatatacagtttaaagtggtttccattttgctactgaccttgaggatgttaataaggagtctgcatcaacctctcacaaagatttgtggaaactattttggaacctcaaactaccttcgaagataaaaatttttgcgtggcgagtaatacaaaactttcttccggtggctgctgcactttataagaaaaaggtactcacttctgcagcgtgctctttatgttcccaagctcgggaatcaattggccatgccttgttccaatgcaagcatgccaaggcagtttggagacactttaattatcccattgatttcaacaaagctcaaaacatggtgggtggagattatatttttcaccttgcgaccttactcagccagcaagaattggaattggtttttgtcatcatgtgggtcatttggactgaccgaaacaaaattaatcatggtgaatcaaggcgtgatggt

SEQ ID NO: 218574 - DNA, 10018 bp, Cannabis indica
tgttttttttttcctaatttaattgataattgttcattttgctcttatacgttgattatatgtggttttataggggggtcatatggaatgaaattcagcagcccagatgggagtttctctgccgctccgtatcgtgatggatatggacttcacatggtatgtctgttcatataatttggatttcatttgggcttatgccttaactaggatgccattttctaagtaattttggtcagccaatacttttctgaagtgaatcggctggtacacaactcaaaattatagagactacaagaatagtagaatatacaagagcaataacaaaaaaatgtatgaaacttgtgtattgtagctgctatggcagcaatagaattacagtggaatggtaactaggcattcgagaggcctaggctcactctccatgatgcaatttgagaatactcaattccttgcataattcactctctgctaaactcatctatttatattatcctattaccactcaaaaactatcctcaccacaatgactcatctaccctttattactttcttataccatattctattaaactttcttataccatgttctattatctcggggtctaatattaccggccacctgaatttaaccttgtcgtcaaggttaaggacaatagtgccattcgtaatcagctgtcgaactataccaagtggatgaacaaggcaatttgagtgagcctcttgattggttctgcaagctgtgagaggaaaataaagcattcaacaagttgacctcgctcgaaaaaaccagtcaagcaatgtcatttgacctcccttcattaaatgaacaagaacgagttgagtctgaagtaaaacgtctcgtgcatgagcctttgtacttgtcggccaatcttcctgctatatagtgaaaccaagcatttcaccacttgaataaactatacttaccatatagatgcacaattggaactcgaatgcaaaatcaaatagtaaatgttgagtttgtcgcgctctgtcgaaagcccaacgtggtaatagctctaggacaacaccaaagttcaacttcccaatagctaaaggcatcctcagaactgaaagatcaagccgaaacaacttgccaaacttcacttaaagccacaacaaaattgaacattcccaaagcaccattgcgaatacttattcgttgacgactaattgtggaggcacctaaaatgataccctaaaaaattgaaactacacgcgcataaccaacaacatagtagaaaaaggaaatggggatttcactgtcatcttgccaactattgaaataaaagtcaggtgatcctattagaaattcaatttgcacacgagatttcacataaatgttcatccatttatcctataaccatttgactatctctgaacgcattctcatataagttagactttggttttttcaagaatttgttgttgctcataaccattcgccttcctgaacccaacaaacccaaaatatggagaaatgaaaattaaattctatgtgaccttgcatactacgtggattcaacagaggagtttttggattgtccaatctataatcgtgatgctgggccatggagcaaacaaccacaactcaattcgtcctctatattcgtgttgctcataataacttctttttttttaggaacccaacaagtagcgaactttgtgcaatgaaagtgaagtagaaaaacaccagctcgaaaatgagaggtgaacttgccatagtaagcttttgtttgtgttctctctcttgatgaaaaatccacctacaatgtttaggcattttattttaataacaagttgcagaaaacaagttggtctttgtcatcaaccccacaacccttgaacagagaggcacaagagagaaaatccatatggaccatgagtcagaagggcagacccgaatcccatgcatggagatgccgaaaaaatgtggtatatcaagcactatggattttgccttgtgttgcacattggtgaaaacccaaagtgtcgactccagcgatgtgctactaggaagaggcaaattggcaagctgttgatggagtagtttgggttggtgagatgaacccaatgaattggctagaccaagatcccatgtaattgagcccatttcatagagaacaaatggatctattttttgtttttttatatcaccgagcaacattaaggagccttaagatttgagtccaaaatggagcagtgtaatagcaaaaatcaattgagccggatttggaaaaatgctgaataaattgggcttgcgcctaaaagatagggtttaagcaaatgatattatgagtgtgtatctctcaaacccctgcccagaactgtttccttccatggaagacccccttacgcggcaagcttggagtcaatcaaatgtggcttctttatctctggcgatgtcccgagctgttggttcttctctgacgatgtccctagtggttgcttttccttcgacgacgtccctagctgttggttcttcttttgagacgtctcgatcaattctttcttctctagcgacgtcattaaaaggagaaagtaatttgcaactatttttcgccattcacaatagcttgttcttcattatcagaagtcccacattgtttccatatcgggttgaaaaaagcccattggatgcaacgttcttctccttcattgtcactaatgaaactaagctttttgaagccattgatacttttttgtcaagcccttgaacctttcttatgtcctccagccaagtattcacggtgccatcgagttcaagcaacgcttcgttgtcactgtagatgagatcgagcagcaacaaattcccttgaagaacttggtctgtttttctatcattgagtagattgccatagtggattaatgactctgataccaattgatgtgaattggctggtacacaactccaaattatagagattaacaagaacaatagaatatacaagagcagtagcagaaaaatatatgaaacttgtgtattattgttgctatggcagcaatagagttacagtgaaatggttcctaggcattcgagaggcctaggctctccatgatgcaatttgagaaggctcaattctttgcataattcaccctctgcctgaactcacctatttatattatcctattacgactcaaaaaccatccctcaccacaatggctcatctacctttttatttactttcttataccatattcaataatcttggggtctaacattttcccttatattttgtcatttagggtgttgctgacaaaggacctatttatggaccgggttcttcttcatggggagcgcatgagaaatcacgcatgaatcggcgttgagatggttatcggtcaaattgagatgagtcaggaggcgaaaaggtctatggtagtttttcgaattcgatgttaacctgaaagtgccatttataggggttttattgctttttcttttgttatgtaggtggtagagacaatgttttctttatataactatgatgcacatgtttttgatataatttcacataaaaggttatatgttacataaatgaacagtccacataattggttttataaatcttttggtgtcattttcttactctatcctcctctccttggagggtacggttggttgcagaagcaaatacttaatgacttaagaaattgtgttctagtacttgttggtttgggttcttttttccaagtggtcctagtgtggatgctaagtagagtgcagaatacagtggtgcaaaataataccagacatcatgcacagaattcggtctttgttgccgaagttgatgctgtatgttgaagtttaaaatcatggtgtgtttaatgagatacgaatgcattatggtggaagtatataattgagtttacttgaagaaaggtgtttttcttttggaatcagttactgctgggagaatagcattctggaagctctatttcaatggagggttgctacttacgcgtttttttccagattatgaagggttcacgttttaatgaagattaaaaacaatagtgacagttccaatttatagagttataaggactcatttactgtggatttgaattaactgcttttgctttgggacaactgacattttaattacttagttgctatagtatagaattgggatttgttatttgatggcattggtccaactggattagaaatttttgagaatggaagtatatagttcattctggtttataggtaattagtttgattatcaaaatttatagttgttatagaatagtatatatcaagattttttatggcattggtcctattggattaggaagagctcatgttttactggcaggatgtcaagcctttgtattggtagtttttgaatagttgtgataatgttttttaatgcgatgtggagatagttgggtctctcttgatccgtagtatgagagatggaatttttattatataaacaaggtggtgagaagtcttctgaagtatagtggtgtgtaaagaattcattagatttggcttatagtggaaggaggatagttaaagggcgtggaacaaattgtatgtagaatgaaggaggttgcactatcataaaggcatgcaaaggaatgactaaccatattgcctccataatgaatagattgatctgttatgaaacatgggcacttattctacaattgagtcttggttcagcgatctctcagtcaacaaggaattctgactaccaatggcaatcaagttgcttgacctaggggtatctgaagaaagatggtgacatgccacgtgatgaggagccaactgctatgatgaaagaatataggcaagtatcctgtctcatatttcatgggtctggaatcttgcatttcttttcccaattagttgtattatgtttgttttctgtcctaatccttcacactctatttcaacttaatcttaaacatatttcactttggcttgcaagtatttcttgattgttgtcttctttttctacaagacttaatttaaaggtttacttgggagatttcaaactatacaatcttcttcttattagttacattttaaacctccatctgatgcttagtttcttagtgcttgatccttatttctattaggctttggcggttattagtatcatagttttgaccgctgtttgcctttgttatgaattgctagctagctccatgtttttaagcttctacacatctgttgctcatagtgatattcttaaaagtagttatgctgacatagcagctacagcatccttcttaagaatgagatttgtgtttgttttttctgtgcacgtgacttggttgtttagttattttaaccttaataaaaaaggattgattgcttttgcctacaaaatcctaaactcgtagcttttagatacttgtgtgaaggggccaattttagaagaaagagttaggtatttgatgtacccttaccctattactgaaattgcgatcacatggtaaacccaaacaaaggaactgctatcatatcctcattcttctaccctcgtatctctatacttcacagccttcatggcaatggcccacatgccccttttatttactatattctacctatcccagggtctatagttcacataatggtttgggtgccattttgatcccaatctctatattgtagtacatcatattttccatatcgaatggtggtgactggtggcatctaccgagttcacattagtctaaaatttgattcttgagcatggattactcagcattgaccaagatttcgaattacatattataggtgttttgatgttattcatggtggtcttcatcatagcatcacaatttttttaagtgcaaaaacattcgagtgaagggaaagacactttcaatttcctggtaatttcgtctttcctgatagctagtatgtctccctgcccaactctatcagcaattcagcaggtcctttctttttcaatacttaataaagtctcccatagaattgattggtctccaccatatagttggtctttggggtcaattcagtatagctacaacacatattttaataaataagttactatgatttcatcttagctagcatttaatattggatgattattgcacttgtaattctagagctttatcttttaataatactatggttgatgtggataggacaaataagtactttttatgtatgtgtgtacatggattcacatttataggcacagtaggccgaaagttggatcgtggtttggagctcagctaaattttttcccttctaaagattggatttctatttggagttgtagctgactaatttgtctactagaaatctgtaattatagttccagaagtttgatgcttattcatgtttaaccacagtgcttgcatatgttatattcggccttagttgattcaaaggaagtgaatactataattgagtactggtgttgtatttaatatgggttcacttcatcccgttgaatttttcacggcaggttagtttaaggccctctatagaaggtaaaatggaaatggaaatcacataacaatggatgtagttcagcttcgatggtacttaacttcagcttgctcagcaaataatcatcactttgttttatgcaagtgatgagagttggacgatggaggattaaattgcttagagttaccttgtgcgcttttttcttagcagtgaaactagaaaggaaagaggacctgataagattagaatataggtaagagcactcttaatggtttctctactctgagtgctccaagactttatatcttaataactgaagtgctccaatggaaaggaataacatggcctatttcactcatccctccacagatgaatcttgatgtcccttcggagtccatttgaaaggtctgatgggtcagttgggatggagctctctccattagcaaaagaagaggggatttagaaaatatactcttgtcaggattcttagtttttcaaggataggagagtaatgaccatgctcgtttgttgtgcttttatgaatcatcgccacttgatacttctttttaataaatgttatttattttagtattggcagccaaccttttgttcagatttattagcttatgttaccattatttgctttattgatctgtttgtttttgctggaaagaatggtcagttactttgtctctcttttttgttctaattttctgtttattgctgtgctgcagaatacaaagggaaggtaggtacggcctttcttatttatggttccgggagtgcgcgggcgaccttaatatgacttggctatggtgagaattaagtatttgacagccattatgggatcttggtaaaaccatattcaggaagttacatcgctgattatattggtagataatatggttgccgaagttaaatctttcaaaatttcacttataattccaagaaaatatctacagaagaggatggttgccatttgtcattgcctttagttaggaatggccatgagttcatgtcaagcctttgtacgaagaggaaagaaaatactttaggcttatactgttatgctttgtgccgttactcagcatcaaactgatcaaatttattgttatggccagaggagtggtttcatattagcttttgaaactaggcttcccgttggacttggtggctgctgtgatggttttattatggtggtggaaaaagaatgtggggaaattgttgcatagagtgttggatataatttgcctactttgggagtgtttgaattaaagccatttgcctactctttgaaggttctcatcaccccattgtactttgattagtaagaaggaggtttgttagtaaggcattcctctaatcgcaacgccttcttcttctttcagatttagcaattctctcatttttaaaatctctaaactgctcaataatttttatatatatacacacactagtggggatggcacatgctttgcctatgctgccaatttcattctttattttctattattatttccatataagcttggcctgttgcagaatctccaccctttatttttgacaatagaagctatgtttaaaccgaaataacttttcaatgagaagtaatattagtacacgattctttattattctttccttgctagtgttttctagcctgtaaatcgatctggattgacactcagaattatagcaagtcaaaaatagatgtgactatatataatgaaccaagaaaaacttgagcagccaattttccatgtttgttaagttataatgaaccattactaagaatatttgtcaggacaaaaactgaacttttactcgtaacaaaagtacatgctctgtcttcaacaagtaatacaaaataagaaggttcttagacattttgtttggaattaacaatactaaataaggaaaagaagaaagaaatgtaatgtaatgtcactggtagaataaggcatgtctccaaagctctatcgtagtcctcattggacaatgaggaaccaaggcagcttactaactagtaactacaacattgataacgttttctttagcaagtttttctccaaatgatataatgtatatggccaatcttttggaaaattgccaagctttttaaccgttttagccttggctttaataagtacagtttattgatatgattaattatttttaataaataagccattaataatatgaaacgtcatgaatgcataaatattcacttatatttcacatgaaacaatactagttatcttcaatcttgtgtacacttctttaaaactgttaaaattaataaaaaattcaaaagttttgttaaatgcacaacaaaattcaaaggttccgttaattgctcaacaatttcgtcttatagacatttattataagggtataagacacatgatgacaataacaaatgtaggagcacaatttttataacatgcttagagcaatctcaacaacctctaaaaaaaacatataaaatacagttgctgaaaagttcggtaaacatctaaaaacatgaaccacctaaaatttcttatttgttatctcactatttactctattattattttcttaagctctaaaaatatttagttgccgaaaaactcggtaaacaagcgagtttaagagtacaattcttttcgatgtcattgctataattaacattcaatgcttgctgaaaaaaaaaagtaacaattttatattaatataaaaataaaatattatagtgaaagtgaaatagaggtgtggttcgtatcttatgttccgtggtataaaaaatattgtcctatttgagtcgtagtgtttaactacattgacaattgattgatgactattatcttgtcctgctcattatcataactaagaagctcgatatcataaaacttgtctaactctttttgtgataaaacttgtataactctttttgtgattagttttatttcttgttgatcatccctttatataagaagtagatgatcaataaattagataagactgttataattattaattacatttaaataaaatataaaactttacaaaataaccaatcacacaagaacattacaatcactaagatttatacccttgacatgttatccttttcgtacatagaaatgagtccatgtgtcaattaaatacggttacctagatggcaaaagttatctgatagtagttatttttttaaaaaaaaaaatcaaaaattaagcttaaaatattattttgttccattttaaaaaatagtgtctaatttattaaggtttgatcaataaatttgacaaaatacatgatttaaaataatatttatccgagcattgctataaggcaccagtggtgcctagcaccttctcgacatgtcgcgttgcgattggttagcgatactccctaaaagctattatattaaattatatgggactcgatacttagttggaccaatagcgatattgacacataggaggatgctaggcaccactggtgccctttagcatttctcaatttatcctataaataattacacatcctaatgtgaaaattaatgtataa

SEQ ID NO: 218575 - DNA, 4548 bp, Cannabis indica
tgtggaaaatagaaaaaaaaagtaggtgggcacgtgggaaatatggcgagaagtaggtgacgattttttaatggacccttataactgtcacctataagggtccattaaaaatcgtattttattaaaaaacgtcgcctattttgtttactatgattttaaaccatcgggaatactaaatttttctcgacgattttaaatagttacttaatttttttagcgacggcccccggaaaaaatcatttttaggatcgtcgcgaattcttatatttgtagtagtgtatcttgatcaggagaggctgccttaatgatgtgaagtatcttagctaaaagaacatctcttggttggaagagactttctcgatgtggaagcatttgaatcagtaggccatgtctttacagtgagaggttttctcgatgtggaagcatctcgactgaagaccatgtcttgattgggaaaggcttcctcgagtgcctaagcctttgaaaggcttccttaacgacatgaaacatctcagtgatagttagtagtcccgttatacgtaaggcaaaaaaccgggtaagttgtgcaatcctacattacttgggaaaggttaagtgtgatgattctaggactgtgtaagtatgatgctacacagttgaagagagcttaaaatggattaatggatactagctatatcaataaaatacatcttttttttgtggcctatcactagagaactcaaaagttaagggtacttgacttggattaatcttgggatggttgagctcctgagaagttttcctaagaagcgtgctagtgaggaaaaatcatgccaaaagcactcgtgttgggttttaaggccagtcgtcattccaggaagcattcagagtgatgtacccttgtataagagccattgattcggtggattgatactcaattgaggcttgaaacgaggggattaaaaatggtatcaaagtcttgacccaactggaagtgtggtcgataaggacgcaaaaccctataaggggggtgattgcaaaaatcagtagtctcgtgatttgtaaggggaaataaactttgagtaatcttgggatgggtagcctcttgggaagttttcccatgaagcgtgtgagtgaggaaaaagtacgttggaaacactcgtgttggtttgtaagaccagtcgtcatttaaggaggtatccttctaaggatatgctatagaaacttcaaatgacattctaaatgtcattccatctaagttagttctaaaaacatctctagaacattagaatggtaaataaccaagtttaacattttagaatctagggtgcccgacacatgtccttagaaaaaaggaatcaaaacttgggtctcgaataaagacttatatttttgttggctatcctaaaaagactaggggagaaatattttatagacatcaagataagaaagtttttatttcaatgaatgctacttttctcgagaaggaatatatctaaaacttcaaaccctgcagtaagatagtattagaagagatgacatcataattgactcctagaaatgttccatctacatttacttaggtagatgaagatcccacttcctttgttgaaccataaacaaagagaaatatatcaatgtttctctaaatcagaatgtcacagtacctcgtcgtagtgggagggtttcaaggaactcaacttattatgatctagacagtgaaatcaactaagtggttggtgataatagtgatgacaacccactgacctttaaataggcaatgacaaatcttgattggcaattatggttagaagcaatgaaccaagaaatggacgataaagtctaagaagttgtagtggcacgaagtgactttagagctattgggtgcaaatggatctacaaaaagaagagaggagaagatgtaaaagtcaaaacctacaaggctagactagttttaaagggttatacccaaagagaaggtgtggaatacgaatttttttttaatctaattgccatgctcaaatctatatacatattcctatccatagtaattgctctcaattacgagatctggaaaatggacgtcaagacagacttcctcaatggaatgcttgacgagaacaaccagaagtgttcaagctgaaggacaagaagataaagtttacaaactaaataggttcatttatgtacttaaagaagcttccttttgggtattaataggttagtaagcgacctgagaagggatataccttagagacagcaagtgacattccatgttgttctatctaagtcagatcccaagacaacctcagaacgatgcaatgatcttatacttagtgtacactattactagatttagggatgccctgtgaacttaagaaaagctataactgctaactaaagtttgcatgtttaatagctattttgaagtgattaagggtggaccactctatggtcattaagacaagaaagtgtttgtgtcaacaaatactaattctttaagaacatgactaaatctaaaaataaagtagcaaagtataggagatactatttgattcaaacccaaagtgttccatcatcttatactatatatataagatggtcccactgccttatttgttttgacacaactgaagaggatgataccattgatgcttctgaatagaaagtcatggtacctcatcgtagtgggagggtttcaaggaacttgttgacgcgattttttgttaacttaatttaagaaaattattaattcaagaataaattcaagaaaagaagagacaaaaataataaataaataccatatatttttacgtggttttgtagttaaaatctacatactccacgagttcatattatttttgagttttggttatgtttacaattcggcaaagtttctgtaaatcagaattgcctctcccttttctctttgagtgaactcctatttataggaataggatggtggttactcaatcttatcttagtaaaaagttataattgatgaatagttactactcacgtttcatatatataactagatatttagataaatataaagaactgatttatatttaaaatacaaaaaagtagtatttaaagtagtatttgacctggtcagatcatgttaattaagagtaaatgcactactgctgtgtaatacggggtaataccttgttgcatgtgtattacaaggtgactgcaaatatatatatggttgcaaattgtagctataataagagatagtcacacctgttttagaaaatatgcaacaccattgttgccctaatgaaataatggtcaatggtataggataggtgttaggacttaggctcacttcactttctctgaaactaaacttagacgtggtcaaattgatagttgacacacctacacatcactgatattcaataaggataaaatttaaatttaaataaagtaaaagtttccaaaaagaataataataataatggacccactttcccatacaacgtggtctcatcaataccaaataatcttcttcgatcttcctttattttttattgtcaattagtcagaaaaatagggctgctctttcatttctaaataatttctaaccatgcagcaaactctttaatatatgtagtatatatgtggtacaagtatgtaatattgcattaaataaatctaaatacataaactattttaatgtggaataaaacaaattgttaaatattgtatatttctagttatcaattttgataatttcaatctacaaaataaaatgaacaaaaattagtataattttgtatttaggatttgataatcaaattaaaatatgtaaattgggtaacttaaataatatgtgcattaattataatattttttgaattaaattcactttatataaaataatagaaattaaatagatgtagtaattcttataatcttaacattctaatgatgcatgctttgtttttccttccatataatgtatattcactatatatagtggaagataaagttaatatatattggttgttatattatttaataatgtaatatgaagattcaaatgtgataatatatattattatgtaaataatatatattaagtgtttgacattgtttaatgagagacattctagcaccttatcaatgtaagctgcttgtgagagaacaatgatctgttctttcaatttttaataatttgaatttcaagaacataattagcttcacccaagtctattttgaattaggtattaagtcattctttaatgtcagtcattttcttgatattgttaccaatgattaaatgtcatcaacataaaggaatatgaatattaccacttgattattcttgagttagtaaacacaaggttcatctttattttggtgaaagccataggctttgattgtttcatcaaaccttttgttctaagagcgagaagcttacttatttccataactagacccatttaacttgcagactttctcttcttgtcttgaaagtttataaccttctagttgctccgtatatattgtctcgtcaagagtttcttgacatccatttgccaaatttcataatcgaaa

SEQ ID NO: 218576 - DNA, 8797 bp, Cannabis indica
agtatagggagagagagattatgccatgattgagtattctctatttcatcaaggagagcctaggcctctagatttcctaggaccttgctctgtaattctcttttgcaaaaatatcagcttataatacaatactttgtctgttttgtactattattagtagaatttgcatttaataattgttctaggaggtacaagttataccaatcttttttaaaaataaacttagtctcagctagcttaagatagttaaataattctttgtgctgcaaatatatctttgggcgtggctcatttaccacgtaagcaaattattttttaaaaaatgagttgaatgcaactgtaggaggatatttgtaatgactaaaactattttacatgtgttagcttttgatgcttttatgtatttcttgagcagcattttcaacagatatgccaaccacaacactttggcttcttctttgttgagtccaatcaaaggagctatgacgtactatctaaatttgctagaactgccattgtatggatttcgtactatctatgacatgctcattttgtatcttcattgcggtgataagtgaactaaaatatttgctttttctttcaaggttcaattctgaaaaggactctttgcatactagtaaatccattttgtctgagtctcattcagtacaaattggtcagaagtttcccagtattgcacgtcgtaagctactggatcaagctactaatctcccagctgcacctgcacttggtgtttcacctcctggacaaatcattgctcttccattttcacgaagtagtggggcattccctgctataccaaaaggaaagaagaaacgatttcctactcccgcaccactttctttgtcagccactcctccaatagacaatcatttaaatcctcaaggacatcattcaaaacatgcaactgaactccccttgaattcaacaaaccatgatttttcaaataattatgagaccatatggaagtatataattattgctggaagtctcgttttcttatttattgttgcggcagcaatgctctgtatgtggcaaagcaaagcagtgaagaccataggtccttggaaaactgggctgagtggacaactgcaaaaagcatttataacaggtaatctttcttacacaattgagaaaattatttggaggtactagttcttgcttattgggtgatatgtagacgagatttgtgtgctgaatttgttcacaaaatttataaaattggtacattaatgcaggtttatattctaacgttataatatgatcaagattttaatccatataaaaaacgtaatatcaagatttttttaaagcaatctgtatatgtttctatcttaaataaatttatagccaagaaataataatttgtaagatagtagactgaatcattttccttttgtaatttgtgttgagtcttgagcttaatctgttagtaatgctatgtaagatgagtaagatatgtgcagacaaaaattaccaaaaaaatgaccacttatgtaggtaatcacttctaataaatgaaacccatcttaaatttattaaaacaacatacctctgttaaaaatattggatttatttaaggcttgatttctagtttactttccttgatattgattcgtacgattgtgatcatattatttcaggagttccaaagttgaaccgttcagagttagaaacagcatgtgaagatttcagcaatattcttcacactgttgatggtgccactatgtacaaaggaacattgtctagtggggttgagattgctgttgcatcaaccacggtatctagtttcaaagaatggaaaaaatctgctgaactagcttatcgaaaaaaggttcattagctaaagttccaattgtattctataaataaagggctgaatctttcttacttgtttttatttctacgatttcttagtttattttctctaaggtttctgagttaattttttcgatctgtcatagattgatacactttcaagggtgaaccacaaaaactttgtcaatctcattggttactgtgaagaggatgaaccttttgtcaggatgatggtgtttgaatatgctccaaatggatccctgtttgagcatctgcatggtaattttttatttatcagttttagcttcaacaagtttcaggtgttaatttatattttagtcaatattgatcaaatataactaaatattccaaaggcttataacttattggtgtgtttgcagttaaagaagttgaacatcttgactggaatgccaggatgaggattttaatggggactgcttactgtcttcagtatatgcaccatgatcttaatcctccagtagcacatcctaacctctcttcaaatgtcatctttttaacggatgattatgcagctaaggtaagacactaactgtgttatgatttattgcttcagtaaaatacaattatttaaaagcgtacacatttattttacacagattggagaggtgaatttttgggaaaattttaagttaaagaatcacaatgacaatgataaagaaaactcagaattgccaccatctgctgatccagaaacaaatgtctattgttttggaatcttattgctagagatcatttctggaaagcttacctactcagaagaacaaggttcccttgttgattgggtaagtgtcaaatgaacattatattttaatatatcataaaacaatgtaaaaatctttttcaatgagataaaataacaatatggtggttattttacaggcttctcaatacttaaatgacaaaagaagcattagctacatgattgatccgaacctaaattcgttcaagaataatgagttggatgttatttgtgaggtcatccaggattgcatccaacaagattcaagacggagaccaacaatgaaggaagttacttcaaagttaaggacaacgatttctatatcaccagaccaagctaccccaaggctttctccactttggtgggctgaacttgagattttatcagtagaggcaacttaacatctctatatgtgttgtatgtcaagttcctctctatctctttgtatcaaaatggtataggaaatatttttacatgtgctccacctacttaaattgtatttaaatccttttttttcatcgtcaatggtcacttcattattcatattctttcttttttcttcattctctaaggtaaaaataattacgcaatacgattgttatcctaattttacaagtggggtgtggtaactttgcacataacactgtatgtactcataccgcaagtatatatttgtattttggtgttgtttggaatgtaaaattaacactactgggattctttagacatttgaatacgtacttgtgaaacttatattatttgtaggttggtcaaaaatcttatccaaattacttgtacattttttttggttatgttcttctccttcggtgaagaacaataaaaaaataaattaaagtggcttttggtaacacttttatttttaaatttttaaatcacaatttttaaaattaattttaaaaaataaaaatgcattctataaccacttttgtattttaaaaacagaaaataaaagtgtgttatgtaaactttattttcatttgttaattttatttaagttgggttcggttccaaactcgggatcgggattcggggtttgggctaggggttcatttggtttccaaagtctaggttagagtcagagtccaaaatatttattaaaaaaaataaattgtttaaaaaaatttagaaagtgatattttttttttcaaaatttttgacattttgatttttaattcaaaaattgaaaagtaaaaatagttttatagaacatgatttagaaaatattttcatttttttaattctaaaaataaaaaattaactaaaaaagtgttactaaatgcaccctaagtttcttcacttattgatcccgatatcttgtaaggtgcaatatcaaagtctcaaaatgtgactattcaaaatacaaagtcgagcctataactatccccaagggaggcttgcattcaccatgcccttgccccctattgagcctaaaaaaaaaaaatcaaccctctagtgacccccaagttgttgttccaccagcaagcgttaagggtgctcactcacttgcccccactcgccttccacgcatgcctagcgagcctaagggcgctcgcccccctagtgaccctcctagaaaatatgaagggtgctcaaccccttagtaagactgaagggtgcttggcccactaacggggttgtttagacctctaatgagttccagctcttgctacaccaaggagccttaaaagcactcatttttttgctgcaccaaccatttgctcactctctagagagcctcaacggtgccaactaaatgaggcccctggtgaccacaagcacaccaataggcctctgcctaagaaagcatgaccgcaaaagtgaggctcttcttaccttataaagagatgtcactgacgtggcctaacccttaatattcttcaaagtgcctcacaaaggaaaggctcacttcctttattatgagtgtgtattaaagttgttacaagttgttagttagttagatgagttgtccctttttctgttatttttaagttttctgttatttctctttctttctcttgttgagctatatatagctccttctctttgtaatcaactttgtacagaataatacatcttgtttgattcagttactctattcttcttctctctctttctctggttttcattttgtaatatggtattagagccacgattctagtgtgctccgttcttggtgctgtcatcttcaatggctcgtggtggaacttagactagaagtacaactgctaaaagaaatggatctgagaatagtatcaggtcctctgttcttaatgccaatgacagatctcctagagaaaatcctcgaagtccctactacatctatagtggagatcagtctgtggttaatttggttccataaattcttacaggatgtgagaattatagctcttggagacgatcgatgatagttgctcttgcagctacgaacaagattaaattcgttgatggtcgattaccacaacccgaggaagacgatgaagtgtatgatatctggttcggatgcaacaatttagtgttttcatggattcttcatgcgatttctggggaaattgccgatagtgttatgtatctggataatgcaactgatatctagatataattacaagaaagatagtatcaaaagaatgcacctaaggtgttcgaggctaagagatctatgcaagctttgatccaaggttctaattcggtgactacttacttcactaaactgaattcctattgggatctaatccaggaatacaggccacaacctgtttgcagctgtggtgctatgaaagttattcaagagtatgaagatgagaatcgtgctcttgagtttctcattggcttgaatgagtcctacagtggtgcacgatcataaatcttgatgcaagatccctttcctagcatcaataaagcctttgcctcagttattcaggaagggagacaaagaggtattatatccaatactactaaaactgagaaaacatctgcttctacactaaattccggtaactttgctgggagtgttcaaccacacaagcctaaaaccgtgtgtcatcattgtggaattgctggtcacataatggcaaaatgatataggttgcatggttattcccttgggcacatgttgtatggaagatttccaaataggaatgctgcagaaacaggaaaggcacctgctgctaatcagactgatgcacaggaaaatggagatgctgctgtcagtggaaatggtaataatcatgggaatggtaagaacatggagcaagatcttgtagctacttttgctcagtgccaaaagcttatgaacattctgtcttagaaagttggtgagaaacaaaactctgcacaaactagccagccatctatatctcaaattttcgggaaaagttctcctcacttacctttttcttgggtaattgacactggtgccacacaccacatgtgtcataatctatcatttttcagcactactcatgttgataaatgcatttcgtatgtcaatcatcctaatggaaattctgttaaggttgtgtgtcttggtacaatgattatttcctcaaaacttactcttaaaaatgtcttgtatgtgcctgatttcaacataaaactactatttgtcccttccttgcttgaatctggtgactgtatactcacttttcatcctgaccattgtttgatccaggacattttgacgacccagctgattgggatggctaaaagagaagggaaactcttctacttgcaaccacctgataacaataacaatccctttatttttttctcttaaatctgattctcaaatcagtgatgacgcagtgtggcattacagaatgggacatcattcttgtatcaaattacatgccttgaataaagaattaaattttcaaagccaatcttgtcctaatttttattgttctatttgtcattatgctaaacaaataaaacttccttttgtttcaaattataatattgcaaaagcttattttgatattgtgcatattgacatatacttactattcaggggcatagttatttcattactattgtggatgaccactctagattcacttgggttcactttataaaaactaaatttgaggctcaagttgctattcctaatttcattcagcttattcaaacacagtatcaaaagactattaaagtcataagatctgacaatggaaaagagttacaatttggtgagttttttagatccttaggaatagttcatcaacattcttttgtccatagacctcaagaaaattctgttgttgagaggaaacatcaacatttattgaatgttgctcgggctctcttgtttcaatcctatgttcccctatcctattggaatgaatgtgtagctactgctgcatatttaattaatagaacccccactccaaatttgcaaaatgtttccccttttgaaattcttaattccaagccacctaactacaatcatttgaaggcttttggttgtcttgcatatgcatctaccctatccaattcagggactcaattctctcctagagctactccatgtgttttcatagggtatcctagtggtatgaaagcttacaagcttttagatttgcattctaataaaattttctaatcaagggatgttcaatatcatgagactatcttcccattctccaacaatagtggtctttttgttgaatatcaccattttttttgcaccactgttgctgctactaaatctgttattcagcatgacaacatctcttcacctgctgcttctactaaatctaatattcagtatcaaagcacatctccacctgctgctacttcccttggaaaacctgttcacactagtaataaaccttcttatttgcaagactaccactgtttcttgcaaacagaaattcctctatcatgcctgcacaaccccctcttgtcacaccttactctatatctcaagtgctcaattacagtaaattggcaccacactttcgtgctactgttcttgctatttccagacatgttgaacttgagttttatcatcaagctcgaggcattaaattgtgggatgatgccatgaataatgagattgatgctttggaaagaaatcacacttggatagtggtttctcttcctgctgagcatcatgccataggctgtaggtgggtctataaaattaaatataatgcagatggttcagttgaaaggtgcaaggcatggcttgtagctaaaggctacaatcaacaggaaggtattgattatactaatacttttacccctgtcaaaaaattagtaacagtcaagcttgttctagccttggctgctattcatgggtggtttcttcaccaattagatgtgaataatacttttttgcatagagatttacatgaagaggtttacatgtctctcccaccaggcttcactccttaaggttctcttccaccaaatgatgtctacaagctttaaaaatccctctatggttgaaacaagcttcaagacaatgtttccaaaagttttccactgccttgattgctgaaggttttcacccctctcctactgaccactctttattcattagacacactgctgatgccttcattattcttttgatctatgttcacgatgtaatattttctagcaacaacttggctgccttggaggctcttaaagttaagctgaatagtaaattttagcttaagggtcttggcaagttgacgtattttcttggtttggaagtggctagatctcccaaaggcatctttgtttctcgaagaccttatgccttacaattacttgaagaccttggtcacttgggttgtaaacccgtttctactcctatggaagggaacctacaactaagtcaagctaaaaaggacaagttagttgatcctaagctttataggaggatcattggcaagcttcaatacctcaccattacacggccaaatattttcttcactgttaataaactcatccaatatcttgctgttcctaaaaatttccacatgaatgctgctcaacgggctcttcaatacatcaagcattgtcctggtcaaggcatatttttccctgctaattttgttattcatcttcgtgcctacactgatgttgattgggcagcatgtcctgacactcgtcgatccactataggcttttgtatctttcttggtgactctctgatttcttggaaga

SEQ ID NO: 218577 - DNA, 1812 bp, Cannabis indica
taaccttataaacctttttctcataaaattccatcaaaaaatgaatcttttggatcgaatctaatttctccctagtcggagtgttggagatgttatacttaaaaagcattttttaaattgttcggtacctcacctttcgatcctcattcttttgtaatgaacctagctgaattctgaggacgtgatcatcgaatagtcgacgacgtgcttggattactctttcagggccactcaaagatttgtgcaacaagctcatcctcgtctacgaacgagccttcgctttcttctaaatcctctaagggaagatttttgagtgactcttggagtctaatttctaacatcattactacaccgaccaggttgggtgagataaatatgattggtatatttgggagttgaacaaagtttggaggcagttcttactagccacatggacttatattgtctggtccgatgtctagcatacctctccagcagggcgcccgacttcgctcaatagatagtctgtcccgacgaagttagtctttaaacatatgtccaaacctactcttcctaccaggcaaaagctggctcagacaatgcaaaccacccaagcaattttagcttcggatccttatattgggcagctgatggtagcccaagcacaaaatgaaccagaagtacaagaagatttcgatgaggaagttgaagagaaaatggaggaggtcgggctcctaatagcgatggcagctataatactgacttggaacctctatcaccttctggatgacaacttgaagctggggtggactatagcgaggaggaactctcggaggctatgcctattcccaagaaatctaacaggccctagcccttatagcaatcccctccatcgaggctgacagtaaaaaagttgaacaacctttgtgctagtttatttaagtaagcggtaatctttcttccgcttgaagggcaactagctcaccttccttggaggggcctttgcgcatggtttggaccccatgccaaacagggtgccattctttcactccaccattatttccaaagggtggctaactattacaatatatgcgcaatgcatataagcctgaaggggttaaggtactttttgtgttgtatgtctcgtacgcccaacaaggttgggggagccttctactcatgatatcaaatggtactttggtctcaaatctaactcctgcaatcacaactcgaggtacttttacttctccctcttggactttagatggcttatcaacataagaatataacagagattgaaggttatgctcgggagtacttcatagtgaaggatgctgatgtaaacaccattctttctaaactttcatgtcgttcctctacccactagtcaccttggagttgagaagtagaacccgctggatattcaggctttttgaggaggcaagggacatccccaagttagccatgcaggaaaatttccacaaatctacccattggtgtgcaagccattagattggacatctaagaaggtctctcgagcctagacgaactttatccttccattacgagtaaaaaaaagtccaaagaggctaagggaaagtcctttaccgctcgggatgtggaaaataaagaaaaagttgccccaaagaaagctgcacctcttgcccacccaatctaattagctacaaggattgatcagcctgtggtcgaggtggtgtgatctcctttgcatgttgttgagagaaaaggcaaaaaggtggtggaggaagagccgaacaatgagtcttcaaatgacgagcgacccactatcgccatgtgtcagtgacaatagtg

SEQ ID NO: 218578 - DNA, 4833 bp, Cannabis indica
aggcaagaaatcgaatatgaatacatagcaatcttaccataaatggaaaattattttgtcaacagaaaacacttcttttgactaccaagtgagtcttaagcgatccgatttgctttagtgcaagctcgaccaacttaatgggataaaaatgtttaaagtaaatacattattgtccaaattaagaaaataaaatataagattcttataacaagtaccataattatttaattaaaacataagagttgaggaaggaattatcaccatacgatctcgttttggtttggaaaagaaattgatgagacaaacaaacattatattagagcaagcttcatgtattaaattattatttttgttcttttgggtgaaaaacatactatgattagttttattcaaattttagtttgatatttatttaaaaaaatagtttgagatattatgatttgaaaaatattgtttcaaaattaaaacgtgtattttagtatttttttttttgaaattagtattttagatttattttaaatgaaagaaagtaatggaaactttcttagtttttaccaaataaaaaatttccaaaatatcttggttggtaaatatttttgaaaaaacagaaaacgcgtttcattaatatattttatgaaaggaaactaaaaaggtctaattaatgtcctaatctccataaatattttatttttaaaaggcaaaaattagaaagaatgtaatgaatttattaaacaagaaaaaaggaaagcattaataaaaaataaaataaaataaaaataaaacaaccttattattcttttaaatgaaaaaggaaggtaattaatttgaaattgatatttcttctcccaaaaaagctgggtaattagtttcttcaaatatcacgatttattagtatttttaatgaaaattaacagaaaaagaatattaattagtcaaaatattaaataataaattaaattaaataaccaaaaatttcatacttgaggagcaagaagaagagtattcatcagtggcaatttcgtaaatacaaaattgaattcgacactgtgggtacgtttccgagtctcaacgccacgcgtagccacagacgtgaaagaccttttccgtactgttattagaagagcgtacactacacgcgtgactgtacgagtggggagaaaaaatagcttgaagcggcgcaacaaatctgtgagtgggaaggatagcatggtatgcatgacatgggtagataagatggtcatgcaccatggatgtgcataactcatgccagctattcagtaatttattttttattatgggaaaattaattattattttttttataacgttttttataaaattaataattaatttttatttaatgcattaatttttttttgtttttgactgctttgggaatggtgtatttttttttaatgtggcttaaaaacattggcttgagtagtcaagcaaaacagagcacagactaagaaaaaattaaataaatttttaaaaaaaataaataatttttatttatttattgtgtcactgttctgagaaaatcgataaaaacaatttattcatgttttaagagagagaaaatcagagccatagattcctaatctcttttcttcttcattttctcactctctactctctctgatctatctttctatctaatctccttcgttgaaaaaatagagtaaaacccttttgagagtgagagagaagagagaggggtttttgttatcttcatcatactcatgagggtttttgctttttgttaggaaaaataagaagaggggttttcttcttcttctttgttgagattctggtcttgtgttctttcgtggaggaagaaaaaaaggtggttgagtttttggatttatgtcggctgattccgtatttgatttggtagtgattggggctcctttgaagaagctctgtcaagctgttattttttgctgtatgattttgattgggttcttacacagactgttcaaccttgtttcgatgcgtttgagaccaaaaaggtatcatttttataaactcttctaattagggtttttgataatttttacacttcttgaaactgattttgcttttttttttgtacaggacttggtctgcaattgggtgttcttcaatagagtgtttcggagatttttaccaattttcaacgattttcttgttcttaagagggggtctcacttgatctcttgaccctttcaccattttttgtttttttttaatttattatttttatttagagttagaacacctgattttcccttcaaaaaaaaatgccagagcctagaaaccagtcatcaaaatccatgagaaagattcgtgtaatctgttcagatccttacgctacggactcatcttcaagtgaagatgaaggtttcggtagaaaaatttcaaagaaatgcaagagaatcgttaaagagatccatgttcctctttttcctactaaacccactaaaaccctagaatctgaaagctcagttcaagacagcaactatggtggttgtgttgttgttagccaaaccctaagcaaccccaagagaagggtttttgctaaaacctcaaatgggtctagaaaaccttcttcttctccgtacagaggtgttcgccaaaggaaatggggtaaatgggctgctgaaatcagagacccttttaaaggttctcgtctctggttaggaacatacactactcctgaagaagcttccaaggcctatgaagctaagaggctcgagtttgaagccatggcgaatgctaattcgaccccgaaattcaacagttcatcttcttcagcctcagcctctgtttcggcctctgtttcggtctctgtttcggtttctgcctcggctgaggactcagagagtgtgttgtcacacaattcaccagcatcagttcttgaattggagacatcagcctctgattccaagcttgatgaaaccattaatgctaatgtaactgaagaagaaactcctgacttgggtttcatggatgaagttcttgcttcatttccaccattggagcaagacataaactttggaccagagctcgatacccttttcttagatgacattgatgaccttcttaatggcttcaacaacatagatgatattcagctttttggtgttgaagacaaagattcaagtaatctacctaattatgattttgatgatcttgggaaagatgacatttctttctggatggaaggagcactcaatataccttgcctataaacaaaaatgccttgagtagttttttctatttttttttttttgggtttattaagttaaaaagatcttataagttttgtttactgtgttcttgagtagagtgtttatgtgagagtgaggttttttgttttagttgttaatggcggatgttagtagattatgaggaatgagtagtctcaaacattgtgtaattgttcttagaaaaaacaagagtatcacttgggttttcctgtgctataagagccgtccaagggttactcttaacaaaaaaatcttcatcaatgtgttcctcaaatctctttttcattttgtctcgtaattaaatgaagatattacttactacttttaattactagaggttgactaattgttagaatttagaatgaatctcatagtgttctatctctaatgcatctattttacatttggacttgtaaattatcatttattttattaattttcttagtaaaaatctttagggtcatagtcatatgtattgtgtcgtttcaatgaggtttgtttatgaaaataacatgtttctaatttttgattcttcatagagtgagggtagagagtttagttatatagaactgtgtagtgtgtagactgcagaaaagagagtctaaaatggtgaactcttagactttttgtcaaaacaaggcccctatggctatggccatggctatattgtgggaccataaaagctggactctttacttttttgccacgcaaaacacatctttaataagaggtaaaaatgaaacaagttatccatttaattaaaaaaaatatagtggaagtttttctttttcttggtcaagtatatattgcacttttgaaatagatattgggtacattattttttagccaaaaaaaattaaaattgagagttatttttagtagaattattttatatattattttttaatttttaaatttttttcattggagttcggattgttccggtagcttttatataagttgcaatgtaaattttagttgctatttaagttgtttcgttggttgctatataagttactatatgaattttcgtaaacataaaaaaaaaacttcttatttttattattgttacgtttttattaaaatattattatttttttgtatgattcgagctcattgtttattttaactaaaagtgtatttagaaaacatgattagaaatactctaagtagttttaactttcgaaatagataggagtatatgaaatgcttctctcctaattttaactactaaaatatatagaaagtatattgttggaatataaggtgataattactaatttttaatattttgtttgataaaataaataataagctataaaaattagagagtgtaattgaagctcctctaattacagtgtaattattagtataacaaaaatatctaatcgtataattactctaaattacgatcaactctaattacatagtaattttgcaaggtgtactcatcatttttcacttatatttatttattgaggaatgttaccgtcaacctcctgttacaatcttttagtcaacttctacgttgaaaaatacacgtcgaaataattttttcattttttttcacgaatgtgttcat

SEQ ID NO: 218579 - DNA, 6843 bp, Cannabis indica
aattaaatagaaaaattaagcataaaaactcaaaattttctaattttacccattcatgagtaatacccattaagagtgcacccatatatatattcgtttttgttataatatattaatacgtaatactaaaattattatatatttgaaaaaaaaaattaatatgtagtaatatatttttataaatttttattaggtaatttattatatttgactattttgttaattttttttaaaacaggacatttaccaatttaatttttaaatttaaagtccttttacatctcaacctttacataaattgagccaatccaattataatctatcaatcatgtcaaaaattggctatccaagcaagattggatcagatttgatggcatggtatttttaaaaatctaatacttcattggtgggttgcaaagcttgctctaggctaaggtgggttaggcccgcaattagggcccatccatcttatatgtccaaataaaaaaagagaaaattacattcactacgggattttaaaagttatttatttaaatatggcacttttaggtttgaccattttatatggaaattttttattttttaggtatttttatggtatttgatatgccatatatatataaattagattttcgaagaccatatttaatgtttttatttatttttaggcagtttatttgtcactggtgtcggaaaagtcactggagtttgctgtcggcaccaggaaagtcaccggaatagctaccgctgttgagaaattcgccggagttactgtcggcaccggaaaagtcgtcgaaattgacattgtcgccagagaaatcaccaaaaaattaccaagaaactggattcttgataaagaaaccaggttgaagaatccagtttcttgatgaaactccagcgacttttccgacactgacaactactccggcgacttttccagcaccgacagcaaactctgaaaaaatcgtcagaattggctttatcgccaaaaaataccaagaaactggtaaaacacagtttcttggtgatttttccgacgacaaagccaattctaacgactttttcggctccgcagcagctcccgcgacttttctaacacctgcatctactctagcgacttttccggcaccgacagcaaactccggcgactttttggccccagtgacaattccggcgatcactgtagtttcatttgatttattttttatttaaaaaaaatgaaggaaattttaatattttttataataattcaaagttgcatatcccatatatatattaagtttttattttaaatgtcatattttttcttattaagttttcttaccatatgtaaattaattttattttttctatatttatgtaaatacccataaaaacatatattttaaaaataaatatatttttttaataatttttaaaaatatcatttatttttataataaggtccaatttttgttttttctaagcccattttgagtcaagaaaagccttggtgggttgttagatgaaatatgtgaaattcaatgaatccagttccttcattgtacaataatcatctaattatatttatatatgattttaaatatattttttattttactatcattaatattttggaccaacacgtagacatggaaatattaagaattcctaaatcaaataagataccaattatttgatttttttgtgacaacgacttatctctttcattatctctattgtgtctaggttggactttgtgttatattgaaaatattttgaaataattagtattttttattttggacagtaattaacatttttataattgaaatatacatataataaaaattatgtttaaaaaattaaaactggggcgtgggttcctctcttcgctctcccatggcgaagaaacggagaggggtgtcgaagcctgctacttcaaatgttcagacggaaattcagtcgccagagcttccttcgatccatggagactcggttgctccgacggaagttttcctggatccgtgtgaggagttcgatttggaaggtaaggcttcagacgggattgcagaggttgcgagacaaagtcccaaggccgtttgggctgatgaagttgaggagagcgatttccaaacttcagcaaaggagatctggagcatattccatactaaccatgtaaaaactccttcttctcaattggattttactgaaccgatcaagattagggatcaatttgtggctaagttggatttataggaaattgaagttgaatcttctttctggaaatcttctattgtttgtattgtgttgggtgctaatcccccgttcagagtatttgaggggtttatcaaaagaatttgggagaacttggggattgagaagattgttcggatgcattcgggcttcaccttagttagttttagggatgaagcaactagcgacataattctagaaactgtggtaatacattttgacaaaaaacctgttgttcttcgtccttggacggctgatttggacactgctcaaatggtgaaatctgtctctgtttgggtgagattgaatggtttggggctccaatattggggaaagaagaatttgagtgctttattaagcacaataggcaaactaataatggtggataaggtgatgctcgagaggtcgatgataaaatttgctagggtgttagtagatgttgaagtttcggataatcctcctaaatcaatatcctttgtgaatgaaagaaagcaaattataaagcaacaggtggagtatgagtggctgccttcaaaatgcaatacgtgtgctttacttagacatatgattgttaattgcaacaaaggagacccgtgtggtttggaaaaagaaacaataagggcctaatgatttgaaagttgagaaagagactattatgaataacaaggccatggcagatgctaagaatgagtctcaacagattgctgcacgtgaggacagcaatgtagatccttatcctgaaagtgctgaaattgttagagagaataccaaaggtagtacctgagggaaattccagcctgcaagtcaatggaaaccaaccagggaagttagtggaagagcaatggatcaccccaaggaagaagggggccaaacctattcttcttaaaactactgctcaagtcaaaaatggttatgatgtgctagatgatatgggtgacaaaaataacagccttaataatgaatagcagcaacattttggggtggaatgttaggggtctgaataagtttgataaacagtgtgaagtgtttgatatttgtaaagtgaataatgtgggtttttgtgctctttttgaaaccaaaatcactcatgagaaagtccaaaaagtgatgaataagtttcctagttggagctactattctagtaacaatttatcctaccgtcttctccttgtttagctggacagattagttaaggtggagaccattatggattacaagcaattcattcactgtaaagttaaaattgttggtactcagactgagttcttcttaacatgcagtctatgggagcaattctctggttgagagataggacctttgggctaagttgactaacttgggaaaaatgaaggacccttggattatcctcggggactttaatgcgatgttttattacaaagatagaactgggggccgtccggttaaggcaatagagatccaagatgttgaagattggttatgtggttgtgatgtagatgagctgaggagttctggaacttactatacttggtcgaacaaacatgacatgggagtgagaatcttctcaaagcttgacagagttttcactaatgagtcttggctggatatctacccgaacactgctgccacctttaaatgggataccatttcaaaccattgtttctgccttgtcaaattccttaaagctagcaactatggtactagaccttttcggttctgcaattactggagcttaaaaaaagactttaaagtaactgatcttgctgcttggagagatagcaaacaggccactctcatgaacataactcagaagctttttcgtgtcaaacatcctttgaagagatggagcaaaacagagatgagtcctcttatgttatataatgtggctaaagatgtgtataataatgctcaagaggctcttgctactaatcctacttgtgacattctcatgcaggctgagaaagatatgtaccaagagtttgttattgctcggaaacagtacaaaaactatctccaacaacagtcaaaagtcacttggcttaagtttggagatgagaatactagctattttcatgttgttatgaaaaaaaagaagaactgaaaacaaaattgtttccttttggaatgatgacaccattgttgaggagtatcctttagtggttgaacactttcttcaacattttcatagttttatcgggaaaaaaagttcagctactataaggattgatattttcagcttggagaatagtcataagcttaacttggaagaacaaattaagctaattcggcctttcaacaagtctgatatcaagaaggccctcttcagtatcaattccacaaagagtccaggtcctgatggatttggatcaaggttctttaacagtctttgggatagtattggagaggacatcactaaggtagttttggattttttccaaaatggttccatgcccaagggattgaatgagacttccatatctcttattcccaaaaaggaaagcccctagaatgctagtgactatagaccaattgcctgctgtaatactttgtataaatgcatctcgaagatgatatgcaccaggctgtcgaaagttctccctagtttggttcatgataaccaagatgcgttttttcagaatagacttctggctcacaacattctgatttttcaagacatgctcaaaggatacacgaggaagaacatatcggccagatgtttctttaagattgatattagcaaagcttatgacactgtggattggggtttcatagctgatctcttaaagggtttgtgcttccctgccagattcatttcttcgattcttaactgccttcatggagcttttacactcttttattaaacggtagatgccatggctctttcaaaggtgaaaaaggccttcgtctaggagacccaatgtcccgtcttttctatttatcctaaccattggataccttactagattgttgattcagagattcaatatgaaaggattcgagtttccccctctttgtaagtctcttaaactagttaatctttgctttgcggatgatcttattatcttttgtaaaggcaatgagagttcagtggaacatgtctatgaggcctttaaagtttttagtgactcaacgggtctcaaagctaatgatgacaaatctttggcttactttggtggtgtggacaatgagtgtaaagatcacatattgggtttgattcgaatgaaagaggggtctttttcccttaattattgggggttcatcttaggcctaccaaatggcgtgctttagattgtgttgttatttttgacaaaatttacaagaagcttaacagctggtctagtaggaacctctcctttgctggaagagcgcaactgattcactctatccttcttgggattaggaactactggatgagtttgttcattcttcctcaaaaaattattgctgctattgagaaatgttgcacggacttcctttggggtttgaagggcaatagaagcaagtatcatctttcttcctgggagagagtttgccttcctaagaagcaaggtggtcttggctttcatgaagggaagaaatggaatatcaccctaatggccaagtttatttgggccatttcaaaaaagcaagacaatttgtgggttcattgggtgaattctacatacttaaaaggtcaagatttttggcagctccaatttaagaatgatgctagttggtatttcaagaagcttttaagacttagaaatgtcattgacaaggaagaggttctcaaggcagaacaattctataatcagcttgtctcggttcaggaagttgattataatgcaagagttttgcacaagatggtcattccgaagtaccgtttcatttgttggcaataaatgctgtgtattcggctactgtgtacaatatttgggtgaatcgaaactgttgcatctttgatggtaattgtaaaacagtgtattatataagtaaaaactattaagaacactgtcaagtttagagttttaaagttgtgttgatgaaagcaaagacaagcttaaagcttatatttgtaatgtaatataaaatattagatggatctcatccaataaatattgggtcctccaacatattggatgtagtgattatataatattcattggattagatcatttcagttgagcaattaaatttgatttggatcagttggcgaaattcaacatccaatgtataataattagattagttttttttttttttggattagatttggagaatctcatgattttaaaatacttacaaataatttatgatatatttgtcccaacaatatcaaaaataaaatttaaaaggactgagagattcaaaatagctataattttggaaaagtaaattagtaaatgtccccttttaaaaaaaaattaagaaaataattaaatataataaataagttaataaaaattataaaaatacatttattacatatatatatttttttaaaatatatataataatgaaataaattttttttttttattattgcatattattatattataacaaaaacgaataaatatattagatcattaaatatatacaacagtatttaatatatagtaatactaaaaaattaatatactgtagtaa

SEQ ID NO: 218580 - DNA, 1874 bp, Cannabis indica
caaatcaaagtgggtcatatgttaatgtttgttttactcacgtgatcatcccaggcatgttcctggttgtagacgatggctgcaccaagactcctggcggggttgatgccggttccggtgatggggatggtggccaagtgaaccaaaaacacagcgaacccaatgggaagaggagccaagatctgcaacattgaatttgaaatcattagtacaacaaaactctataaccagtcatgataactgtttatctggattatcgttatatatgaggtggttcatgagtttctgtaatggggtaaggtttctactggaaaataatatatttctaagatggatatatataagaaagccattgtaaacaaacgatctctgacataatggaaaaacatatggatcttcataaaaacctcaacaagaaaaacaagcaaaacgcctatattttataagcaggtgaattattagacagtcagtcctaagtcatcttattcttattatatggattaacatatggaaccaatacatttaattgactcattcatcaatatcgtcataaaaacctcaacaacagaaacgaaaaaaaaacgcttatattttacaagcagatgaattaaactgtcctaaagttcatcatattcttatgcagagaaacgtataagaaagaacactctatgtttgtgatgtgtacccacagttgaagagattcatttaatacttacagggacatgagagtctctggcgcttctcttggcatcagtagcagagaaaacagtgtagacaagaacgaaagtacccacaatctcagcaccaaggccatcgcccttggtgtagccagcattgacaacgttggctccaccaccttgaatcttgtactgagaattctcgaaccccttcacaactgcagccccacagattgctcctaggcattgcatcaccatgtagtatatggatcttgttaaggagagctttcttgctaggaaaagcccaaaagtcactgctgggttaatgtgcccacctgatcagaacggatcgacaaggtcagattaataaaggtttatgataagattaataaacaacaatatatataggccaggcatatcatcatcaaccgcagcaaaatgagtaagatctttctaggaaattagccaaacagagccacgaaaagttcccattcattcaaatacataaacaaaattatcttgagctttcgttgttttgctctctctatcatcaactttatttcctccacagaccacaatgcaagataaaatgtttaataagttaaaactcagtaacagatagccagccaagccccaatttcttctcagaaataagaatatcatcacaatgaaaacccaaacaacttattctagtttccatatgagtttatcattttcctctcttcattattttagttaccaaacaacttaaacgataaataaacagtagatcaaacagatcaagcaaatatgaagatcaatatatacctgagattccagcagtacagtagacaagggcaaagatcattccaccgaaagcccaagcaataccctgaatacccacagaagcacacttgtttggagctctagagactcccatgacggtcaaaacagtgatgtacagaaacagaaaggtagccacgaactcagcaatccctgctctccagaaggaccatgacttgagctcaccgggctcgaagagcggcgctggaggtggctccttgtagtccttgtccgtctgagctgaggtcccaatgggttgcctctcggagtacttgttggctcccagcctcacatcttcttctttaccctccattgttagatgctgaagctctctctctctaaaaagcagaaaccctttttttctctctctaaaaa

SEQ ID NO: 218581 - DNA, 6846 bp, Cannabis indica
ctctctctctctctctcatgccgcgtttggaaagcgagaaagttctagaaaattaagcttgaacacaacaaaggtgggagggaaaaagaaagaggagttatccgattggttgctgtgccaaagatttggtttttattttttgggtgaggtttcgacatttgttgctccaacagtgatttcgagtggttttgggggtgaagggaattttatgccattctgattcaattgtcggtatggggatgaaacgcatttggttttgaggcctctgatcgtcagatcatggccttaaagcggtgtctttggatcaaatctttgtggatctttcataccctgaaagctatcctccatattcgttgtttcttctaagctgtacaaagaagaaagaaaaaaacctaattcgagtcgatccggatcgttgtttccggagatggccgctcaaagatcagctgtgcattcttctttacacattgaatctgcgtttagctcacctgcgtcgcgaacggggaatgcagcaaattctattcaagaagtgagtcttgctgatcggggcacgaagcatgtcaggtatgggtcgagagccgctgattcggaaatgttcagtatttcacaaagagagatcattgatgaagattcgaggttgatctatttaaatgatcctgggaagaccaatgaaaggtttgagttttgtacgaattcgattaggacaggaaagtattcaatcctcacatttctacccagaaatttgtttgaacagtttcatagagtcgcatacatatactttcttgtgatagctgtgctcaatcagctaccccaattggccgtttttggccggggagcttctataatgcctttagcatttgttttgctagttactacagttaaggatgcatatgaagattataggcgacatcggtctgatcgaattgagaacaatcggttagctttagttttaattaataatcatttccaaccaaagaaatggaaggatattcaagttggagaaatcatcaaagttctggccaatgaaactatcccttgtgatatggttctgctttcaactagtgatccaagtggggtcgcatatgtgcagacaatcaatttggatggggagtcgaatttgaagactcggtatgcaaaacaagaaacactctcgaagtatccagaggaggagaaggttgaaggggtgattagatgtgagataccgaataggaatatatatgggttccaggcaaatttggaaattgatgggagaaaactttctttaggaccctccaatgttcttcttcgaggttgtgagctcaagaacactggctgggccattggggttgcagtgtatgctggtcgagagacaaaagctatgcttaatagctctggagcttcatgcaagaggagcaggcttgagagccgtatgaactttgagatcatcattctttctttagttcttattgctttgtgtacagttgtctctgtgtgtgctgctgtttggttgaagcgtgagaaggatgtattgaactacttaccgttttacagaaaaaaagatttttcattgggaaaagtgatggggaaagtgagagactataactactatggatggggtttggagataattttcactttcctcatgtctgttattgtcttccagattatgatccccatttctctgtacatttccatggaacttgttcggttggacaggcttattttatgattggggatacacagctgtatgatgaggcctcaaattcaagatttcagtgtagagctttgaacataaatgaagatttagggcaaattaagtatgtgttttcagataaaacgggtacccttacagagaacaaaatggagtttaaatgtgctagcattgggggggtagattacagtggtggaaaagttgtttcagaaagggagcagggttactcagtgcaaggtaaaacattttgtgcttttgaaaattctttccgttaaagcttatagtgatgataatgtttttcatgttgtcattaatttatcattgtcactcatctattttattaaactatttgtaatcatctttacttgttgtcattttttttcctccttaatgtcttgtatcagttgatgggagtattttgaggccaaagatgaaggtgaatgttgacccagagcttcttcaactactaaagagcggaaggaatacaaacaatggaaaacaagtccacgatttttttcttgcattggcagcttgcaacgcaattgttcctcttgttacagatacacctgatcctagagttaagttgatagattaccaaggagagtctcctgatgaacaagcgttggtttatgctgctgcaacctatggttttatgcttgttgaaagaacttcaggccatatagttattgacatccaaggacaaaggcaaaggtaatccaaaatgctgtttattgtggttattctcaattctagatgcttataaatttttatcaaaattgtacctggtcattttactttgtactgtactaatctttcttatgtcaccactataaaatttggcttgtctattttttgtaagataaggtaacttattcaagcactaagtggtatctgcatggcattgagattgtaagaatacaatgatatcatataatacaatcttgcttttataagaaataatattttaggaataagttcttggtcttattatgaagcaatattctaagaattatttttggagataggagtcacaattcaattgtaatgaacgtgagtgatcttgtcacatttttcctatcctatctcagttgttttgcataattcctgacaaaaatttacactaagggattcttgtgatgattctttttattttttcttctactgttacttatgagaattttgaacctttatttccaaatatacagatgttgttacttctttttaatgatcttcttgatcatgggcagtgcaggttcaatgttttgggtttacatgagtttgatagtgatcgtaagagaatgtcagtaatactcgggtgcccagataaaactgtaaaagtttttgtaaaaggtgctgatacaacaatgctaagtgtaattgatgaatcggtcaacacaaacttaatgcatgttacagaagctcatctccttgcttactcttcagtgggtttaagaacacttgttgttggaatgcgtgaactgtctcctttagaatttgaggagtggcactcttcatttgaggcagcaagcacagctttgagcggtcgggctgctgcgctacgcaaggttgctggcaacatagaaaccaatctctgcatattgggtgcctctggaattgaagataaactgcaaagcggggtgcctgaagctatagagtctctgagaacagctgggattaaagtgtgggttttgacaggtgacaagcaagaaactgccatatcgattggatactcttcaaagctcctgactcccatgatgacccaacatgttattaattgtaactcctgggaatcttgtagaacgcgtttacaagaagccacagaaggaatttcgggaaatgctttaacttcagcggccttgattgttgatggaaccagcctttgttatattcttgacagtgatcttgaagaacaggtaatttcttataggcctaggtttttagtaagttttggattccgccttaaactccaatctaacatttttttttatttgataatttcagctcttttggttggcgagtaaatgttcagtggtgctatgttgccgagtagctccactgcaaaaagctggaattgttgatcttgtaaagagtaggactgcggacatgacactggcaattggagatggtaatatctgtactgtaatgtaatgaatgaatatgttatgcttccaaaatattagaagcatgtattggcctattctcttattgaaatttaaaatttttggaaatttctgatttattaacaggtgctaatgatgtgtcaatgatccaaatggctgatgttggagttggcatcagtggccaagagggtcggcaagctgtgatggcatcagattttgcaatggggcaattcaggttcttggttccccttttattggttcatggacattggaattaccaaagaatgggatacgcaattttatacaatttttacaggaatgcggtgtttgtttttgttttattttggtgagtactgccttattgtttatgttataaaataacgtagcactgtatttaataatataaattggttggtataattccttttgtggatgagctcattttaattaactcgcctggtattgttttacatgagttgcattctagtaattagaagagtgttcttattattgtatgcatgatgaatttgatgtaggtatgtactttttacatctttcactttgacgactgcaattactgagtggagcagcgtattgtattctgtactctatacttcactaccaactattgttgttggaattcttgacaaggacctaagcagaaaaacacttctaaagtatcctcagctctatggagctggtcacagaaaagaatgctacaattcaaaattgttttggttaacaatgatggacacattgtggcaaagtttagtagccttctttatacctcttcttgcatactgggaaagcaccctagatgcatccagtataggagatctctggacaattgctgtggtaattttggttaatttacacttggccatggatgttattcggtggacttggattactcatgcagccatttggggatctattgttgcctcctggatatgtgttactgtcatcgatgcttttccttcattagttggttactggtatgtccttcatctaatagtataaaatatcacatttttctttctgcatgatataatccatgtctcttatctgaacttgttgtagttaacctgaggaacaatgaaattataccatttcatttcttctcctctgcaatatcttacctcaatcaaattcaatatcttacctcagtcagatgataaattgttattaatacagtttgtgctaaattgttggtcttagcaaagagttggtttactcagaaggaccatttttttttattgaaaaatgaaaacaattgttcaagcctttgtattttctccttcattctttctttttgatcaaagaattgtctcatagtgtagcatattgctccccctcaattttttggctaatcaaatggtaaacttcatgttaatcatatgcgcgtgagagagtatgctatatcttgataattgtgcaagttcaagctgaattgtagtgtcagcaaagaatagtgattcaagcctcaaaattcaagaattccagcattttaatattaatcaccgcaagttgttaaaagtttttcttactttttcttccttctatgttattaatcaaataagtgagtgctgtttatctggtttgctaatagatttctgtgactcaatctgacaagtcgttctcatttcatattggcagttaatgctatatgcacatatgtttttaaattgtgcttattatcagtaatattagttcttcttataatgatacttaaaaggagcatgtataattcttgtttctataaattaatggtgcaactccaattttatttggcagggcgatctttcacgttgcaaggaccggattgttttggttgtgtttgcttgcgattgttgtagtcgctcttcttcctcggtttgtcgtaaaatttctttaccagtactactgtccttgtgacgttcagattgccagggaagctgagaagtttggcggtccaagagatttaggaggtgtacaaaaagaattggatccaatattggatcatcaacagagatgacaaggtgattttacattttttttcccttaatcaaatccttgttttcctttttcttctcttatagcgctttattctttgggctgctcttgagttctcctcctggttgccaaaatttcattatattgctatccgaaggatagagttcccaatactaggcttgtatttaactttgttgtaattctcataattaatgtaaattagtttaagaaagaaagaaagaaagaaaaaaaagaatagagaagggaatgattttactattgttatatgaaaatgaaagcactcagatgattcagattatgcttcagtgttgctataaaagcactatacatcattgccagtgattttgtaaatgtaagttgaagctggtattcggtcaaaactcacatcttttctagttattagtaagtaacgtgcattctgctgtttggcagttcccatattatgttctttaatcaaaatgagaaataaaaacaaaactgtattattttaggcttggtgatttgtaatgctgctcttgttctatttacatatctttatttatttaatatagaaatgatgatgtagcaagaaatatttttagtggtagacattagttgtcaattgatgaagtggctaagttgattattgtcctaagcttttgatgattactcaatttgttataaacgacaactatctatgttatggtttttggtgctatgttagttaaaattgtaagtgattgatttcccagaaatgtcataacagccatgatcgtttgtcttcatgctagccctgtcgtgctagagtaggtagtcaaagcttttagtgggcagaggtctggtcaagctgttcttgttttcttcttttgtttgttaagaagtggtaagaaaaagaaaagagatataaattaaaaaatgattgtccttgtaaatgatggctgtcaattatacgtaggacaaattatgctgacaccatagttatatctcaaaactatgctacagaggtagtcaaagctttttgtggactgagtttttccaatggga

SEQ ID NO: 218582 - DNA, 12770 bp, Cannabis indica
attttttaatttaaaaaaatattaatttaaaattctaatacatacaatacaaatatatttcaaaattattaaatatatatttcattcttatatataattaatttttttttattctacaaacaatttagaataaatttatgtttttacatacaatttttttcttactatattaatttattattagagatataaaataataataatttattatttttataattaggtatgtgaaaaaaaaaatatttttaataaatattaaataatttaatattaaaaataaccatttcaaaataaccaatctaatctgaatttttgcaaattgtgcaaatcaaatatcaattacttagtgcggattgaatcgaatccaaaatatatcaaatacttagtacggatcgaatatattgtgaacaaagtagtgcaaattaaattagataaacacccttaaactacagtagaagagtctaatcaaattctaaaagctatgtctatgtcatctaaaattctttaaaaacaaattttaaatgatccataactaaaacataccatcatttgagtgtcttttcagaacaaataccttaactactgattgcatttgtttcatttcgaccacaattgagaatattacgaagaaacagtaataaaggttttttttttttttgtttgttttttttttctacaaaaactaaagaagacaacattggtggtattgcggtcatcctaattaccttccacaataacctagtaagtaggtactacagtttgatcatcaacattaggaatacagcttctcactttgagaaaagcaagaagcatgacaaatatcacagattaattaacacacagaccatatcgctaccattaaaaggttagtgattacagacaaacaccattttaaaagcagatgagattggggtcatatcatattatatattatatatcatcatatatcagtggttaccatcttctttaagagtagtcatgtctatcggtagtaagcctgctgataagctggtgccatgccattgccataaccgccataagcgggatagggtcatgggagctcctggatatgatccagccatggacgctgcctcgggtgagtacacataggggtttgttggtgggcgttctgcttccatacatggttggtggtgagtggtatggggcaactggagcagggtaatgagcatgtgaaggagacctcacaaatgttggagcagcagggaatgaagaaacgtatgcagtttgtcaatcggccagccttggctggaggcataggacctccattgttggctcgtgttcgcttgttggcgggaacctggactgtctttctcttctctggcttgcccttctctagctgttcaaggcgcttcttgagactttctggaggaaactcagactcaagtttgtagtcttctatgcacttgatgacagatctgagtgcagactgctctttacggccagctaggtgctgtggaaaattgaagtaaaagtacattggtcagctgaaaatgtaaaccttttccactaattccttcccaattagtgaaatagataaaaaataaagacttgttttttcaataagttatcttcccacgaagtacaagccaatgaagtgaccagattagcagtttcacctttattaacaatagcataaaaagtcaaaacttaaaaccacacacaaaaattgataaacaaattagcaatctttacagtcctaaaaaaacgttcacagaaaaattgtacattaagattcaagctcagaacacaacttctatactatatgagcggcacaaaagacataagttgatacttgcaagaacataacaaaactacatgtcagacgtataaacaggtaactagggggcacgggctcagctttagaatagatgtaacaactacattatggcatgcaatcaagaaagacataccgcagctcggccagtattgctgggatcctctaaaatggaagctgcagccttcttagcatccttaagaaaagctttgagcagaggaacaggaggaaacttgtccacaaggccaacttcgtaagtgaaatgcacagcatcaagttgctgcccttttccaattaattcttcaatcatatctgtaaaaaaaaaaaacacttcaccattacaaacgcaacaagtgtaaacattcaaagcaaagaccgataccttgacatgtatagcttatacaaaacagaacatagtttcttcataattaatacttaaagttcataactccatttccgtgccccaaaaacaaatgacacgaacatcatcagacacccttccaatttatcgtaaatagctctcattagtgaatcactcaattagatttgtttgaggtaaaaatcaacaacccataacctggtgagcacatcaatgatctattcctaaatgggtgataaagaaataagtagaatctacaatgaggaagaccacaacatgggcttaatatcaaaaattctaagagagaactcgaatatacaaagagagagagagaagcagaacgtaccaggcattttatcagagagaccaagagaaactgcaagcttaggcatctgctttctccaggcagacccaaccacaagcttcctgtacaaacccacgtcttccttctttacaattccaaaagtcaccaaatgttgaaggaatgtgtggacatctggggtcttcacgttctctatgccaccgcgctcttctaagctcgccttccatgtctccgcaatcttattggcgcgtgacttcacgcttggcgtcaccagaagcctggattttccgataacagggtcgaccaccaccggaatcagcgactccagcatcagaacacaagcccaacccaaatcgttacctctatcgctcttatccaccctcttgtccaccggaaaaacctccgatatcgtttccagaacgaactttgccggatcaacgcattcagccaaagctagaggcatctgagctctaagagcatccaattccttcttcttaccagtcacgaacctccagagaccttctgcatccattttcagacaaaaacatttcagcctcaaaaggagcccctcgccatcgtcgacctctccatcctcgtccccaggacctctatccatggccatgatcgcagcctccttgctcacctcaaccttacctagtgcgatcttgacactaccctcgatggttacctcacgcttctcgagctcatggagtgactccttggtctcgttgtccagagtctgaattttgcgtttgataacctccgacttcttcaggaggctctgctccaacgaagtgaagtgatcagagagttccttccacagcagagtacaactcgtcatcagagaagtctgcctttggaactcatcaaaactcggcggagttaactcagtcaactcgccaggatcggggatagaccccatatctttagcactgtatcaactcagtaatcagtagcctaaagaagaagaagaagagagtaaaggcagaaactgaaaccctagaattgcagagagaaagagaattggcaaagaaaaaaaaaaggataaagctagaggagcaaagaagaagacactgagatgacgtggacggttgataaggagacacgtggaggcggctgtccgagaaaaagttgcaacaagaggcaactctagaatgcgccgagggtgcgtacaggtaaagtttggtgtatgcggagtgagcacgagagcaggctaaagtgcgcacatggtgtgtagagctactatagagtaatattatttttggtaaattctaaagcgggaaatgatgatgatgattagatgaggtggtgactggtgaggttaagataagagaagggagtgtttgggagaacgtatgaagtagaacagagaagagaattagttcttcactttcccggaaatcgaagttagatcatagaaaaaaaaaataaaaaaaaaaacaaaaaataaaaagcaaaagtggagtgggccaggcccactgaccaccacatgggtagagtcagataaagtaaagacattgagggatgaatatttatctacactgcctattgtctactactacaggctacagctgctaatactgtaccaagcgtgacccaaaaaaattaagaccatgccacgtacacacacatatcgtggtggtaagtttgttcaaaaaaaaatctaaaactagaaataaaaagtatatgttagggagtgtcttggaatctaatcacactgtatttttccttacaattttgtatggtgtttcccaatagggtttgtaggattgatgagataactgttttgagttgggtgtggacccacatagaaaatgccatgggcccacttgaaggcccaatagtttagattcttgacacgtgacgtggacaacccggcccataggattctttggaccactcatggggtcagcaaccgaaatgatttgatgatcctagggaggctaagcaaggattggttttatcatttttttcaattttaaattattttaccaccactcgcgctttcatgggtcccagtcagtactgaactaataatggtgtgcacgtcaaatttattaatatacataatatataatttattttttaaaatggtacaaatccaaacaagatctttccagactacacaacttgtaaagagtaatatgatattatgtaggtgcagccagaaaatgtggaattaggtaacaataatgaaaatgtaaagccatttcaaagaaatcaaaatgtgaaggcaaatttgataatcctccaacaaagaattaaccctttcagaatccattttgcttgtaacccctatgaagtaaaacaaaaccaactttttagattcatccacaaactacacgaataattatttacaaaagagagagagcattgcttaagatacaagataattcgttaaactatgacctttcaaaaaagtagagtaaggtacaaggtaaattaacttttcttccacgaggagatttgaaataaaaatgttatgccaaatgcaaaaacaaaatattgtgatgacataaacctcaagaaaaatcaatctgatccacccaaaagagattagtaacaataataacaaaaaacggcattccaataattataagcaggcatatttaaaatggagctctattggcctcatgacacccctgttggctattaatttacataaaagcttcaatcacctaccaacaagacagtccccacccacatcaaccataaaaagatcggcaccaaatgtgcttaaactaaaagtgtaatgtgaataagttaccacaatacctcaaaagtcaattttgttcaaagtctatttggttatctgtactccctctggctttcaatcacgattttcttcctcgtatcaaagtcaattttgtctagatcactggcagttccaagataggcatagaaaatcctctttttctctcccgttctgtcatcaaatttcataaggtgtggattgttctcatcatccttgcttcctagtgttaaaggttgtagacgggtccaagctccgcgtcctcggttatcctgatcaaaatactgtgccaagcggttggcctccttaaggcctgcttggtcacttgaaaacttgatgagtgttgtacccaaatggccttctctaccatacaaggattttgacttaccaccagtgcatccaaactctgaaaagacaaagaatgccaaaccaaagacatgacttgtcaaaaataaactggaattgtatacaaatattaaaaacagcacaaggactcggtccatgcactatttccaaactgattgcctggattttatttttttcctttagagtatgtgaggacattggtgtggaggctgcctttcccgtacaacagcaagcataattagtttatgatatttaatttaatggagcagtgagtgtcacaactgactgacaacaattgccagtaagatataaaaaaaaggaataagcagaaagcaaacatcaaatgttgttacatacaacaacaaaaaccttagttcttctacctttaattaaatccaatggcaaatacaccattgcagacaagagaccacaatttgacgatataacatagttgaccaaaacccacctaaaactaagtagctttcactaattggcagatttgaattactcacctcacaatcaatcaccaaataataataactataataatcaggctgcaagcccaaatcatgcaagttcagaaagtgatagacacggcgtgaaccaaggaatctagttataagcaatagtctctgttaataaagatcatactagagtgtattgtagcactaattatctaaacaacacagccacattttggatctcaaaaccgccatgttcagataaaaattatggggttcacatcagccatacatttattttttaaaaaaaagtaaggaaaatggaaccaaaaatcagaaaagccaaatctggctacgattagtgtaaggaaccaagatgacaacagcataccaacatcaaggtggctcataactcaaaaagtaatggaataccccacaagattaacaccatcatcaaaaaagtaaggttaaaaaagtgttaagagttaaggggcctcttcatggaaactaaaattggcaatgccttggtcctccatgtttaagaaattcgacaagagacaagacccctacatattccataacagttaatggaataaaaatcctcaattaaatttacatgatctccttaatttgttgatatcttaattaaaaagcagatctgacacgatttgaacaaaaattatcattaattcttctagttgccataaataaaccttcaataaggaaaatcaaccaacaatgtggagaagaacagacagtgtttccctacaaagacaactagaaaaccataagcaataaggtagctccaatgttcttgatagtcaacatactgtagaccattcaactactcccttttccaaagcattgtggaccctgtaggctaaaactagttggctttgtaagctctaaccatttttccagcaaagcatcacttagatgtgaaatgtagtaatgtacaacgatcacaaggaacaaactacaaaagatgagctggcttttaagcatcctcttcttgcctactgcagtgcccaaaatgaagagttatttatcattgctattctcttgcctacttcagcctccaatgtctactacactccttacttttcttggtctcgtaacttttttaccagccccatatcaactaatttcaagaaagtgaaagttgataagaggcacttattaaaatcactacaacagctcctttttactactctactatactgtccgaatatccgacttcacaggacatcaacatctttaaaatactgacaataatgagaaggttctgattttagaatgcttcttaccctcaactacccaagagggtgacactgacaacatagtgagcacatttatcaacacatctcgctacatttaagactggaaaatcttcaaagaattaaaaaaataaacaaaacttcaacctattaacatcaacctcatatactagaccatgggaccctcgactagacttaaaatgcaataatacttgccttcttatagactttctgaagagaaacaattctggtaacagcatgaagagtgacaatacaaataataaaaacttaaagtagcgcattgtacctctaattttgctatccatacttttgtttcccaaaccttccatccgcccttctttgttctttcctgttaatgtattatgaattataaccattggtggccaaataaccagatcatcccggtttgctgctgcttcttcagcagaaagaaattggtacgcttttgagttatcaggaggttttgagtagctccaacccattaaaacacatagagctttgtgcaagcctaaatggtccacacgcaagtcagcattatccgcattgtaagcgtgcatgatgagactatgcatatccggaaaatctttagaagacctgaaatgttgcatacaagggaattgaaaaacatatctataaagaagttttcagacatcatcacaggcctatatgtcaagcttatatgaaatgaaggaaaatggattcaccattataagggtgccttaaagacattatgaaaatgagacatcacaaaccaatgtttactttctcaccaaacaagatagtaaacatcaacttcaatattaaacttttttccagaaaaagaactgaagagcaatggcagtaagtaatcacaagattaacacaaaagtcattgaacaaagtaattttttttttctttttgattgaaacataacttgaacattgaaatttaacttgacctatgcgttattgtgcctcccaattttttcagtgtccccgacaatgaaatttaaaataaacaagttcaatctatcatgaaagtcattgagattggcaaacaatacaaatgtttaaacttttaataaacttggattactagagaatgtactacaaaggccataccacaaagttgtgaaagtcattatttgccaatctcaaccttacttcttaacctctctataatttacacagcaactatgaaggcacattttcccttcaaaataatatttcttgcttctctgaagcaacctgctataagaatcaccaactatagggcaagtaaacaagcagaagttgagtttagctctagagttccaacaagaccaagcaaagtccattgctactttttaagaaatgttgatcagatttacaaacatctagtttctaaaccaccggcgcaagtataatcaatatatatttcaactgcatgcagcagctaaaagttattttatttcaaactctatggctcagaaatgaatctagagaacaaagtttaagcctccacatcagcacacataaaggttatagatcacttctcatgtaaggctataaagctccacaacaacctagtaatcataatcatgtcctcgaaacttctaatatcaagatagccaggggtttgatgagttttaaaaataccaataagcaactacacccattaaaaagggcggtactacacatatataaaggcttggaaactaacaaagaattgatgtcaagctagatctaaagcaaaaggagccatatttattatggcatgatcaggtaattagatcatgaacataaatgatgataatgtgttcatttgcaaagagacttatccgtgaatagtaatataaatctgtccacctaattcaaacagaaaatacaattgcataatattttcctctaattagattgtttgaccacctaagcatttcacataattagagttgcaaacaatctaattaagaaaaaaagatgaaatggaagtggactccaaaaaccaggctggaataaaaaaaaaagaactactagttaccaagaaaaacagattttactgcccagcctctacaggcaatcattatcattgatatactcttctatgagttgaaaactaggtcatgaacatctgagaacatttaaggaaaccattgagattgaccttccatctatttagtaaaaatagaaataggaaatagaactacatacgcaagcaaacacatacttaaagaaacaaatctgggttaggccagctaacccaacctcaatattagtttcttctataacgatcaagctctatatggactatacaatcttaagtgcagagcccaacagcctgtagtgtgatgcaagcttcaggccagttacttatacaaagtagtacaacttggtcaggaaaaggcaatatacacaaactaggagagggcttgaactgatgacgtacgaaagagaataaattttgcattgaaaatcacccaagatatcaacccacacctaaacatgaaaatcacacatccttattcgtcttcaaataaaccaatggatgtatatcgctacataaatgtagaaaatcctctcagcagtctcctttgagctaaattgaaacttcaatttaaggctacaaatagtttttgttgaaagcaaccacaatcaaacgttagtaaacccagtaagcttttgaccaggagcaactaggttttagtttccatcaatacagcaggtccatttaaaataccatacatctataagcagcagcaacaccataaaaatccacaagctcactagaggttaaagaggaatttaagctgccatttaatagagactaaagaaattcaagacctggactactggccatccaaaacaataaccaatgagaaagaattcaattcagaaattgcatagatcttcaaactagcttttcagtcgcaaataaagacaggattagataacttgaaaatagaacttgcaaagaacatccagtaaacaaattaataaggaatcttgtaaactaaaataacaactatgtcattgtcaaggttcatgaaattgattaatggacagcaaacaagccaatgtcaacaggtgaagaagaacccaggaggaacaaaactttcccgtgatctccaataacacagcaaagattgaacagaaataactttacattcacaaatatcacaagattgaacagaaaagaaagccttcttcctgcatatttaccaagctggtatcaatgtaagcaatgcacagctaatccttaaatgcaaccgaaataatacactagggaatggtagaagttcaagtttcaatcaatcacattagaaaaacttagagaacatatcccattataaagacttagtttatgtaaatcaaacagctgatactaattcctaaactaatgggcacttacctagtgacatactcaaaccaaaaccttgaattactttaaagaaataataccattatagtaatcaattcctacgcctatcacaatcacatttacagttttcagcacaactgaccgtgcactgtggttggcaccaaaactaacacataaacaaattcgctcatgcaaatcaaagctgagtttaggaccattatccatcaactcattccaaacttaaggtacggagattatatttaattagcatccacaggagggcacacttaacagccattaaaatctgctaatacttaactaatctatccggctatcaaaatgtacctaaaaatgggactataaacagcatgacataagaaatatcacaacattatcatctactctagcaaatggccaatgagaaagttgagcataaaaatcccacaagtccatgtagcgcagttcctaaaactatcaacaagaggaaacatttcaaatggtagcagctaaaagaagacccaatttcgtcaaacctgccacaagcaatacaatgaagacggctgagctttccattctccaagtagttcttcctctggttagcattttcgttaatcaccttggcaaatcgaagaaacgacttcttcagctcactctggtcaacttcaagatgcttatgcgtcccttgattaccaccactaccagaaccttgcctgaaacctaaattattatcatgaccccgaacatccctcgtatgtttgttagaattcgaatcttcgccattgttgtcggcagatttgttgccgcgatggctaggacccgccgaaaaaccattggaattcccatacggcatgtactgctgctgatgctgccttcgtttagcgaaatcatccataagatccttctctttctctttatccttatcttcctcttccgagtatttcctcttcagtgacccttcaccgggtccaccgcgcccatcaagcccaagcgaattccagtaatcttggttccggttataccctcctccaccgggacttatctgtccgccgtgtgggaaacgccggtccatccctcccatttcataacccggacccggtggaccgaacctccccatagggaactcttgataatcgggagggagagcgaagtaggaccgtacactcccatcagcaagagcgatcgagcgtcgttcaagcatgtgaaaaccgtatgccggcggcggaggtgggccaagcgcggcggggtcggggaacgggaattgatgagatccaggagaagggaccgcaggtgggttgccgggacgagacggaggcgtgtccttcgttgtgggcttaggttgggccgcggtaggagttgggccgggcttgggagacgagtcgattttaggttttgggggtttggaatcggtggctggagatttggtggtggtcgtcgttttgggtttggcattggaattgttgttggtatttgaaggaggaggatcccatcgggacttgcggtggttggcggaggatgcggttgaagcaatagatggcttgtgggaggagcccttgccgtggtttcctccggccatcgttcgtaacaaatttcactgctagggttttcaattatatattttacttacaaatctatataagggaattgaggtagcatctcatcaattttttctcatttttggtggttttttcatttttaagcaggtttttttttattttacgaaaatccaaatggcaacctaaatcaaaatctagtaataattgagcaactcaaaaataatatatgagttaaaaaaaattatcaaaataacctttcaataaaataaaatttgcaaaataactcttttttctttttatattacttttattttatactatgctcttaattcatttaaaaaattgaattagtactaaataaaatcaattaaaacctcatttaaaaaaaaaaaatacactttcttttttttttgagagaaaagatgatcattcaattaaagaaaacatagttgggaatcacaaaaggggatccctcccttaacttaaaatccaaaaaagactcactgt

SEQ ID NO: 218583 - DNA, 5228 bp, Cannabis indica
tgaatctcttggctcgcaccctcgtcaccggccaattgaacttgacttgtatctttagccttagtgttctcatcagataccaactatcgaacctatgggtaattaaatcaacgctattctaaatgaagaaattatattggctatctttaaattgaactaaggttgtacgctcggtcctaaggacggtaggagaccatccataaacacaagaattattacctcggggagccccatctttaacctcggtggcttcccgagtggttatatttttaaagtaatggataagagcaacatagttgcagtcttcttcatcctcgggcactggaacttttttccaagtagggtacttgggggacttatagtcatttgtacactagtccttgctaagaagagcgcatgacttttaattatctgggtgtaataaaaagtcaacaactcgcaaaccatatgaaaggttagtcagaatctcgtgtctattttggatttcaagtggtggaatatgtctccttgcaacagctaaaaatataaaagaaaaaccagatttagtaaagtattaaaatcataaaaaagacaactctaaatcaagattttgggaatgattaatacttacgtaaattctaaatatggtcggtgttaattgggtggaatctagttgtctaaaaagaagtcttccttaaattaatttttgttgagaagcctctctctgatcgtacgataattgatttgagtccccatgtagtaaaagccttatgctccttgctttctcgcaggacaggctttgacggagtaaaagtataaaatttcaaggggtgttggacactccaacttcaagatatggtagagcgacttcaagcaggcaagaatcctataagagtttggggcgagttgaaagggtgaaatcccaaggtagttgcagaattttttgaaataatccctaaaggggagtacagctcctgaagcccctatctttgaggactcgcttgtgctgtaaccttcatcttttaagacacgttcaagggggaaacaattaaattttccaggtgcaactgagtagatgcaacatcctttctcgttcctaatgctacaagatcttagaacatccccaacataagggacaattaatctgaccctagacttgatcagttctgcttcaaatgtagcagtgacagtaggattcaagggcatcttggatttgcgagctttaggagccataagttcaaattccaaggcacctggtgaaaaaacaacagtgactttggtaaaaataatggccttgctaagaaaatatctactaagttaggtgactcaggccgagttacttctcgtagataacgatgtctagcctcaatgacttcttgtaagaatcgcctatagtggttagaaacctcttcctgattggtcctaataagattctttctaattgttttgtcattaattttgactatggactaaggtttatgagtttaaggtttaaaaactatgcttggaattgaggatagtctgtaactaaaggctttgggactgtaattttgagttgaattgagacataataatcacaaaatataatgcccaaattcttagaaaaacagagcacagataaaatctaggacctgcgaatcacgtaaccttaaaatttctagacctagattacttgaaaatatatataaaactcactcaaacaacaaatgatacaaaatgaaaagaagcatatataaagaaatcaaaatggataaaataaaaaggttaataaaaagagaaatcacttattagtttgacgaaagaatttggatctcgaagagcttcttagtgcaagggcttggatcttggcaattttgagattgagatatgaaatcgatcgaagtttgaagaaaataagtgagggacagtgagggcatgcaatttcagaaagaagatgactgaggttttttggagttctaaaagcttcgtgggtgatactgacaaaattgaaagaatcttgaatttcatacccaaaaggtgactactgttcgatcacaatgttgacagatcgaacggatgggaactattggaaagagaaaaatcagaataattaatgtttaaatggtatatctcaaagttttgaactgccaaaagaaaacatgcaatttttaaataagaaaagtacgatcgcacccacaaggcaattaaaaagtcctttatattttaaaaatcactttttaggggacaattgttatacccatatttcgagcagtaatatagtgctaacacatgtaatatagctggaatacgaaccagcttaaattatgcatcaataaatacattcagatgactcatctcgagaaatacagctattagaaatacgcaaactcatcatcctatagataataacaagacacgagtaataaatacctattgatgagccagcgagacgaataagaaagtccatctcaggataaatataatacattacagaattgtttggaaagcgtagataatgagtttgcaactcattgacgtcccacatacacgtgagtatattgaaagatcaaagacaacaacttcagcatgattcatctcgcttctgtcacgctgtaataagtgtctcatgtataccttactcaacattaatagaagaacgcaagaaatattacaacatatacttagacgttggctcacaatgaagtgtctagaaaagtattgttgaatcgcaagaagtatgaagcgtagtgatcggcataacagtctataaataatggcaaagaacaattatttataattatcccatgtgatgtaaatatgaaacatgatgaggaatgtctacgtttcacaaacagatacaagtgataagatcccaataaaataattgtcatcctagacttttataaatatgaatagaacttaaaaaacaaataacatccattttgggaaaagaaagagaactatatctattatgcattatgtaaaataatttattgtattctacatataatttatcaactcagataagaaagactcctgaactataaaaatttaacttttgaaatcatattaaaactttcttgttatttattattattataattattaatttacttaattaattttagaaattatttattgttaaaagatttatttattagttaacgaaaatctatcttaatactcttaaataagattatatttttctataaaacaatagagttatatgtttgaaccaagtaccaacaatttattaagtagccagtaaccacaaggtccacaacacatgttttgtgttgttttttgaaataattgttttttcctggtcaatgaaaaccgaagtgtcagattacatatatgtgaatgtgataatttttggactgtttaggggtataagtctattatatatataatataggctaattaaaataatttttgtccaagtttgacatgtactaagtcatgtcctttaaaaattttagctgttaaaaattttctctgaactattgagattgttagatttaaggacttttgtttaatttcatttaattttactgtatcagtgattgtttatatactaaatcatgctccccaaactttaatatctaccaaattatggccgaaaaaattttgatatgtactaaatcatgccccctgactttcatccatgtgagaatttttttactaaaattagacaaaagtccttaaatttaacaatcttaatagttcaaagagaatttttaacggcaaaaaatgtttagaggatatgatttggtacatgtcaaaattcagaaggaaaaaatcctaattagcctatgatatatatgtggggagattgtgaaactatcaaaatttacttaaaataatcacccatatatattaaagagtattgttattggacagtagtgtccaacatcttctataagaagcgttctacaattatttcgcaatattttaaaaaattattttttttaaaaattatttttttaagttatataggatctagtatttaattacactaataacagtataacaccgagaatagtacgaaacactaataatatcttatagcaatactctatattaaatgaagttttataatatggtaagaaagaggaaaaacaaaaatgttcaactgtacttgtaatcattaaattaattcaaataaaatttcatgccgagactaattaatattcaaacatatattaattattgtttgatttcattaattgatatttataatgaatatttatacatcaaaatttaaatttaaaaaacatcacaatttttttccaaccctagtggttgagctggccccattggatcagattgggtacacaatataatatgaatggtatgtacatgggccatgccataggcatgttaagatatcgaataccatacatacaagtgtggtataatataaaccttatttgtagtgttttggtaagggtttttaaattttatttttttggtaaattaatccttaaattatataaatgttagcaggttggtccccaaattttattttatttttttaataaattagtctcaaaactttattttttagtatgcattgactcatgtattgactcgattgtaaaattctccaaatgacaataggtgttagtatttttgaggggcaccttgtaaaatgataaatagctgtttgtattttcttaaagtaccttaaaatatcaaataatttatccttatgcataatttaagataaaattatttatattttgatatgataaataatattaaaatacttaataataacataggatgagtctacattacactttttaaaaagatatttcgttaaatttcttatctatttacatatctaatatcgtatacattatatagaatcacctataaattttaaaaagtttcgaataatttataatactgaataataagagaaattctataatacacccctttaaaaagatacacagatacatttctatctattttaatatctgaaataattttttagttaaatttttttctcatagtcatgtaaattatagttatttaagacatcttgtaaaattttaagaaattcagaaaagtttcacgccgaaaattacgttcaagcactgtgttacaccggtgactattttattttatacgcgtgtaaaatagactgtttgaacattattttctatattgtaaattattctgaatttcccatatagggtatcttaaataactataacgtacatgaatatgaaaaaaaaaattaaactagaaactttttc

SEQ ID NO: 218584 - DNA, 8616 bp, Cannabis indica
aaagttttttttttcaaaattttgattcttaactaaaaaatattgaaaattgaaaataattttacagaacatgtttttagaaaatgttttaacttttctaattaaagaacagaataatgattaaaaatgtgttacgaaacgcacccttagccattttttttgtaatacgatcttttgagaaataaaaactcatagtagacgtaatttctttcctgtcgtgatacaggaagtgaagtactataaattgttgtgtctctctttatttatttttaacaaatatttcattcttaccaaccttgagagcgggtgtggctaggaaatctctacccagatttttgagtcaatatttttgtgctttcattgagaggcacaactatagaaagttactttcaagatggttgcaaaacgttcctaaagcatcaataggggtgccccaacatctggaaaaacaagtgagggcacgccagttactgaagccagagccaggactactcttacacctcatgttcgaggaggaggtcccaaaaccatctccacaactcatcccccaaggccaccaaatgctcctaatattagaactagagagcaaattccacctggagagccacacatggagctacaagaccctgaggaagtcgatccccaagttgaacaactcattcaaattgtggctgatctacaacaaaagctatgagactctctcgacactcaacacgaagagttttaatactagttcatagagaaatgataaaacatcgatatccaatgagttgatctggaatagtggagagctaggatctctgtacaaattagagaagcctatcgattaggttaaggaactaccccatgcaggagtatttttgagttggtgaaagagactccctgtcgaccaattggtcacgtgagaactagtgctcaagtagaaacccttaatgcacgaaatacaaataccacagggtaatagtacaagcatcaagaaaacactaggtgttgatacctcgtagaaggaagctaccttcgagcaagatctcgaacagacttaaacttttaggcaccaattaatgggcccttcatctgatgtagagtgacctcagaacattgggataaccaacatgactcctccaccaggtcctcctcaatgctcttatgatactaggccctgagaccttgcaaggggaaacagacctaccactcaagacaatggaggtaattgaatgctttactttgaaacttgaggctatgagatgcggcaagtaatgaccaatgagccactttatactcaaaagtactttcgagatgaaatgggtgagttgtgtcgttactttgcctgtggcctcaatggccagtagtatgagtacttctttcgagtacatggagaggatttgaacctgagcaaccaattgacctctcctcatacttgtgatctaggagaagacaactttgaggggagtagtcactacaatgttgttgatgaccactcctagagagcatcccccgagatgatctggagttcatttgagagacatcaccagagtttccttcatgactttgtggttaggtgacaactataagaacaagtcgatcgaagtccatgaccgacttggaagacaaagagacctacgtgacgctctaaataaaaaaaaagttggtggaagaaggagcttatagagaagaccctaactaggtaacaaaatctctaactgggatgcaaaccaccatccatggtatcaacaaggtagaatttgatacctgagggaccttagtgaaagggaccacgacccctaagctattagaattcgaacttgacaaggagcgatgctcaccactctctgaaagaatcaaagctaccaatccctccaaagttcaagaaccattacttgcatcaatgcactgggaagaaagatccactatctcacatctactactttgaagtgcagacaaatcgataaggagtaagagatgatgtcaattatagaatcttccctgccacaatgacaaatctagctcaatggtggtacctcaacctatccattggatcaatcaattcatgaaaagatctagtggatgcatttggcaaccaattcactcctttcagacaacgcaaactcgaacccaatgatttggtagacatcaagaaataggaagatgacccgctcaaggactacctcaaaaggttcttggaggcagccactaagaccaaaagacatggcgaggacgtgagggcaatgtcacttgcaactggactaaaggagatgaatcctctgtggtctgaccttcatctcaaggctgtttacacaatgaatgacttcctccataaagccgatggctttatcaaactagaagatgttgtcacttaagccaagggctcaaaaggtggcaagaagaagtttccagactccccatcctctaacactgaggtccatgataatgggaagaaaagaggttctaacagagggaaaaaagccaacaatggtggtaagtaaggcaactccctaggtggaaagaagcccaaggcttagggcaggcatttacgagagtatgagcctcactttacaacctactccatcctcatggccccaagagaggagatctatatggccacagagtctacagtgttgcattgctaaagtcttcccttcaaagagttaaggaagagagacatcaataaattatgtcgctaccacaacaattattgtcatgacactaatgagtgtaatcacttgagggacaaaatatagtttcttatcagacgaaaacattctactctttagtgatatgtacaacctgaagctctagctgggggcaatgcccctctcagcctgtgccaattgcaggcaggctagagatcgtgattggaggccctcatgtagctggaaatttaaggaaatccctagatatgcaagatccttgcaacatgaaccaggagccaaaatactggaggtgacaaaatgtcctccaaaatctcaacactacaggtgtgatccatcacgtttggagaatcgaactcctatcatatcaactaccctgacaacaatcccttggttgttgaagtgaaaataaaaaatatgatggtggcaagggttatgattaacgaaggatcttcctcgaacatcctattcaagcaaacgctaatcaagatgggtttagcactcaaaaacttggaaccatgcgagtagcttatgtatcgtttcagcgaagttggcattgctccatgtggcaagattagactgccactcactgttgacactgccttaagaagaccaccatcatggccacgttcatagttgtggatgtgaagtctccgtacaacgtgatgctcagaaggctagccctatacgaccttctagctatctcgttaatatacaacttgtctgtcaagttcccaatgacggctggtatcgattttctccatagaaatcaaggaactgcttgcaagtgctataacactttgttatcactcgccaagaagacctcttgtgtctatggcaccagggagtggagcatgatctctactgcaaaagccagaaaaacaaccatgaccccaagagttcaaactatggaaaagacagagacatcacctaaatctacttaaaggcgtgcctaagatggggatgacattgacccccattttggggaaatcgactcagtagtggtttgaccaaggaactcaaagaacttcccctcaacttcttggacccaaccaaggttgtcaagattggaacaaacttaatggaggtcttaagcgagatgctcatggcttttctgaagagaaatgaagacatttttccttggttacatgaggacatgattgggatcaacccccaggtaatctatcatgccctcaacatagacaaagtaatcatcgaacctatacaatagaaacacaagctccttgacaaagagcattccaaagctctcaaggaagaatttggaagaatacgggagcacaacttcattagggatgctttctactttatttgggtatccaaccctattctaatgcctaagccaaatggtaagtggagaacttgcatcgacttcactcatctaaacaaagcatgccctaaagattgtatccctcaatcacaaattgatcaactagtggatccaacaccgaccatgaactcctcacattcatgccctaataggatgaattgagcacttagtaggtttatctcaaagtgaaccgagaagtgtgtacccttctttaatttacttagaggaagcaataagaggtttgaatggagtaatgaatgcgagcaagccttccaagctctcaaacatcacctagcgaggcctcctatcctatctaaactaatagtcaatgaagaattattcatctatttggctatcactgagcatgcaagccagtgctactctaatacataaggaaggaaaggtaaaacacttagtttactacattagcaaggtatccctccattgagaagctagcctattgcttattcttagcctcaaaaaagttaaggccatatttccaagctcacatagtcaaggtattgactgaccaaccacttaaggaagttttgatgaaaccaaaagaattagggcacctgctcagcttaagatcacttactagcctcgaacattaatcaaagcataggcattagtagacttcattgctgaacgcactggccttgaagaagatgatcccatgatttgtgaagacgaggtccacatacttgagactgcaactcacggggacatgggacctccctacaaactctatctagatggatccttcaatgagcatgattctagtgctagactcatcatagttactctagagggatttgaaaatcacactacattcaagtttgagttcatcgcaacaaacaatgaagcaaagtatgaggcgctcatagtaggactacgattagcacatgtaatcaaagcaaaatcactagagatctatagtgatttgtacatagttgttaattagatgctcatctagtatcaagcctctgggtcaaacatgatagcatacttaagcaaagctaaagatctattagcctaacttaagtactgctccaaccaacatgtactgcatgaacataatacaaataaagatgcactagctaagctagctagtacaatagatttcgatactctcagtgtagttcaaatcgaatacctagccaaacaaagcattaactaagactcggagcctatcctcatgattgacaacagtccatcacagataacaccaattggagaatacttagaataaggtattcttccaactgaccagaacgaagctaagagattgatgagaaaagtagcttgcttcatcatcataaatggcctaatgtgctgaagaggctattgaatgccacttctgatgtgtgtcacaaaagaaaatgccaaactcctcatcgccgaggtacatgagggcttttgtggcaaccgtgctaggcaaaagcctctcaaatagatattgaggcaagggtaattttggccaacaatgacagaagacttgatggactatgctaaaaagtgcaacaagtgccagagattctccaaaatacctagagttgccccaaacaaagtcaagagtattcaaactccttaacaatttgctatttggggaaacaacctcataggttcactacctaaggggaaagatggagttcaatatgcaatagtggcagtagattacttcacaaaataggtcaaaccaaagctcttatccattagcacatcaaagatgttcttgatttcgttgtcaagaacataatttgtcgctttggactccaacagaagatagtgtcagacaatggaacaaagtttgacagtaatatctataatgatttttgcaccagatatggaatcattaagtgttttttagtggtttcctatccacaaaaaatggacaagtggaagcagtcaaccaaaactcttaaggatatgctaaaaaacacttggagcaagccaaagggaattagcctaaagaactgcccgaagcactatgggcttatcgcaccacagaaaaaatagaactggccacactccctttgctctaacctacaggtatgaagttatgatacatgtaaagctcacaccaccatcacatcaaagactaaaatttaaccagtaaaccaaccatcaactgttggccgtgtctttagatggaattgaaaagattagagaaaggtctaagctttgacaggtgatgtattagcaaaaggtcacaaaacactataacaccaaggttaaagatagaaaatttaagcctagagatatggtgttacgacgagtattcctaaacacaaaagatgcatcagcataagtactggggccttattcgaaagggccatatgtcatcactaaagaattagaacctgggacatacaagttagcatgctatgactacaacttgaatctagtaccaataacaaggtactggaacggggtgcatctacgatggtactactaataaaagaagttttctccaaaacagcttgctttacagtgagatttatatcgcattctacaagtgaaccagttgcctcttaaattgatgagatgcgatgaagttgtctcttagtttagaggtccatcgctaaggtgtggctcctatactaaaaagtttaatatggtattagtatagtgaagatcactttaacaaagcttggctgaagaaggaaatctgcaactactactttaactatactttttattttaacttagctcacaattatgtaattgtatttaatttgatgagtaaaaacattgaacaaagctttgttttggtaattctagagagcatcttcattgaaacactactcataacactttataaactttgggacttttgtatcggggaaagttgaccaattaaaagattgtgcttctctgttggatgaccatttgttgtagatggcatcaaagcataagccataatagttacatccgtagcagcttgctctgtgagttgagtcaccttctctcttaagacctttacttgatctctaagttgagcaacaactaaggtctgttcatcaagtgcaagacaagaagactcgtaaacatatgaagtcttcttccaagaagtagctaggctcttcataaagctattttctcaagctttagtatcattagccacttttagaacactagacaactcactatctagagaatcaatgctcacattcaaaatagtcacttgatcttatgtagtaacaacatgctcctctagagcagtgaacttttcagtaagctaaaccactttcttgtgttcattatccatggtgtaagcataaccaacacaagcctcaaagaagaagacaaagttaggtgatggttaataatgtaaaaccaatctaagaggaaacaagaacaatagttaccccaaagatatcactgaagcatatttgggcgatgacatgcggaggtttagagctaaccaacttctatagtgggatattctcagccttggaactaagtaaggcatcacacttggcaagaagctaggagccctgcgtgtgcagctgctccactagatccaagcttgagttcagaacaccattctcagccttatctagagaaatatgaatggaagatccctcatcagcaccagtagttatagacttctccttgctaaattattgggtaggaggaacgacgtaacagttctactcctttttttttaatttcttctttgacgtagcagggataccctaaatatatccttgaccagaggttcaacttcctttggcattcgaatttttctgctttgagttcaaacaagatgccatagcagccaggaagctcctattgtctacaaaaaaagacaagttgttagtagaacagaggaaaataaaagtagcaaaggtcaactacacaacatggagcatcagccacctcttgatttcccatccttctttggagaagttcaagtggaggctacttctccatcttcctagtttaaaaacatatatattctccctaagtactcagggtcatttcaaactaaagtcacatcttctgatattttttgagataagatgatatttgcactttaagcattctcatgatccttcttgagtggcattgtccaagactcatcagggaagcaagtttaaacatatactcattggtaagacattatctgtccaaccttttgaagattttcagtattgaacaaagttctcccatctctctcccatgcttcaatctcaatcagtgtggcatctactctcctcttcatgtcaattagagcagcaggtcttttggaagggccaaccttttgaaatgttatgtctcttgatggaagaactggggtgtagaaatattcatcttggtaaaggctgcaattgcttttgtaatgttttctatgtatggggtgaactggtggaagtgatagaagccttcttcttttcgagttggacttcttttcaagttgtaaagtaagtttatctcatgtggtgttgggataggccaatttctcaggcaataaaagatgaagaaggcggcaagaattatatagtcatttggatttttttagtagggacaaactccaaaaaatccttaagggtgcaaaggcaaataagcacccgcattcatatggaacctcgaccatgttgggttttatgccct

SEQ ID NO: 218585 - DNA, 8335 bp, Cannabis indica
atttaaaagaaaacaaagatggtataataataataaggctcccgaattttgacatgtaccaaattatgttccctgaacttatttgttcgttaaaaattccccatgaattattagatttaaggacttttatctaattttagtaaatttcttaaatctaacaatcttaatagtttagggagaatttttcacggctaaaaaaattcaagaatataatttagtacatgtgaaagttcggaaaaaaaatactaattagcttaatattaataataataataataataataatgataataatttgagggagaagtacggcccaacccaaaaagaattggattatgatgtaatgtaatacgctaatggcgcaatctttaaaaatagagaagaaaggaaacgggaaaccccaagccaagccctatattagttgtgagtagcaacggtggcccagatttggaggagcaacttagctaactcacaagaagaaccgctctttcctctcgccggtcagaaccactatcacggactctcattcatccctcctacatacccacaccactgagatccattcctcttttttcccccaacctttccgaaactactacgattcaccagctttaaggtaagactttctttggttcctaggaaagtgtaacaatggacgaattttgagtctttactcttatttatttatttattttttgttttgtgttcttgataattttctaactgttctatctttagctcagcttccaggttccgcatttaattttcatgaaaatgagagttggaacttgaacaaggtttttggtgctccaagtcttgtgtttctttgtgttatttcctcaaatgtgaaacatttttgtttctacccttttttgacatgttcctgagctagaatttggctctttcttactgtgaatctgcgacgtagtaaaacgcttcaagaatgtgatattgttgttgagtgcatgtttcgagttttgctttttgaaaaccttttttcgattgggtagtggtttatgttctatcttgaagtaattatctgaatgtatgtatgtttgtgtgtctttatttacttaaacaaaacttttgcatagcgatggttttggtatttatgatttttttttcttagaatcccgtgttatggaaatttattttccttgccatgatctcatttgggttattatacgtacagtttcgagtgtgcattattgtatgtattgtgtatctgtttgtattgaattactgagatggagctttctagtaagcctgtctcttagtttatgtttgagttaatttgctttatgtttgattaaattctcattgtttacttcatttccactgtaatccttacgtagttaacaattggtaattattgttgtccattcattgttaattacagaggtacttctttttgtttaattcataaaagtagtgtttctgtatatttgaattagtgtttattctatttgctcttgttcctcttctgcatatctattatgtttcggttatatctgactttagttaatttttggtttggtgtttagtcgtttacacatgctttgttcttaagtcaggtgtgtaattttttgttttttgttatgcaggtttatggatgcacataacatcacagcttcttaagtaggtataatggctttttgatcttcggagtgtcatttttgggagacgtattggtcagttattcattcatgctcttgaagatttcttgtggtcaaaatacatttatatattaatataaggattgagttgatttatgtgagcttttaatcacacaaatttcgtaataacagtaatgccctttgttgtgattagtctgttttgatatattttaaacattattgtagtactacgaccatatatactggttaccgtttagccttttcattatttcaatgtctgatacttttactgcaaatatagaagaacctacagcacaaatgagttgtgaaaccacagaaggtgtgcattctaaagaaattattctagaacaggtgaatgatattgaacccttagagcaattagatcacattgaacctaatattatagaaaatgctcatcaagaacttggcacaccgctgcccagcattcttagtgaacaattgcaaccactttccgaaaatgtgtccaatgattctattcctcacctattggaacatcagcataaacatatgggatcgaacctctcacaaaatgaaacaggagaaaataacagcaatgtgccaaacataatttctgaaaacaggaccttgatttgtgattctgaaggtgtcatcagaaattgtcagacagataaaatttcatgccctcaacaaagtatgtcggggcagaacaaggaatgtgtacttggagatctaagtgcaagtactattagtaggagccctattagtaaacaaccagaacaaccttctgacgatgtggtcgaaagctctcatcttgagcagtttgaaacctcctctaaaagtctaaggaactccagcaaattagggcggaaagttaaaagaacttcaaaatcaagaccgaaaaaatatatgttaagatctttggctagtagtgaccgacttctacgttcaaggactcaagagaaacctaaatgtcttgaaccaagtaatgatctggttaatgctaatgttggtaatggggtggagaagaaaaggaaggagaaaaaaaagaaaggagtgaagagagttatagctgatgaattttcgggaatcaagaaacgtctcagatattttctcaatcgaatacagtacgagcaaagtctgatcgatgcttattctagtgaaggatggaaaggaaacaggtgctttattttttcctgtctagttgctttaatgaagttgggaatttgttgtgcatttggtattttgtatcttgcacagtttgatatttgatttgtgctgtattcttataaaagattatatttgtctttattttcttgcatgccatatgataattattacaaaggaaggtaaaacatgtttgacttattgataccgaataaatatagaccccaaagataattagatattatgtttaatttttatttcaataaggttacagtttggtaggttatcttatttagagcaatcaaagttttagtatatttaaacaattccattaattagttttctagttgatttagaacttgttatttgcctatctattaataggcctacttatttttcagacttgatatgatattataaagtattaaattttcctcactaagattgttcttgttttcttctcttgattttatagtttctgacacattatttcctgatcttattttttcttggttgtacatcacttcttgttttacaagttgttaaagatgaaatttatttttaaattcttcagaagctggtgaaaggtggggtctcaccattttcgctgtctatctcttgcctgtctttcattaatgtcttttttaaaggagttctaagaatgtttatgtaatgtctccttaatgtatataaatagaatgttatatgtattttatgattcttagtttcttcacttattcttctctttggttttattgtatttagtttcctccttttcactagaatgtttatttgattttgtttaagtcctgtgatttgtttgtgactttgcagcctagaaaaactaaaaccagagaaagagcttcagcgagctacatctgaaatatctcgtcgtaaattgaaaataagagatctatttcaacagctcgatgaactatgcgctgaaggagggtttccagaagctttatttgattctgaagggcagattgacagtgaggatgtaggagatctcttgctatacgccattaaaattctaactcctctttactgagtcatttttctttcttttccttttatttggctagagttgagaagacatacttctttgttctgtttctaatgaagaatatttaaagtcttttgcaatatgttgggcagattttctgtgcaaaatgtgggtccaaagacttgtccgctggtaatgatataatactatgtgatggtgcttgtgatcgcgggtttcaccaattctgtttggaacctccattgttgaatgaagacagtaatatccagaccatatctttgagctatctattaattaaaaatttttgttctttgtttgatttctgctgtcttttgcagttccccctgatgacgagggttggctatgccctggatgtgactgcaaagttgattgtgtcgatttgctcaatgactctcttgaaactaatctttcagttgatgacagctgggaggtcgatccaaaaagctccattctccagtcttttcattctattaatttagttgctttttcaaattttaaatgttctcttgacatttttctacttcattctgcagaaagtttttccagaggctgctgcagcagcaagaggaggaaacaatctggaccacaatcctgaattgccttctgatgattctgaggatgatgattatgaccctgatggtctggatatcgacgagaagattgacagagatgaatcgagttctgatgaatcaagttctgatgaatcaagttctgatgaatctgagtatgcatctgcttgtgatgaacttgaggctccacccaataatgagctgtctttgaagctctcttccgatgatgattcagaggacaatgactatgaccccaatgctgtggatactgatgaaaatgttaagcaggaaagctcaagttctcatactacttctgactctgaggatcttactcccacagatgatgataataaggctaaaaggctttcaggaaagtctggtaagcaaagttgtagttctggtggaaaaaagtcatctttaaagggtgagctgttagatattttaaagtcaggtcctggcgaagatggttccccgcctattttagagaaaagacatgtagagaggttggactacaaaaagcttcatgatgtgagtattgtttcactctgcatactgacttcttatattgcattaacatgactctgatgtatgtagatattttctgttatttatgcatgtgctttctgacgaaacttctacttattaagtagaactggagtgaaatgagaatttattacctgcatagttaatggtaggctatcaaatgaaatgttatgattaagggatcagttgctgagtatttctttattttcaaaaataaaattgaaaggagtagattactgatttcatggatttctcattctaaatgtgcccagttttattgaccatgtctagtggaattgacatgaattaaactgttacatacatggtagcggtattctagttaatgaattgatggataatttagactttggaggattgtgactatcatatattgtcattttgtttcttcattaaattggaagaagtacggtcaccaacatgtggaactaaacatacgaagagtctgttgcagtaatgatcattgctaaatttatgagtgaccaaaacagatacacttctcttggttttctgcctgaaactagaatagaaagttatcttgttaatggaattacataatgaacctatgaggagtagggttaagtggtcaagttcatagtttgctcctatgtgtgatttctcttggggagtttcttgctcagcaaagaggagcggtataaatgcatgaatagtgttaatgataccacctcatcccacgttttgtcatatgtcaacagtaaattggtacatgctattcaatctatttatggtgaattttaagtctccgtattaaaacatgaaatcaacatttcactctagatagcactacataaaattaaaaatgcgagatctttagaagtagaaagtataatgtgaatcttggtatatgactacgtgttgagcatttttgtgttacaattgtcattttgctcgtcagtctttcatgtttcagtaattatttcattttgttagtgtttatttaaatcttctatcgactttacttgcttttatttataaaggaggcctatggaaatgttccttccgagtcaagtgatgacgaagattggagtgatagtgctgcaacaaggaaaaggaagaagaaaactactgagcaaggtgctccaatgttatcaagtgatgataaagagtggaatgatagctcaacgagaaaaaggaagaagaaagcaactgaacaagttgctccacagttgccaaatggaaatgcttcagttgagaagagtgaagcaactgggggaaaaaggaagaagaaagcaactggacaagttgctccacagttgccgaatggaaatgcttcaattgagaagagtgaagcaactgggggaaaaaggaagaagaaagcaactggacaagttgctttacagttgccaaatggaaatgcttcaattgagaaaagtgaggcaactggggatgccataaatcataaccttgaaaaccatgagcatataagtaggagaagatcacgcggaaaatctatggttaaagatacaaatgattctcctagtaaattgaaaaaaactatggctaaagatacaaatgattctcctagtaaatcgaaaaaacctataggctaaagatacatatgattctcctagtaaatcgcctataggctctccaaaatctgcttctactggtagtagattaaaatcagcatcatacaagagacttggagatgccgccacacaggtaaaatattaatagttattatcttttacttctataactctggtaaatgtataaattatgttaatggaaatatttttacgtgagtatcaagtgtccgcagaatcttttatttgagcttttattgcttcttcatttcagcaaatggttaaatgctcattatctcagttcttttttcatttctgtgacaatggaccatttctcgaactcaatagtatatttattctgccaatgcaagcctgataatgttattggctttctaatactgcaatagaacatagcctttttcaaggcctcactccttactggtatgaaatggctatctttcagttatgtagttatcaagaacaagagtaaggaagcaacttctatggagagaatgagctttgtttctctcttatttacatttgtaatgctattcagaaccctttgtcattaatatacctgaattgtgggtgagtttatgcagtccatccacactgtccgcatggcttaaattgccagttgcttcactggaagccactattgacagctttttcttgcacgaattcctcctttattggattctattgcatcccttttctttaattcataaagggaaatgtatcattattgttgattcgtttgttcttgcagggcctgtatacatccttcaaggaaaatcagtatccagaccgagctaagaaacaaagtttggctgaagaactaggactcacccctcgacaggtcatactttgattacaagaataacgattacatgctcttctaattcaataagaaacagaatatgaatttgtagtttctttcataatatttctcttaacattttcaggttagcaaatggtttgaaaacatgcgatggagtgtacgacatccattaggtagagaagcagacaaaagtgggagtgcttcaaagagaagcatttcatcacctcaaccagacaagcagctacttgaatccaaacaaaacattggagcttcaaatggggaactacccgtgatagttgttgcattgccagaaacctgcaccaagaatgaaggtgatgacaaagccaaattgctcaccaacgaaagcagctctcaaacttctgcagcccggacgtctggaagaaaaaggagtaggccaaaaatcgagaaaccaaccacgcctgttgtagtggacactaacaaaacaagtggtagtagaacaaggagccgccgcaaatctgctccttgacaaatataaatgctcttcggggatatacattgcaggaaatagggtcaaaaaaatcgattcatgccccatggttcttggttgtaatttttaagggttccccagttgttctcagctgctccctcaaaataaaagtgagtatagatgctgctgggtctggagtgtgcttagattttgtgtaaatgtaggctatgtagcaagctctttaccaagtttcatgtttaagcatttagtcgttatgctcttaattattgcaaatggcggccgcattggacttttgagcattgagtaagacaactattcaatcaagagagattgtactaaatctgtttggtaatcattagttattacttaattttatgtgctttattactattttacaaaaaaaaaaaaaagaaaaaatattagaatatgttttttttatgtactatgatatatgtatactattagatatgtttttagt

SEQ ID NO: 218586 - DNA, 4013 bp, Cannabis indica
tacaaataggaccctgaattgattttttgtcaaaataaaatttaattataatccgatctaaaagtgctgtgacaaaagtgtttacattttttgtatttgttcgtattaaacattgtcttcaagttggttgtattaaaaaaaaattgtcaaaaataagctcagggttctatttttactattttagaaaatacagggtccattttgtcatttaacaaaacacaaggtccaatctgtaacttttgcaaaacacgggatccaaaatggtatttacccatatatatatatataaatatatttatatatatgacaggctaggactgccttgtttcattcgaaattgaggaagttaattgaaaccatttctcaaacaaaaatatttcaatttctcccgtttttaagttgatgtcaacctcaaacttttatataatatgcatatcaaactgtcgaaatgtttattaatatcatggagtgtctcattcataacacatttttttctcactttaatatgtatttgtattaattgatggtctgagaataaatttatattagtttaaatttaaataagtaaatacgtgtttaatggttgtgaagataatatagtaaagtggtgatgttggttgtgtatatagtagagaatggttgagagaattgtatgagagaaaatagttgtatataggcaaatagaagaacaggtagtatgtttagtaggtgacttgatttagtttttaagcttgattacaatttagaactttaatgggagtatttatagttactcactccttacattacactttatagttagaaagaattataactataaataatagttgtgaattatttcttctatatcgatccttcttttactaggaggaattatatcccaacacatctatatgtttttagagttcaacataattagtacattctagacttaatctaatctagaaattacttaagttcttagataattttttctacaaatgcatagaaatttctagactaaattgtgtagaaatatgtaacaatttctaatactcctctttggtacacatttcggtagctttgatcatgtctcgtagcagctcgaatattccttttggtatcgtctttgtgataatatctgctaactgttcttcaatcttgtagtgcttgagttttatttctttgttagcttctgtttctctaataaagtggtacttgatgctatatactttgtcttgctgtgaatacgagattctttgccattgctatagttgatttgctatcgcagtaaatcattatagcttcttcttgtaattctcccatgtcttcgagaattcttttaagccatataccttggcttgtagtcattgctgctgcaatgtactctgcttttgttgatgatattgcgcaatagttgcttgcttctttgatgcccaagaaaatattctcgatccaagtgtgaagacatatcctgacgtacttttcatgttgtctatggatcctacccagtcactatctatgtagccaacaagttttaagtcacttgtaactccgtaccatatttcgtagagtttgtttcttctaagtatttaagaattcacttggttattccatagtgaacttgacttggatcatgcatgaatcttgataaaagactaactgtgtacattatgtctggtcttgtagcagtaagatagagtaagctgccaattagactttaaaattttgattcattagcttttggtgagccatcttctttcttgagagctttgttgttgtctaatagagttgatatatacaatcttgcatccttctattttgaatttcttcaatagtgtctctgtatactttttttgtgagatgaagatcacatcttctttttgagttacttcaatcccaaggaattagtgcattaagcccaagtcagtcatctcaaaattttttatcatgtcttctttaaaattctttatcatcttctcattattgcttgcgtagatgagatcatcaacataaaaagagataattagtgtatcattcataccttgtgtttttatgtatagtgttggctcacttctgctcctcctgaattcttgtttagtgaagtaatggtcgattctattgtaccaggctcgcaaagcttgttaattttaagccatacaaggcctttttcaacttgagaactttatcttcctgtattgtaccatgaatcattgaggttgttctacgtatatttcttcttcgagaaagctattaagaaatgccgatttaacatcgagttaaaaaatcttccatttcttttatgcggctagagttatcaatgcccttattgtgtcgaagcgggcaaccagagcaaatttttcattgtattcgactctgtattgttgtgagtatccttttacaactaatcttgctttatgcttttggatagaaccatctgcatttagctttgtcttatagacccacttgattcctatagtttctttgtcttgtggccgatctctaagctcccaagtctcattcttttcaataatttttatcttttcattcatggcttgtctccatacttcttgttgttgagctgcttcaaaactttctggctccataagtacgttgcatgtctcatagatctcaataaccggtcttattcgccttggtggggatcctatgacttgtgcaggttgattctccatggtagattgaatgggacatcattttgttcatgttcttatcttggcagcaaagaaatattgattatctttcttttaacttcttgtatctcccaattgtatatggcatcctcgtcaaattctacatcttagttgattataagcttgtttatttctaagctatagactcgataaccttttgattgagtactatagcctaagaaaattcctttctcggacttctcgtcaagcttcctctttttttctttttggaatgtgagagtagcatatgcagctgaagactttgagatgctttagtaatggcttacgtccgctccaagcttcgatcgacgtattattctacatgtttttggttggacatctgttgagcaagtatactacagtgcttactccctcttcctaaaatcgttttaggagacctttctttagtagcatggctctactgcctccataacaattttgtttttcctttcagatatgtcatttagttctagtgcatatccagtcgtgagttggtgctccatcccttcatcttcacaaaacttgttgaattcattaaaagtgtattctttgcctctatcatttctagttgtcttgatgtagtgaccgctttgttttttgacacaggatttgaattttttaaaaatatcaaagacttgcgactttcatagcataaaataaactcatgtcattctagtaaagtcatcaatgaagagaatgaagtacctattttggtcatttgatggagcgcattgccccatagacgtttgtatggaccaactccagtggctttttggctctccaagttttgctggatgggaaaggttatcgatgttatttcccaagcatgcatccttcacaaactgtgttgatctccttaatttttgggaggtctcgcatcatattcttttgcttgaggattttagcccatgaaagttgaagtgactgaaccttctatgccaaagccatgattcatctatttgtgcttgcatctccacactacttgtaaatctccattgtatatgaaaatatctgttttctttcattttttagctttgcaatttgaaaagatttatcttgcttacatagattgagtaagaatctccttcaaaatacaaagagtatcctttttcaatcatttggcgtacactatgtaggttttgattgatattaggtaccgagagtacatcaatgatgtatctcttgcttttttagtgtcaatagtaatggtgcctttgccgactgcttccatgaagtcacctttaccaattttgactttagccttggatctttctgttaggttttatgccctaaataaaactctttacaatctgattagttatc

SEQ ID NO: 218587 - DNA, 9215 bp, Cannabis indica
ttacagtatataaaatagtgtttaaacagtctatttcacacatgtataaaataaaagaatcactcatgtaatagactatttgaaccctattttttatgtgtaattttttctggaatttcttaaaattttacaagatatcttaaataactataacatatatgacaatggaaaaaaatagacttaattagaaattattccgaataccgaaatgaataagggtgtataagtacacccctttagaagggtgcattatagattttttcatggtgatgcataatctatttatatacctaataatgaatcaaaataatacttgataatttatagtcatgactattaattactatatatatatatatatatatatatatatatatgtcaacttaataacaagttgtaactctaccatatatcaattttaggttaatatattattatatcattatatgaatatatagagctatctaaataaaatgtcaacgcgataaattaatatcataatgtgaaaaattaaagactaataataataataatattctaggtctctatagtggaatctaatctagaaagagctagaaataatgaataaaaatttctaagccctacatatatatctctacaagtacgtggaataagttttccctaagaagaaatcttcattctagaaacaaaataatagaatttccaacttgctagcccaatcaaacaaaaattattccttataaattatcacttaattacatgtgtactagtcacaaaatatcacctcaacgttttcaaaagagatcaaaagtaattcctatataaacaatcaatatatattgtggtcgttatgaaaaaaattaggatttttactctctcatattacttgaaaaaaaagagtatataataattctcagattatgtagatatggaattatacagtaaaagatacgtaaataaattgatgtgtactatatatatcaacaaggtaaattttgttttttggtagtccattacttaaaaactcttaaacgcacttaatttggagtaatcttaaaataagtgacctcatgtgacgttttcctaaaaatcgtgcaagtgaggaaaaaatatgctacaaacattcgtgttagtttataagattaagtcagttgtcattttagaaaatagctaaaatgatgtactcgtgtataagagtcttaagtccgttagtgtaaagagtccaataaaaagttgaagtagagtcgttcacctaactttttataggtggcgttttataattgattaacaatattctctaaaaactattttttaaattatatataagacttaatatttaattataccaataataatataacactaaaaaaaaatattagacaccaacaaaagtacctttaatttgcaattttctttagataaggtggtataaagcagtaccatatgtatatatattaacattgtaatcaaatcaattaatgtaaatgactacactttaatcttgacttattaaattattgattataatatcatagtatagtgtgcatacatgtaattccacgttggcttagtccaataattaacttcagtccacatcacgtgtacatatatacatataatgtatacgtatataatgtacagggacacaattttgtcctataatgtacttttacggaatatatttcgtgatgtacaacagtctttaatttgagagctaaggttaatctaaaggtgtctttaatttgagagctaagggtaatctaaaggtaattagaattaaaaaataacaacgtatcctgagacctatctaatataccacacaatacattccgataatagtaaatcagacaaaattcaataatatataattgatgaaacacgtatttttatgcatatatagatatagtatatagatatatgcagtgtttttcaatgatgggcatcaaacgtattcacacgccgaaagtcaaaaagcaggacacgcgttggaatatttccacattccaaaaatgaatcgaaacaaaaataatacaaaagcctaactaactactcttcatcaactttttatgtaattttaacaaatttaaacatgtctttaattcacaaaatatatctctctctatatagttttaatgttaccataatttttaaatacttaacccatatgcttatttctaccctaactatctctaattaagaaaatcaaattattaatgtaactaattacgagattattaaaatagaatcagaaaatgattgactagctagctattacacaataatagctagtaattttttcctatcattatttatttatatatttcatataatctatgtatggatatatgttttttttttttttttttcataacaatctctattatagttaccactacaaaaaatgtcacttttactaacacagttcgctattactttggtaaaagtaacttttaccagcatatttcacaaactgcgctgtcaaagaggccaaagttttaccagcatacatttgcagtggctaaaatctaacttttaccaatacatttacgcattgggaaaagtcatttttgccaacgctttttattttataatggcaaaagttttagtaccaacattgatttgccaacacatcacaagtaaattctattataccagcgcaaattttgccagcacaaaaatatgctggcaaaagtgacatttcttgtacaaatatcactataaataaaaattatttttagtgataattttttagttataatatatatacattttgtgaatatatatgaattttagtcacaataaaaaattacttataactaaaatataaaatttaaataaaagttgtcactaatttagttttagtcaaattaagtattgtgattaaaaatacatttaatcacaacaaattagaatttttgtagctaatacttttagtcacgggacttttagtcacgatataagaatgataatttataattagttacaatttttttatttttacatacaaattttattaggactaaaagtaattttttttttataataaatgactcatcaaataatttaaaatgtcaaaattaggattcaaacaactcattacaaacacatatatatcgaaaatacgcatgcaaggtatatgaatcctaattctaaaattataaattatttgatttttttgtttgtttgttaaaaaaaatgttaaaagatccacagtaagtagtaagtagattagaattaatatatacctaaaaatatttaattttatgtaatccagtagatctccccatatttatatgtatatcatattaaaaccacgaggtacataaatattatataaataaattaaactaaatatgttaatcaaatattttagcaactaccttttattatatatgtgtttagtcttgatctgtgtattaattagatttgacatatgaattgatgattaattagttagtggtgtttgataatgatattcatacaactaataaagctcattgaattgaagtatgcatgcatggtcatcatgaattgaaaagcaagttatttaaaatattatatcataattattataatttataaaataatttattttccaaagataattaaacatatataaataattaaattggtgtctctcaatatatacaaaaatatataccatcaactaccaattaatatatgtaattactttattagttcaactagtagatttccatgaaatattatttaagtttattagttttcagttttaaattatacctttcacccacccatataaatgctttttgaattttcaattgatatatacataaacctacttgtccaatatatgtgaattgatacaatatataatatatatgtatatatatttggtgaatagatctcccactagtatatatatataaattgactagagagaccaaaaattaataatatcaattggtatattaaattttgtcccacattttatatatatatatatatgtaagtaattatatatcatgcatatataaatggaaacttaaaagaagagaaaaaaaaaattaaataacttttggatttctcaaactactttgtttaaatattgaatggaaatacaaaattaatctattcatagtaaaatgaaaatagtgccgtttagtttcatgttgacataataattttattaactcatctaaaaagaacgtgtacaaatagattgaacaaaaattatgtaaagcaaataacaaaagtgtaaaccatcagattgaatacagactgtggtattgctccaaaattttaagggtattagctcatagagtatcaaattcgattgtcaagttattgttaattaagtcaattttgttggattttttttttttaattaaggaaaaccaataggaatgtttaattacttataatgccttgaactgtgttggataaacctctatcatttcttttaaggtcacttattatattacaagatcaatatattggccaaatgcatgccttaattaacgagagagagaattgtcaacacaaattactagggattacccgtcattaataattgtgacttggaatccaaatcttgtaataatgctttgaagcttttctagtagagaatcaagctaccatctgaggaatatctcaacggggacgtagcctgaaatttcttaggtgaacctcatcaaaaattctaatgttttctactctttactttacattactcgtttgtatgtgtgcttagtttaaaattattctcgatctgaggtggttgattttattgtgtttatgaattgtgattcaagggttagatcgagttctaagaagaaactctttattagggttttttaacctagtggggattcgagaccatctatttggtctagaatgatctttggggttttgttttagggccaaaatgttatcgttttgggtattgactttattaaagtcaaaagaggtataagatcaattttgaccttgggtaatattgatttatgtattgttggtgtaggtaatttttgtaggaatttattgtttttcccaaattaccctacaccaacattcaattatcagtattaaaccaaggtcaatttcgacctttaacaatccctgacttttcaaagtcagcagagtcaaaacgactccattttttccaagacaaaaccaaagatcgagaaccttctcaatcagatcacttaggttttaggtttgagttcgaaaccctagcagagagtttctctctcagagaaactcaatgccaaaccctaaacaccccagaaatcacagaacacacacaatcaaaagatcagatctaaatcgatctgatctatcctcaaataaacacaaacacagtaaagatagggttagaaaacgctagagatttttcccgaagctcaccaaaaatttggctacgtctccgttgagctgttcctcagatctgagagctcgattccactatgaaatgatgtttcagagatacaagacagagattccaagtcacatgcatgatttttgactggtaatctcttagtttattacatacaatgtgtttaatccctctttctctcactaactaactctcttctggtttcttgtgcatgtatgagcttctcctccttcttcttcaagttttacaaccttggatcttgaagaatatcactcaaccgtctttttgtttggatttgcagcaggtatatatagctctaggtttctgatctggtttagtagttagttagtagttagttagttacaaaaattagttaggtgtggattatgacctaatccattctaactaaaatctgttagggattaagctttagaggccgaaggccaaaatagggattttgcatgtattaatttttctccttgtaagtaagtagatatcagtgtaagtggaggtttaatcaataattttagaatttaaaaccctggaatggtatcagagcttggttaaggtggaaagatttaataaatacaacatatcaggaatgagaagcactaaaaaagcgtaacggttctaaagaaaataaagaaacacattaagatttaaggagtttgatcttgaattggggctacacgaaattaaaagctttgtggacattcctttgaatgattcaccaaaaaactctgtaactcaatttatgttacattcagattttataagcatgaataatttgaaagttgatattgaaaaatttgatggtactagtgattacaggttctagagaaggaaaataagatctcttttggcacaacaaaagcttctaagagttcttgagtatccaatagaatggccagatggaaccatccagatgcgacaggaagaaaaactagggacagtcacagggataatgatatgcaacatgttagatgctatcattcgattgatagacaaagaaaatacccctaccaagatctggaagaaattggaagaacaatcccaacaaaaatctctaacaaacaaattttttttgaaagaaaggattttcagatttaagatgagttcatccaagtctcttgataaaaaattggataattttctaagaatgcacattgaacttgcaaactcaggggagaatgaggccttgagtaatgaaaatcaagccatcttaaattccttactagaatcctataaggaagtaaagactgttattaagtatggaagaacctaccatagcgctcgaggaggtcatctctgctttaaagtcaaaggacctggaaataaagagaaaaaggaaatagctcgaatagggacgtcaacttaagtagcagcagacctggaacaataggggagtgagtcaaagttaaggtcctaataaggggggaaaccaaaacagaggcatatcaaattcaaatataagaacatctgatgaatccaatggctattataactgtagaaaacttggatactttgaaagggagtgttatttcttcaaaagaaataaaagatacaagcatcatagacatgaagactctaaaaactcaaactctaacccttttaaatctaaacaagatttacatgatgcaaatttaagtaatggatatgaaagtggaaaggtttacatagcagggtcatctttatagctgacatggtattagattcaagatgtacatttcacattactaacaataaaagttatatgtttaatgatagggatcaaagggtggaagactgattcttgggaataaattgacatgtgacatcaaaggctcatgatccattaaatttaagatgtataatggcctgattaaaaccttgacagaagtgaggtatatgcctaacctatctagaaatttaatttctctaagtgttctagatgagttaggtgtttagattaagacaaagataggaaaatgaagctttgttaaggagctctaactatcatgaaagggcacaagaatggaggtctctaccacctaaaaggaattccagtttcaccctgcaacatcacaacacagtgaaatagaagagcaaaatgcaactttggcacgggaggttaggccataccaatgagaaagactttcaactcatgagtgagcgaaaactgctgggtaaggataaggtcaataaacttaaattttgtgaatattgtgttccaccatattgaaattcaatactgtcactcacaacacataaagaattcttgaatatgttcactcagattttggggtcctaagaaaataagcactcatggtggatgtgtttattttctatctgttgttgatgatattttaaaaatagtttagattttttttaaatagaaaaatgcggctttttataaattcaaacattgaaaaaaattagttaaaaatataactaataaagaaaccaaaaccattaaagactgacaattgattagaattttgtaatgatgaatttaataattattacaaagagaatggcatacatagacacatgacaatgaggattagaccccaacaaaatggggtggcaaaaagaacttaacaaagtgagatgcttgatgttataactaggattgttacaaaggtttttagggagaagttgccttgatagctttatacttgataagcagaagtcaatacagtgcaaatggattcaaaataattcaagtggactagcatattaccaccaaaagagggtgaactactataaaattcttgtgttcatctttgtgcgcgtcaacacttatcaactcagttttaattgcaatacattcttattggggaaaaatcatgatgcttcctaagagtgtattaaaagaacttatttctatatgtcgagcttttcaatagaagggaaagattgaatactaaaagtcagggtatatagcttgggatgagctatgtaagcctcgaaaggaagatagcttactaattttgaacatggtgactcatgtatgggcgattgccacaaagtaagacaatctttagattaagtgggtacataatgtatacttaaaagagaagtcttggtaggactacgaagcaaaaatacaatacagttggtattggagacaaattgcctcagtgaaagatacaatcaaggaaaaaagtctcttgtcaacaatttgtggtgaatacgtattcaattcagcaaggttatcaagtattagcaccgcaatgtgaaaccaaatcttggtacggtgagatttggggtagatttcttatccctaaatatcattttatcatttggttggttgtactaaatggactacaaacaagagatagactacttcatttcgacatagtaatagttggttcatgtttaatatgtgaacattctgatgaaaatgtcaaacacttattctttgaatgccaatttattaagagatgtttggaggagattaaactttggctaggatggagaactacaaggaactctttgcttcacctcttgtaatcgatgtctaaacaatagaagttcaagtagcgggtggctgctgcaatttacaatatttgcatggaagagtaggaatgcagtctactagaaccattgtgtaagctcgacgccaatggtattgatgcacataagaaataatgtaaaaattagaattttaacatttttgccttaaaaaatgaagaaaaaagatttggaatggtttgaacaattatatagttttcactgattttacagattgtatagactataaatgtatttatagtgcttttagattgtgaaacgatttgaagcaatacattaatgactctgatttatccaaaaaaaaagtaaagatatgtctttggttattacactacaaaaa

SEQ ID NO: 218588 - DNA, 4080 bp, Cannabis indica
aattgatgaagaagataagatcttatcctatttctgaaactggtgtttggattaggaaaaattagaaatgaaaatatacagtaaatttgaagtctcaacttgaagataaaatgaggaatttcactatgaaggagaaataagattaaagcagctacaatgaaagcaaactgattttatgtgtaaagtctctagatttagtttgtaccctttattcttattatttatgcatcattaaaaccttattgttgatttcttctcagagaaggttaacatacacatataccaaaacatgttatctgtcctacaaggttaatggtagaatagaagaatggagaaaatcagtgattaaaaaggaaaaaagaaaaactgtttcatatgttacaactgatctacagtcaacgtatcttgtctttcttctccttttacaattatcactaaattttgttttctttatttatttatttattgatatcttatattggagtgcatcttttttatggttaaatttaaattaggacaagcttcagagacactgaattccatcattcaggcatgagctttctcttaaagtttttgtccattcttcagatttcgatttctcatcgaacaatcagtatattgcatcatcatcattggataagactgtgcgagtatgggagatatcacaaggtctttgtattagagtaatatatggtgtttcttcgcaattgtgcattcgttttcaccctgtaagtataattgtttagaactttaaatattttctaagttcctattatgttaagtcatcatatttgtaatgtacgtgtttaatttcttgtgattcatccacacaagcctggtctactttacaagtttcagtagcataattcaaattaactcctatggtgaaatttgagttctttttcataagaaattctgtcaaaggtccctttgttttcctattagatctcattatgcggccccttttcataaaatggaatggtaataccttatatttaagtcatcattagtaaacagcaaaaggctttttgctgttgcatttcttggatccctgtctttctatatattgaagtgtcattaacgtttccttttttcttttaaatttgatgcaggtaaataacaatttcctttctgttggcaatgctaacaaagaaattatggtaatggctgaattccatgtctaatgcctgcttgagtttaaaagttctcttaggcttaggaagtgttctatgcttgagttccgacattttcttccattgtagaagtgtttcttttcagaggatacaatattgcatttaaacataaatatattgaagaccagagtaaattaagttatttactctaaccagacctaaatacttagttttggaaaatatgccaaaagtacaaagccagattttccaaaaaataaataaaatcgacagatatatattgattgcagtaggttgtttctctttacatgtaatgctctacatcaaaaatatgccaattatactattttgcctatgtaagtgaaatttagtggatttgtttgacagcaatttctatgttaatgtatcaggtgttcaatttcagtaccggaaggattattagtaaagcagtatttgatagtggagttacctctatggatcatgatcacactggccagctcattttttgtggcgattcgctggtgagtccatgtacacatgttcacctgttatcttaccatttgaatgattttcattttcctctgttgacagtcagtctctggttgtactttttcagggctctatatactctgtaagtatgaactctcacacaggagcattatcccgttctcatcgctaccgagacagtagcaggaaaaaatctgcagtcacaactgtgcaataccggagtttctctctaatggctcgtaccccagtgttgttgacatgtactcaagatggaaatttatctttcttcaggtctgtcaagtgtcaaaataacttaaattgtcacttttgctctttctttcgaacactgataaaaatggtctttttcctttttctttctttttttttcccctgaagtattgctctagaagttcgaggctatttgactcttcggtgctctctcaaattaaccccgcgagtacacagcatcagggcttccttctgtcccctactttcccccgagaaaggagaatatattggtttgtatatccctaagttaatttcaaagttaaatgtatgtatgaatcaatatactaaactgacactgcgattctctttgttgttttctttacttagtggcgggaagtgaggattcgaatgtatacttctacgatctaacccgaccgaagcatacatgtgtaaacaagctacaggtccagtcttatttccttataaattaaggtttcgattaagctaatcttagttgattttgcgtctctgtcaactgacggaaacatatgaaacttgcagggtcataggtttccggttatggatgtagcctggaatcatggagcaaacttattggcttcgtctgatttttacggcacggttattgtgtggaagagatcaaagacaagttaagacgaaaatctataccgataacaagccattaacagattacaaaactgagaaatggagtggtgtggagtggagtctcaagaaagactccaatttgccattgtaaaccattgaactatttttaccaaaatgtgttacataaaagtatttgtattattattgattgttgtaccaatcacagactcagttagttacctactcattttttgaatcgtataatcaatatgtttactttattttttccatttcaatattctcaatgaagttttcattttataaaatttgaggattaatatatattacgtaatattatacttggttattgtattttattttagagatacatataccaacatcatataataaaaaatttgtttacaagaacaagagttttgctcattgaaactgtttatgtgtggaagatatatgatttttgcatttactcattttaaattcatataattacaagttaattttatccataaagttaagatgcctaacaagcattattatgaggtgaccctataattagttagcgattttttataatctcaataaattagtgatattacatttcacaaaagtgttagcactataagtgtcctttaatatttctctgaagttagtttatgtgctatacaaccctgcttgattttttttttttaattattattaggaaaaaaatatattatatgtatgtcgataatgtatattgtgttatgtaattttttgtatttatgctctcactttaatgttaatatttgcatttacgttttctagatatttttcttaactttcatcccattacgtagaatgtctaggttcgataataataagctaacaatacatcataaaggaaaaatgagaaaaaattcatccaacctagttagttgtacagcctaaattgctaattaatttataactataatataatgaacgtgaattagaattgcttcaaaaaaaattgaacaacaaactaacaaaaaaactacgatagagatcatgttgtaataattttttataggtataatttctacttttataaatatgatttgcataaaactggccaaataatcaataattaagaaaattatgtgatttgtaatgttatggtgttaaatatatttagataaccaaacacatacaataattccacttctaaactctatgttcattttagagtttatattactttaagagtagatgattttagctaaacaaaatttgtgtcattattttaaactaaagaaggtaagaaagttgacctaacatccacaacattttaaattcaaagtagctttctatacctttctttcccaaccaaacatactccaacacaagagatcttcccctatataaaaccctaaacaatcctcaaacaccataaacacaacatcccaatcaatcattacacacaaatcacaaccattgtgcttgaaaaatcttgagttttgatttacacaatggccttcaacaatcgtttcgccttagttttattcactattgcttttgcctttatgagcat

SEQ ID NO: 218589 - DNA, 5692 bp, Cannabis indica
ttagtttcttaaatacctttgaacataacatagatgttgctaaataaaaaaagtaatgtaaatttttttttaataacaaaacaacataattatataatctaaaaataaacataatttcaaaagtgactaaacaaaaagtgtaaccaaaatgtatatgaaatcatttttatcttaaagtgaatcttttcatgataagtatcaaattaatctcataaataactaaaatattgctttttatgcaaaaagtaaaaaagagatcttttcataaaagataacttattggtatcgtatcagtatgcataagcaactaattgttatattaatttgtttaaaattttgctagttaactatgcggtatattctttataagctatcttttagtaatttattgaagttatactctaataaatagacttatttaaaattacatagtatagacctaaaacaataaaatattttccaataacttttggaactggtcggtataataaactttgcttaagttattttagttactctttgatattaagctagaaaactactattttgttaactaaatataaaagaaactaaaatgataatttttttaatgacaaaaaatatatgcttcccacatattaaaataatcgtgttaaaaaataagtcgcaatggtatattttttgagccaaaataattagcggtgtaattagaattattttttaaaaagtctaaagagaaattaatattttttaaaaaaagaaataaagaaagaaagaagaagtcacttcatttttagtttaaaagtaaaacaactcaaaaaataaaaatagaaaaaggtagcacttatattgaagacacctgcaaaagtaattgtcttaaattaatagaagtgcacttatattgagtacacggtattctatttttatatgggaagttaatttttgctcattgtttgtttaaagttattattgtaaataattttctaaacatgctttattttttttatctatcttatttgtgattggttacttttaattaaaatataatatttaaaaatttgcacaacaataaatgtggtctcccattgtagatgtcctaactgaatatgccatatgtgccttatatttgttttctactatagaagtctccatacaaatttaagtttatatacaaacttattcatcaaaatctacacatttccaacatgttaattgtgatgcaaagaagattttagagtaatttgtgttaggcatcattaatattcaaacataaaatgtcgactaatatagtacatacatatgcttatatagtattgggggctctaatacatactatattaaagagcatcattgcagatcaatgtgtttatttcctaggtagttatgaaaaaagattcttactttatgtaaaattcttacttttttcgacattatcatcatcaccttataccatagtcctatatcaacaactcttcacacttcttcatcactttcaacatcattggctttcccattctccttacaagcgtcttctcttggtttttccttcttcactaccttctttctcactttgagcaaatcaacaataccttgtaaggcaacttcaagttggccaccctttacaagctcttcacttaaatctccttcttcacccttaactactttaccattctctaattccttagcttcagaatctttcttaccactaataccttttttctcctcttcatctttttccttcttcagcttagcttcttcactttccttcttcttcactttgagaaacccaacaagacctttcaaggcgacttcagggtcgtcactctttatgagctcctcagccacttctgcaggtgtaacttcagcggattcaagttgctgctcaatctcctcgaacaaaggatggtgtttgatcccgaggtagttcgaggcaagcaatttgaacccgcctggggtgcagtaagacatgtggacatgaacgtccattcgacctggcctcagcagggccgggtcaagtcgctctttgtggttggtagtgaatattatgatgcgctcgtcgccgcagcttgaccacaaaccgtctatgaaattcaacaagccagacagagtcacctgtggagattagtaacatcattaaatgaagttgattaaggaaaggaaaaaggacaagtgggacatttccctgtgtgttgttaactatttctcgtgatacataaagtgtcacacaaagtacaaattcattggtcactcaatggagccaaaattgaattgagcacatcaaattgaaagggcatgaaaaatgtgatcatatagaaaaggtgaaagagccaatgataagagaaaaaaagaaaacgtgaataggccaaatagaatcttgatagtggaagctgatttaaattttactaagtggctaataaatggggttgtgctgtgtctacactttcaatcaattcagcttagaaaaatataaaaactacaattttattgaatcagacaataacagagcattaaactaattaattagaatgaaaataaactaaatgaatcttttcctaaactaagttaaattttagtagggaaaagaaaaataaaataaaatcaattttaatgtttggtataagaatgaaaatataaaagttcaatctttttctattttccacagtttttattcttttttaactttttcttttttcatttcccaaataaatagcatccaaacataaagcattaaagttttcatgaatgaaatgtcattaagatcattaatggcagaaacagaaatgtaacctttttctcagtagacccatttggagaagtacttgaagattctgccacagtcttgttccgatcttcaaaattgacagagcaatcgatatcttcaaccaccaatatggacctgttcgccattgcaataagcaatttcctaagatccgaattaacctgaagctcagaaagttccaaatcataaacatcaaaattcaaatagttagccattgccgcaatcaagctcgattttccagtcccaggcggtccgtacaataggtagcctctcttccaagctttcccaacttttctgtaataatcctttctcctcacgaatttctcaagatcattaagaatgaagttcttgatctccgaatcaagagccagagtctcaaacgtcgccggatgatcgagattcgtcggcatccaagcatcggcgatgttacagtagatattctcgtagtcaacggtgaagatcttgagggttttcttctcctgtttggctgatttcgattcagccaaaatgtgaggcaagtaagaattaagaaccaaatcaagatttctcttatgaaagctcaattcaaacgatcgaacttccgatctgagagtagaattcagatctcgagggttatggaaatttttcgattcgacttgtctacagaccaaaatccaagtaaatttaacgccattaaagaaatcaacaatggtttcgcctctttccatggcgatagtgaagttcttctccttctctggtttactcactttgagtctctgagtcgatggtgagactttcccacctaaataaacctccgctgcttcgtagatttgattgttgaccagaccatcgaactcgtcgagcaccatagtcatctgcgacgaaaaccgattgaagaaattccttatgccagagaacaacaggtcttggaattcatcgggcatgaaatcgttgactagtgtccgtacaagcattgccgtcgcggccactgaggccgccgtggacagaaatgtcttggccgttgtgaggttagtttcggatgaggaagaagaagaagaatcagccatggattaatggtgattgtaagactaagagtgtttgggttaatggtggtaacgaagaatcggagtgtttggatttatatatgtatatttatatggattttggagaaagaaggaacaacaagagtgtgattattatggtttgacttggttgactttgtgaacttctcagaaaatctcactttattattctattgagactactcagctgtaaggattgtttttgtgtcgtttagtttaaacgacaactatttctgtcggagtttagttaaaacgacaactatttctgtgaagaggaaaaacaagggtccatgttatgattatcctagtacgtagttgttggattttaggtctcttaacgtcatctacaatgcagacaacgactagcgttgcctgctatgaccccttttttattttaaattaatttaataataaagtattcaataaaattaaagataataaaaatttaaaaaaaaaaaaaagaaaagcattgtgctgagcaggaccgtgataatatttctattgaaaagtcataatcttttatcgctcgaaaggattctgtagaaattgcattggagatgcctttattaatttttattattaataaattgtaaattttaattttattttcacgtaagagtacttaaagttttaagtttataagtggtataatcacaatgtttatttttagcggcattaatacttaatgtttgtaaaactgtaatttttctataatttcatcagtacaaactttgttattttcttaaataggccacatataaggttcagattctagatcattgggtctagacagaaatatatagtatcagttacttacatatgttcctttaataaattcaaaacgaagtttgtactgataaaactagaggaaaattacagttttacaagcattgagtacttatgctgctaaaaataaacattgagtttatgccgcttacaaatttaaaactttaggtacttatgccgctatttatccaatactatacaataaatttaagagtatatattcttacaaaaattatttgcttatcattattaggttaggcgtgtatcagagttagtcttacgttgttaatatgtgaaaataaattgtcatatataagatgaatatgctaattctctcattgtcaattagttttgagatagaacctcattcatcttattccaacttctaatatagtatcaaagttacttgtaatccattagtgagcccaaaatactgtcggtcaaaaaagacgagccaaactaaaagctttttcccctttaacctctatttgggacctttcggccaatgtgtgccagttttcagtgttagggtctttgacctgtttcaaaattcacaaatttcttggcgtgtacacctacaaatttctcgatatttgaccttgtgggattcttttaaatgtcatatttagcactgtaatttcttaaaggtcgttcgttatacccacacttttcaaacccaaacatgaggaatgtgtattagaattagtctcacattgttaatgtgtgataattaattgtcatatataagatgaatgacctaaacttctcattgtcaattagttttgagatgatttatcatgaggtggagctttgtttgttggtcaatggcggtgattgtgaagttgatagtttttcatggtaatttgtggctaaaatttcctaattttgtatttggcacaatcaactctcccattactgaatttttaggcgtagaactccccaaattctaattttgatttggtctctactatttcgtccattcaggttgttaagtgccaaagtggactaccactatgtaatgtacatgtggcaaattttaattgatccacatattattaataatttaaaaaggctaattaggattttt

SEQ ID NO: 218590 - DNA, 16681 bp, Cannabis indica
gtggtgatggagttggaagtgtttgtgagctgtgacaagaaggcatcttcaaatttcaactcgtctgatttcgaaacaacaccatctttcagccatgggaaatcgaaaactccctgagacacctcgttggaatcattatccggtgagatgtaacttgtactgccacaattggtggtgatgttatcattgagactagtcttcttggctttcttcttcttatctaacaagtgcttggactgggaatcttgttggtgatctccttctggtgatgttcttgatctcttctttctgtcatggtccatgaaaagtggaggggttctttttttttttctctgctctggtaagaaaagaaaagaagaacaagattaagattgctaatgactaaatcgaaaggactaatggagattggtttgtgtagagataagaaaagtgaaacatgtttatgccaatgcaatcaacgtatggaagttttcccaataaaataaagtatgaaacgacttatgaatgaaggaatgatgtgttgttacgtgcatgaaaatgacataaaaaatttccaaaagtgaagaacttgatagcagaatttgaaattaagggacatgatattattattattattatcatcacatagcaaaatgagtagaggaaaattgctctttctagcaagtaataagaacctgcaatggaagatctttaaagggtatttcgaaaagtgatgaaattagataatgaaactcttaaatattcagaataatgaagaagaaattattcagcctttgaaagtttgatatagacctaaagcaaaaggcagaggatactgtgaaggtgaatgtgaagctgttgttgagattgtaacgttttgctgaataagaatgatgattataaaaaaataaaatacaaattaaaataaaataaaaaaaaaaaagaaaagaaaaaaaaaaaacaagacagtttttttctcacacgctacgccattttaagctaaaccgtctccaaccacagagtattctctcacgctttttcgctctctctccattgccagaatcaaatgaaaccgatgagttggtattagttccttttcttgcgttcttttctctcctttttagtttctaaaatcccacaagcaaaaaaaattaaaaaaaaaaaccaatatttttcgttgatcacatctccattctaaccctttgattttgtctcaatttggtatctaacgacacctcccaagtccagctctttctttctcccacactcctttcctcatttgtcgcctcacattatcaccatgtgatgtttagtcctcgactcacatttcatacgtttcaatatttgaagaaatgtatgtataaattcatgtgatttctaaaagctattgggatgatgatgatattcctcaatttggttcaagtctcgtgatccaaagggtatgtttttaagcaaattaaagacataaagaaacaacctttttgtatattgatagataaaatcaaccaaaaaatcaggacctgttctgatcttgtaacaaattctatctttccttctttgttcccccaacaaatgttattcaatgtgcacataaacttttccatctaccaagctgctgatacttgaatcctcaaatcgtggttctgcatcaactttaagaaaaagctttcaacttggtgtaatcttgaagagagagctgagggttgttctttctttacaactttctcaatttatagcagttcagttgtctttttcacacaatttatgcacccttaattcattatccactcaatccatagtttcctcctgtaacgctcaagtggaaaaccgttgtgttcaaatcaggagatagaatagaataatcatgtttagttccagccaagttagatattagatcatcttgtagtgggttagcatctcttttacaatgccttttgtctattgagacaaatctgattgaaaagacactaaaaataagcactaccaatagtcgccacacgagcatgatccattgcgaaaatgatggaaacgattagtatctctgacaataatttctcttcctacaaccttggagacatatttgattgctgaatgacaatccccacagaccctaatattcttcttgatcctaatggtggatcccggaggggtgttaagcagcgcaaatgcgagagcaagtttctcactatgatactgtaactttgcctccctttcttgctggtccacaaacaaaagcacatgactagtatctgggacatatcctatctccttgatttttacgctcatttgctcccacatcttaccaatctcttccctttgtgggtgagcatcatcatttgcaataaacacgtggactgcattctcaatttccacccaactacaagcaggttcctttttaactccattctctttcatcacctttctcacttttgcagcatcattccatctaccagcagaggcatacatattatatagcaatatatggggacccgaatcatgaggatcaagctcaaaaatgtgttcaccagcataagcacccaactccatattcttgtgcatcctacaagcaccaagcaaggctccccacacagctgcagtaggctggataggcatttctcttatgaacctctcagctcgatcaaaaagacctgcacgaccaagaagatcaaccattgtcacataatgtgaaacatctggctctaccctgtacttcttcatcaattcaaaatagtgttgtccttcatccaaaagaccagcatggctgcaagcggtcagaacacaaaggaaggttacatcattcggttgaattccaattctcagcatttcttcaaactgctgcagtgtttccttcccgagcccatgttgtgcgtatccagtaagcattgagttccaagaaactacatctcgcttaatcaacctatcaaaaaccttttttgcatcctcaatgctacctgattttgcatacatgtcaacaagagtatttccaacaaaagcaacaagtctaccaccggacttaatgacctgtgcatgaacccacttgccctgttccaaagaccctgtgctggcacaaactgtaaacaaactagaatacgtaaaatgagtaggtttaaaagaatctctttgcatttcacggaagagcttaatggcatgttctccatcacctttcctggaataagcagcaatcaaagcattccaagacacctcattcttgctcaccagaccctcaaagattgactgagcttcaaccataagaccaaacctagtatacatgtccaaaagagaactacccacataaacattagaatcacaaccacatttcacacaatatgcgtgaagctgcctaccctgcttttcactggccagaccatctccagaagccttcaacaaactagacagagtgaactggttcggtttcaatccatgttgtagcattgggggaaacaaatccagcgcctcttgtgctcgataattctgagaatatccagtgatcaaggcagtccaagtaaccatatccttaagtggcattttatcaaacactttacgagcatccactatgctaccacactttgcatacatgttgagtagagtgttctgaataacgaggtcatctctgaactgggaattcagtaaaagggcatggacgattcttccttctctaagcttccccatctgggtgcatctcttgagtaaatcattgtagcgagaacggtcaacttgaaaagaatcattaaagccagaagcgtcccattcctcaaattctgaaatatcacaatctttgaagatagcttctggagttgcaaacgtgccaaagctgaaacaagttgattctgaaatttgccgaatgcaactatggagaatcttcaaacaagtaaacccaccatacaagaggtatttactacacaaaatctgtttcttcattcttcgcctttactttttgagattatatgtttttcccactaagttcaaaacgttgccttgaaggatatatagttaagaatatggagtttggagtggaggcaccaagacgagctttgccattttggaattggcagccatggctgccaaatgccatgcttcttctattcttaccttgaacctttttttttttttgaaaaaccttgaaccttcattgttttccacttcggctttggttattcctatttatatatttattaaaatatttaggaaacaattttgcagaagaagtttttgcacatttaaaaagtaaaagaaagaacttatttttgtcattgaattcgtattattaaaattcagtagtaaaaagttgttattcagttaaatgatgatgaactttacaagttgctaaatttttatcacttatttacttgaatagttttctaagttttggatggtaaaaagtcaacctcagaggttcaagtataaacattcccccatggaaaccttgaagagaaattttacagaagaagaaaagtgaatggcaatcttcaagaggagaattgttttctttttattaggttgatcttgtgtagtaatattcacaaggaagaatggtatcaattataaaacatcgcctttagttttaattctcgtaaatcactgcactgtaacaaacaaatatgaaaattctaaacttattccaaatgagaatcagagaacacaaaatgcctacgaacaaccaatagtacaaaaatcgtaagaggaaaaaattattatagctactaacattttcccttctagatgtagctatgaatttgaaatggatgacggattttgttacaaactatttttatacaacacaaatcataaaagtacaaagatgtcccaagcgagcttcctagatttcttgctatacaacaaagttgcactaacaaatactagacgagtctaaacagtcatttacagctcattaacacagagttgattaagtgcataagaaggcgaatgttgttgatatctgaagctgaagtggtagattgattgcgatgatattcaagtgtttggtaaactttttcaaagattggccggacatgcaatgcaatcaagggatccgttggatttatggccacagccacatctgtcatccatgccaactttctcgacatgtcattgtttatgtcgcatgccaattgttggagaagagccagtacaactccttggcttaatggcagtggcaccagtgacatgattcctggtaaatcaacctgagaacacaaacaagaaacattgtcagatttaatttatcataaaacatcaaacttagtgatcatcataagtggagaaataagtattgtaacagcaagatcacaaacagaaatcgaagtttgctacagccagcagaaaatatctacattagcatccacactgcaagttaaaactttcagtacctgagaacacaaccaagaaactatggagacatcacttctgtggagggctcctgtaaatgcttcctcaaatttgcgctcagcgatcagccttgataattccttaataggatcaacaggtgattccgcctataaaaacaaatgagaccttccaatggttaaaatgtggagatcatattattgcaatattttcaggaaacacttgttagatgaaacagattcacttggagagcctaccatttcatgtacactagaaagcggaccattgctcaactgtgttgtcaaggaatttggtccttttgagctagcacctgcagctgcaaacgccatcagtttacgttggccatcagctaattctccacttaaggttcgagtgatcgttgatgctgaattaattgcatcctggacaatgaaacacagaatagtgtgaaacacaaaaattgagtatactgcaaatgtaaacaagaacggtatatagtgcacttgaaccaaattggaagggatcccaaactataattagtagctttaaagaaaatgtggaaaagtgaggtaatggttggattaaacataccctcagagcagcagccagtggagaatgtgtggactcaaattgctgctgagtagcacttgtatgtttaacaaaccctttctgaaatgcagcatcaacattctcgaacatgtttttacatgacccttcaaatgtgggaatgagggaagattccaagctcgaccttaatgcatcctgcagtacagattccataatcacccaaacaaacagagtacattctacaaagttgttctaatactagtcgatgatttatgtcacgtaacatgcataagaaatgccttagagctcaactactatggctggatcaataaaaggatatttggaaaaggaaaaacaagtcatgttctaaggtttatgaagtgataatgtcaaagattaattgaattaaaattttaacaaatgagtatgaaggtaattaaaccattccaaaggattcagaagtaaacgcttatgaggactgaagagtatgaaattaaaataatcaaacacttgtgatgaaaattcatcatatgatctacgctttggcgcaaaaatcatgaaactgaattattgaaacacttgccatttgaagaagtgagtgagaaagaaatcaattgatcttatacttgataacacaaaagtaaagacatgtctgatgcatgacttttacccgcaattaaaatgtagtcccacgttgacataagatgtgattactataaaaaattattggttgtaaaaaattttttcaagtaagatcctctttcaacaattaccatacgaaagaaatggacatttcctaggatgctttaacactagccataaagaaggaacatcataattttttacataaaacacaaatatgctgggtcatccttcttatttattttttaaaaatattgttcacatgtactattattaaggacaacaaaaagattataaaaatgatgttatattaaccagaaatcacctgaagagcttgctttccagtagtttgaaactgtgcttggatctgcctagccaatgtggcctctagttttgaactaactgatttctctaattgattcactgccttctctcctactcctttctgcagtacgaaaagaacatttccattcagaaaagtctgctatcaaactgagtaaagactgggctcaggaaaaagaaaaattaaaccttttggcaggccctcattatccaaaaatatcattcatacacaataatctctctatttatgcattataaggcaacaaatttttctccaaaacctttacttatagcagataatttatcagaataaataggctatccagaacacctaaaaacaccttagatcataatcgaacctggaaagactccgtaattgctgaagatatggatttctctgtaatttgagttattgaacgagctaaacctggtccaatggcacctatttccttcttgaaagttttctctaacatggttggaagatccctgtttatagcattggtgaacaagtttgttaattgttgagtgcggtctcgttccaacttctcttgtttagcattttcttcttggaaacgagcccataaagcatctgaattagccttaacaactttttccatgctccggcctaggattccctctagccgtttaccctctttggtaactgggccagtaatcatcgcattcatctgtttctgtaattccttttgtgttccaattaactgtaacatgtaatagcatttactattagtcaaaaagtgtgataatacatagggcattgcagaatgtatatgttagccacataattaaagaaatagaaacactcattttctggatatcaccgtaatttcaattttctaattatcattgcagaatttagcatttagcaaatagcagccaaagtcagataagaaataggtctcccttccagcacaaatcacagggaatgacactcaatctacagatgtttgatagacatcaaaaacctctagccacagtaagtcgtgatattaaaaacttaaagagtactgtcgattttttaatccctatagagtaacaaaaaacatataaggttaaaaagcagtactatgtcctgtaaaacttgaaaaacattttaaaaggttgctcatgcatgattgtagtgccaactttgaagaatcacctgattcagcatgtctttcatagctgataactgaggtaacgcagcttcaacaggtggtgtacctgacacgccatcaggttcatttaatgaatcagtggagttaaatgagcttggagaagaggaagacggaccggatatctgtgaatttttccccttctgctttttcccttttgtagcttggacaggggttgttacattagtatctgagtcaacgcccttgagagtgacatcattcgtcacattttggactttattttgttctcgggcctcagtaacaccaacatcattagcgttcacggttccctctgtacaatatgtgtcaatgcaatcccgtgccatttgaaaaccaagatctgaggcctgggagtaaaaggctttcttctttttgtcgtcaagaacctcattgcttttaatagctcctgtttctccaacaactttaacctctacttcattgctctctgcatccttgttgataacatcttcaacattctcctctaaggcagtcattccctgattaagctgagcatgttcagaagatgaagcagctgtagataatatctctgatggagttaccagatgtgttgggtgtctaaatgctgcatgattaggagccatagaaacatcattttgtgtgacatctttgtcacccttcatgagattgtctgtcgagggagatgcctcagaaacattatctttgacaacattctgatcatcaacttgatctttgagaggcagactagtatcattgctattctgtaaattactataacctgacaaatttcgtgataatctaggactcaaaggaagagaggttgatgatggatgtttaactaagatgtgagatggagtagcaattgaatcgcaatccgcccgtgaagtagaaactataggcaagcttgtaacctcagaagaagccattttaacaagatggcttggtgagggagcaatatcagatggtttactcttatgggatgattccagcattgcagaactatcagcagtatcaaaaggatgagagccaattgatttcattttctccaattctaaattctctatgggtggtggcaagcattgtgacaagtttaatgcatactgctgaatagcttgtgtttggacacagtacacctgtacgacatgatccccatctggtaagctatcacttgtcccagtaagacttagaattggcattgtgacagtaaactcagcaatgtagtccatacgtgttgcagctggatcaggcccatattcaatatggacagcatatatggcattctttttggcatttgccagtagaaacagacctgcccgaggtaatgcaacaacttgattaaaaaatgcttcctcaacattggattcagcagagctctttatttccaaagtctgggtacagtgccatgattcagcatcacaaggcaagagccatccctcctcatttgtggaggtccacattttcaattccctattgagtggaccctgttaaaaagggggaaaaaaacaaaatgagggtttagcatggaaaatatataccagcaaaataagtgcgtatactaataaaaaaagcctgccatatgctatgttagtatgttctctatgatagggcaataagtatttaccgcagtgataagcacaatatgatcaggacggtgtggagcagttagaaatgtcacggaattaacaggaacgccatcatgcggttttaacacggcaagtggtaacggcttacggtcatcccaaattttcacctgttgcaaacaattaaagtccacaaggggataatcacaattaacaaaacataatatgaacacaatcttagtgcaaatctttaccttaaagttcatattttgccttatctaaatcaagaaacaagtaaatggtaacacccctattccaatcacacacttcataaatatgcagcactgtcatgagcaaaaagttgcatctttaatgcaccgtaatttcataaacaatttaacctcctcataaagcattaggctagataatgaactttttatatggatggcatccctcctcctatttgtatattatttcagtcttaacgttattcctttaaaaaattgtatataataataataataataatacatgaaagagaagcattttaaaacatcctaattggttcactagttatcttttctattcattacttggctgataaaaacttaccattcacttaagattatgatacatacatatatttgatagtttacttaattttatttatttcttgtggcctttctaaacttagaaggtatgggctgtggcaataacatatccccagttaatcaattctattgcgaacttggaatgaagaaaaatataactaaaagatgacaaactcaaatgaaaaccgaaggtaaataccaaccgtgccatccaatgatgctgaagccaaccgggtggtcatccattggcacatagataattcagtaatttcactatcatgcttaccaactaacaagaccccctcaaccagtttatcaataggacattgaagtggttcctctgcagaaaatgttttcccctttccgactctcaataaatcaactttcaggatgtaatttccaattgccacaattaaaatttcctgtaaaaaagattaatttattaaagtgtatcacaataaagcaagaaacgaaaatccacaaccagcaatgcagtaaaaactcaagtagaataatataatttgcaaactacaatttacttgtttgtgaggatgccaacacagccttggatggactgcttttcccagtcctactatttggattgcaacaacaattttcccaataatttgaggcttgtcatcctcatccgggccttcatgaatcttccatatgaaaacccgtccatcaacacttacactggtgacaatagaaagttagttgacttaaataaaactaattctaaaagcaaagtggtaacagaaagacaaagatctacctggctaaaaggtgaacatcctcagcaaagaaagccatgtcagtaactctctgataataaaaaacagagtaaacatacttcagatacataaatagataaacagacgaggagggagagaaagagagatcaaagtaatcatattctgatagttgtcattgctaatagtacttccaccacttcaggttcgaaagcaactacagtctcgagaactctcaccaaatcataaaaagaaactaaaattaacaaagatcattgcaacaattacaagaactaaacttgtttagttgtgattcaaacatcaatcaagaattgaaggtcaacataaactgcccttttaaaatcaaaccgtcgaaaatgtcaacaaaaaaaaaaggatcacaagtggattcaaagacataatcaaccaacctgagtgtggcctcgaagcaaagctctcaaagcagtattaatatcaagaacccttatcgcaccgggcttcagtccataacatatataagatctattcaccgcaatttgacggccaacgacaagggtgggatcagaaccgtacttggtgatgggagtgacctccaattgaggctgcacctcaccctgcaatctcacatcgatatcataaatagcttggtcgccgattaaatggcgtcccttgggaagtttcctgctgggcattctcatcggagtagtaggcgccaccatagcgttaccggacactgctgcagccgacgacgacgaagaaggagaagaatcaaaaggaatcatggtcggaggaggcaaatcgagattagaaccagagggagatttttgggtgttattcaatagagccatcaagcgagccccgctagtaatattggggttaggggaagaagaagaaggaggaggtggtggagaagcggcgggtgagggagcagtggctatggcggcggcgtatgagatgggtccggggctgggaggctgcggcatattgaggttggggaggttatgaaatgggtgagtggaggcgccagtgggtggagggtaagaagctggagaaagagaagggatattgggaatagggaagttcgaaccggaagagggtttaaagagttgatgaatatcaaagagtggcggtggtggttgaaggtggctctggttctggttctgattctgattataggtcaagtttggatttaggttgttgttaaccccagttggggaagccatgaaagaaataagaaagaaaaataaaaagagtaatgaaatgagtgattttcttcttaagtatacgattaagtacacctattattgttaatattaagaatgaataagaagcttttactttagaatagaagaagatatcctccaatcaaaagcaaatccaatccaatgatgggttttagattacaacttttggtattattcttttttttttccttttctggattgagaacatgagatttgataattaagaatttgaatcaaagatccaaactttagaaacttattaatagaacacaccacagttgtgaatggtgatggccaagtagtaatactgatagagttgtaaaaaaaacaacaatcttttctactttctatgtaatggaaatataaaaccttttcctctcctttctcatctttgtctcccaatagatgacaaaaaaaagtggacactattattttactaactattaaataaaataaccatttacaaaatattcatgtaattcatttttattttcttttttgaggggaaaattagggttcttgaaaatacctcctcttctaacattaaaaaaaaatacctcctcttcaatttggtttcataagcataatccatatcatgcgtgttacataacctagtgatccttcatgaaactgatttataaattttccaatctcagacaaacaataaataaaataaaaatgagaaaaatattgaaaataaaattaaaaaaaaattatttttattctcatcacattttacaaactcatttagaataatatcatattttagaaaacaaatgaatactgttaaatgtcatcagtcatcacaatattctcagtcagcatatcaagtatcaattccttatattccaaaagagaagaaggttcaatcaaatatgcaaaggaatattttattcaaaaaagggaataaagatatggtaatatcacaagagtgcacacacactctctcactgtcaaggttgtttcttaagaaaaaggtcgtttgttcctgctgattctcaatgctcaaacgctaaagctctggattgaaaccccacacaacacaataacacatgcatgtgattacagatatttcaggacataatccttcacctgagctggaaagcaagtagccaagtggcaagtactacaagtactactactactactccttttaaggcaattatattacacacaactcaactttttcaacattattggtatttagctattttgggattgggacatacttatttaagtttaaaaggcccaaaatcagcaaagaaaatgcaaaggttgcacttacaggcgctccctatccatgtatattcacaagctgcagtggtgattcttccatttaagtaatactaagtacgaataaaacgagtgttgaatttacaatcaaataaatacagaatagacacatcaaagagaattgtacagctttgtcggttttgcagaagcattataaaatcagtcacaatgttattcagacaggaaactagaaaaaggaaagaaataaagaatgaaaatgacacaggtaaacagactgtcttttaacgtaatctatgagatttccgcttcgtaaactttaactgcaacagcctccagcttgggaagaggctccatctctgcctcccgatggtccagggattccaccatacccaacttttattccataggactgcaaacaggaacaacaatggagcatcagacatacaatcacaagctctgaacaacttattttacaccctaaatcggttttaaattagtaagcataaccatcaccaattttgtcattaataaatacatataatgtgtaagagttccacaattagccatttacaaattgcaccaatcaagatgagcagaatttaataaatatgtgttgcattagtaaaccctctcagaacagaagatggtcacgacataattgactaagtggcaaacttgtatgaccggttctactaaggtgacctaccaaaataatgaaaacaataatttaaacagcaaaaaaaaaaaaacgattacctcatttgatacatcaaaaactccatcctggatcttcttgtatatggttccagcagtcttaataaatgcctgaacaaaagaaggttaagcatttaactgtttgaagcaaggtaagaactacaaatttaaacaccagaagaaatgaacatgtgtttgtcaaattaatctcgagtaagtaagaaaaaggaatgctcacctcctcgacattctgagcagttttagcagatgcttccatgaaaattaacccatgctccttggcaaactgctccccctcctctgtgctcacagcccttctatgagcaagatcacacttattgccaattagcattattgtcatgtttgcatttgcatgttgtcttgcatcttccaaccagctagccaagtgattaaaagtttccctcctaaaatgtataaaaaaaaatatcttatataaactggctaaaaaggtacaatttgaagaaggatataaaaatgtagacctattcaagacctttatctatatctcactaatgtatgcggcttaggtttatgtccaaaatcttgcttaggactgaattcattaacattagcaaaaaaaaaccctcttgcgtcaaacccattaacttctgggaataagcttgagttggtcgcttgctcattctattgaacacacttgcattatatctaagtgagaaaacaagaaactacaaacatctttagaatctaaccatgggacagaaaccaagtacaaaaccacagaaagaaaatataagcgggaacacagtgacatacagttttttttatctaattctgaaccttaaaataagatatagcgagagataggaaactctagcattgttatcttagataggtatacgagaaatagaatctacagctcataggacgtacaaccatttcacctccacgagtacaatatcatagatttacatgtatcaattacttatgtatggtaacagaatcatatattttaacaccaacaaaagaggaatgctatagaaatcccattatatcacttcatggatactatttcagtattttgcttaatttcttgtttcctaaaacgtttaaagagttcaaaccaataaaggaaagaattatggtacctggtgatatcataaacaagcaatgccccagctgctcctctatagtaggacctagtaatagatctaaaagattcttgaccagcctggaatataatatattatataaatatatataggtaagaatctatcagcatctgaagcagtaaagcataaacacgtaaccaattaaatcaaaataatgacgaagaagaagaacaaaccgtgtcccaaatttggagcttgataggcttattgtcaattgtgatcatcctggcaccgaactcaacaccgatggttaagtcgtgaactggctggaatcgcttatcagtaaactgaagaagaaggcatgattttccaactcctgcaaaagccaaaaatgaaaaatgaaaaatccaaaatcataattgaattcccaaatctcaagtcctctcaaacggtttcaattcaaaattccgatcaaaatgataattgggaaatcgctacaaaccgccaaaaaaaaattaaaaaattgaagtaagggagggggagaagtttagaataaggattattaccagtatcgccgatgatgatgtatttgaagagataagcgtacgacatgttcttgttaatcaaatccctcctattttcccttttgattggatcggcgtacagaaatataactagatctcttctctctccgagtcagatttataaagaaaagaaaatcaacaaaggttgaaattctataggaaacttagagcagaaggcttgcgcgtgtggctgtctatatatatatatatttatgtatgtgtatgtatgtatgtatatgtatatacgtatctatctgtgtaataggagagaagagagggaagaaaggaaaaagagcgattcacagagattttaatggtgaaggcataaaagaacagttacagcgaagcaatgcgccgttgtactcttccatttgtttcttgctgtcacgactaacgtaccgcatctcaggcccagcccattacttcttattgggcctcaatatattcaagcccattctggtaataatgaaatggggttttcaaaaaaataatattaatttttgagcaaaaatttataattttactgttatacggaaatttttacaaaaatattatctttttataaatcagtaaaataaaacaattaaaattaattgtgaaacaactaaaaaataactataaaataacagtaaaaacttaacaaaaatatttttgagaaaaattctaccctacaattaaaataaaaatatataattttagtatgtggtgtaaaaatattggtaaccattttcttgttattgatttatgggtaaataccattttgaaccctgtgttttgcaaaagttatcaattggaccctctgttttgtt

SEQ ID NO: 218591 - DNA, 2990 bp, Cannabis indica
ttcatatttaggatgttaattcaacatacttgttagtaaatctagatcctggtaaaaatattcccaatagatatggccaaattatctcgagcatttcttacacttaacagccagccattcataatctatatttttctccattaattgtccatgttcattaaggtactgaaaggatctcgagggtgaatctgttacaaaaactcgatcaaattgaaccctagtacgacctttagtatgttgttctacaataataggcttccgagcaatactaactaaggcactaaggcgtttgttttcccaatattgaagacccaagtcatgtagatgaatcaataaaggaacagacatggctagtttaacagcattcaagtctgttgtccatggtctaactatgatcgacttcttatcaaactaaataactcttgcttccaaaacttcatccctagtctcctcatcattgattttcaccatgataagtcctatggacatcctagtaatctaaactatccctagatgttcccatattcgtttgatgaatccttcaaagacagccgttggaggatttacaccaagagtcatacatattacagttgaattccatgtatcattttgttccctaacctcctcatagtccacttgagcaattctcatgccattttttatcaaaggttcagtgtaagaaagcttcgaatctcgattcaataccttctctttagcaaaggtattccagagactcttagctgattcttgaaacggatcttgttctttacccacttcttgttctaattccacatctttagcccagctcataataactagaagtgtatggaatgttggaacactaggagattgtcgaacagtgttctgacctaattcctcaatataatcaccgttagctaccttattcagtttgaaaatcgtacctatagcgtcattctcttccttatttgcgtgtactccatggctagaatcaagctcatgcaacttgatagcaggcttacgaaccattctcttcttctttgccatgggagagagagaacagaaacacacacttcctcctctaatcttatatgattatatatgttttcttttaatttttttagtgtcattcctcctcaaattttatatagttattttcttttctttttattatcttatatggttacattataatattgtatcttttttcttcattgcataagaatgttgtattttatatactattcttcataaaatgaatatttaatagaatgaaatatttccttttattcgtaaataatttaattttattagtgaatgattataaaatttttcaaaaacaaaaataaaaaaaaaaaacaagtcattttaaatggattagttatttttaaactattttaataaaaaaaaagttatttttaattatttaaaattttattatattataacactttttcttttggtattattatagatatttgggtataaatttcaattttttttaatttttcttcaataattattgataatatttagtcaatttttgatatagtagtaatagtagtaattatcaatgatatagtgatgacaacgattttaaatatactgacaactataagtgagatacaataatgataatgattttgaatgtagtagtgactacaagtgagatacggtgataacatcgatttgaatatttttgcaaattaacataaagaaaacaaaaaaaattgaattagctggaattaatagatattaattaaaaataaatatttaatattatttgtatgtagatattattttttaaccaatgtatagatattatttaaaattgcttcaaataattctatctattatttctttaattctcttatttttctcattttttattctactttaaattctctcatttttctattttttattctactttatttaattagagatcattaattaattaaaaaaatttaaacaaaatctatctattctctctttaatttctaacttttctaattttttattctactttaaattctcttatttttctattttttattctattttatttcattaaaaattattatttaataaattttttattctaatttatttaattagagatcatcaaataattaaaatttttaaaatataaactatataatcatatatgatagtaacgattcacttaattaatctataataaaataattcaatacttatgtataaaagtaaatgcttatcaatcattgtttgatttattttatatattgggaatgatattaatgataactacaaatgagatacgatgatgacatcaactttaaatatattggtgactacaagtgagatgcactaatgacatttgaagatattttttgtgtgcttttgttatccgtattcctagatgcctggtacgtggcaatcacggaaaagttccacgttagatcatgcgtggttggcatgtacatcctgcctttcagaatcaaggaagatgttatattccaagagttaccccaagattctccttatcagcgaggacggaaaggactctgggactcccattattaattcgctattaagaaggatcagaagctataagtattccaagagggtagcaggttagtctaatctaggaaggctatggacaaatgatcctggaacctatttcgttgtatcttatccggagctcagggcgaaggttacatatcttctaacaccaaatcagatcctgtcctctgtgtcagaccttggtagtgcgcgtacgtgcctctgaagctccattttatccaacgacttgtttagacaacaactttgcaaggtgaaacttttggacaacacgtgtccttattcccacgtattgccttgcagcagccgtacgccacacgatgagaaagctttctacaaaccaaaggtcagattgccatggtgtagtaccaaccattgtagcgtgtttaatacaaaaccctaggtgagtgaagggtatgccctcacccaggggcggacccacattg

SEQ ID NO: 218592 - DNA, 5270 bp, Cannabis indica
cttttatagagttttttttttttaaaaaaaaaaaaaaaaaaaaataaaaaaaagaaaagagagacctgatagtgtatgatagtacgaagagtctcccataagataggaatactaattcatttgatgaaattttgagactcacctaactttgtgttgtgaggtcttatgctcagattgtagagttagctctcgctgctgagggggctaaaggtctgattcgaaaaaggagcaatcagagaaaggatgtgtagaagacaccatccggtactggaatgagtaggggtcctaaccccaatgattggaagaggaagccaaatgaaccaccagttgcggcttcagacatgagattttaatgtaatcagagtttctgccgaggcgagaacaagtctaggcgatcatattcatatcctgagtgtccacattgtgggaagcgtcatatgggcgaatgtcgtgccaaggcctatttccagtgtggagtaataagccatttgaggtgaagctgcccgcagttacaaaagactaaagccaataaagaagatcctatggttcctgctcgggtgttttccttgacccaagcagatatagaggttggtccttcgactgttacaggtgagatttctatttgtggtattatgttttctattccgattgattctcatgttacacatttgtatattttgagtagagtcattgagaatttgagtagacaatgtgatattatgtctagtgggttcggaactttgttacctattgggaaaatagtgatctctaagaggtggattagatctcttcaagtgttggtagaagggagagaattgttagtggatcttattgaactagacttagaagactttgatgtgattttggggatggactggctggccaaatacaatgctaccatactaagagaaagatggtgacatttgaaccagatggtgaaactccatttgtttttatgggaaaggttcagggatcacggattccaatgatatcgacactcaaggacagatatttgctacgagagggatgtatgggatacttggccagtgtattggataccacgacggatataccaatgggaccaaaagaagttcgagtagtatgtgaattcctagatgtgtttctagaagatttattgggattaccacagaagagagaggttgattttgagattgagttgataccgggggctaagccagtttccaacgccccatatagaatggcaccgatataattgaaggaattaagagttcagttataaaatatgcttgatttgcagtttacgagactgagtacttatccttgaggtgcatcaattttgtttgttcgcttaagtacattgccacattaagtacatttttatgtaataaatatatcgtaatacctgaaagataatactcaccatataataaggacctatcgctatgattcgtatatttgttatttagtaaggataatcgttgaattttaagtgttaaattaatttaaatattaactaagtgggagaatgttagaataattttatatggtaacaaattaaatattttatttgatttgatttataaaatacaattcattatttaataattatttaaaatattctaattattttaattaccaaattttagttaccggatttaatttctagaaataattatcaaaatattctgacaattaatgtggtagagactttgatggaaagtctcacctatataaatatagaatctcagtctccgagctcactactcattttgtaaaccatagtatagctatccaaagagagtaaagagagattggaagctcgattacccacactaatcaattttcttttctttctcagattcaaagctcatgtaggattgaagctcaaagaatcaatggttggatatatcttaatcctataattatatcatgtatatgtttgaattattccacatttcatacaaccgttcattaacaagtcgtatattttaaaaattaaaatcactattgtcgaaagtttaaggggcaaaattgtagcaattcttctaaattaattttttttatgaatggtattgaaaattttgttgaaaaattatatattctctaagtaattagattttttgaaaaaaaaaaaaatgctagaataccattaaaaaaaagacaaaaataaaaatagaaagctccatcaaatttttttcttttttggccaagcatgatttagtggataataaatatgagagacacgtggcaatttttatttaaatgagacacaaaataggacacaataatgagatagaggatttggatccaaatcatggggctaaacaatattaatatagtttggagtagaattttatagcagattcaacaacccaagattatcaaaaaagccacatgttatgcattgcaaaaacttacttttaattttattttattattaaatttaaaattagatatcatttgaactttatattccaattcagttttttgtttatatatcaatcatcttaagtacaatgtaagcagctccggattctcaattagctttttccactcgttgcaaaatctagccacagttgctccatccagtactctatgatctgcacctatattagcctgaccaaaacaacaaaatcaaaaccaaatcatggttatgtgagtagaggttatctcatcttattcatcaatacattgagattaactcaaatcggttaggattcaaggtgtggaatggaacagtggaagttaaaatgctcaaattttaagatggattcgagtgcattttgtttttatattaagcacattgccacaagttccttttgaacaagtaaaaagagttaaaacactcaccgtcattactgatgcagggtacacatttccaccatcagcaaactgtggaaccttttgaattcttccaatagcaatgatgcaaacctctggcaagttaagaagaggggagccgtactttccaccaattgcaccaatattgctcaaagttattgttccaccagatatatcttttggactaagcttgttatcagtggctagttgttgtaacctagaaagttcctttgttatctaaacaaatagataatacctcacatcagggaaaaaaaatctagagcagtactattttcaaatcctgaaatcttcaagctaatacttttaatggcattgacttgctttcatctgacaaagtcatcttatactactcggtacaaaaagcgggtggaaatcacattgaactaacctccatgatggaaagggactgaacattttttatgtttggcacgactagaccgtattgtgtagccatagcaactcctatgttgtgggaacctgtataataatttagagcaacaatgagcattgttaacttctacttttgcacattagatattagtttcatggattgggcagcaataagtcgacaaacctttaaaaatgacttcaagtgagtcctcaataaagcaactattcaccgaaggatacttactcaaggccaatgaaagtgattttatcaatattggaaggaaagtgtacttgatttttagatcagagttattgtatttgaaagagtctttcagcttcacaagtgcatcacaatttatatcttcaacataatggaaatgaggaactcttgctgccatgctcatagactgtaccattttacgttggaatcccctgaaacaaccaaaaatgaacaaattaaattgattctaacgtacactgataacatttgcatctacacatcttaaagcttttgaaaaacatatctccacccaatatttacctcagggtaactatcttatcctcgtagtttggtccgattccatctgatgcatctgcatgactttcagattcacccaaagtgtgctcagaatcagaacttgaagaggcagatgaatcttctatctgacccttttctacagcatacttgaggatatcatcttttagcactctgccatttttaccagtgccaataacatcatttatattaatgtcatattgctttgcaaggtccctaacagccggtgtagatataactccaccgatactttgtttgttctgctcagactctatccactgaatagactcagcactctttatatcctcacttttctgtgttggaactgagagatcttcaacaagcatttttaaaagtgtttctccaacctgcattttcatttaagcttaaacaacaaataagaaaatataaaaagtaaaagtaacaaagagaaagaagttccaccctcttgatatattggattgaatgataaatatttcagataaatatgttgcaataataataaataaaaaaaaaaaactaagaaaaatttatttattgatgtcagtcaggctcaggtagctctactcacctttacaatgtcacctggattataaaacatctcagctactcttcctttgtaacgactagttatttcaatggttgctttgtcactctgaacttcacatagtggttgaaattcttcaacttgatccccctgcaaaagaaaaaaaacatgaatatctaagttcctcgaattctctaacaaagaactaggtcattacaaaattaaattttactaaagatacacatcatccagatcatgaacaattaatcataattcaaaagatacttctcatttgattaacatgaaattatcttgatcacaaaggatgaagaaacttgagtctgttagtcagacattgatagatatgtccctcccaacatatctattttgatttgaaatgaaattttctcagaagaattcaattagaccacctttttattgattaatttctagacatgtttcatagtctccattgtcactttttgtctagcagagcagcatgttcattaatacattttcagtcacaacgactaaaatgaatgaatctaggaaaaagagagtgtttttgaggcaaacactgaacaagctttaaccattaacaacaacaccaccaccaaaagtcaagacaacaaattaacaagcaccataatcactcacctctttcacaaaccatttgaggagttcacattcagcaatgccttcaccagtctgtgccaatggaacttcaactacaccaactgctttaacatcaggcacatcaagagttgaatagcaactcctctttacaaaatgtgaaatcctgagctataaaagttgaaaatgaaattagaggtgaataacatcagtttgctactcggcttcagttaagcacccagcaacaaattcaagcaaaacaaaactataatgaccttaatgttcttcccctataatctt

SEQ ID NO: 218593 - DNA, 6086 bp, Cannabis indica
gggaagagagtatgatttgattgatgatgcatggggatagaacacgtgtatgcatagtatgatgagtaagtggtaaatgtgtaataaaaataagtttgtaagtataaatgtagtaataggcgtgtgagggtaattatgtaataaagtgagtaaaaatgatttttcatgtaaaaatttctatgatatattcaatattgttgtatataattaatgatctaatatatttatccgtttttattacaatatattattatgtaatcctaaaaaaattatataacttaatttaattagtatatatttgtaaaataagttagaatgtagtaaatataattttataattttttgttagctaaattattatatttaattattttgctaattttttaaaaatttgcatcataaccttaataatcctatggtcatttttctactgtattatagttttacaataatatgatttttttaaaaaaagaatcagcagataaatcaaaataattttgtatggcaatttgatcttttaagttttctttaacaaattattaaaaataaggtaccaatttactaaaaagaaatttgagagccacatgaagattcaccaattatttcaaaaaaaaaaaaaaagaagaagaagaaagattagttaccaatttactccgtccaggaaaggcagaactaaaacacatggaaacaaatattcattgaaataaaattgaggcttccataaaatcaaaaaccaatattccattacctaaaaaaggttacaatatgacttttcaagtgctaaaacaagcaaaggaattgttttaggcaagataacgatacaattttctgtctgtagtgtccctttccaaaaaatcacgctcaatgagggactcaatgcgtttcttaatctcagttggattagctaagaaccgagattgcagctgtttagtcacctcagctattatgttgttatgatccagagtcttccttgatttcatgatcctcactattgcagcttcaatctgcggttttctgtcctcctccactctctgacgggtctcctgtttctcaggttctgattccttttgtgcaactacggttcctattttaaccttgtagaatttgctggcaaacttgtcgttaacaaagaatgcatcatcctcaccaatgtctttactcatgggctcttttcgaaggacgttctttcccttgacaagagctaaggattgcagacacctctttagatcgggagctggaatctctgtggcctgctcaatctccttatagctaagacgatcagcattattgaatagcatcaggacacacatttgataagtcgacacatttaactcgtgcttctggcccttgccaaaagaggcctttatatcagctgtccccatgttcgtttgccaggacaatctccgaccagtatgggttccaagataatatgaccgaaacttctcacaaagtgctgacatttctgctggaaggttgcatgtaacactaggctgagttggccaagatcctgtagtcagaacctggacagtcaatgtagggccacctcctagttcaggatgactcgcataaaacccttgcatcgtgtcttgtgaagttttcatgtctgtaaacataccctctaattttgaagtgaactggtatccacactctgtcttgagcttaactatcaaacttctttcggcatcatcagagacagtttttccagataaaagcctctttgccaaatgctgtttatagtatttttcaaacacatctttttcctgcaggtaacggaacaacatcatcaccttgtcaagaattatttctacgtcctcttcgctaacccccttcaaacctttacggagcttctcatcaacaaacaaagatataaactcaggtgaacgggggttcagattaatgaagtactcaaatgaagaattcaaagcattctgaaatgtcttatcgttgttaaacgatgaactaataatcctatcatacttgtctttttcatccagcagccgttgaacaaattccacaggatccttcaacttttcaggatcagtaactagttgcttaccagtttctctgatgtgagaagtcatcacctcgcgtattgtcgacagaccattgtgaacccggcgaaacaggttgtacattcttttaagatcttcatacttatcatccagaagcatgtttaccagacctgaattttccatatgcactaatctcagcatgtggttcgcaatcatctctttctccacaacattggttatcttactttcgctccttgtgtccaagtaatgtgtgaccctttccacttcctcattcaaccgtctctcagccttcttcaaataatctccacaatcacagcattcaataaacttttgggactcacccttatagaactcagctgaaacatcgaggaaaggtttctcaaagtcctcttgataaacagaaggacccaaatccatcagcatctttattatgtttctcatcagccccctgttaataacttcaccagtccgttccctaagtattagttcaagaagcgtattaagaagtcttgcctgaatcttagtggcgtggacaatattatccctccataagttcagccctagctcatgaacaggggttttctgcgtacttggaatataagtcctatccatgtacatcagtatgtctcgtatcatttgcaaagccttgttgtggtcattccatttcctgtttagttcttcaagaaacaagcctccctgagctgcttcaatagattttgatatttctttgagatgagaagtcatggtggtaacaagccccgtgtacagcttctcaccaaatttgtgaagcaccatattgtaggcatttctaaattcatgaagaaactaaaacattacaaactcataatcctttttataatgaaacaatatgtaaaccctacagatcacaatgataacataggtccacatgcccataaaagtatcgttcatagatttttgttcttaagttgttctcagatattttaaataaaaacaatagagatgtttagtaagtacttcgtaaaaaagaaggaatacagtaattgttgtattcaagttatcatgattctcaagaaagaaatgctcaatggagagtgaattgaactactattacgatcattacagccataataactaccaaaataaacatcgctatgcctattctagttttagcagtaataacattaacaactggtcaactaacataaacctagctacgcgcatgttataggaataaaagtcaagaagcataagtcttcataagcccaaacgacagtagctggcatcacaatcctatgtagtttttttttggctttctaacccaactttacgctactacacaatcaatgaattacataatcttcaaaagttcaatcacgacttattctagggttaacgtattccgtaattgtactcataaattccgagcaaactaacacaagaaaataaaacccctatatcgaaagcatcaaattataccaccgagctagataattacaacagcaatctccataaacaacttgaaccttaaatcacacactaaatcaagagaattaaagaagcgccacctaggaaagggcatttcccaacatacataaaatcttcgaatcatgaaagcacatagaaaaatatttcagaggtgccaaataaaaaagaccgaagaacaaaaacggacctgtaaagctcctcaaagctaagtccactagcattatgattgtaaatctcatggattgcatgctctaaaatcttccatgtcttctctgcgtatttgggatccaccacaaccctatgtttgaacgcttcaatctgaaaattcctcttcttctggttactcatattttgttcttttcacaaaatcccgaaaatctgaaacgtgtagcttcgatccagaagctagacgaatccaaatctaaaacagtagccctaaaagaaaaagatcgacccgaagattcgaggtcaccgcaatttattgaacaggattacaaatagggggaaataagaaacagagcggggaaagaaaggagaagaagaggaaaagaaatggattagatttatggcggattgggtgatattatataaacatttaggaataataataagaaataaatattaaaattacagtttagccaaacaaaaaaactgtaagcagagaagagaagaaaagggttttgggttgcttgggttgggtgggtacgccagataccatacgtgagaaaaaggaggaggtgtgggggactttcgaattttcttgataacaaatccctttccttttacaaccaaaaacaaaatattgaaatgtaacctttttttttttttttttttggaaataggaaatgaacttagtttcaaacagggccattgcctcccctactgattcgtacactcattcttagtcaattattagatgaattagtatttatttttgtatagatttaatttgttagtgtgtaggtttgggcttaaaagacaattttgtgatggattgagatctttgagccaattttcgacaatgttttcatcattttttcgaagaacttatgaaacccaaaatgatagagctcgttcccagatttccaaaacttgttaaatcatctcatttggagtttgttcgcgaaagtttgcatgatttactgagcaaggtccaatagcgacaaaaaaatggcctgtggcgctatagcacaaaaattgttgcgctatagtgccgattttgaaaaaaatgatttttgcgctaaaacaaagccttgaggagtaccgcatggcactatagcatcgggtcttctgtgctatagcaccgtacacacaattttaaatttaaaccctaattctaaatagattctttctatcttttttgggcctatataaagaatgatgtaattcgactttggggacgactggagagatagaaataagtaactttgaaattagaaaaaacattgaagagcaagagaaaagagattgaaagcaatcatcatcaactttcatcattagagttctttttttcttcttctccttcttctttattcttttatttagttatttaattatgaacatgattattgttctagtgttattttttcacctagaaactcgagatcaggctcccataaggatgacacgtggactcacatccctcgaggattggtgatctgttagaagaggacctctcgagaataaacctcacctgaatcagactcagcgagatgatgtgaccttgacagagtccagttgcattattaccccttgcgtaatgtaggaccaagaaggaattatacaagttcacatataccaagatatatgcgataactatgaagacttctcctgcgatttagtaaaatatcatttctttacatagcgagttggtccgaatgacctaacatgttcgatgacccgacaatgactcgcatatcctaggctgtcgacaatgagaaggtattcgtatacgcgactcaattaggacacagatacctaagcgcaagacccattagcctcgttttaacagaatacaccctaagcatgtgagcttgtgcgagtatatgaacagacaacttgccctatgaaaattgcatacgttgatgtatttagtaaaatagatttaaactgttcttcatttattttagttacatttttctaaatttaatgctaatattcaatgtaaaacagttcaataattaagttctgtgtaatcaaagggacactttttttgtatataaaggagtgatccaatatgaatagaacaagctagaaaatccttacaacagttgactaagcagactgtgatctgactgaaccactatacctcttcgtgttcattacttttattagtttttttaattttgtctatgtagtctcagttgaatactcgccattctaggttgagtactcgctctcttttcttaataaattatatttttattttcattgggtgttgtcaaaattcctccaacaacatttggcaccatttgtgggaacgtatttattttttatttcggaggaaaatcaaaatggctgcaaattagacaaacagaaacaacaacacgggatccttcaatgtcggaactgttggaaattatttta

SEQ ID NO: 218594 - DNA, 2528 bp, Cannabis indica
atgtatgatcaaatcttatatttattgccattaattgtaatcaatatattttttttaattttttaatatttaactcttatgtgtatataaataggagatcattagaaactctattttctttatctaaattataatatcttataatataaaatgtgtaatttcaactaaagtaaaactccatttctaaaaaaaaaaaaaacaaattcggaattagaactgtggtccgtgagttgtacaccctacttcttggccttgggttggctctctccaatactgagctttctcattctgaaaatgccgccattacagtctctgcaacttcgacgactccttcttcgaaacctattttcttcatcttcatgcctctcttcttcttcgtctttcattagaaagccccatttacttacttcatcagaacttactcccgcttattctccattccgccattaccaacccaccccttcaacctttcactctctctctctgccccaaatccatctctctagatttttttcttcctcgtctgaaaccctaatcgaccaagatcagattgcccagtctctctcctcggagctcgtcaaggacccggagacagagcctctacccatcgttgaacgccttacactcggcttctctcatatcgtacccactccgcctatagttctcgccgcgctcaatctctcccctgaagctggccgtacggttctagggtttaacgaatggctcatctcaaaccctaaatttgatcactctgacgagagcctctcgttcttcgtagattactttggacggcgcaaggatttcaaggtgatccacgatgtaatcctcagtggccaaggcgtggctgggcctaaaaccctagcttcagccattgataggttagtgagagctggtaggccaactcagacgattgcattcttcgagaagatggagagagattacggactcaaaagggacaaggaatcactcagattggttgtggagaagctttgtgaaaatgggttcgcaagctatgcagagaagatggtgaagaacttggcgaacgagtttttccccgacgaacgaatctgtgatgtgctgattaagggttggtgtgttgatgggaagcttgaggaggcaaagagattagctggggagatgtatagaggagggtttgagcttggacccatggcttacaattcaattcttgattgtgtttgcaaaatatgcagggaaaaggatccttttcagcttcattccgaggttgaaaaggtgcttcttgatatggacgtgaatggaactccaagaaacgctgagacattctttgtgttgatcaacaatttgtgtaagattaggaaaactgaagatgccttgaaagtgtttgatagaatgggcgagtggggttgttatccaaatgcagaaacttatcttgttctgaccaagagtttataccaggctgcgagagttggagaaggggatgaaatgattgatagaatgaagtctgcaggatatggtgaattgcttaacaagaaggagtattacagttttttgaagattttgtgtggaattgagagaatcgatcatgctttgagtgttttcgagaagatgaagaaggatggctgtgaaccagggatcaagacttatgatttgctgatggggaagttgtgctctcataacagactggacaaggctaattcccttttcaatgacgctctgaggagaggaattccagtggaacccaaagcttatcaggtggacccaagatacatgaaaaagtccaaggctgagaagaagaagaaagaaaagaagagggaaacgctgcctgagaagatggccagaaaaagaagtcgcctcaagcaaattcgattgagtttcgtgaagaaaccaaaacgaatgatgcggcggcctacttgaattctaacttgagaacatttcaaattttccaacttgtcataaaagggtatgttttgatgatgctcttgatataagtttcgtttttcctttgagttttgatacttctctctgctttttcatttttagtattattgtttaatgcggctctcaagtgtttcttgtgatttactatgattgttagcaacattagtaataagattacttcaccaaatcagaagagctttattttgcaaaattatccctgtcctgaaaataaacttatgtcagggtaatccatgttaacaagaaaggtggtgtttgaaatttgatggggatactgaccaatgcaatgaaattaaagagagggtagtaagatcggtgtacaatttgtatgattgtatattttgccctagtcttgggggcatgtatcataatgtgaggattagctataagcaatttaattccgcgattttagaatgtgcaatagtatcagagtttgcttcacgaattttgtatcaaccctcctataagaaatgttatcttctctttttttttttttttggttatcttgttggcattttgttttgattaggtgaaggtttattgtcataatttacaaagaacaactccaaagatttgaaggtgccttatcagct

SEQ ID NO: 218595 - DNA, 1776 bp, Cannabis indica
aaaaaaaaaatataaagaaaaaaccattaacgattaataataaacatgttcctggctaaatgaaaggtgttatacataattttagcatataattcaataatatgaatttctatgtttcttttttccttctctttagtaagaactctagctatacctcttgatcatttgctataggggcaaattatattaaagccaactaaatagctgcaaagtgatcactagtactccatgtttgatttccattactactattaatccaagtagtagtattcccattctgatgatcatgcccaatattattagtactaccactgttactcggcgtcacagtgctcacctgaaactgctgcggtactactggcggctgctgcggctgtccgtaattagaattaccaaaaaaccactccataccggtgggtgttgcggaatcattcccggtcgaaattacaacttgatcctttctcggtggctgatgatgatgatgatgatgatgatgatgatgatcttcttgtcttgaaatctccagattatgaaacaaaagaggcacagaagatgaagattgatgaggctgcttctccggattattattattattattattatcatcattatcattattattgttgctattaactagagtttcgtctttctgatgagtctgatccccgccgaacaacatggtggccagcctctgctgctgtagtttccagtgaaggtcttggttaatggaactcaaagactcgatggaagaagctaggttggtatgaactgcggccggtgcactgaacccacctggacccaacgacaggggattataattactaaaactactcatcatcaatggatttgatgatgatgaggttccagatagatgattaatgctattattgtcgaaactagtagtgttaggtgaaacgatgacgtctccaaaagtattagtattattactgttactgttatagattaatccatgagctgatgaagggttatgatgtagtactcttgggaaggaaagcccgcttagctgaaaatccatggccggagaaattccgtgaaagaacttcaacccaaaatccgacgtcgatggtgagctggaatagtctttggagtcggcaccagaaccggaaccagagagacgggaggaggaagacttaaccttcttgttttttctacaaccaccgccgacggggacgtttcttagggctccgcctttagtccagtatctccggcaagtcttgcagaagtgtctgggttgagtgaggctatagttgttgtagtagcagaattttgtgttgggagaatcgcaccgagggcacttgagagattgctgctccggcgccggccttgctgcgctggagtttttccggttgcctgcagcgctggttccgtggatctcatctttggaggaagcggattttgtaggggctgccgccggagcaggatcggcggacatcattggttatagttcggttaaataaaatctccgtatagtaattgtgtagtggaaattgaattatttttggttatatgattttgggattggaagttggtttagtttccctttgtaagaggcaaaaggttttgaagatttaattgaatagtttcatgcatgggatgtagagagagagtggaaatatattggtaaagagtacctgtgattttcatcaaagaggggatttgggtttagagatggtctatttatatatttatataataaggtggatttagtggttggatctggtggaataaataaaagcttaagagagagagagagag

SEQ ID NO: 218596 - DNA, 2710 bp, Cannabis indica
gtagcgtgccttagcattagggcgttacaggatcctacacagacacccttgtcctaccacacatgagcagaatggcctagttgagagaaagcatatgcatatagttgaaaatagattaactctccttgattgtgcttctatgccacttaaatttggggatgaagcttttaagacaacaatgtattttcacaataggattccctcactcgcgacacaaaacatataacaccctacttgcttaggcacgctatcgtgattttttaattactatgcctgtctttgctatttaaaggatttcttgaaaaatgtgataaattataacattgaaatttaaacataaacattgataaatacctaactttacataacttttggaatcccgtttaaaaatttacaataatatacaagatatatttttccaaaagtatcacattgcgactacaaaatataagcccatgttgtcctgaaactgaacactccaagcttaagaatctagatatgtaaaatgatcctaaagctctggactcattgatgttcagccttaaactttcctttacctacacatgcaacatatctgtgagtcgacaaactcagtaagaaaagcataaaatacataaatacattaccgacttgcatttaggcacccatacacctatctacaaggcctaatagataaatcataacgttcttgaaaatgatatgatttatcagaatatcagccactactagtattataatcgcgctgcagacccgcaagatatttacactgttatgatagcatcagtctatacccaaaaataccattgaccataatgtcactcttaataaacactatacactattgaattctcaagatgtaagtatgggctagtcctacgggtaaggggtaacgaataagtcaaagaacctgtatagtacaattatgctagagcttaaccatctaaggattgtgatcaattgacgtaagatcaactaagtgatgtcaacttagaaaggacataacgttatgtttatgatatcttttccactatcaataacggtccaatctaatgtatagccaatacatccaatacaagtttacgttgctaatgctcagaaaggatattccagtacttatacaagtataagtaaactatatcgctaattatcacatccgtataaattcagtgcactgataaattgtgggactaaatagtttgaagcatataatcataatcatttagtactgtgtaaaaaatactatcatcatgagtaacaatatgttcaagatttaacataatttatatactaaacatataatcatgaaagtaatcatgtgaactatgcaacataaaataatttctgatcttttatttattagtagataagattatattgtaataaattattgtaataaattatattaataaattttatttagggcataaaatcccaacagcattttgtataagttcgaaaaatagattcgggatcctgaaatttgcaaacttttggtatggaatgtgtttatataagtgaagtgtatgactatttaaaaggttttaattaaacacaattttacaccaaactttttggttaacaaaagttaatacattaattatgaaaaattgtagcgtgcctaaactagtagggtgttacattaaatctctactttgttagagaaaagcttattcagaagatgaaatcaagcacacccccacacttacaaaagttacagatgctttgactaaagccattttcaataaaagattcatggatttcaggtccaaacttcacattgaagatgtttcaaatgctcagtttgagggcaagtgttagcatatgtgtcacctagctattggagttagttagatttcggttgaagttagtttatttctattatgccttcggctgtattgattctactctaacgtaactctacacaatgtataaatattattgttctattctcttctgaccaataagaagaatccatttctttcaatatctttcttctactttttctctccttttctctctattctttcttctctttagatatggcaaaacgttttaacattgtgttattcttcatttctttcagcatcaatatatataaaggaaaggaatgagacgttaacatgacactctaaaatttcttcaatgctattttcttttccttaattctctcatttaattattttattagagcataaatttataaattaatattatactattactttaataaattttttatgaaaatatctatgataaattaatttctttattaaaaaaatacataataataaatataaactaaattaataatattaaattaaataattattaaattatttatgtatatacgtattcgaaactatatgtatgtgtgattttttttttattttgcagaatataaaaaaagtacattttttatacaaggaatttattatgaatcaaatattataatttgaacaacaacaaaaaaaagcaggtgtgagattatgtacaagaaacaggtgtgagattatgaatcaaacttttttataatgcattatttttatatcacgatcatataaagttgatgtctttattgtagtttctatttatgtcctcaaatttctcaacttaacacccaatttaatgttctgttagttgataaataaagagccacatgtaaatatagtattggccaaactaataatttttttagaaaaaataattttaa

SEQ ID NO: 218597 - DNA, 5908 bp, Cannabis indica
gcataaaacccaacactttctttctatttttactaatttgtgagtctttctcattttctgaagaaattttaataataaacattttaaaaataatcccacattgtttaggaaccattttgtgtgttgtactatatcgtataaataagtctattaatcttcacttttatgtcacaaatttaatttttttttcttcatatatgatagttgtttacagagatttttagaaacaaataaaagagagcttaagaaagaaataaaatagtaaattttagacaaataatttttacgtggtttgagcgttaataatccctagtctacgagtcagttgtcccatgtatttggataatacaagtatttactgtataaaccttagctctgcattccttttgtctctcttgaagaagaaagtttgtaggaatttttgcagaggtttggctagtatcaaatttgtcaccacttgtacataaaaagtgagagtatttataggcttacatgtgggtaagggcatttcctttacccacctagagtttcgtaccacagcccgttgcaagggctggagaatacaactgcagatttgactgttcgaccttggagaaccttcttaatcgtgcagtgtgcaagggtaatgcctaatactttctgaattagggacacgtgttgcttaaaggtttttcttttacaaattaatctctagacaagttgtgggggcaaaaggcatgtcttcagatacgtacgcgcactaccatggtctggcatggaggacaagatatgatattgtgtcagaaaaatgtataatcatctgtaggtcaatttttatatgcaattggcatggcaatttgccttggtgcagtagctaagatccatgaccagttcgtagaggtcttcacttggtagtcaagtagccaaactgtgttccatgacgtcttggagttggggacaaatatggtccttccgtgtcccggagatgttacttgggttgggaatggttctccccatcaactatccataaaacctgtcccggactagcaaggcatctcagcgaggaaccttaattgtcatctatataaatccgagaggtttacacatctttgcctctatttatgccacatgtctttggtataaaaacaagaataatatttacctcccaagcttttgggactctttgagtttcaggagcttgcaatttcttccccggaactaatctttgacatgtgctgactattagagtcgtggatgcatctttttggtgagttgtaatccattgagggtcgatggaacgttagggcttgctgacagggcataatgcagaatatttaatgccctagtcaattcattacgtgcgttttgggggacatttgttagaaaaggtgaaattgacaatagggtgatttgaaaagacctttctttattgcttgttggactcgaggcaaatcatggtaaagaaatgcttttcaaccctttcaactccccatccgttggatcaaatgagatgattgtgtgggagatccagaccgttgattttgaaaaaagcctaccttcttttcgaagtataaattgacatcgaaggctcttttccactttttccacacatttaacgaacttcaaattctctcttcaatttttctttcatttttccttcgtcggtgaatgcaagaggagtgtgagcatttgattcaacaacttctaattctccacatgaggctttttccagacatcaaaccccttcgcatcgatcacctgaatctctaccaaacaaaggattcgacttccagacttgttgtgatagtttaatcagctaggtttgaaagctctagacaagattctacaacaacaccccatatttttttcactcaacaagtaagtactctaactcatggttgaactttcgttgtttcgtacctaggatagaaatttcttattcaagctaggattatgactatttatatatgttgaatagtgaaaaaggcttcgtgaaaaatttccatagcttaagggtagatctttctgagaattgccttgccgtaaaaaggaggctagaactgtctgggtatttttctggttatttgaggtttataggtgcatgtatatagaccttagggatttgttgattggaatggaaatctggcgattttttgttctgtgttattagttggtcgcttcaaaaagcttggtttctcttcgtttttgtgttggtagagatggacctgaactaggatttttaattgggcactgtgggaaccactaaaggtgcacctgttggcctcgtaggggaagcaatcacggaaggaacccaagctatggtttctattgaagtgccccaacaagggaaaattcttgagattgtcctaaaggatgaacccatcacggaggaaggaccctccgtgaaagccaaaggaaaatggagggctaggaccccctactgcacatgctttcaatgactatttggaagatggactagaaggccaattgtttctgttcttatggaatgttgacaacataagttgatcacgttggtctttgcaatattccaggattggtatggcacaggttatctgccacgggagagtctgcgtccactagtgtggagggattcagtgcctggagttggtcccacatttccaatggagcacatcttccattaaggacctattttgtgaaattaatggctaagattgggatagactctttccagttaatcccctcatcgtacaagctcctgggtgggtggtatgtcttttgcaagatgaacaagttggaggtaccttcctcggaggagatcttttacttttacagtgtaaaggctaaccctatgaggactaacaaaaagaagctagacttcttcaggcaggacaagcatcctaattcatattgtccaattcgccacactaatcgtacccacgaccttcgtgagtattggttcttctcctccgggttccccgtgaaaagggtgccttcactctagctgaacttccagtgccaggtattgttgactcacaccgtaatttcttatttcttagattttctttgtattggttgatttactgatggtttttcttgtaaattttttgacttttgcgaggacttccatctcagagcatcaaaactgcagaggtagtcaacaaagtggctcagtatggggccttcaatgaggagcaattaagggtcgaggaatggatcacgactgaattactttgtaggtctagcatcattgaaaattttcagaacattgatcctgttaacctccgagggaaacgccaagctccaaaagaggtgaaagaagccattgcaaccgacttagccgttgtcatacctaggcgactaaagaggataaagtcctggagcctgattggttgacccgccacccaaatcccttatctaaggaggaggaaatttcaaaaatatttgctgcagcgtacccagacgtggggactccaggaactagtacttcgggaagaggtaatagaccctttcgcgtcttccatacccccaacctctaccgcatttcttaggaggatcaggggggattcaataaatattttttgagtttagaccgctatagatatcccatcagtgattatatatatagagtagaccaatttgttaggagccctagtaatccaaaggcattctcagacactgtcagggtggatccttttgtggtcatgtcattgcttaacttcagggaatatggcagcttccttggataaggaaacataatttctttttctcatgggaaatcttatagctgctaactgaatggttgcacccatgcacaagccttcttagttgattttgttgttttacaactatgtcttcactagttttgacttggcttgtattttcttatagctgatattgtggttatgtgtgcagatactccagaatctaggatgttgaagtccttgagtaacaaaataactgccacctcagctaaagctagagacacctaggagaaggggaagggtaaggtcaagtaccgggcctctaggatccgaaagccacgtcctgcctcaacttcttcatcattggatttttgggagattgctcctcccataaaggcaagctttacaactctgggttcttcggctctcgttggggggtggggagaaaactcctaccgcccttcgggaggcgtccaaagtaccagctactttgagggagcaaaccttgaaggaaactccatgggcggagggagtgacttccagcattttgacggatacgagaggttcaaatgacagcctggatgggcttgtgtttcccaagaaggatgcccccgtcaagcctaagcgcaaagagtcaacttcttccctgagctagagttccacaaaggcaaaatattcaactccaactccatctaatccattatttataacaccaccaccattgcaacaagaataacaactacaacaacaacaataaaaaatttcacaacaacaacaacaaattccaccgcaacaacaacaatgaattccaccacaacaacaacaacaaactccatcaccaccttaacaataaacttcgcatcaacaacaactacatattgttccttctcaacccaatctgccacaaacacaaccaacatcttccaaccaactttttaggccaggtattgccttgggtaggattccaccactggatttttccttccccgtgagaccagccgtcctaagccacaaagttctcaccaaaatagatgaaacaactctcactctgaacaagcatcatgagagagagaaatttgtccttcaaaaaagatccaacaggctctctgccgtgaagacagttgagattgctgaggggattcgtcagcctttgccatattggctcaatcttggacttggtggaagtgacccaaaacttggtacatagggttggtagagaggtggcacctttcgctacaaagatgctggaacaagtaggcacgagtatgagcaaactcacttttgagaagtgggcagttagtagcagccatgactcatacaccctttctgtggtagcaaagcaacatgcaacaagagtaagttctagttttcgagcattacccatgttatttgtcttttggctgagcactgttgtttaatagtatctgctctgaatctgattgccttaattgtggagaggacgtctaaagaggtgggtgccatgactattgagctagggcaactccgttccaagaattaatcattagtcactaagaatggagctttgcacattgaggtggagcaagataagacccaggctacccaggatgtcaaagatgcctaggatgcgtgtaccgccaaattgatggtgatggagaaggaactcagtgccaaatattagaagctctatgagaaccacaaggctgaagctgaatggaatatccaatcaaccgtgacatctctccgtgaagacctttgcaaaactagggaagacctttgctagagtaaggaagacaaagataagtgcaaggctaggttgatctcccagagcgagaccttaaaaatccaaatctagcaagccaactccataaaagaggaaggtcgtaagaaagacctagtcatttagagccttcataatgacaataacgaggagaaaaattgaaggattacttatcaatcaaatacaataacttagaatttttctatacaaccatccgtgtgaccagtacttcccaccaacaaaccatagagaagctaaagggggaggctactcagaagcctgccaatggcattaaaacttttattactctggcaaccatgtagaggatgtgggaaaatgtagttcagaccatccaggaatgtggtttgctatcactgagctacaaaatggacaggctgcattataagactccctcaatgatacgatagagtaatgtcatgtgtctgtcacagcccttcgggaagagttagcaggaatgtcaactaag

SEQ ID NO: 218598 - DNA, 4356 bp, Cannabis indica
ttttctttagtataaatgcgtacggatagagaccccgccatttgttgtcaaatgaaatgcgtggttaccattcaaccaagtgggacccattcacattttaatgttatagatttctttctcaagtgattcttttaatatataaaaaaaaattagaattttacggagttgggttttatggcgtaatatttatatacactagacattagacaaaacaaaagcacaaaaatggtcaattttggtcctcaaaaaaaccactaatgagggttggtctacatagactaaaatggtatattctcattgcattattttgccaatttgtaatgtaatgatcaatacaaagaaagaaaatgaattgatatttgtttgttgaataaaataagtaagagaaaagtccaaagatgaagaagaaaggagatgacattggcatctgacaaatgacaaaccagctactttcaaaatgtaacacaccattggagcgtctacttaacttcctctaacagagcgcgtgggataccaaattttattttaactatactcacttgcttgcccttcaatgaaagttgaaagctttccatttttacatggcttacctcatcacatcatccttaatttctcactaactcaatcattagccgcaacccaaaataaccaaataccaaatctcaattcttttttttctttttacatttctctacaactcttatcttcttctttatctaaatctaccttcttgttcctgatttgggttcttctgcaactgggtattttctttttctttccttcttttgtttttggttggtttaatgtaatgaagaaaataataaaaaagtttcatactttatggttttttggttttgtcttcaatttgtttttttcttttttagaaaagtcttcagtttttgtttttggtgatttgaagtgattctttttaatattttatctttggagagttgggcattctacacttgttatgttaagtttgttattttcagcatatattttgagttttgtttggcttgtttaaatctaggatttccatggccaatgattttgtcccatttttgcattcttgagggataaaatgtaagatgaactttgtatttattgaatattactaagcagattagattgatttcttgacaactttatggtgctagtgttctctgatttttgttaaaactcatgtatccaaatttgtttcaatcttttgatatgtgaaatagtgcccaaataggtgcttgtgttgccttctatctgtgatctcagaacaagtttgagtccttggaatttcctaggttgccacctccaattggagatatatatatatatatatatatataatattatcttatctttttaattaatactgcatttacataaacaaggcctaaatgtgattgtgatctcaatttgctgattgatgatgtttgtttttgacatagtgatcttgaagacactatttcttcttttggtgattggacttttgagccaatttggtttgtttttttatgagataattgtggctcttatgagcagaaaaagtcaatgtcatttcggattagaacttaattattttgatttgggacttattttttgatttaatggtgactgtaggataattttctgcagtgtggtggtgcactcctagtttaagtaaaattaatcaattgagtaggaacaataagggtctataatcacatatattttctttcttattaacattgaataattataaactattgtcattttctgtttgcaggagtcacatatgagaaaattacaaattatgttctctgcaaatactacttcacatggattggattattaaactaagcaaaagttgttgaagtacaccaatatggccacaccagagaagcaactgcagccaatttgatttgtcaaaatgtgaatttttgtttcttttaggagaaaaaagagtatggattgaaactaaatcaggagagaatattattcagctcgggtttcatctaccgccatgagtcatcaaagtattgtttcaatgacacaaggagaggcttccaaagaagtctcaagctcatattgcattcctttatgtccagggcagagtttattgggtggtgaatgttcatcttcactttcatcgccgttcatacgcacacagtctcttagttctcctattcatcctcctaagtacagttttggatctagttctagtagtactcctatgtctcctggttctcatgttgagcatactaagagttcattttcgcggtcttctgtcttctgcactagtttataccagtcttcaatgagctcagaaacacaaaggcatcttgggaatttgccttttcttccacctccatcgtgtaaccagtcggtttctgctgttgcatcaacaagttctccattgcttttcagtggagatttaagcaatcaatttgatgaggaccaatctgattcagcagaagctctcatgaaagactttcttaatttatctggggatgcatctcatcattctcatagtaactttcatggtctgagctgtgcaagtgatagtgtagcattcactgataacttggaattgcaatatttgactgatgaacttgactttggtatctctgaccatgcagaaactcccagagttgatgtaagttcattatgatactattatttctattaggggttcaagctgcattgcctttacttgctgtaaccttttgaatattgatttcttctgttcattcaggaaatatatgagacttcaccaaaaccatccataggattgatgtctgatgacggttttcgctcaacggctccacctgtagacgcccttttaaacgtcccatctcctggacctgctgctctacataaaccccgaatgcgatggacgcctgaactccacgagcgatttgtagaggctgttaacaagcttgatggagctgaaagtaagtaaccaaattctcctttttgtattgacatggcgatggggatgctaaaacttcttactttaccttgctttttgaatgtagaggctactccaaagggtgtattaaaggttatgaaagttgaaggcttaacaatttaccatgttaaaagtcacttacaggtaatgaaatttgattcttactttacttggttgagtatggttggtgatggaattaacagctaatcctttttattattgtagaaataccgacttgccaagtatatcccagagaaaaaggaaggtaaggaagacatgatggtttttggtcattactaaaaatgtctcaaatgaatgagtttaacataaactttgtcaccacagagaagaaggattctgctggccttgaagaaaagaaaacaccattaagtagcttcgaaatcgatagcaagagaaaagggtcagcattgtcttaaacaaatcattgtcttctattaagaatgaaaatccaagctctcttccttttttttttacaggagtattcaaatcaccgaggctcttcgaatgcaaatggaagttcagaaacaattacatgagcagcttgaggttcaaagggctcttcaattgcgcatagaggagcacgcgagatacttgcaaaagatcttagaagaacagcagaaagctggtagtgccttggtttcctctcaagctttgtcatcattgagtagcccgagctgtgaagagtctcaccaacagccttccccttgtgctgctgtatcatcaagccaacaactagactctaaaaccgactctgcatcgtcctctcccccattcaacaaccacaaatctactcaaagtagtcatgattgtgatccaaagcaaagtaacaaacgaatccgtcttgatgatgatgattgttgaaaattctcaattgtatgttatgtgagctttttgtatatcattgagttagccaaatttgtagtatatttgatttagttttggtattagtttttgactctttaagcaatttgattgatagatatgaaaaactgttatttatctttcgtttcaaacaacctctcctcacctctattaatgcattgtaaagttttatatgcatttttcttattacatggtttttcaattaatgaatatcattttttgtatattttatattatttaagacttgaaacaactacctttacaaaaaaaaaaaaaaaaaaaaaaaaactgaaacaaaccacactaatataattagcctaatgtatatgctattattagtattatcttcttcctcattagagaaaatagtttaaaaagatggtatatttttggaagatcataattttctttacaatcttcaatgatttcagatcagtattttcgctcatattttatcatcttgttctttaatttaacaaaggttctatagatctatgatttagagtttt

SEQ ID NO: 218599 - DNA, 4537 bp, Cannabis indica
agttttgtagtacatacgtgttcctcattaatttcgactactcttatgtctatactcaacaaatggcaacacatttctttgatctttaacaagttcattttactacattacttttatcacaaaaaaattattctctaatgaacctttacatatcatgaattagtaaatatttattttaacaaattttcttaataagaaactactaaagtatcctactatacatgtatcttattgtgtttataatacatatatgtattttattgggctatgaaaaaaattggatatataatggtgacattttttttgaccatgatcaggattttaccgttgagttttattacctcataaaattatcttacaaatatattctaatatataattttctaataaatttattaagtatatattttgatattaatatgttgtaggtgttctcttatatggacaaaaaaagaacctcaagtcatcttttatgaattatgatattatagtttttattatctaatattttttcatgagatatctctttctcatattgaatcacatagattaattggatgaacacctgaattatatgttaggatatattttttaaaattcttttttaatggtattcattataattataatatcatctctatataatttttaaaaaaatttaagtaattcaccgaatacagagttcttaattaatattctaacttaccttaaaaaaaaaactttataatttcaacattgtaagttattcgaaactataaaaaactataaaataaaaaaaaaaactaaaaaaaaattatggtatgtattttcgagtacaaaaattaactaagaggttataataaaaggtgtaccactctatatcttttccaaccaatatctgtactttggtcccagggttttgtcatatagttagagattagataataacagattcatattatgacattattatataaatatatttatatatataaaaattaaaaaaaggtaacgtacttttgcctttgtcattggtggtgctggaggaagcctttgccgagcgcagcttccttttcttcttcacttccaagccaccagtaacattggaatccggcatcaatatcctttcagtaaaaggattttctacttttgtcccgaatgaggtattcgatccatgatgaaaagcaaaggtatcatcaaacttgggttgagtgattgtggtatcagtaataccattaataatattattattagtatcaaaggaaggaagattacagaactccatttcagataagggggccagatcattaaaaatggatgagggttccgatgagaattgggaacgagtactatgattgatcaaagtagtgtattcaggattggctggctgctgaagctgctggtgataatcagtagtaaaggattggttttgggacgcaaaggtaggtgaagaattgttattactattattgttattattttcagttcttttaaaccgggcaccggactcagctacgatcatatccaggtcattttcaaacattgatgaattatcagacagagacggaaaagatgaaggaaatgaataacaagtgttgttattagcaaacaaatcttcatcatcattattattattattatgaatgaacctgttttccgctcgagctttggactcagcaactacggaatcaatgaggccactatattctgacgacgatgatgatgttggcagtactgtcggtcgaaagtactgggtcatcgtttgggtcgaagggagtcccagttgttgattatgcacagtacccatattgctgttgctgttgctcttataatgatcaaaagcctcatcattattggccaacgtcgactgcggtgttgcaaatgagaaagcagctggtgaggaagtagtaccaaattctctattactacatctactaagttcgagatcagcctcagccagtaacctgtccaataatgacatctcctcagatgggtcggccgtttggggcggaggaggtggtattggtgcccgcatggattgatgaaaaggtggtaccctttgggtggaattattaggaagcatggattgatgaaatggtgtggtttgggtcgaagtgagaactgaaggaggcattgtttcactggaatattgatgaaacggtgtcttactgtaatattgatgaaagggtgttgtttgggtggaagaaggtagcactggaggaggcatttgatgagtatgcgaaagtagctgttgacgacgctgatcatctggaactggaatattattattattaccgaagacctgcatattcttgcgcctatcgaaaacttcattgttggccgtgaaccttgaagaaaatggcgaagctgatgaagaattggtagtaggagtagtactaaactgatgatgacgattagtactactgctactgccattgatgatttgatcatttcttcgaaactttgattctgactcaactcttactgaatccaataagaagccagtacaagttgacggtgaggaaaagttcgattcaaacggcgccgtttggcttggaggaaaagggagcatcatttcattattacataacatcttcatcgccaccaccatattattattattgttattcatgttttgaaaattactcatcatcctcatccgatcatcatcgtatgtagaagtagtaccactactactgcttccaactcctaagatcccttttttataatttcctaccaaacaccaaaaatatttgtttatttttattatgtttaaaccagcaaaaacaaaaatagaaacaatcgaaatcgtgagtaattaatccttacttctttgtcgaggaggcttctccttaggcacgacaatcggttctttgcgtttcactactcttttgcccttactgttgttcgattgttgtagatcgagaagactgggacatgactgaaatataaaaaattggacaagatccaacaaaatgattagtctagctatctagaggctatgaaatcgtttatatacgtaatatatgtatacataccttagtcctagtaagtttctcgttcatcatttcagcaaatgcaacaggaacgaaaacccaacacaccttgtgtacttccactagtaagatctgtcgggactatataaaccctaaatttgccagagacgctatatatattcactcaccaaaatcgttcgatgaccagtagtaggattcagtaccatcgcatatggttgtacaagctcttcagtccattgtgtttggtcctgactcaaactcaatgataaggagtagtaatgttttgtctcggtttcggcggaaccattattaggtttaagtaggaattaaaaaaggaaagaaaaaacgtgtttatcttcttcttcttattattatttttttattttaaaattaattaatttggattttttattttttttattacagctcatacttcaaatataatgtccgatttttaaaaatagattattaaaccaaatcccgaatttaaaaataaaaaagaaattatacaaaaaaatctaccagaataattacaaagaaatatgctgaatatttataatatagtaccggaatcccaaaacgacgaacaacgaaacgatcccaacgtcagtataattctttgttcggaagtgagttgactttttttttttattcttaatatttgtagttacattgtaatattcttattaaattataatgaaatgaatgttatatatttttttgaattggattttttaataaatattaacacgaaaaagatttttttcttatctgaaaaaattacacgaaaaagttggtataggacaaaattatcttagttctaattatggcaattataaatcttaaaatttaaatattatgctacatgattatcatttatcaaatttgggaattttagttagtgatattattgaaatcattagttaaaacataaaacaaatttagtggaaactgcatatataaccacggtccacaatgacttgaatgaaaaataagggaagagtaaatttatgcaatgttgcagctgccacgtttttaaaaagtttttagatgtagaaaaggacaaaagaaagcaaaaagtacttgatttcaaaggacaaggtgaggtacgtcatggctatttttcatcatgttattaatcaagccaagaacttccactagtttccgccctcatatttattgagtaatatataactatatatattaatatggtttaccaaatgatccaaattctacaaaaatatatttattaaagccatatttttgtgtgtgaatataagaattaaaaactaaagatatgggaatgtagtggcaaatcctacaaacctgttcttaataagaaatatatgaccgtatgaaaaaaggtgatttagtaatgggagtatacatttcccaaaacctttgctaaccattcattaattgaacctatcttggtctcaaccttggttattattatatcatctttattaataataatatatattattatatatgtgagaggtttaataaagaaaactagagtgaaaaaagagttaggacaa

SEQ ID NO: 218600 - DNA, 3075 bp, Cannabis indica
attttttttaaaaaatggacatttactaacttagtttccaagtttaggaccgttttgcatctcagccctaaaaattaatttttgattctttatagttccccaattttttgggctagctcgctatagtttccatatgaacacatatattattattatatatatgagattaattagcatcacttaaagtgtcatattgttattgaagcaaataatttaattattaaaaaattttcaaaaaatactctttttcatgtcttattaataattttacgatctaaagtttttatttattaaaatactctttcaaaattttttttcttttaataaaatgggattctcattaaaagacaaaaactcaaaccaggtctaaggactcaaagaacatccggtaagctcggccaccacactcttgcaaaattaaaagacaaagcaattcttagcaaatttctgagctaaagagttcgcagaacgattatagaaaataaacttataaacgttgatacgattagaaatagaatcgaaccaaattcaactataaataactcttttttctttagaaattagatgacttgttgacagctcaatttgatttccacattcaaaaagccaaggcttgaacaaagaaacaactcatggagaatagccaccatggcctcagccactgacggtaaaagggacccaatcattggaacagtcgtagaagcaaggtaattacccaactgatcatgcataagaaccctgtaccccagtctacgattaataccccatagccatgcatcaacgttcaacttcaaaaaagagttgaccagcaaaaccaaaggaaacacaatcggaatgagagagggagaagctggaaaagctccaacacgaggcacgaccttgtttttcatataaaaaattcaaaaagaaagtaggcccatcccaacaccccttcaggatcaaacacttttttcttatatatgcacccattggttcctacggtactagattctccaaagcaacaccatcagaatttttatttcaacttaaagaatattatctcatgagcccaaagaaatgagtaaagattggtcagtggtaaagaagaagggaaactcacaaaatgtacttgcttcttaatatcttgaatgtgcgatgtaatgaccgcttaattttagtatgagaaatagcaaataattagtgtttaatttagaattagaattttaattataatttatgaatttatggagatatatttgaattctgggcgtgttatttatgttatatataaaattttatattttttgtattttatgtccggtaatagtggaacgagatatttggtagatagagtcactttttcttatggtttagtattttagaaataacgagacaacttatatagacactgacaatgtcaagaatatttggagttttagattttaccgaaattcccttaggtggtaaggttactttttgattaagcaagaaaaaaatggtcttttgccatatgttaatttgttttgtccactagtggattagggttgaattagtaacatgattttatttggcattttgttgataaacattaagtttattttctattatccaaaattagaaacaacaaaatcaagccttctcactcctagcctctctctctctctcgacttctcttgaacccagtagaagctagggttttgattgttcaatttcatgatgttctagctggtttagtagcatctataagaatcaattcaaggtaaacaagtttccttcttctcttttgtgatttttgtagcataagagctcaaacttcactctaccatggtatttttagtttctacgtgcattgcttggttttattgcttggattaagtttattctgtactttttaggtactcttgaagtttttgtacattttgggattgatttgaggtgtttaggaagtttttgggggttcctatactgaactggtcgatcggttcaatatggtcttgtagaaccagtctaccgattcgtccccaagctgaccctacagaactagttttctggttgggaacgggtctaacggttggggcagtttagggtaccctagattttcctgttttaagatatttagggtatttccatgttatccatcgatagggaaatttttagttttaatgttaagtccttgaaaagtcatttagcatatcactcaccagttttacgaatattgtgagttaggagcctgtaaattgtcgagcatcaatttgactcaggttgatcggcacacctgaattcagagtcaaggtaagattagtataatgatatgcatatatgattacatttttttcgtgcatgtttatgaatgcctgttagattacattgaaatagcgatatcaatatacgtagagttatgttggataccggtaaatttatatttggctcaagtactgattggcgttatcatattggtacgactagagtaccgagtataggctcatattatggttaatagtatagtcgtacgaacgttctagacttagtaccgcctgggacacgaggataagggtatgataaggtgtaagggtgcctaattgtaattcgggttatatatatttatgttatgattatactttgcttactgagtttgtcgactcacagctattgtatgcatgtgtaggtaaggacaaagctaagggtgaacaacaatgagtgcgagcggatgaaaattgtacatgccgggagcggttagacctagagcgtacgatctttgggacagcaggctgtattttatatagtcgctagacgataacttttgtaacgtatattttgtatcacagttgtaaatattttaaatacgggatcccagttaatatttactttcaaattaaagagtacttaagtaaagctttaattaatcacgattttcaagaaaactgttaattaacaatggattgcacaattaatacaaaattacgatcacacgcctaaactagtggggtgttacaatttggtttcagagttgctaggttgtattctgaagattgtcacgacatgtacagtcatcatcagagataagctcgactcgcggttgttggatatattttacca

SEQ ID NO: 218601 - DNA, 5128 bp, Cannabis indica
aatcacttcaaatctcttaaattgataactaattagattagattgtaatgggttttatttagggcacaaaacccaacattaccctgggtgctaagtccaagtttttgcccattggaagttccatttggtacttggaaatatttgaatcttaatctttgctgaaaatagagaatatgcatggaagagttttcgaaaaacatcatcgaaatcggtctaggttgacaaaatctcgacttgggcattgggccttgcttttaacccctaggaagtgttatctcttccccgattgtacttgttccccgtttttgatgaagacaaatatgatgcaaaaacagatcgttgatttgatacttggaagtcccctagattgataaattgtcaacctgagctttgggtgctcgtgcaccgagtgctgtgggtgctcaaaaaagaattttctccatatctaattcttatgcttcaaatatgttcgtagtatgtctagctcatgttccaatacaatgtttggcccatttgcagtaagacggtcccaaaaacggaaactctatttaggatgtcaacttaggtgctgggtaaaaccctaggtgcccaagtagacttttggggtgcaagttcatgtaattttagctcccaaacctggatttgattgctctatgtcttaatggcacataataatgaaagatattcagttagaaacgagttatgaaagtcggaacttctatctaagagttctcgaagtcaacttgggcacatggctagagactcctcccaagtcgactactatgactcaggtgatctacttaactttgtgacgtcttctttcttgtcatgagtcaaacattgatgtccatgtcactagaaatgtttttttcagttaataaaactcataaaggaagtctaacttatttaaaattgattttttacacattaaagagagtgtgcgagaggggctgaaaggggagcaatgagtgagcttaagcttgaggatttgtcaatattaaccttagtgtagaatagagacttgtcactagtatatgattctcttcttaatcagagaagatgattgatttgctttattgtcatgttctttatgtgtttgatggatcatgacaaatataagattagtcatagtttgttggaacatgaattgtttaggctctcgtaatagaattacttacacaaatatttcctaccccaataagtgagaaattaaaagtcatgaataataatatatatagctaatgatgagaccacgatatattctggcataattatatataaaatcaattgtcattattaagtagaatattgcattttatataatatcaattgaattccattaacgtaggagctgtactcaacagcctgtccaatgtgttgggtgcaaatttccttgcaaacaaatggcaaatattggttctcatccagttgttctcacatttagttccatgcctaagcccttccaataactcaatattcacatcttctctgacaaacatccttggatggggttggatcaatccagaagctttccatccaacccaagtcaatgacctatttaaagttatctccccaaacttgatattaacaaatgtgggaaggtagtgttcatcagtgatacatctgccacgacaaaacctcacaaagagatcaaagtatttttggtctgaaacaacctccattgctaaggttcggtctatagcgaaccactgtgaaccctttcgccattgctgcagcgtaatgagtgggctcattttgatattgtacctgccccggccgaccgtggtatcggagtcaaaaacctctagaaaggctttggttgtgcccatgacatagttgtacactatagagaagttatataggggaatgcatgactcagagagtagaataaaacgtttgtttgaaaagtcaagtaaagcattggctagtaggcgcctttcggcatcaaccatgctagcacctccccattctacttcctgcaacaaattaatcgttcaaaacttcaccatttgtatgggttaatgatgtgtacatatacaattcgaaaattatacttccaaaagaaagtacacggccatgaacattcgattaaaatttcaatcatagcgtacgttactgagcgaacaaaaatacttgaggaaaagtataattattaattacaagagcatatttaagcatatgtttaattgttattactcgccaaaagattttcgccgacaaagaaaaatatatggcaaaataattttagtgagatcaaaatataccttaaaaaacaaaatgtacgcttttagtattaaagaaaaaaatgtactcaaaagtgaatcactcccagtatagtaatgatacaactatacaaaaactggcttctttcgtcataaagtattttcaagttgaaaatgaaaagaaaatgaatgtgtcgacattttactaaccttactaggaatccatctgttataaaaggcagatcttgtaggcattgttttgttgaaagagggagtggaggaatgaacatagacggagtaaaagccttcgtgccctttgaagaacctgtcccataaaggagccagctccaaatcacctcttgtcaagaacatgaaggcgacttttggagtgatttttaatgggtattggcttatgttcggtaatatagaagctctccaaagcaactctttatcatccatgttatgcctcacatcgtgtaaatctgttcttgtggtctggttcatgagtaatgcttcatctttatcatcaaatgttgggattgctagtggaggagatattatgttgaggtggagataggattggaggttatataatagcattgtgccggtgaataaaattaaggtgaagatgacaaaagatgagattactttgcgtaaacttataattttgagagccaagagcttgatatgtaaggctatagaatattggtatttctcttttgttgacaccatattaaataatgataaatgcacgaagagaattgttcaagaaaaggaataatatgatgaggacagagattttggatgttaatgcggtttatggcatagatcttaaacaattctttgtcctcagtaacgaaatgatcgtaatagaaggagaagagataaatcaaaatgtcctcgatctggtctacaaagtcaacttttaattacagactcctgcacttggaagattataagaagttattataacttgttttacatcactttgacaatgagttcaggaagaaattactatatttctttggtggaaaaaaggaacaattttttcttacattgatctgtaattttcatacttccatgaataaaaaaaaaatcaattctacatataattttcaatgcaagaacaaaagattacttacttgaaaagttgaaatgatgaccaaaatctactgctttattctaacagcagcgccagcatcgatgtttttcataattataagcttctgcaaacatagtaaataaaatatattgggggaagaggactgggtaaaatctttgtcaaccccattcaaagagaagataatgtaacagcaatatgatatgtttcttagatattcttggcatatagttataggaatcagtaagcaaaaagactaactcttgccctagcaatccattggggatttttacccaacaaaagaaggaaaataaatgagacaaataagggaaacagatgattttggattttcaaatgtgtttactgtttaaagaaataattaatatatatttatttcagatcatgaattcagattctagttatacataaattaaattttatttaaaaaatatatatatattagttttgagtcctttcttttcaatataaatatattgttgtgagtacgtggctaaatattactctcttcctattatactactactgcaactaacttaaccaattgtctgttatgatagttggtactcaggtctacaccaaagcctataaagccatcattcaagttagttgggtaacacattaagagagagagtcagatcgagatagagaattttaggagttgtttaaagagtaaagcaagagagaagtgagttctttagggcattaatggtgtgatgcatttctaatcataattactgcttaatgaggttgtttataacaaaagcaaagcttcttgagttgtacagttaaatcatttgtaatcctctgttcttcattagctaataaagactctcaaagccttgttgttgttctggtcagggatataggtaagttggatcatcatcatcttgttcgtacctcgtaaagttggtgtgttcattgtctttgattaactctatttttcattgattattgctgcattcaaattacacttaaactctaattggtttcattgtcaatttcttgtgttaaatgttctggttgagttgttgttttcccaacaataattggcatcaaagttgagttcttgaagcaaaaataggatcaagaaatggattcatcgctttcgcacgttgtgaagtagacaagctcaatggagccaatgatttcagattatggaggattaaaatgaaggcctttgttttttttattattatttctctaatttattcactccttcagcagttaatttttctgaagttgttgattgtagtcctagtacagtcacggttgaacaaaataacatgctccttgaaccggttttgaatgatgaaataaaaagagctctcttccagatgcatccggataaatccctgagccccgatggcatgacaccgggcttctatcaaaaatgttggagtgcagtgacttttgatcatgttatgtgtttctactattacctataatgtcactcatgggggtcatctatgggtccaatttttcctggtagaggcctaagacacggggatccactatctccatatctgctccttatttgtgctgagggcttttcggctctattgaagaagtatgaaaggcatcaatggtgaactgggtgtaaagttgctagaggtgctccaagagtttctcatatgctttttgtggatgatagttatttgtattgtaagtctaatggaaagtaagctcaaaatgttattcaggttttacaaagctatgaattggggtttggtcagaaggtgaattttgataagtcttcagttttttt

SEQ ID NO: 218602 - DNA, 4754 bp, Cannabis indica
ttttttaattttttttttaccttggagaatgatgctgatataaaatctttcttccttaaaattaacttttttctttctttctaacaagcacttgacattagctatttggaatattcaggtataagcaacgagggaaggaagctatatcagcaaataatgttttcttctatattacatatgaaggaactgtcgatattgataagatctcagatccagtaagtggattcactttcccatacttctgaaaatattgattattggtttttataaatttttcacaatttatttttacatgaaaggtacatcaacgtgccacacaagatcagattgcttactttggacaaaccccatcccaacttcttactgttcctcatagaaagaggatgccattagcagatgttcttcatttgcaggtagatgctgtttttgtctttgttgaaacttctattttgatgtggtttgcattgtatctgggactgtggtttaggaaatgcactgaaaatatgtatcagaatgatctggctcgcagctgatgataatctagaatttttgggtgacctgtttgatttattttgggatgacttgttttccttatagaccatattccggaaccccaaagaggtcaaaccatatgctgttcctgcacctgaacgctgcaatctaccagctgctgccattcatgcctcttcagatactgttgtagttgtggatataaatgcaccagcagctcatgttgcacagcacaagtggcaaccaaacacacctgatggccagggtgcaccatttctctttcaacatggaaagggtacaattagttccagtggtggaacatttatgcggatgttcaaagggccagcaggagctggttctgatgactggaatttcccccaagcactagcatttgctacgtctgggattagaagctctgctatagtttccattacttgtgataaagaaattatcactggtaagtaccaatatttttcaatcacgatctttaccttcttaattttacttttcattaatatattatgtgaaaatgtgaccctcataccaaaaggaaggtaaattgtatgtactttcccttcatgtcatacataaaactaaaactcagaaatctaaattttagtgtgatctaatctcatgttggttgcggatactttcatgcgtagaaacattcatattcaaaaattctgagctcctttaatgttttcactcgaatatgttgattgtttggatccttaaattagccttctttcagtttaagcaatgattgtctgtattctcaagataaataaaaagaagaagcaacagtaggctaccccaggttattaaaatagttctatttgtaatgggatgtgtttatttatatatatcttcctggtaaggaaataaatcctaagaatacaaattctgttgtcttgtttcagaaaggtaaaaagaaaagaaaagaaaatcctaatatgctattataatgaatgtaatccacaagtaatttgtttctttgtttttattctttttttcttataagaatatataataaatcgaaataggaccttactaatactaggcaacataagtataataaaaaaaaaagaaaaaaaaagggtcagttgactatattagctcgcccaactttcaaaagttgaacttgaataaaaactgggaagcctaccatataattgaatagtgcgaaaattctctggtaatgatattaattgagttctacaagctcttccagctcttactttttctcattattgcatgcttttgtattatagtaggtctcatttataactttccatctagttaatttgcttgttttgtctacgattaagtttgatgagaagatgatcatgatgacacaactaatctttctggattttaactaggtggacacgtggataacagtatcaagctagtatcttcagatggagcaaaaacattagagacagcgcatggacattgttctccagttacttgccttggtctttcacctgacagcagctaccttgttacaggaagccgggatactactgtgttactttggagaatacgcagggcatctgcttctggctcaagcagcatatcagagcctctgactgggactggtactgcaaattcaacaagcagtagtaatttatcaaacctgttggcagacaaaagcaggagacgtcgtattgaaggtcccatacatgtcctccgaggccaccaaagcgaaattctctgttgctgtgttagctcagatcttggaattgttgtttcatgctcttattcatcagacgttttgatgcattctataaggaaaggtcgattgattagaaggttgcctggtgtcagggccaatgctgtctgcctctcatcggagggagtaataatgacttggaacaaatcacaacatagcctaagtacttttagtcttaatggggctctgattgctagtgttcaactacccttctctgctggtatcagctgtatggaaatttctcgtgatggacaaactgctttacttggtataaacacacggacagaaaatgacggaccctccaacaatagctgggactcaaaattgaagaagcagggattagataatatgaaccaggattgtgatgaagatgacaaagggaacagattgaatgttccatcaccttcaatctgcttcttgaatctgctgactttgaaggtaatgatagattcctcttgcgaggtgaacattgttcatcagccaaatttataaccttaaacatagttcaaaggctaacttgacatgtgaatatttaaatttaaggaccaaaattaagataaaaacatagtttgggtttcaaaattatacattacaaattcttgggctaaactaagacttcggcccataagtgaagtgagatataccttttttttttttaaacaaatctcgtgcatgattttgatggagagaaagaagtgaggaatcatcatattgtctttgactgtcccacaccagttatcttttcattacatgcctgcctcagccttcaggcctcggctcatcatgttcaatgcatattcttcggggcatggattctggatttcttagcatgttcatcaaacatatattgctcgttacatttatggtagtttccttggtagattgtttacttgctaacaagttactaattctcatttcttgcagatttttcatatcctaaacttgggagaggggcaggatattactgctctagccttaaacaaggataatacaaatcttttggtgtctactgctgataagcaattaataatcttcactgatccttcggtatgtccaatgtttcaattttcattttcaattaggtattgtataatatcattgttctattagagtttaggttcatgtaagggatcgttgtgagtctattaaaaggctggttgtgggaaacgaaatgaatcattttcattcatttgcttgtttggttagaaactaaagtagtggaaaggccattctcatgattttgttctttatcagttcttatactaattttattctcattcccattcacaacaacaatgtttactcctagtcttacaaaatttcacgtttgcaacatcattattaattttcctactgttgctgatcgcagttgagcttgaaagtggtggatcaaatgctgaagctgggttgggaaggtgatggactcagcctcatcagatgatcatagtctttttaggccatactggactgaagtaaagataactcacactagaatacaacaaggtcctcatactacgagggcatgaaaaatgtcctcactttctgtaaatcaataaaatcttttggtagcgatgtaacatatatgattggaacaacccaaaatatctcaagagttctaggtttttagatatacagcggggttgctctttttgttctgtttttcttttttcaattcaattgattgagttgtatgtatgtctcctttgagatataatgaggattgaggaggcctgagctgttcatttttccccattaatttttttttataaattagtgaatgaaaaatacacattttttattttttactatatatgctacaagttttgtttaactaaagactataatagagatgcgttctccctgggaaaaaagatgttatatttatattatgtatttaaggtgaagtttgtttgatacgatgtagttttacttctgtcaatgatatttgaaatttgaatgtataaatatgtatttgtttcagagagtgatattcttgattactaggttttttaatacaaaccgaaaaaataaaaataaaaataaacagtactattaaaaataaactaattagttttcataatagggaaaacgaggtttgtctatatcaaatggtaatttttaaaaaataattataattaaatattaattttgaaataataatttttaaaagtgagattttaagtaggaattttatgcttaattttactatttaattaaaaaatttatctttttacactatcaataatatatttatatttaatattacttttatttctctcctaattcaatttaattttttttatctctcttaattaaatttgatagaacaaccttaaacatataatataaaaataaattattttttaattaaataataaaattaagtaaaaaaattccaattttagctataaatgaaagtaatagccattaaaagtacactcataacaccaaccagcaattgaagtctaaccgcactaggaatgtccatggggcgggtcggatttgatcc

SEQ ID NO: 218603 - DNA, 4054 bp, Cannabis indica
aaaggcagacaatacaacacacacattgagcaccacaaatcttataaaaagaagataatgaccaaggaaagacaaattaaccaacccaacccccaatcacagatgatataagtaaataatataatgtatatttcttcataattccatatcatatgacatatatagtaatgcttcttatatcatatcaaattcgaagagtgtcaaaatatagcataccacactcaaaaaccataaaaattgcatttcttacaaattacaattgcaagccaaatttagtaatgatcagaaatattggctttgcttatttaatttattatattattagcatttttttatttaacacgcgattacatatttattattcactttattaatactatcccatcccatgtgtgagataatgattcttcttctttttgatatccatcatatattcttaataatctcccttaaatccttcttcatttacttctgcaaacaccacaaatttacaacacacgtgcaattaaatattaatttagtaattttagacattgatatgtttttaattttagatttttttttgtaaattatttttagattaattacatatatataagtaaatttagtgtgtaaccatctttattcatattaatttagtatagtgtaacatcttagtgatgtattttgaaaaatatgatagacaagttctaagtaataaaattgatctcaccttcctttgacggcaacactcattgttatcgttgtcactatcactgctactatcactgctgctactattcccggatattcggttcttgatcctcctaaacaagtttccctccttcttttgatgtatggtgccaccaccggcggcaccagttccgtactggatgtagttgtggttatgaccctgactatggctcatcacactctgactgtggcgacagttagttttggtcacacagtgacatgatgtaacagcattagtagtatggtgtttggtggtgctatgaccactactaccgtggttactatggtcgtgaccatgaccatagtgggccttttgtggcttggctgagccatacccatagttagtttgggtatgggcctgggcctgactacagtggcactgagtcttggtcttgcatgttgcaacatggtgggcctgatagttctggtaggtggtgggcatgggcttgggggattggtggtgtgtgttggtattgcctcccttgacccagctagccattcctgacattttttggcccaaagaggaacttccattgtggcatttctgctggcaggtctcgtgggtgggcctgctgcattggagtgaggccatttcaactcaaaggcaagagatataaagacttaataattagtgagatagtttttttggtcttgcttttcttggtgatatggaaatgttttgcttgatccttttatagggcattggtggtgctgtacaataattatttttttttttttttcattttttcaattcccattattgtgaaatgacattatttgaatatgctgcttttgtattttggctttatggatcatcagataaggggcaattattcttttgggccttaatttctcagccatcaaataagtactagatctctaaacttttggttttaaattgtttgattcccatatggagcatggtcatggattaaattattatgtgctcttatttattataattaaattgataattaatatccaaattaaccattatttaaagtgcattttttttaatatttcgtatccaaaaaagtgattacaatcttttcagattatttttatttgtgctaagataattagtttataatttatagaatataaattatattattacctttattttaatccatgaaatctgtagtgttgcatgtacaaattgttatagttatttactcatacttttttttttttgaacaaatgttatttaacattatattgattttctaatggggtgagttaacacagtacagtataaattctaataataatatctttgcttaattaattaaatttaatcatgtaaggaaaaggtgccactggtatgtaccagccaaaagagaataagaattgagaatgggtgaccatgcatgctaatatgccatggaccttttgattctttcaccatttattgaattttttagaaaccaatataatatatataataaaattaaagaaaaataaacaaatatcgaaataaaaatgacgatctttacgtgcttcgagtattaacaaactttagtccacgaatcaatactattagttaaaaaagcattcgagtattacacaaatatttttgtaatttatatgaaccctattttcaatcttagcttataagaaatgaatctccaaccctttgcatgaaaagattttgttatatttataagcaagagtttgcatatataaacatgatccattgatagagtaaatataagtaatatattaatattggatcgatttggtgaggccaaatccgtgaggcaatagttatctatacatgtagaattttcttaatgatgccaggtagaaaatgtgtgtcatccccgcatgtaatattaacaatttagtgactaattgacaatcactatctttctttttatggaatgcatgatttctggacctgactttggaaaccaagtactgtggtgggattcggtattaaatgagtgtcgaataagtcttaacatccgaaggcttattaattattttttggaagcaacgctagaaggtagctggatgatctctttgctgaactcttcttttgtttggtcgagatatctttctgaaaccttgatggcccgacttagtaagattggtccattattctaattggacctgtaaactaggcctttattaattgtatttggggtctcaaaagtacatgtgtccctcctctagaaatatgaacaatatttaccccccaagttttggaaactttagagttgcaaaggcttgcagtctttcttccagatggtatgagggtgcatggatgtttaaaaagtgattaattagttgttaaaaatacatttttatttattttaaatgataaaataaattgagttttagatgatatttttatgaaattattgtaatatattttataaataaaaaatatttaattttgattcaatttatgattttattgtaagaattgaagtgtatttttgttgaaagaaagaaaaagaagcaaagttgaaaagaaaagaagaaaaaaattgtatttttattgaagtccaaagtaattcaacccaaaaatgccaagcctagcccatgaagtccaccatcaattttctctcttacaaagcatgtgatgcaataatgataagtttaggtcatcatcaaccatatttctctcttccacactcaatcttcatccaaatattagaaggcaaaataacaatgataacaaaaataatattaattttattttttatttcaaatgtcaaatttaatattaatatttatataaactcaaactttctttaatttattgttagtcactttatggctctataagtaggagttcatttttctttcaaaaaaaataggagtttattttagtagttaagtgtgtaatttttggaaagtaaagaatatatagcaaaatttcttctcactcttcttctcatatttctttctataatttttgtgagaatgattaatataatggcataatcttcctttaaaggttagggataattccatatgcaaagtgaggttattttgtatctttgattcattttttgtttgaatacttatttgagtaatgcaagttcattctccacttttatttatattttcttcatcaatctatactaaatgtatgtatagacttcctcatactttttctatatatttttatttcgtgatgatagtaatggtattattgctcatttctatcttttatgttcatcttatttactttttgttaaatgatatataagtttagtcatgttctccctatctctaaaaattaataaaagtgatattaatttatatttttttttctagtatcatcaccatctctatttttttttttttt

SEQ ID NO: 218604 - DNA, 5472 bp, Cannabis indica
ctcttatatattgtttggtactagtagaatgtgaaaaataaaattaccatattatccttgttagtataaatatttattttttaaaatgataatttaatatttgatatatttattttgtcttttttttttcaaatgaaaaacttttttattgaaaataagttaaaccgaactagtaatcacaaagggggctacttccttcaaaagaccaacattcttaacctttataactctagtccaactggccaaagcataggcagaaggattctcagaccgcaacacaaaagtcacaacaacatccttaaagaagttacaaatattcaaacaaaacaaaaatagagagggtaagtgcaccaacgaaacgacagcgaaccaacaccaaaagccaaagcagccacctttgaatatgtttcaatcctcaacttagacacctgtttatctcgagccacctgcaaagccaaagcaattccacacaacctgaaactgtagagcactgagcacccgacaacaacccacacctcctcaagctctctggcataattcttttgaaaaatagcaaaaccagtatctgtgtccactacaaaagcatctacttggcagcaccaaaaatcgtcaaaattctgaggagataactcaggaaagcacctatcaatctggacttctttctcaacccaaatacagtcataaaacaattcatagaacctggaataagtaaaccatttccacatcatagttcttgcctttatgaatcatatcattgcaccattttcacactacctcacaaacacatattgtaaatagttttaactcttcatcatccaagctaatccaccacttgtaaaaattaattgtgcttgtccaatttaaacagtcaatgcgcataccccatcaacttctaaaccagatgcatcgagtaaaactacaatagcaaaataggttgcaaaagatgcacacttgactatcactaggaagaaagctgagcctagctttagtagaaagaatattagacagaattttccaacagtgtaactatagctacactgcctaatagtaaagtggtaattttccaaaaatgataaccttccgggactgagactggtttagattacaaccatcatctaagttgtcatacgttctcaatcttttcaatctttctagaatgtcttataagttcctaaagttctaaatataatttagaaatttttcggctaaactcaaaaaaattactccacttacacttaatcttttttaatagtaaaactttctaaattgttaaatccattttttacagttaattattaatataaaccctttatatgtacaatgtgtcaaatttatattaatacacctaatattattattttagaagtatataaattattttaaaatttataatattttttctcttctttttttttttttaaatatcttatttttagattaaatatgcaagtgaaacaatatttagtataaaaatatgtgtgtaatattttgtgtttgaataaggacccaagaaagagacatgtgcttgaagaagaagaagaaaagcataacgtggggtgtggtgttatcaacattgagacattttccattatagaaaatggtttctttcttataacaataccaatctcatcttcaacaaaatattaaaaaaaataaaattacattcaaaaacatactattcagtactgaggctacatcattacacaaatacacagaaaaaaaaacaactaaattccatcaaattctataagtataccaaaaattaaactttgcatcaagtaaataaatgctattcacagtagaaagactctagagaaacatgaaaaaagagaaaatcctattttccatgttcagatgctgcaacaaacatatattatggtatattatataatattaaaatctattttccaaagatggatttgatccaccaaatgcctttagtgtccttggggccttcctctccctctggtggagaatcactatgtggagtcttgtggagtttgctcacatcatatccctctgatttggctctctcaacaagctcattgaatatctcatcatctatttgtgacttcctggacaaaatctaattacccaaaacaacaaaattgtgatataaactttagaatcagtcatgaatatgcagaactaattaaaaccaattcagtatcacaactgggttttggcttagttttaaaatcaaggaaacttattattatatccaatttccaaagccaaaagcccttttctatttttaaataacaaatactttgtaaataaataaaaagcatacccaaaggtaatttctgctgggttggccaacgagagcgacttggtaatcttcatcaatatacaaaacccaataatcaccagttacagggatgatgggcaagaatggagggacatagaatttgactttgagttttgcctcatcactatttggatcaaccttgtaagcagtcccttcaatggaacctcttttaccatcactccaagtctcattcaagacatgcacagtcccatcttcattgagagtataggtagccctagtgtcaaccccattcttgggctgattccttgatgggaatgaagctatctcataccatcttcccatgtacctctttatgtcaacacctttcaccacttccatttctttgttcgccatttcaggatttcagagaattgagtgagagagagagaagagttttcaatattttcttcttttatgctctgtttttcttttctttttgataagaaaatggagatggatttgtatattccgttttatacgtggagctttcttatcctaacacgtgtacggctgaaaggattgaagctaccagcaggttctaggatgttataattgttagatatttttttttagaaaagataattgaaaatttgttattttgtgaagattttctttcctgtgggcaaaagcataagcataacacatggtttctttcttgtcaatggtttttcttattaatcaataaatgctaattacaattttttattacaatctcttaattaattaacttttatgtttgaaatcacatgccgaaataatttttttcataacagtatttgttataattacagtatcatccttgtaaatttttaaaaaattccgaatagtttacaatatcgaaaatagagtttttgatattcaaatttaccacgcgcatttaaaaaatttcaaacgtattttcggtactgtaaactattcgaattttttcaaaaatttacagagatgatgttgtaagcataacgaatacccctgtaaaaaaatttgaaaaaaaatattccgacatatgtttttgaacgtagaaattgactaagagattgtaacaagaggttgacggtagcactcctctaatctcattttctattccttttctcattttatagaaaaaaataccaatctcatcatttagaaaatagaaattagttcaaaacatttataaaccaaaagactacacaaacattctgttttaattatatgtggttggctaaaatgccctactagtactatacctacatcacttaatataatattttaggattgagtaactaatttaactgcatcactacaacaaaaatacatagaaaaactacaactaaagtacgtttattgaagcctataaataaaaatacaacaataagattaaaaattatttgcataaattaactgctattcacagtagaaaagactgaagaaaaacatgcatgcatgaaaaataaaatcctaatttcatgctctttaataataataataatagtaatagtgcgtggattggagaccataatacgtgtaatgtgtatattaattaataatgactattttccaaagagggatttgatccaccaaatacccttgttgtcattgggtccttctccttctggtggaggatcactctgtggagtcttgtgaagtttggtcacatcatatccttcttctttggctttctcaacaactaaattgtatatctcatcatctatatgtgtctttctcgccaatatctacaaaataaaaatatgcccccaaacacaattaattgaatttatttgtggtatttatttaacagttaactacataataacctattaattaaaaataattaggtgtcccaactacaccaaatcaaaattttacagccaattacaagatattattatgatggcactagaaaaaagtgtgttgtataaaaaacgaaagaaagaaagagactaaaacactatctaattggaacttctccacaaacttctaaaccctaagcctccaaattaagtgtgctcctatctatgtttaacattttaaagtgttcaacagtcaataatagtgagtatagtttctaatttcttttataacttattaaacaaagtataattaatgattcaatattaaataactcaatactacttttatagttttattagtctcaactctatgttttgttaatgatgctaaaataggtgtcctatactattataagccatattattagtataattaagtatataattaattcatatgttgatttaataattattataaaaaacgttaattattcaaaaaaatactaacgtattaatagcaatggtcattactatttactattaaacacaattgtaagactattactataaagtatcttaatttgagtagttagagatttttaacaacatgttactacttagaaaatattgaaaaagagaagagaatagtaataagcaataagcatacccaaagagacttcctggtgggttcgccaacgagagcaacttggtaatcaggatcaacatagagaacccagtaattaccaacaacagggattatgggcaagaatggaggcacatagaatttgactttgagctttgcctcatcactttttgggtcagccttgtaagcaataccctctatagaatctctcttaccaccactccaagtctcattcaatacatgaactgttgccttatcttccttaagagtgtaagtagcccttgtattagctccatctctgggctgaaaaaatgatgggaatgaagctatctcataccaccttcccatgtacctctctacgtcaagaccctttaccactctcatttctttattattcgccatttggggtttcacagaatcacacaaagtttcaatctttttctttttctctattgataagaaaatggagatggggttatggctttttatatatgtgcaccattcttgtcttgacacgtgtacggtcaagaaggttgaagctacgagcaagttctcgtgggactgggattcttgtttttattcattgttgatatattttcattatgtttttgtttgttttcaggttttttatttttcattttgtgttaatttgttatgtgtttaaataaagaccccaagaaggaagagacccttttttgcttggagaggaaggaaaaggcatataacgtgggtgttgtaatcaaaattga

SEQ ID NO: 218605 - DNA, 2693 bp, Cannabis indica
attcctttctattctattccatttcattatctccaaccaaacgcatatcaatacttttttttgaaaatacaaaatatttgaataataccatttatcaagcatatataagagagtagcaagcaaatagaattttcttggaatttctctaaatatataataattttgaacaaataacaccatgattattcattcaacaactactaactagtctagactctaaatgatgactaaaaactaataaaattaagactaaaatctagttatccaagcatttattattacaacatatatagtactagactagataagattagtaactagatcctacattatatatatgattggatattaattaataatagtaactagtaactaattagtaagtagtttgaagttgaagtagttgttgaatattgatgggataaacttcagttgggagagtagaagcaaaagccttgttagcaatttgaatattgacagcttcagttggatgcaatccatcaaaaaagacatgattgcttctgtttccacacactgatccttctcttttgcacaacactccattccctccttcactcaatgttgctactttacaacatggtttactagcctccttgaaacctatacataaaaaaattatcataaacaacaacaaccacaaaaacaactaaaatatataagcacatattgtgtggtgtagtggcaacaatgtttttacttgcattcttccttgtttgagtaaaaggttcgaatcccactacatcccctcataggagggattatgcttgaccttttgggaggctagcttgctatggcagtatcatccttaatgaaatgggaactctcgaaggtgcataccaatgtccaattaaaagaggatgagatataaaacccctatagctggcaggtggtccctaagattgtctaagctaccaaaggagtgggcaggatctacaccatgtgatctcctttcttccgacaaataaaaaataaaagaaagaaaacaacaaccaaataataaaactactttgttactaaaaaaataatattcagatattagttacttgttactttattcttactaaaaggttacttgttactaacaaaatgtagcttttatatagtgatagagaatatctttagatatcaacaaatcaacggttgagattattgattacatattatacttaaaattgtgttattcttatatatttactgaaaaaatgacatttttttactgatttatttttatttacatttttacgaaaaataacatagtgtaaatgtccctatataataaactacaccatattatcctgtccaacaaattcattataaattaaaatgaaaaagagtaactagttacctttctgaaaaggatttctgatgatgtctctgataattttgtaagaattaacataaagaagagcagagcctggcatttgtggcttcatggtatctaccaaagacttcaagtgattgttaaacagttgtgctgcaatgttgagcccttgtatgcaccgattttgattttgattttgattttgatttcgattttgtgttggagtactatgttggaccattgttcttaccatgggactgcaccctattggatttattgacattaatacaaattttctacctcccaacctgtatagtttctgcactaacaacacagcttaattttaattatattaagtaattataaaatatcagtatttttcttttaaatgaacaatatatatggtaaaaaaaaataaaaatggtaaaatgtattaattattattgataataaagatagattttgatatttaaaattttgacacatcttgaagatacctaatccaattttttttagaaaagatattgataaactttattaatgctattttctactttgagctaatatagtttaatgcatggacatgtgttataaaaagagaaaaatggtactagaaacaagtttcatttgcaccaaaaatgatttacacatagctcattttattatttgtatgtataaaaatatttttaatttatactttcttttcttcattctcaaaatataaaaagaaaattataagtaccaaattaaatatattttaaatgatattattcacacaaaaaataaaaataataaaaaaaaataattaaaattaacacaaaagaataaaaaggaaaatggttatgagtgaattttaaaatttaatagattttttgaaaaaataaaataaaaaaaattaaaatgacactttaaatttgcttacagtttaatactgttaaaatttaaatttaaagaattaaattcaagtaaaacaataattaaaaaattttaatctccaaaaatttaaaataaaataaaatgaaaatattgagatggcatctataatttataaatatggtaaaaaaaaagtaaattgtatatctattaagtcaacatttttgtccttatcttacataatgatgtattgaaaatgaaatgacaaagcaaacaaggacacatcaccccctctcttctcttcatgaaaattatcaattccaccttctttaggtaattattaaagaacaaaaaaaaaaaaaatcataccatcccctaataaataaataccaaatttagttttgaaaatttacccttttttttaaaaaaaaaaataataagaataaataataatgaaaatgaaatatcaaataataat

SEQ ID NO: 218606 - DNA, 10555 bp, Cannabis indica
catagataataaaataatttataaaatattaaataaaataattaaatatataaaaattataaatattaaatatgattgggtggacattaaatgatattgaattggatcggttcggttatctattggatcaaatgtctcatccaacatccgatccgatccaattggatttttaaaatttgcatccgatccgatccaattataattggatatccgattctattggatcagttagaattagatcggtcagttaggattgaattggatgactttctgcacacccctaagtaaatctgtcaaaatacacagttttttttttttggtatacaaactgattttcagccatatatatatacaagcatgtgatatcatgatatatataatactatttgaataataacttagaaagcattcttttttgagtataaaaagacaaaaggaagaaatattatcgcaagttatagacaattggcatggaatggcttggttttttttttagtatattcagtgaaaattttgttattttatggaaagtgcaaacaaatatgctttaattaattattattaatatacgatgagtgccaccaccactattatccactactatgaataatatatatagcaaatgaataatgaccaaacttatatataacaaaactacaaattaaatttataaaatagagaaaacaatgggcacttatataccatatatattcattggatatgttacatatataatcgtcatatgtatatgagaataaaaaggtatattttggtccaatataaaggtttcgagtttttattaattattatttatttaatattagatttaagattttattttattttatttcaacttcttctatttgtaaatttgaagataagtgtagaatttgaaagtatttagttaaattacatgaaaattaattgacaatgagtattgagtagtcataaatcttatttatgatatcttatttctatatattaataatataaaactaattctaataaaaattcgaaactatatatttatcatcttaccattaaagaactcttgaattcattttacaatataaatcactcactttaattctatagagagactttattgtcttaaggcatcgaactatagaaatttaattataagaattcattcaattgtgaaaatctaatttctattgttttaggaaaatttactcgaccacatatataaagttaatcacctttctttttttttttcttttgaaaccaagttatcgccttcttcaaatagtcatattaacccataaattttagctataatattaaaattatacttacatgaagaaatgaataaataataataataagtagcaaatcgtgttaacgtggttccatctttcatggctgtcattgtaccacaccatcatcatcatcactcatgtaaaagaaaaaaaaaaaaaaaaaacccaaactcaattttttcaaacacatacaatttattccacttctgagtttctgaccataccatattattaccttataataaatttattatgttttatttctcaaaactatttgtaccaagttgaattaaagctgttcttgaaactaaagtcatggtatcgtgtgacacatatcattttcacctttaaaaaaaaaaacgaatttgattttttttttacttttcttttcttttacttttaaaaaagtgaagcatatttactagagagtgtacagtacaaaaccagaagcttcatctcactatactatggttacatatctaaagagcagagaatattgattctcttcatcaaaatagctttagtattattacttatagctaaaacagccaaaactagagttacccatttgggaaaaacacgatcttttttcttttttctttctccatagacaagcaatgggaggttccataaccaggcctcgaaacccatcattttccttcattttcttgctgtttctcactctttcatggactttccagacgacccttttagttattggagccccacaatcgaaacaacctatcaaaactgttgtagttttggttatggagaataggtctttcgatcacatgcttgggtggatgaagaaagccattaacccagctatcaatggagttaatggagatgaatgcaaccctgtttctaccaagaacccgaaacccgaaacgatttgtttcactgatgatgctgagtttgtggatccggatccgggtcactcttttgaagctgtggagcaacaggtatttgggtctagctcatttccttcaatgtctggttttgtagaacaagctctttcaatgtctccaaatctttctgaaactgtcatgaaagggtttagacccggatccgtacccgtttatgcctctttggttagtgaatttgcagtgtttgatagatggttttcttcaattcctggtccaacacaacccaataggctttttgtgtactctgctacttctcatggctcaacaagtcatgttaagaagcaattagcacaagggtatccacaaaagaccatatttgattcagttcatgacaatggtttggactttgggatttactttcagaacattcccactactcttttctataggaatatgagaaaattgaagtacatatttaagtttcatcagtttgatttgaagttcaagaaggatgctaggaatggtaagctcccaagtttaactgtgattgaaccaaggtactttgatctaaagggaattcctgctaatgatgatcacccttctcatgatgttgctaatggtcaaaagttagtaaaagaagtctatgaggcacttagagcaagtccacagtggaatcagacccttttggtgattacttatgatgaacatggtggattctttgatcatgtcaaaacaccttatgttaatgttcctaacccagatgggaacacaggcccagctccttatttcttcaaatttgataggcttggtgttcgtgtcccaacaattatggtctctccttggatcaagaaagggattggtaagcttaatgtttaatccttcttctactttataagttttaatgccctctctctctatttaatgcttcaaatgctttggtagtacaaagtgtacaaagtaactttcttctcattaaaatcataattgtaatgggtgcattgattaagaggatgttatatcatgtaacggctgaaatcaactgaccataattagttaaagttttctctttcagaatttctcattttcttattatctattttggtgtttcagtggtaagtggccctaaaggaccaacaccaaactctgagttcgagcattcttcaatccctgctaccatcaagaaaatattcaacctctcctcaaactttttgactcacagagatgcatgggctggaacttttgaacatgtttttggagaactaacatctcccaggactgactgccccggtatataattcactctcttaactctactacctatatttttcttttagttatttgcagtagttcactttgtcccacttaaatctttatgtaaatttttgggtggcaaaattacatagtcattttgttgcacttaaaaccgacaaaaatccttatgtagtcattttgttacaacattaatctcttagttgttatcggggattagtgttgcatcaaatgtgtaatttacattacaagaaaataaacaacatagtaatttttgcaactacaaaatgaacaatggaatataaaactttatttggttgattttacttgttgcagtgaccttgccagaagtgacacctttgagaaccacagaagctaaagaaaacagtggactatctgagtttcagagtgaggtagtacagttggctgctgttcttaatggagatcatttcttgagtagtttcccagatgaaatggggaagaagatgagtgtcaaagaagctcatgagtatgttaaaggggctgtttcaaggttcataagagctagtaaagaggccatcaagttaggggcagatgagtcagcaattgtagatatgagatcatctctcacaaccagatcttccattcacaactagctggacttgttggatttccaacttagatcatctaagttcataatttacatgtatactgatcgcgttcctcattagattaggtatttgtgtactgttattgaattggtactggttttgtaataatagtgaaaaaaagcaaaagtaagcaactgactaagcttaaaaaaaatagaaaaaaagaaaaaagaaaaagtaagcaagttgattttgagcctttatactgtttgtattgtgtttgtaaataaacttgttttgcttttgtgttattcaacttatgagtcaacaaaaacagctttgtagagaagcttttgtcaaaatcaactgtaaaagaattgtgagtttgaaattctcaaacttgttttaaacatagtttgacccaaagcacataagaagtgcatatatatctctctcttttcctccatataaactataaatacttgaaactcactcaaaatttccaagattccaacaaatcataataaatatacttgtacatagcattttcacattcatacaacactgaaacacaatcaactcctctcccctagctttggttgaaacatctgctcatcattgctgaagccaaagtttttaagggaacctcatgagattgcttacaatatgagctcaagctatactcttgaaacctcatctatccaccttgagctcagactgaacatgggctttgccatgtagaaatgtcagtaataagatttcttaactgatcaatgagatttttgagataagtattcttgttggcaagctcctaaattgtgaaacaaaatcagtcaaagttattgggcattcaaaaagagaagaaaaaatagagctggttaagcaaatattatcatcaagaaaacagactaaaattctttgaagcattacctttttcagattagatgatctctcttctaatttttcaatctctaattgctcagcttgggacagtgaaccagtcgcagtcgatcccgattcgtttggccgtccctgaaattcaagacaaagaccacaaattaaatgcttgcataaacattgtacttggcaattgtatataagcgtgtacaaacttttaaagctatacacttttaaagggcatgtactggagttcaaatggagagagacacaaagatcagaaattgattctgctgaattttctccaacttgttcaggcattctggtcactggatcagaaaaacttccatgtattcatttaaaacaattagaatcggctccattaaaatcaacaccattaacatacaaacaacctacatgtcatgttatccagttcatacacccactcaatgtgtcttaacaaattccagttcatatatttactcaatctttcatgggcattagtacttttccaaaaacaaaggagttcagaaattttgcatatctagaaaagtgccctaaaatgacaatcacccatatcaatattaaaatgaattaaagaacagaaaagaaagaagaagaaaaaggttgtgaatttactgtctgagaagtgggaattgaagtaagaatggcacgaagcgaagagacagcatttttgtagcgaaactgagcctcaccaagagcacctccggcagcgccagcagcagcacgccaccaccaaagctccccatgatgatgagctccagtggtatcagaagcagaggcatctccattaacgacggcaaggacaccgtttgaaagggaagaggaaggagcattgacagaggagggaggagaagaagcagaagcagaagaagcagaagtagtggaccacaaggcaggattgcagagctcgtcgttcatggaggagaggatctggaaagcggcctctatggtgtcttctagatgcttctgaccctccacggctagctcctgtgtggttttagggcttgcaactgtgattgcattcatggccgcactgtcttccatatctttggtttcaaattcaaaagccttaaaattgtgaaccagatcacgttagaaaacttggtgagatgagaataatcgaacaacctgtgaaccccagaaaacccagaaatgataatctacacggtacaccggaggcggagcgactgagtctgaaagtgtgaaggggataccactccgtgtttgaattcgatttaggggtaaaggtataggggtttataactcactttgatctagatttaacataatttttacaacataaatatggggatggggcttcaaatattcttagacttattcagattcgatataatttacaaatccaggattttaatactcatccaaattaaataaaaaaattagatattaaatgtattagatcaaatctaattcaattagatattaaaaaataacatccaatctgatgcaatcacaattagatatctaatgtttggcggttgattgtaattgaatctgtcattaaattagatcgatttatgcacacctctatttaattgtaacttgctcaaaaaaatatatataaaaaaattatcttttgttggtcgatctcaacttattcattctattttattagacatttagaatttttagatgagtatcttcattatgtttcagaaagtgacttttgctatcgataaactttgtcgtgatttcctttagggcagcaatgaaaatcgtagcaaatcgtattttagttcttacgaacatgtttgtttacctaagaactatgatggtcttagcttccgtgaggagaagaagtggaacataactttaactttgatgtctaaatatatttgagccatctcgactaagcaagattgcttatggggtcggtagatcaacgcactttatttgaaggatgataaattttggactataactacatgatgtaagctcgtaatttaagaaacttgtcaaacttagactttgtatcgacaaagaggcgttgattgaggccgattaggaaaatacaaggttaaaaagttctattattctctaatttgtaaagataaggtgaattattacaaaattgtttgccatagatttaatgttccaaaatataggtttattttctgggcaacattaaataagtacttattaactcgtgatcttattgacagatttatcactgatttatcactatagacttttctttctgccttgtctgtgaagcagtttcagaaactcataatcatctattttttgactgcattttctctagaacaatcttatagattgttgtcaagtggttcggtttgacaacatggccaaaccatttagctgattgggttaataattggatcaactccttgaaaggcattgctgccaagattgtctcggttgctttgggaacaatagtgtattttgtttggtgcaatcagaataagtgtatttttgaggcctcttgtaattctatcccattagttacttaacaggttaagatgaacataaaagctagagtccaacttattaatgctgctagactagacataaatgatagtttaccaaaatcaaaataatttaccagaatcactaaaacaaaataaaacaatacgtttataaaactaaataaagaagagtgtaagaaaattagatgaaaacaaaactaattcacacctataacctataagataataaaagagtatttagatttggtcagctacaaaaaatttgaaaaaatactcaaaatcaaatctaaaacaaactaaagatctaaataataaaacgcaaaaatcaaaacaaattgtatatttttttctttagcttaattgagaaatttaactatttataatgctattttttaaaatgcaacaatctcaacaactcaaatgtttatgtttcaaattttcatttcttttgtgtagaacaaaaaaaacgacatttggctttcaaaaaggaaaaattgtcgtttgattaaaattcaaattaaatcgataacgtcgacagcagggttcgaacctgcgcgggcgaagcccaacagatttcaagtctgtctccttaaccactcggacatatcgacttgatgtggattacttctctcatttaatatataatcaacaaatagagaaaaactataaaaacaaagacaacaacagaattaacggacatgaattttatgggtcatcttcatcttcaccttcaacctccacaaacttcactctccccaaactcaatcccagtccctaatgtcttcaggccaagaccccttcttcaatctgggttcgaccccaaacccattcttctccccagttttctctctttggccctcactgtaaccttaagctccccattctctgctttggcaatcccttctcttaattctccctcttttccatctcctactaccccattttctcaatccaagactttgaaggttggaatcgaaaatgggtatgtcctcaattagcttatacatgtttttttttgggtataaaattagaaatctattgatttatattcccctttccccttttttatttgggttttttttttttttttttatttttttttttattgacagaaaaatcagaccttgcccatctataaatcctggctgtatatcttcaaatccgaaatcatcatcatttgcattcccatggaggattccagtagaatttttcagacaatgccattcaggtttgtaatagatatgccttaatgccatttatctttacctgatctttaaactatattattttgttaaaagcagaaattgcaagattcaatcttggaaactcagggaaacgcaaaaattctagctgtggaagatacccctgatggtaagttgaaataactcagttaaagtcactttagccctaaactttgtgtgaagatcatattaatgaagtgtatgcaattttggtattagtgatgcatagcctagtgtactgtactatctttgatttgggaaaatatcaccttaaagataacacataaatgtgaacaattcttcaaagttactgaccatttagaaaactccaggccaatatctgttagccgaggtcgatggcggtttcaatgctcgagatgtgatggagtttttggtgaaaggagatgtagttgcttacagggctatggcaaagaaagttacttatgtctatccattcaccacagctttaggggattcaaagggacaagaagagcgtatgaagaaaatcatagaccaattgggttggtatgctccaagttttgatgccatggaataacattctgattacttatgtatgcaaaaacacactgttataggctacctatgaagccaaaaaaaaagatgttattttttgccagtctggtggaaataatgtaatttgtttcactccatttgtaaaagcatttattagtctgtacgtagtttgttcatcaatactgttgccacttctgatgttgtaattacttctttggctagatattttgctctcttgctaggctacttttactgctattaattgcagactttccttcctctttattaaggcttatcattatataaatatctatacattttatttatatataaagtcccttgatataaattggaatgacaatttttttttcatttttaataaggggtaaggttaacaaaatcacaatagaatagttaaaaagaattgctaaaaagatactagtgccaaacacaatttgattatgagatgttatactattatattagatacaatttagtatcaagtctcacatatgatcccacctcatagtggtgttgagaattactggtgtcttaacaatgctatcatgaaacattgaggatgtgaggaaaagaaaaatagagaacccaaatttctaagtgattttagtgataattttatttagctttttaattaatgatgatatagcatcgagacagtgtgttataagcaaatagaaaaacccaaattttgaagtgaaaaacaaagtgaggtttagtgtatatgctgctaaaagagcacatacaagagtgttaaatcataagaaagaaaaccccacaaaaaataataagaatgaaaaggattgttcacatgcatatgctggtgtgtagtagaacatcaccattttctaaagcttctattggaaactcaaatgagagagtttgagcttccatacaattgggtgtagatcttcttgttctgtaaacaacaaccaaactcagcattgctgcaacaatgcatagtccagataatataccacaagtgagggaatagcaaatagtgcccaaacaagtgagtgatttgtcttgtccaagagttgatatgggattttggagcaggagagaagcttgtttctctgcataatagtcatataagccactagcaagggcctctgagaatattagtgaaccagcagggttggaaagtgttaggaagttatacaaggccccaaaactcttcaatccaaatagctcagaaactgcagcaggcaaaattgcccagtgggagccataaccaagtcctatcaaaacagtcacaacatagatttgccctggccatcccatagcatagtagaaaaacccaaatgccataatgacttggagtatagccatagccagtggtcttggataggcaaaatctctggt

SEQ ID NO: 218607 - DNA, 4719 bp, Cannabis indica
aaaaggattagatggttgaggaaataacggcttttgtgaacaagatgttatagagctgaattgtaagatctttgaggagattttacattccatttctctgggacatggggctctattcaccagtctagccacttttcagaaaatgttgcgaacacatgttcttggctgttgacgtatgcttggtttttactttgaaaccattgatgttaggaaaacaagctcctaaatggagccaaaaatacacgtggatttcactgggatgaaggaagttgtctatgtgtggcaagtgcttattatattctgtaaatgtccaaaggatgctctggatgattttttatgtttttaataaaaaagataagcaaatatgtgcattcttttatttggatgaaaactaaattagaaactggtgtgattatttaacacttctattgtctgctctaacagaagctgctgcatacggtgaagaaggtgatgaggaggttagtctatgcaaaagaattaagcctcatttttgtaaaagattttctttcgtcttactgttggaaaaggatacattcttaagattaatttaacatttttccctccagtctcttgatgcgaaagctcagaaagcattggaatgtccttgcatagctgatttgcgaaccggttcatgtggggatcaattttctgaggccttccttgttttctaaagagtactgctgaagaaaaggtaactgatcacaattataattactaccctttctggcaagcaattgagaaacattgagtacgttagttaattgtcctttaattatgttgatatgcttttaaacattttttagggacttagaaatctcttactacacacacttcaccacccaatcacttagcctcaataatttaacagggataaaatatatgcattaacttgagctagcattaacaagtttctttacaaaacaaaaaacttgagctagtatggagactatctattttaaaatataattcaccttcttcttcttctactttaagttccagttcttttgaaggaaaagcatttcctccttttccttttgttttccttaattaactaacttgcttcctgggaaactggaagtcaagaggcaatattactgttacatttgctgttagtttatgttttcaatatttattttccttctgtttcttgcatccaattgatacagtataagatttttcgacctgcttcttttgactggttacaaatatctaccctttatttgctgtttgtggttaatttgttggatgttgctgacaatttaagggaataatgatctggttggccaatttggtgcagcccattaaaatttttcctatataatcacttccttttctgcagggttcagattgtgtgcatccatttgtggcactgcaaaactgtatcaaatctcatccagatgccttttctaaaggcattttagaggaagatgaagatgaagtcaagaaagtggaagaaccagtccaagactacaaaatttacccacccaaatgggccaaagaacctcagagtcccaagtcaaagctttagggtaaagttctattttgtttttcttcctcatcatctcctctgcactctaatctttttgtcttcggtttgtttttaacatatgaagcataaagcatcgaattattttgacaaataaacattgagagtgttgcttaaccaaagtccataaatgttaggaggttgaaatcattggcattgtaatcaacactttatagaaagttgtaacattgaggtgaaagatggccttatacttgatgtgatattgggaataaattttataatcttggatggtattggcaaattcaaaaatgataattaatttgttgtagtcataagtatagcctaatgttacaattcctgagaaatcctaattcgaaattctcgaaaaaaaaggacctaatcttggtggaggttggctacgggtgttgggattgggaaagaattcgtttttggtaggtgtgggtggtaatgtcgatactccattgatgttggttggtggttgaggattgggtttgcacttacattgctcggggttgtgtgagggtgagttttgggggtgccattgctttgatatggtgcgatgagggtcctagggtggttagggtctgttgatgacagagttgggcctctattttgagtgctccagtggtctatctttggtattctgggtccttggtttgtgggagggaagtttggatggctttggtttgatagttgatgttgcttggcgatggtaagactcgttgaagtttctcgtcttttttctcaggtggctcttctctttgtggtgttgtttgttgctctagttaatggcttttttcaatcatgggttgttgttttgttgtttgttctctttttttgtttattttgttttttttgtttttgttgttgcaataatggtgttctaccactttatcctttgtgactttgactttgagtcatttttgtgggctttgcctcttggttcagttttactaaggtagttttgcctaggaggtttggagcattgtcgcatgtgtaagatctttcaaaggcggtatgatttgttgtaacgctatgttccgcagggacgccacgtgtgtacttttataaattaagttataataataaactaacagtttaagacaagtgtggtttaattaaaactttttagtaaaatctatttaaattaaaacttaactttttattgaaaatactaccagattcagggatctacttgtttataaacttttacaacatgttacaaaacaactattacataatagggttacattttcaaaatatgattaaaaggtggatcctgtccactaagagccaagacgcggttgctgatatgtacattgtcgagagatctctgactcatggctagtctagctttctctttcatttacctgcaccacgaagtactcatgaatcacaaagactcaacaagaaaagaaagtgaaacacaaacatcgcataacacgagaaattataacaatgaataacatacaaattcatcatctggtataaatactatcaatatgtaatcaagcatcaataaaataccccaaactaagttctggaaaacactatgagcaaaaactagcctcgaagaaaactaggatttttccctgctggccaaccggttgacaagttcactaatcggtcaaccggttctggcaacaatgaaaacatcctggtttttcacttcaaaaccaaaccaaaatttcatcaatcctgctcaaactttctagaacaattctataacataaatacaacgtactcaagctttcaaaactcagtatctcctcaaaatatcaaaatcaccataattgagtgaaaattgagttcttaaaactaattctcctaattctagacctagcagccaaggatatgatcaatacacacacacaaaaaaaaacttaaattaaatctagaaacacatcctgaactcgcttttacaccacagcctcgaaaccacaaaaaccctaaccaaaagtcaacctaaaccttaaaatcaataagacacagagggagaacttacctcaaagcttgaacagcacctagggttagctaattcagcttataattggttgattgtgaagaaaaaaatgctttgattcctactggctcttagggcttcgaaggaaagagagagagaaatgaaaattgtatgttttcttgatttttttctaagttactaacttaattatctaaccaattaataataaaactaaagagataactaaattctcagctagtaatttctatgccttcacataaaacaaaaataataaaacttagtaaaagactattttacccatcttaaaacacttaaactaaaaacataagctaagggtattttggtcatttttaacttatccaactaaactgacaactcaactttctaaactagtccgatatattttcaatatatctcattatttatcagcatgacatttctaaccaatccgtcgagtttctatggtcgttgaacccaaaaaatattttatttcaaaaatggtatataaaatacttacataatctaataaaatctccgcaattaataaattacgcttacttgttcatataattgtatatttaataaaatatgtccaatttaacataattataatttttttgaatattacaactattccctccttagagaattttcgtctttgaaatttacctgaataatttgggatactgctcccgcatctgcgattctaactcccaagtcgcctttttcaatcttgttgttcctccacaacactttaactagcggaagagtcttgttccgcaacactttttccttcctatccaagatctgaactggttgttcttcgtgtgataggtctgtctgaagttcaatgtcctcgtaactaagaatataggtcgtatcaaaatacatacttccgaagcatcaaaatatggaacacgttgtgaactccagataaagcatggggtaaggctagtcgataggctacctgacctacccttttcagaatcttgaacataccaataaatctaggacatagttttcccttctttccaaatctctgaaacccctatattggtgattctcgcaggaagacgaagtccccaacctagaattcaatatctctatgcttcagatcagtgtagtttttcttatctactttgttgaggcgaatcacacgagctcgaatctctcaatgctcactcgt

SEQ ID NO: 218608 - DNA, 4738 bp, Cannabis indica
aacacctcctctcaaacttagcggtgattgagtcaccccaagtttgtctatgagaaaatgaaatcttgcattagataagctctttgtaaggcagtcagctacttggtcacttgatggcacatatcggatttccaaggttttgttcaggactttatcacgaacatagtggacatcaagttcaatgtgcttggttcttgcgtggtagactggattcgaagcgagtgcactggctcccatattgtcacaccaagttataggtatctcaggcaagggaaacttcagttcctgcaaaagtgactgaatccatgacagttcggcagaaacatgggcaagggccctatactcggactcagtgctggatcgagagacaacagcttgcttctttgaggaccatgagaccaatgtgtctccaaagtatacacagtatcctccaattgatcttctatcatcgggacaacacgcccaatctgcatctgaataaccagtcaaggtgagtctctcacaaggtttcacatgaagactataatgaggtgttcctttgaggtatcgaagaactctcttgacagcactccagtgtgtagtggttggcgccttgagaaattggctcagtttgttaatggtgaagctaatatcaggccgtgtgtgtgtcaaatactgtagtgctcccactacacttctgtactcggttggattgtccaaaagctcaccatcttttaatgatagtgtctttccaaccgacattggagttggacaaggcttcaagtgaatcatgttggttcttttgagaagatcgtttacatattttgattgtgacaggtacattctagtttcatcacgatgcacttcaatccccaagaagtagtggagtgagccaagatccttcaacgaaaacaccttgttcagatctgttgtgaattggtttagtcttcttgtgttgttccctgtaataataatatcatcaacgtaaatcaatatgaggataacttcattttcagttttgtagaagaacaatgaagaatcagcttttgaattcttaaagttccagccgagaagtgtagcctttagtttctcaaaccaggcgcggggagcctgttttaagccgtataacgacttttgcagtttgcacacgtagtcgggtttctccttgtcttcaaaaccagcaggctgatacatataaacgtcctcttcgagttgtccattcaagaaagcgttgtttatgtccatttgtcttacatcccaacctcttgctactgctatagtgagcacaattcttactgtagaggctttaacaaccgggctgaacgtctctccatagtctattcccggtctttgattgtacccctttgccaccaacctagccttatacctttgaaaagagttatccgagttccatttgtgtttgtaaacccatttgtttcccacaatgttcatatggggtgttttgggaactaaaatccatgttttatttttcaccaaagctgtcttttcttcatccatagcacctctccagccttcatgagccaatgcttcactaagagaacttggctcttcgctgatgttatgccattttgcctgcccaacatacacctttggtttaaaaataccagctctggctcgagttatcatagggtgaacagaaacagggcctgctgcaacattatcacttgctgtcatttcctccacggcattttctgtcacctgttgctgagtattgtcttgagatggaaagccagcatcagtgatttcaatattaacatcatcaaatagattattttcagcatgattattactgctgttaggagagttatggtcaggaagtacctcacgggcagcagcaggatgaactttatcagcatcagttgactgagatttgctatgggaatcggtgatgaagggattaatggtagcagaccagaatgggacctcaacatggattggtgtttcagatttgtaagtgttgaggaaaccattcttgaaagggaattcggactcattgaatatcacatttcttgatatgtaaattcttccagtgctactaagacacttatagcctttgtgactatcactgtatcctaggttgacacatttagtagagtgatattgaaacttgtgtgtttgatatggtctaagacaagggtaacatgctgtgccaaaggtctttagaaacttataatctggcttctttgactgaatcatctcaaagggtgtgacattgttaagaatcggggttggcagcctattaatgagataaacggccgtttggaaagcatcccaccaatatttttggggcatgcttgcttgagcaagaagagttagacccatttcaacaatgtgtctgtgcttcctttcggctctaccattttgagcggaggtgtgaggacaaggatgagtaaaatcaatcccattttgaacaacaagatcagtaaaggctttgtattcacctccccaatcggtatgaagtctctttattttcctttcaaatttgttctccactaaggctttaaattgaataaaggcttgtagggcatcacctttggtttttagagggtatatccatgtgaacctactgtagtcgtctatgaagtggatgtagaatctatagtttgtgtttgacattatgggggctggaccccaaatgtcagtgtggatgaggtcaaggggacattcagatctatcattattggttttaaaaggtaaagagtgggatttaccaaattgacaagcttcacagaaatgttctttttcattcttagaatttcttacatccatttgacttaacacaagtacttaagacacgactggacggatggcctaatctcctatgccatttgtccttcaaggaataaactactcttgacagactgagttacattcgacttggacaaagaacgctaaaccagaaaagaactttgatttaaacttgttgttggggctgatgttggaagaggtttgatcaaactgataaagcccatctctaagcttcccttgaagtactttcctctttgttaccttgtccttcacagtgcaataatcagaagaaaatttaacacaaacattattatcagatgttaattttgaaatactaatcaaattttttgttatttcaggcactataagaacatctttcagcaacagaggtttttcattgttagtttcaagtaatccagaaccaacatgagttatggttaacttgttaccattgccaaccacaagactatccttaccattgtatttcgtcttctggtttatgttgctgccttctgctgctatgtggttattcgcaccactgtctgcataccacgaaccatcatcgaccatttcgggagtgacaataaaggcagctggatcttgagaagtcttttggttgtttccaccattaggagcagaccccatgaaggtttcatcgaacctgttgtagcaataggccgcagcgtgaccatatttaccacagatctggcatgtgggttttggtccattgttggttctgcctcctctgcctctattgtttccgaatctgcctccacctcgattattgcctcctctgctgtttcggttctgtcctcctccactaaaactagggccaccaccatttcctttgttggccaaattagcagtgggattagtagctgtggtagcaacatttccattcagtttgctggttcccgaaaaggtgctgagtctttcaactttgctatcgaagcagagaagaatgtcttgtaattcttgccatgttgtggatgttcttgcttcaacctgaagaactattggcaaatagtccagatctagaccagacagaacgttagagacaagttggttttcgggataagggtcacctgcaagagttaggacgtcggcccattgtctcttctgtctaagatattctgccatgctttgtgaaccctttcgatgagtttgaatcttggttctatactcatccatcttggctttagagtgagcaccaaaaagagcctcaagagcacgccaaagagctgcagaagagtctacacccatgacctcggtggctatctcctctgtcatggatccgaaaagccatcccatcaaaagttggtcatgaacaatccattgttcataatctggattcacctccacaccgaaaccaggctgaccatcaagagaaggagtagagatgaactcaactggttttgcttttgtacctgtcaaaaaaccatcaagcctgtgtcctcgaacaatggatgtaaccattgtcttccacagtgagaagttcttcctatcgagtttgagagcgaaaggttgattgagagtgcttccaaactgtggtacgacgacattagaggaagatccagtattttgggtcgtgaacgtctggttagcaacactgctaccgacgggagcttgaggggtacgatcgccggtggacatagcgccgaaaaacccgctctgataccaagtttaaaataagagaagataatgattgaaactctgctcaatgagcaaaaggcagtagggcttcttttatatatataatgaaaaggttttacagagaaatctagaattcgtacactctataacaaacttgtcagaaatacaaaaaatgggaatattcccaaaggaataaaatgagaaaagctgctgcacggattgctgatgtaggcacagaatatgaggctgatttggcagctgaagtggatgcagactttgaccaaaacggctgatatggatagggtcattttctaacaataatgtgtattaaatatta

SEQ ID NO: 218609 - DNA, 6321 bp, Cannabis indica
tagactatgcttagttagtaagtttttatttaatttttgtctttagtttatttttaaaataaaataaaatcagaaagtatcatatattttatatgtatatgacattgtagatgaattattattgtcttacttggaccaattcaatttatttgatataaattagaaaagagaaatgctaaaggcatctaaggtgccaaaatgtcatagtacttttaatatcgaaaaaactactaactaattataaagtgtcaagactgtagtgtgaaagtccatagcttagctctaacaaatcttcaaggaaaaccaatttgaaagaaaggtgatggctgagtttattcttactccaattgctcgattaatcattgatcgtttggaatctgcagctgtgaaacaaatctcatcgatttggggtgtgaaagatgaggttgagcaactcaaactaaccatttcaacaatccaagctgtgcttatggatgcagagacacaacaatgaagttcaacattggctccaaaggctcagtggtgctgttcatgatgcagacaacttaatggacgagatcaacactagagctttgcaacaacgaatcatgtctccaaatcaggtaggtatttcattcagaaaatcaagatttctaatttatttttacattgtttttgaggcaaatagtcaagcttgctatgatgatggtgttggattggtttttgacgtatggttttcctccacttttttcaaaattgacaatttatatacaaaaaagattgacagttggatttagttttttgtattctctacaagatcctttatttgtattgaattttttattaaagatttttactagtttacttaccaattttcctgaggggtccctaattcaattcatgacttagtagggcatgcactctaatagtgaactagtttggatagattctctatctcttatggtttttcaatgaaatgtttgttcattgttcaaaaaaaataaacacacagtcagataacaatatagcgacctcagctccttacaacaattacatttcattgataaatttagagttgttgagtctttttggaacacctgtgccgacaaactaggaggctctaaactttaatcaaccgatcaatactatctattatcatagtgtttttctcaaaaatacataagtttttttgtttatcaaaatactataaaccaactagacaccctctgaaattgaatgatgagtctagagaaaatacaatcaaactatgaacaatgactatgaacagcctgccaaactatgaaacaatgcttaggagccgaaagtttgcaacaccatgtttccaagttagagaataatatcgttcccacaccttcttagacaaatcttaatggggtgtttctgtcgtttgatttcattattatctacagaaaaagactattttttctggctccaatgcacttgcttatcgatttaagatgagtaataggataaaggacatcaagaagaaactagccaaaatctgtgatgatagaaagtttcatttggaagaaaaacatgaaaagacagattattcgaagagcaagagctgatacgcactcgtatgtgcgtcaagaagaagttattgggagggaggaagatatatcagctattataagtatgcttttatcggatcgttgtgaagagaatgtatcaatgatttccgtttgtggcataggaggattaggaaaaactacacttgcgagcgaatccagaatcattttgagttaacaatgtgggtatgtgcggctgataattttgacttaaaactaattttgaaaagtatcattaagtctgggggagacatgagaatggaagaactgcaaaagaagcttcgagaagtgcttggtggtaagcggtattttcttgtactagatgatgtatgggaggaaaatcgtgctaagtggttggaattggaagagttgataagaaatggtgcaaaaggaagtagagttttggtaacaactaggagtaaaaagattgctaatttcacatctagcaaaggtcaattgcataaattggggatacttaacaaagatcaatcttggattttgtttaaaagggtggcttttaaaaatggacaagagccaaaaaactctaatattgtgaagattggaaaggagattgttgaaaggtgcaaaggggttccactagctataagaacaacaggaaatttgttgtacaatgaaaatttagaatcaaagtggtcatctttgaataaagaattttcaaaaatacctcaagcaagtgaagaggatattatgcctacccttagattgagctatgatcatctaccttctcatttgagactttgttttgcctactgtagtctatttcctaaagactataaaattaaggtgggaacattagttaagctttggatggcacaaggatttcttaacttattgaatacagttgaagatcaatgtttggaggaggtgggatatgaatgttttataacatgttgcaagatgcatgatctcatgcatgatcttgcaatacttgtgtctggtgcaaaatgtgctacttttccttcaaattgtcaaggaaacttcatcaatgaaaatactcaccatttgtcctttgaacaccatgttcactctgtaagtaaaacttttctggttcaagcaagtaaggcgcgaacaattcttttgctcgatgaatgttgtttcaaaggcgagctagatgcagtggtattgcatttcaagttgatacgcgctttgagtttgaaatggttatttgacgattcgttggattcaatttgtaaattgaaacatttgagatatttgcatattttacgagtaactataaagctacttccagattcatttactaatttggtgaatttgcaaacacttaaattcagtaattgcccaatgctcagagaattgcctagagacattgagaaactcatcaatcttaggcatcttgaaatttttcattgtattgatttggagtatatgccatgtggaataggccagctgactaatcttcagactttatcaacgtacgtattgaggaacaagaacaagaacaagatacatgtcccgaaatatgttggcgaactaaaagatttgttgagattgaataatttgagaggtaaattggaagttgtaaatgtgagcaatgccatagaagaatatgggagttcgagcttaaagaataaacaataccttcaatcattgagtttggagtgggaaaatacaaatgttgaaattggtgaaatgtcaatggatgtccttcaaccacacccaaatcttcaggaattgaagttaacatgttatgagggtgtcaaattgtcaagttggctgtcatcacttacaaacttagtcaacttaacagtatcctattgtcaaaaatgtgagtatctagttccattgaatcaattacacagtctcaaatttttgaaacttaagagcttgatgtctttagattacatatccaacaatgatttacatcaagacttacttggttcaacttcaacaacaacaacaacaacaacaacattacttccatctctgcagagacttgagttagataatttgcctaatctaaaaggatggtggaaagaagttgatcatttttcttgtactgcaaatgaagacaaacacatctccttgccttatttcccttgtcttttttctttatgtataaaagattgtcctaagctgagttgcatgccactttacccacatttggaaaaagagttgtatctatcccatactagctggaagcctttggaagacacattaaaaatggttatattccctacaacatcttctttttctcctctctccaaattaaaaagactaagtttatatggcattgaggatttaaaatgtcttccagtggagtttaagagccttacaactcttaatgaattgacttattttagttgcagcaagtttaaggatctgtgtcctggtattctacatctctcatcacttagagatttgacagtgtcaataagtggaaatggtgataatgatggtgatgatgatgatgatggtgaccaaattatgtggaaagccttaactgaaagactccacaaattagcactatggtcattgtcgaatcttcctaagggtatccaacatcttaaaagtctacaacgactttatattaggtattgtgatagtttgacaacaattccagaatggattgacaacctcaaatcacttaaggaacttaagttaagaggatgtcctaatctgacatcattccctgaaggaattcaaggcctcacctctttgaaatacttggagattgcaaaatgtcccaatttgacatcatttctggaaggaattcgaagcctcacctctttgaaccatgttaggattagtgatagtcttatgttattgaagagatgcaaaaaggaagtaggtgaagattgggataagatttctcatatacaactcttgaacttatttccagatccaaacaaagaagatttcgaggtacaaacattaattaaatatctattgttattttttgactaaattaaaacagaatgtgtatcattttattatttgatattgcagctgtgcataaagtggatgacataaaggcatgcatttttgtaacatcacgcttcaagtcttcattgggactttacaatgacggaatgatgactcttatacaagagggtcacccatcctgaaattagttcaggtcaaacacgcttaaccgtgaagttttttcgtgatgggatactgaaattagtctcatacctacacagtctcagaatcatcacacttgactttctttaagcggtgtgaaataacacagcttatttagtattttttcttacagatcacgggactactgactgtcacaatcttcatcaacaagttttggctatgcagtgttacaagaaagaaagatagatatgtatttaacacatttatagattcaaatcaatggtatgttaaagttaactttcatttctaggagatttgatattaattgctgcattgcttggataaataaatattttgaggctgattattttacttcttgaatgtggtattaattactactcaactttaatctaaacacagtaatattgtgtgcagattgaattgtcttttaccaaacaatcaacttttaccagtttattgaaaccagaatttacaaagggaatcacgaagacccgcgttaattaattaactcgatttttcgattagaagcatttaattaagaaggattagctgcaataatactgtatgtatgtgtcatttactggatgtgtagtgcagcttcaattaggggtttatcaatcattttttatagattttaatgaagaacatatctatttcatagtaccacattagttgaataagttttctctaataccaacctagctataaagcaaatagttttatatagtaatagtatctatattatgtgaaaaataaaatgaaaacaaaatatgtgaatacactctaaatcatattagagtacattatccaacacgttcacttagtaatggtgatataaaaagtctggaaagaagactctacttgccaaacactgtctaataaatataatgacggttttttctaagggtatcaaacatcttacaagtctaccttaaatttatagttagcaattgaaatcttacatacgcgtgtaggacacgaacaataggcaagatcctagatctttgattagagtaaaagcaataaaacaagtgagtaaattacggaatataaaccacgagctcaaagaggtattcaaagattactaattgccatattttattgaatccaatagtggaaatttaacataactacacactattaacaaaataattataaaaatctaatgtaaaatataaatataccctaattatatatactatttataattatacctaattttcaaaattgaagcttagaacaaaataaacactcatgaagttacacaccacatgtgtacaaaaagcaacttgtatcactggcattttgaaagttaataaacatattacccatgtgaaagaaactgaattggttagtttttatttagttaagaaaacagaagaccgaaaattcctagataaatctaaattcagagaacatacaaaagtgtctggtctaatgttattcagattaagttctcttttatatttacaaattatgaaactaaacaatttaaaggaattttttttaactacccaaaaagatagaataattatatttttaggaaattgaagttggccatctccttataattatgttatgacaaactttgctgctaatttgtactgtactatacccagatgttgaaacaaggtgttgaacc

SEQ ID NO: 218610 - DNA, 2228 bp, Cannabis indica
aaataatgttacattatttaaaaacaaaaaagttattgttttttttttgataatagaaagggtgctaaagcaccccaaaccagggaaacaaacgaaactacaaacaaaccaacgaaaactgaagaatgaacggaaaagaaactaaacagctacgacaacaaacagaaaaaaattggtcagagactaggatcccactcaaccaaatcgtcaagaaccgaatcaggcagagcatcggagctaatcctcccaacaacattaaagcaagttggccgttttgcgatattgtgcgccatgaagttgcacctccttgggatatgaataataccccactccttgaacttagaacagtaattggaaaatctggctttagcatactgaattctaaggttgaacaaaggagaggctaggtcttgaaactcatttacaacattgaggttatcactctggaaaatgatgttgttcaatcccatagaggccgccaattccgcagctaagcacacagcaagagcctccgagagcaaaggatcagtgacagcggtcttggaggttatgattgtagttaatattactccactcgtcacggaacacagcagctagcacactgccagaagaggaaatcgctacatcagaattgcagcacagccatgatgaaggaggcggagaccaacttaggatctcaggaacagtcctgaaagagaccataagatgatcgttggttttgtatcggatcatatcaatgacacgcatgatgtccatctctttttcgcccactagcctccggtttctctctttccaaataccctccactatacataatgtatgggccataaagtcgatgaatggcacattggatggcctgtttgaatccagtttgaaccactctgtccattgggtccaagtgtgaacagtcacaagctcagtgcgaatgctccaacctaggtgaaaccaaagggctttagcaaaggggcaatactagaacaaatgcaaagaagattcggtagcctcattacataagatgcaactatcaaatattccttccaaaatcgcagcaagcttgcctcttgtggggagggcatcaaggaagagatgccaccacaaaattttcaatcgagagtggaggggggaatgccaaatcaatttccaaatctcagtgccagcattctcaaggatatctcccttgagtaatttacaggttgatcgaatggagaatttgccattcttttctcctagccaaatccaagagtcctccttatcctacctcaggcaaatcaacattaagattgcatgcgcatctgcatgtgaaaaccagtcacgaaccatgtcaacattccaccgattgtttggcaaaatgaattgactcacccacgagaccccgtgagtagcatctttgaggggaatgggggtacggtttgaggaaggcacccagggatcaaaccaaattgaggtattattaccattaccaattcctctacagatccctttctgtaaaatcgaccgagcttcaaggaccgctttccacgtccctgaatcactgcccctgctttcaatatccatgaagtttccacccttaatgtactttgcattaatgatggaactccatatgctatccttctcagtgagagccttccaagcccatttagtcataaaggatttattaatctcttccacacatctaaatccaaggcctcccctgagtttcggtttacaaagagcaccccagttaatgaggtgcaactttcttttgatctcagtatcaccccaccagaaatctctaagatttcgatccactttacgtgcaatttttaacggtatcggatctgtagcagccacatatgttgccatagaggagccaacaacttggattagacaggctcttcctgctttagatagcagtcttgttttccagctcttcactctttggagaaccctctctgttaaaaaatgcagatccttagatcggttgagagatctaaatagaggaagtcctagataggtcgcatctttttcattcttcgcatattaagcaaggctgagatttctctagcctggttagtaggcacaccggacgtgaaatgcactgttgatttatggtaattcacagcttgaccagaccaagcgcagtaatcctctaagtacttaagaaatcccttagcttctttaattgaggctttcccaaacaggattacatcgtctgcgaacataaggtgagtaatggccggtccatctct

SEQ ID NO: 218611 - DNA, 4506 bp, Cannabis indica
ttagtaaaaaaattctaacatggataaaagtccaggggacatgatttagtacatatcaaagtttgaggagcatgatttgatatatatcaaagtctagggagcatgatttagtacataaacaatcactgaaatagtaaaattgagtgaaattagacaaaattccttaaatttaacaatctcaatagttcaggaggaatttttaacggccaagaaagttcaggggacacgatttggtacatgttaaagttcagggggaaaaattattaattagctttttttatatgattgtgtatattgtagatatttaggattatttgtcgattttcaaaatattttaaattatttgtattgtcgaaaataaagtttaaacagttgtttacttatatataagaaaaaaatagtcatgattgcaataaaatttttaatcttatttttggcattgtcaactattcaaagttttctaaaaatttattggtttggtaggcttaaaaaactacaacttacactatcattaaaaaaattagattgaaaaacacttttgaatgtcaaaatagataaacaatcaacaaaagtataggtgtactatacatacccaattatttttttgtttgtaaaagaaaattaatgtagacaaacccaaaattgatgttacttttgccataccgttggagtaattattgtggaaaatcacattattaatgggtttttgcagttgatggaaatctcaaaagttttgggtaattaagaagatgacaaaaagtgttgtttttctcattttgacaataaaaatctaaaggcacgagtaggattagtctaagtcaatactggtgtcatatatttgaagaagttaaagcaaaacaagtagtgcaattaacaaagtaaagcagtttatggcgattttcacttttaggctaatcactgttattttggtttcatacacagtttcttctgcaatactcgagagtattaatgatggggttgagtctttgtacgatggtggttccccattggtttcaaaaggagcaagctttgagctgggtttcttcagtccaggcagctctaataataataaaaatcgttacttgggaatttggtacaagaacatccctgtacggacagtagtttgggtagctaatcgttgctccccaattaaggactcttctggtttgttgaagataaacaagagtaatggaaatctgatgcttttgggtgtgaacaaaagcgtggtttggtctactagtttgttgaaacaaacccaacaaactaagcttcatctcctagataatggagatcttgtactgagagatgaaatctcaaataccattttgtggagaagctttgattacccttctgatacattgttaccagaaatgaaactggggtgggatttgaggactgttctcaacagacatctttcggcttggaaaaattttgaagacccttgtcctggagatttcacctatgggattgagctgaatcaaaagcttcataatttccctgaattttgtatgcgaaagggttttgccaaattttatcgttctggaccttggaatggtattggtacaagtggagctccagagttaaagcttaatagtcttttttattataactttgttcttactgatgatgaagtttattatgtgtatggaatgaaaaataagtcagcaatttcaagaattgttataaatcaaaccacactggttagagagcgtcttatatggattgaagaaaaacaaacttggaaacgttacttatcagtgcctagagatgattgtgataactatggtgtttgtggggtcaatggtaattgtgttataggagataatccaatatgtcactgtttaaaagggttcaagcctaagtttcaagagaagtggaatgagatggattggtctgatgggtgcatgagaaatgtgccattgaattgcaaagacagaaatagagatgggtttttgaaaatttcaggggtgaaactgccagatacttcagattcttggtggaacaaacagatgaatctcaaggattgtaagggtagatgtctaaataactgttcttgtatggcttatagtaattctgatattagaggagagggaagtggctgtgttatttggtttggtgatttgatagatataaggcaattttcttctggtggacaaggacaagatttacatatccgaatgcctcattcagagctaagtacgataccacctaatttgttccttttgcttttttgtttatggttacattaggctgctaggctttacagtgtaaaaactattaggagtcgtttggcaaaattttttgagttttaaaaaactagaaaacagaaaacatcaaaatgttgttttcaattttcaaaaataatcttttttgtctaacatattatattttatattttgctcacatactcggatcctagacccgaatctagatccggatgagttaatgtcatggtatggtgctaaaatattgatttttttttttttgtaagaaaaaatctaaaaacagtttttaaaaatttgtgctaaacactattaaattgttaaaataacaaaaaactgttttctattcttatttttaaaaacacaattttaaaaattgaaaactgaaaatacagccaaataagcttatagctaaatgggaattcttaattgtatcatttttgctttttgtatgtcaaaaaggtaaatcaaaacgtaaggtgggagcaatatggatagttgtagctgccattggagttgtgtttttacttggttattgcatttacaagaggagagctctaaaaggtaatgttttctaagttttaagaaattgtcttggaaagtgaccacttataccatttgttgagaaacatatgttacattttgaaactaatgagtggagtagcacatgtttttatatattgctcaatattcattacaaaaaactactacttttggtgacaactgtttagtcacagtataatttttttgtcactaaatgtgacttttggtcacaacaaaatattacttgtgactaaagcatagtatttagatacaagttgtcactaatttaattttagtcacaacaaatattgtcactaaaataacatttagtcacaataaattgtaatttttgtgactaataattttagccacggaccttttcgtcacaacataggaatgatgatttataattagtcacgacttttttacttttagtcacaagttttgctgggactaaaagtaaaattttttgtagtgattttatgttctcaatactaattagtgaattcttaaaaagtttaatgactgttatgtttggtagaataatttgtatacttgtaaatgtttcttatgttgagctgcaaaaacatttgtgccttaacttgtaacagatggaagcgaaacaacaaaccagaatggcgaagaggacgacgacctggatcttccgttgttcaacttgtctacagttagtacagcaacagacaatttttcagaaaacaataagcttggagaaggtggtttcggacctgtatatagagtaagttttgcttatttaatgttacaaagtaaaaaaacaatgataaagaaatgtaaccaatttattatagtgttaatttcagggcattttggaagatagacaagaaattgctgtgaagagactttcaatgagttcaggacaaggagtgaatgagttcaaaaatgaagtaaagctaattgtgaagctgcaacatcgcaatcttgtaaagcttcttggttgttgcattcaaggagaagaaaagttattggtttatgaatacatgcccaacaaaagccttgatttcttcatttttggttagaatcctaagaattaccaatttattgccattttgttgtaattttcttaacttgaaacttacatttactagatcaagtgcaaggacaactgcttgattggacgaaacgcttccaaattatatgtggaatttctcgagggctcttgtatcttcatcacgattcaagattgagaataatacatagagatcttaaagctagcaatgtcttacttgacaatgagatgaatccaaagatttcagactttgggttggctagaattgttggaggagatcaaatagaacataaaacaaacagagttattggaacctagtgagtactcttgcatgtttctttctatatagatatatatatgtataatttaattatctctacctggtaatattttgcagtggttatatggcaccagaatatgcgtttgatgggttgttctcaattaaatcagatgtcttcagctttggtatattggtcttggagattgttagtggaagaaaaagtagaggctttcactgtgaaaagaatggccttaccctcattggacatgtaaggagcaataaacttcattggtaattaataataaggtaaattgcggcataaatacctaatgtttcaaattttatacacttaaatgcctaatgtttatttttggaggcaaaaatactaatgttacaattctcttacaccgttacta

SEQ ID NO: 218612 - DNA, 3764 bp, Cannabis indica
tatttttttttcttttttctaatgactttttaataccaatatttgaaggaccaaagtcaaagaggtgctgcaaatggcatatccatggctgctatgtctctattcaaagcagctggtccagctggtggaggtgtcatgtacgtattcaatgataaaaaacatatagattgtttttaatgattagattttataatcacattggctataagtataaattgttatttttttttttgaaagaaaaaaattgttattgttcaatgttcattttttgatgaataagatttgtttatagaataaataacttttatatgagttgtagattgatggtttatatcctgtcaaatactacttttcttttgggattcaataacttaatgaagtgttgaagttattatactctgtttaatttattaatttttcatttgatttttgtcagattttcttgggcacagaatcatcaaagtggatcatttctccctggtacaacatctgacattattttttttttcgataaatgtttttcatatttaaacacaaactatagtgtatcatttgaggactgttgattcttaattctagtttatactaaaaaaattgttgagatattatacaaatcgcctttaaattatctatcgagcacactgaaaaaaagatcaaaccaaattattaacaatagcaaggaaatgaagctttgattttgaattcgataaacaaattatatagatacagtagcacaatatgtaaaaagaggaactagtacaaaagcatactctataaatagccagtgtaaagagttagttgaaaatagttagttgctgaagtcagttagttttgccacttgttttggttgttattttctgttatttccttcttctttcttcactatgtaaccaactctgcatctcagtctctataaataataatcctcattcaaggcttgcttaacttttgcaagtcttgtgattcagttcttctcttgagtccttttagatttgcatagataagttcttagcttacatggtatcaagaaactcttaaccaacgtcgttaatggatccctgtcaccttgaacctactgctcaaccattatttgctcaaactccgccaatacagcaatggaatccttttcataattttttgaattcgtctctcacagttcgactggatcgaacaaactctcttccgtggaaattacaagtgatccccactatcatcgatcacggcctcgatgacatcctcctcactggagtttctcccattcgaacgcctgtcaatggtgtcaccaatccaaaatttacaacatggaaacgaaaagatcaaccattacttagctgacttcaatcttcaatgtcagaattgattattggatcattagcccaatacaactcctccttcgatgcttggcatgccctggaacaaagatttgtcagtcaattgaaggaaaaactacttcaaatcaaatctcaactctagttcagctctaccagaatttgtggatgattatggctggtatgttgatacaggagctaaaaaacaaataacctagggcattgaacacctcgaatctgaaattccctaatcagcttctaatatcttacatttggaaatggaaaacgacttcccataagtcatgttggtaactattctctcccttcctctagttcatctctacatctaaataatatccttaaagttcataccatcactaaaaatcttattagtgtctctaagctaacagatgataataatattttcttagaatttcactccaaatgttgttttgttaaggataaaatcacaaggagagtactactcaaggggaggcttaaaaatggcttgtacatgctgtcttacagttcctttcatctttcaatgtcaagctcgagtgtcatcttgttacaaagcagtccaagtcagagtcatcttctatttctcatagttcaaactctcaagatcctataaaatcttccatttacatttcctcttaatgtaataagagtgttgttaatataacctctcacccttgtactgattcttctataaacaaagatgatattttcaaatttctaattgttaatgactctgcactttttcttgctcaaaaatctaatgtcagtcttgacactcaaaactaaaacatccaacaccttaaatcttagctacactcaatattccaagaaatttaaaagaatgaaggttttgtgaggcctacaaaaaaaggtaaaaaccacaaacttccttattcaatctttgagtctcgagcctctcggtctcttgaattggtcctcagtgatttgtggggatcctctcatacaccatttaaggaaggtcataggtactatattcacttcttagatgattttagtaggtacagatggaaatttcccctatcctcaaaatcccaagcctataacacttttatgcaattcaaaacatttgttgaaaagtaatttgatctaccaattaaatttgttcaatcagattggagtggtgagtataggtctctagcatcttttctaactcaacatggagtccatttccaacatccatgcctttatgaccattaacaaaatggtcgtgctgaaagaaaacatttccacattacagaaactggacttactctattggcacaagttggtttatctttatcttattggtggcttgcctttcagcatgttgtgtatctcattaataggttacctactcgagttcttggagaaatatccccctatgaattcctattttacaaggtccctgactgcacaatgctcaagccctttgggtgcacttgctacttacacttgagaccatacaacagtcataaactctcaatgagatctgaaaaatgcattctagttggttattcactgcatcacaagggctatttatgtgaagatcaagttggcggggtatacatagcaagaaatgtggctttaaatgaggaagattttccagcacttcaacttgcaacatcacaacaggtacattcttcctcaatgcacatgtctcctactacatcctttcttacatctcccctaaatattaataatattgtgcctactgtacatgcttctgaggaaactgctgcacctatatctctgttatgcaaattgtaaacagctatgcaagtatacgaaatctattgtcgtcttaaactcacacaagtgaggtcgatccacagggaattgttattgagtaccactaaattaaatttatgtttctatttggtaaaatcaataaaaatgttgaaaaattaaataactgaaaattaaaaagcaggaaaatagcaattaaagtgtaattaattatggatgaatatttatgaatatgaatccagttagttcagtttcccaattgttaatgataattattaattatctctcttttggtgatgaccgattatcaaaataacactaactcttctcaaatcattaaggtcttaaatcatatcatatccatttgcacctctgaagtaaattaacatataactggcattgaattcagaatttaaaaatcacataagctatgtaaatactctcgttttacatcaaaatttatgtttgtcctattagactattgctgatattcacttctcaaatttcatattaggaccataaatcacatttaagatggtcagtctaaactatgtaattaaaaacaaataagaacaaatcacgcaatatagggcagaaaaactaataatctcattaactaaattgaaaaaaatcatctaaccttcattatatccctaaattgggaattta

SEQ ID NO: 218613 - DNA, 3957 bp, Cannabis indica
aaaaagaaaaaaaaaattatgaccttagtattatgcgtatacgcacataatattgccattttattttcaaattactggctaattgacaaggtaaccagaatcatacaacaaatatgtcgcctctaaaaccatgcaaattcgcccctaataattattaggggtgactagttcatgtcaaaaaatacaattaggggcgacaaagtcgcctttagttaggagcgcccttaaaagtaatccatgaatttctaatgtttaaaaatcgcccctaaaaaggcctgtcagaaatcaatttttgacttttgtcacctctaaaagtatcaatattaaaaaatatataaattattatatcataaatatttaaatatattttataaagaaaaccaaaaaataattctattttttagtggtgtaattttgtataatactaatacaaaaattaatctaaaacaaaattaatactattcttttatctttagaagaagaccgaatagattaaacttaaatttacataaattacattgtgcttctaagtttttacaaaaagaatgagagagaataataacaaacaaccaaaattctctcttgaaaaaactcagaacttaattatctgaaggaattgtcaatataaggtggagaagcgccttccgttggaggagctgccattggagagaggaagaaaaagaaaaaaggaaatcacaaaaaaaaaatgagaaatatatatataatttgcaagaaaaacatgaaaatatataatacttaaattatatgagagataaaaatttaccagaaaaaccgaactttgtgaagtacttaataaccaagcacgaacagagaaaatgcaataaattgaaataaaaaaccaaaacaaataaactccaaaagagagagggatagagagaagatggaggaacaccaactcctgaagcacttctgaactttatcgtgattaatttttgaactaaagagatggaaggagggacccggaggaggacagtcgaatgtcagtccgaacgaggaggccagattagactgggaagactagtcgagacagagagaacgatggggatgggattttttttcagaaagattttttaggttttggagagataacagaagtgggggtcaaggaaaaagaaatcgattttaataaagcaaacttttaggggcgacaaatgtcgttcctaaaaattgcatctaaagctataagggaaaaaaatcttgcccaaagctacggatataattcaaatttattagggacgatattgtcacctctaatactattaggggtgacaatagtcaccctaaaagtatacaaagtaaaaaaaaattaaaacaagcgacttgtcgcctctaatacccctattattaaagaattttttatcgtctctaaattagttgctcctaaaacttaaatttcttatagtgaatgaaaaatgtatatagacatcgatagtattcattctaaatcctaataatattaatagccatgctttattttgaaaaatattgttattttcacaaacttaaactaaatgcctttatttacatgtataatatataacgcactacgtaccgtaattatttggactgatcaagagggaaaccttgaaattttttactagctatagccgtgtcattcgcactagctaaaggttaatttataaactaataattattaattaatcataaaacatatatatgtgtgtgtgttttcacaactatacatagccaattaatgagtgatgatcgatgagatgtagtttttttttttttttttttattaagaagatcgatgagatgagttcatcacattaattgccttttatttgttgaagtggtgtccactcttcatagcacccactcatctttaccaaaaaaaaataaaaaataaaaatcatataagctttgcctatgtcattgaaagagcactaaacctaatataaacacacacacacaaaaacatagtaacattattttcaaagagatccaattaattatgaactcctttcttctccttggttttatttaatttttgttttacttattatttgattctgatagcacacaaggattctattgctttggaatgccacggaatttgtattcgcttaacggataagggaatcctagctagggctaggggagagagagtagaggacgtactaaagtggggccatttttataaaataaaaacaaatacattacctctttttcttttatttattgatatattgcttcctttttgtgcctataagaagaggcatttctcattttggtgttcattggcaggcaggttaagaagtatcacctacatatatagagagagagcttgagaagctagctagctagttagatatataaatatatagaattgatagagctaactaattttttaattaagttaaattaattatttattatcaaatatgggagataataatagtattattaggtcatcggtacatggggggaagattacagaggctctgagaaagatgaagccgtatttggctatggtttctctgcagtttgggtatgcagggatgtatattattagcatggtctccttcaaacacggcatgagtcacttcgtcttgtctgtctatcgtcacgttgttgcctttgttctcatagctccatttgcctttgttcttgaaaggtacttcgtacttacctacctacgtatagtacgtacgtacactatactatatatactagctacttaaaaactaatactattatatatatatatatatataaatatatatatatatctttactgatgattttctagctaccgatttgttcatgctactgctaatttctttttatattctaattctaatgtgtatatatatatatatatgtgtgtacgtttcttctttcttctttcttttcacaggaaaataaggccaaagatgactctcccgatcttcctacgcataatgctgcttggtttcttagagtaaggccctatatatgacacgctgcgcttgattaattattgaataattgtttctcaaactacacatacataaacatatatatatatatatatttatttatgtatgtttatgttttgtatgtgcatgcatggttacaaataatttaacatgtgtatcataattcaaattatatgtatgtatatagtttatagaacgcatttctatatatatattaattatatgacgcatatataatttaacatcatttgtgtatatgatatataatatagctaataatatacagttacatattatttaataataattggaaaaaacatgagccacctgaaggtgggcctagaggtatattcctatgcttctttatcagaactttttcatgcacacacgcacacacatgctgacatgcatgtacagttaaaaataaccctcaattattttcttgatcttgactactcttttttttctttcttttctttttcttttttcttttttcttttttttttttttttttgttcgtgtttaccttttatattactctaagcaactcaactaatttttaagttcctagtacatataaatctaataattacaagttgatcatgaatattctaagagaaatgataaaggggactttatgtgtcaaccacaacaagtggtatattattattgatgcaaatgagtttgatacaatttaatttaataaataatataataaattgttaatcaattattaaagccctatcaccaagttgttaggcataatattttaataatatatatatactacatatattaagttttattattgggagaaatattcagatatatcctgtaatctttgtagagagagagtaggtgtagtggcaatcgttgctaatggaaatgatgtcgaatgtcactcttttatatatttatatatatattatatgtctcttcttcaattaattcatatatatatatttatagtatatatgagtgtatgtgtatgtat

SEQ ID NO: 218614 - DNA, 3693 bp, Cannabis indica
tggaggatatagaaaaggtgtggtggaggctaagctaaaggtggccataaatggatttggacgaattggaaggaacttcttgaggtgttggcatggccgaaaggactcgcctttagatgtcatcgccatcaatgacaccggtggtgtcaagcaagcttctcaccttcttaagtacgactcgacactaggcatcttcgatgcagatgtcaagcctgttggtgatgatggaatctctgttgatggcaaggtcatcaaggttgtctccaacagaaacccctcccttcttccatggaagtaagctactactatactaatatccacaatttcatcatatgttttcttaattgcaatagttgtaatgatgataaagttaattgaatttttctttacaaatgttttcaatttaattagacttcaaaaaaaaattatagataaatatgattgatgaaagttgtaaggtgtaaaatgtttttgagggaagttattgtttatcgttggcctctatagtaacatcagtcgagagatatttaattaaaattaaaattttgatatttatagatgaagaatcaatttaaattaaccataaatataactaagtttttaacaaatacatatactttataaattgtcaaaaattctttcatctaacttatttttatggcttcctaattttatccattttgaaaatttggtatttgaagatgaaaaattaattaaataacttttttttctttgggtcttgtagggagttggggattgaccttgtcatagaaggcacaggtgtgtttgtggacagagatggtgcaggcaagcacattgaggcaggagccaagaaggtgctcattactgccccgggaaagggtgacattcccacctacgtggtgggagtgaatgctgatggctacagccacgacgagccaatcatcagcaatgcctcttgcaccaccaactgccttgccccctttgtgaaggttattgatgagaaattcggcatcatcaaaggcaccatgaccacaactcactcctacaccggtgaccaaaggttgctcgatgccagccaccgtgatcttcgtcgtgctcgtgctgctgcactcaacattgttccaacttcaactggtgcagccaaggctgtttcccttgtcctcccttcactcaaaggcaaactcaatggaattgctcttcgagtccccacacctaatgtctcagtcgtcgaccttgttgttcaagtctctaaaaagacttttgctgaggaggttaatgctgctttcagagaaagtgctgataaggaactcaatggcattctctctgtctgtgatgagcctcttgtctccgtcgatttcagatgcaccgatgtatcatccaccgtcgattcttcgttgacaatggttatgggagatgacatggttaaggtcattgcttggtatgataatgagtggggttactcacagagggttgtggatctggctgacattgtagccaatcagtggaaatgagattcccaatccaatcattttaataagattttttccctgccttaaatattattcaccaactgtttttttccttcttttttcctttttctattattcctgtctaaaaatttgtaatgagaactttgaaccgatttccctggcttgtcattattcaataacagctttcctttcaatcaatatttactcaaagatccataaacaaatcaaagaattacactattccaaagaatataaatgatccatccttaaaacaacaacatcaataaataaaaaaatttacaacagagagaccaaaaaaagtggagcttgtgtgtgtgagtaaaattgtaccaagatcacctatcaactaatgaaacataagagttgacgggttgcgataaatgtgcacaaatgcagcatctcagagtgattaatttcgataaaatctggtttatctagaacaaccaatgcttcttccttggcttctgctgtgctggagcagctgcaaagaggccattttagtggattttcaaactagtgcctttctcttgaaaccatattcaaaacaaaataagtatgaaagcttaaagctacgagtatggactcaaaacgtgcacaaaccttggatttcataaagtgaattataatgaacctcagaccagaaactcagccacaactctgcatgattcaaaagaataatatcaatgtaaatgtactaatgttttcaggggttttttccagcaaaagaaggtgttagcctaaacacaaaaagtacaactagttttgtcattagtccacacaatttaattcttgtttaactaattacttgacctttagtttaacgactagactttttgtgatgattgcataactaacatcattcctcttcctcttattaaactagtttccaagtactaaagaacactcaaactctgttttgtttaagaactcgaaaggagagaaaaaacagtcaaacttaccacgcttcggtgcttgatattgtggcatgatttcaataaaacaagtgtctctgaatgatgtcaaaaggcatatctttgctgcaaactgtgagggaaaaaaacaataagcatcaatcatcatcatcataacatggaaaaaatggtaaaacaatgccaatagtgtgatttgattgattctatataccttatcagctgctgcttgtaaagtaacatggtcaccccattcaccaagtctgcaatagaatcagatggtaaaacttgaaccattacattacatttcatttcaagcaataatgaaattcattcaacaaattaagaaaaaagaacacacttagccattttcttgtagtagcgtttgtacttcattgggacataactatcatacagagagcgaaaccccttaagctgaaaaaccccaaaaattaaataaaaatcgattctttggtagctgcaattacagtacttaatctgaaaaatgccttacctgtttcacaatatctttgcgcacatgtttgtgatactccggcgaacggtaaatctgatcagaaatcgcacgaaactgccaatacatatgaaaaagattatgtaatgatatatatatatatataattctgttttttctttctttattagttcaaatagtagtacctggcaatttccatcgccggagaccttaacttcacgtaaaccataaacatttaacctctggagaagacggtgatgatccaaagtagcatcgcttaagttagggatgaacgaattgatgcgaggaacatgctgaaaacacacaaaaattaatgagatgatgatgaaattgaatgaattgaagaagtaagaagtaaagaatttacaggaagaggagccaaattggagaggcgtctagcgagagcaccgtccaagtgagcatattcttcggtgagaacttgggcgatcatccgatcatcctccatttccttctgcttctccctttctgaccattcattattcatcatcatcatcctccttcttcttcttcaaatcaaatttaataaattgacaaaatctgaaatttcaactaacaaactaatttaactaaaaccctaggattgaacaatacagatgaatcaatgagtgaaagaaaaaaaaaaagttctttctttgaaatcaaaccagggattagattttttttttctttttttggccaattgataatttgggcaaatcaaatttctacaaccttttttgataaactaacaaaatct

SEQ ID NO: 218615 - DNA, 10397 bp, Cannabis indica
gtcgggtccgggtacaatttttttaacctaaaacccgtaaaccaaaacccggtcaacctgcccgatgttcagccctaatcaacactagtctgctcatagtgcatccgatctgcactaagtgctgatttcatatcttggatctaatctaatcagcaccatagctcaaatccaatctattgactgaggttttcggcaaccaatttaataagataataatgagagctttggggtaattaatgcagatgatttttacgtggttttggcataaatgagttgtaatccacgagtctcttgtattaatgagagtgtttcttacaaagaatgttttcttttttctatgtcttctctatctttttctttcgatccccttcttaatttttctaggggtattttgagagccaactatagataagcacaagttctcaaaagatacaaaatagggcatgcattgcctacgtagtaggcagcgtagatgttaggtgagattagccttcatccttccttgattgatatgattcttcataatggagccgtcactagcccttttgattttcgtgcaatcgccctaaattaggcttacgatgtttacacgtcctcttatgggcgttcccaaacattttctccacgctacattaaatgcgaagtgactgttcaagtaaagtcctcctggcccggaggtgccttcctatgtcctgactcccgaaggggaaggtgagccttttgctcttttttgggagctaacgacatgaaccatactcgttgcttctttaatctgacctttaactcatctctgggtgacgtatctattttatccacatgtcacacatagcggcagccacatatattggtaataaattggggcaacatttacctccaagtcttatttagttgcaggtaaataagacttgtgagccatctccagtttcaataaatgaaatggcacgtgccccaggcgcgtgggtagtatttatgatcatcatcattgattttatttcttttgcaggcaacaattcactcccctcctgttgacagacccttccatcaataccagtgtcagaaaggtactcaaatgttttaaccgccctttctcctctttacacccgttcatcccattcgtcggatcataaaattcgaatcgttgtgaatcctcaccgtacaaatggtctataaaagccaacacttttcccaactaggtaattttcaccacccaacagcttctagtctaccaaaaccattcgataaaattctagacgcccctaattttcttctacttttcctctatcgttaccagacgaaatattaccaccaggtgttatcaacttttgtcttgccgcctttgtgtaagtttctattcagacatttctttcagttgttagggcaagtatagatgacaatgtatttttgtctgatgtgtttggattccttgaaacgacggttatggccactgttaatatgacgcccccaaagttgggcgtccgatgacttatgctctttgttttcattcattttatgtcatttactacttttgttgtgtatgaactactgtttttccttttctgggaaagttaaaaatggtgatttcccgtgcgcttttttttggttgttcgaagtgacttttgcacttccattttttctttccttctttgctaggatgttttgcacccgatgtttggatgaggcctctttccagctgttaggggatccccatttccctttttgattttagggtttaatatgggggctaactgttggatttttactatttcagatgagtgaagtccttcgtgaccttcatacgcacagtttctttgggtttgaccaagaaatccttgatctacaccaagtccactccatgtcaacccccactgccagagtgaagtcttcgaagaaggggccaaagaagttggccaccttggacgaggtcatgaagggccccgtcatctacaaaaagtttgcatgttgttccaatggctaggaagccgatgaactgcattcaacgttaacctgcacccaccaattagagaaaattagtattgtcgcagggatcaaaccctccagttcgggggtctaccatcgtctccccatggacgaagagatactaaaccacaattataacgactttggggcatggagcaagacccatctgatgtccggggccatgcttcctctccaggattatttcatcgatttccttgtctttgttggtctctcaccttaccagctaatcccgtaagcttaccgcctgttatcaggcttgtacattttttatgtagccaggaattgggccccgcctagtcctactgaaattttgtatttttacgaacttcttttagtccccaaaaagggggacaaatttaaggatggtttttataaactccaagcccatccggccaacgaaactccagtgcccttcaattttcagaagaatgtgaaggagtaccgccacagatttttcttctcctccgggttcaaagcttttgagcgcctagacctactgacggattgggtcaggatccctcctatgcaccgtaccgcccctactcaactcttcctaaaccacgcacatgtgttttctggttacaagaaggaagacttgaacgtgggagatctggtcacgacggccaactgcacgaaggccaaattgatcttggagagtcgatttgtggaggacttcaatttgtccaaggttctttaccctaacgtccggaaccctgggagtgagaaggcactctgagaagatattatcttgtccgcagaggacagatacaataaatatagacaagagggattaggagcttgcatttgcccgagcgcaggctgcctctggaaagatatcctaagaggaggcagggaacgaaagaacttcagtccgacccaagtttccattcccggttcctaaatctggggcccatggtgcaagcacctccagagcttgtaagcctcctttgaacattcactttgtcccttctgtccaagactatgctgacctaaggctagtggagtttgataatagattatacagttttcggatgccccatttctggtggagataatgccaaatacttttatttctcaaaattaagtcactatttgggtcaaacccggatgggctcaggtcctcccgtaccaattccttggatcactcctcctagacttcaagttggttccttccctcggatagctttttaagtgatgatgacaccagcctttaaatttgtgaattttctaggacagaattaaatcacaaaggtaggactacttccgttgtgctatacttgcatatatgatttctgatgttattctgattttttactcattttgaacagggaaacccatggaggatcttttggatgcactcacccaaacttacagtcctgagttaaacatgcctaagcagcccagggtaagtgtgaatctcggaggacctgccatcaaagctcttgggaaccataaagtggccctgattaatgaagaggaagaagaatttgtctctcctctcgatcgaaagcgcaagagcgttatgactgagccagagtcttcaaagaaaatgaagagggttgacacactgacccaagtgctaattcggggattccttctgaagttgatgagtatctcgctcctctgggcatcattttgactcctgctcatcctaatgaagaaagggttcaactctgcattgccaagcataattatgtcgtgggggaattatccaggggggatgccgaagcaaaggctctgaagaagtgcctgagggaggcctaagatgggtcctttcaaggcgaatatgctagggacgtctaggatttaaacttggatcccttgatagtctggtttaaaagctttgtggggcccaacttggctcattttgcctcagaaatggtgagtcactttgctgctgatttaacccaacttcccaccaagaggtatgcggcgtgtgcttcttcgaatctcgtatactaaatacaagacatgagtgttaccctgactacaataagtgacaatcttataggtctcttttatgtttttacttctgcagttctaacttttttctcttttggctgctagattgctgcggaggccggtcgtctttccaaaactttgatcgaccaagggttcactatgtcagagtttggtggcatggacgtggtaatgaaaaagctccaggactcaaaggaccagaaggaggccattcgtaatgaagcccaagaggataaggcccttatggagcggaaccattaggcggtgctgaaagccagggatgaaattgttgcttcggccaggagggacctccgagactctaaagaggagaaccaggaacctattgtgaagctcaaatctctagaggagctgcaccaggtcaatttgaaggcaacaacctatttaactgttgaactcaaagagcttcgtgagttccacgatcagactcgcaaggaggcttccaaagctgcgagggatgctttactggctccaattacctgtaagcactgcgataagcattttgatgacggggtgttcatgtgctggaaggccaataatttcgaaccccatcttcctttttatcccaatcccgacgttgttctggctcaattttgggagaaaaataagaagttggatgctgtcctggctgagcgcaggggtccccgtcttccgccttgacttgattaattaactcttttttttttatatttcaccttcccccttttaagacaattctattttcgtacttattttttgtattttaggtaaggggagactttttatggccctaccccaggccttttgttattcatattttagacaacttatatgtttatatgtttattttgttttcttcatatctagcctatttttgcaagtatgttatgccttaataccctctaagtgacataaaaagaattttttaggtcacttagcttaaatttgtgtggaataacacatatatttgtccggcacaggttatcttacaaaatacaaactaatattactgaactcctaactattgatagtacttgcagaggtggtcagcattctaggctcgacgtactatggatccgtccattctctttaacttataggtcccggagcctatttggcctaagtacccccactcttggctcttgggtgattgggaagacccttcgtaggactaggtctccaatggtgaattttctatctttgactttggaattgaagtatttcgcatttttttagtacgctgccatgcgtgtttgagattccttccgaagctcgtctatctgatccagtgcttcttgcaacaaggcttggttcgttgctggattgtacgtggatcttttgtgggaagggatcaaggtttctaccgataccatggcttcacatccgtacactattgagaatggggagtgtctggttgtggttcttgtggtggtccggtaggtccataatacgcgtggcagttcctcaggccagttatttttgcaggccaacaattttttctttagggcgacctttaatattttattgacggcttctacctgtctatttgtttgtggtcttgcaaccgcagagaagcttttgatgattttgtgttggtcacagaaatttgtgaattcatcgcaatcaaactgctttccattgtttgagactatcttgtggggcagcctgtaacgacacaatattttttataacaaagtctaaggatttcttggaagttatggtcttcatgggctcggcctcagcccactttgtgttataatccaccacaattatagcatactttaccccacgctttcctgtaggtagggagctaatgagatctattccccaaacagcgaagtgtcaggggctagtcatcaaagtaatttcattgggtggggcccttggtatgtttgcgaatctttggcatggatcacacttaagaacgtagtctatataatccttcttcattgtaggccaaaaatacccttatcttaatatttttcttgagaggcttgggcctccggtgtggtctccacaaaacccctcatggacctcctgcatgatccttctagcttcagggtctgacacacaccttaagtacgacatgctaagcccctttcaataaagaacattgcacatcattaaatatcgatgagcttgatattgtagctttctagatacaaccctttctttgggcagctctcctttgttatgtacttaatgatggggtccgtccaatccggcctttgtacgttggtggctaccatttctttgactttgatactaggttctgcgaggtgttcgacaggtaccactctcagcttctcaatctcgctatctgaggctagcttggctaaacagtctgcctgagcattcttttcttgtgggattcgccccattttatattctttaaattcttggagcaattccctgacaactgccacgtaagcggtcatcttctctccctgggtttggtattctcctaatacctggttgaccaccagttgtgaatcattataaacctctaccttctcggctcctacagccttggccaatctcaatcctgtgattaaggcttcatacttggcttcattgttagaggctgggaaagtgaactgtagtgccgcctggagtcgtaacccatccagtgagatcattgctattccgacaccagacccattttcattggatgctctgtcgacatatactttccacgtgggtatattctgagtgggcatactggcattttcctccgtctcgttacattctacgataaagtttgttagtgcctgaccttttatcgagatgcgtgggatgtattggatgtccaactggctcaactccatggcccacttgaggagccttcctgaggcttcaggcttttgtaaaacctaccgaagcgggtggcctgtaaatactttgatggaatgggtgtggaagtagggcctaagttttcttaaagcaatcaggaggtagaaagctaacttttcaattaagggataccgaattttggctcctatcatgcatttgctgacatagtatatcgagtgttgaaccttctcctcctcccgaaccaaggctgcactaaccgcactcttggagacggctaaatataaatacaagtcttctcagtgaaccggttttaacagtattggtggtttggccatgtgctccttcaattttctgaatgcctcctcgcattcttcagtgcattgaaatttctgacatttcttcaagatgttgaagaacgcatgcattttttggtcaagcgggagatgaatcgactcaaggcgacaactttctcagtcaagcttttacatccttatgtctttttgaggagggcatgtttaataaggcttgtattttttcaaagttcgtctctatcccgcgctgactcacgatgaatcccaaaatttttcccaatttgacgtcgaaagtgcatttttttggattaagtttcatctcataccttcgaactacctcaaagcattttgtgaggtcgtctgcatggcccatgcacgttttggatttgaccagcatgtcgtctacgtatacctccatgttctgctctaggaggcctttgaacatccggttgatcatgcgttggtaagttgctctggcattctttaatccgaagggcatgaccatgtagtagtacaccccttgtcggtcctgaagctagtacactcttgatttgcgacatgcatttttattttgattgtaccccaaataggcatccataaaggatagtaacttgaatcttgaggtggcatccaccatttgatcgatccggggtagcgagaaataatccttcgggcaagctttattgagattggtgaaatctatgcagacccaccatgttccatttgatttaggtactagaactggattggccaacaactctgggtagtacacgtcctgcataaagttgttggacaacaacttattcacttccttctccaaggcatcagcctttaccgggtctagcgagcatcttttttattatatcgggggcatatctgggttgacgttcaagacatgggtgattacgtgagggcttattccagtcatatccccatggcatcaagcaaagacgtcagtagcctcatttataatatctatgatcttactttgctcctccgattctagatttttccctagacggataaccttagaagggtcgaggtcgcacactcttatttcctcgacgtcctccataggttctaacatcacttcagacccgatacaggggtccaactcgtcctgttctgccaaatgttcttcactccctcgtaccattaggatcgacaaatgtactgtagcattgtaacattgccttacttctccttggttccccctcattgttcccactccgacttctcgagtagggaatttaagccacaggtgttgaatggaggtaattgctctaaaattgactaaggccggcctgccaaagatggcgttgtaagcggtagggcagtccaccaccacaaaggtacaatacttgaaggtgctttggggtgtgtcaggacacagggtaaccaggagtctcacctttcccatggggatgagtgtcatcatgttgaatcctatgagttgtgagccactgggagaaaggtccccgtcggcgagtccgatagccgtgaaagcgtccttgaacaacaaatttatggagcttccattatccaccagtattttggcaacaatcttattggcaatgggagtgtttatgaccaaggggtaatggtgtggaaaatgcactggtttcgcatctttttcatgaaggtgatgggctggtccatgagcctaggcctttgagctagaagttgagtaacctcccatacttcttcgtcatgttttagggccccaacgtagcgctttaactcattcctggtggttcttacaatatgaggtcctctaaagatcataacaactcttccattaggtcggggtggtaattcgggagtctactgaaggggcacccctctgggaagtacctcaccctcgagcgcaccgccagttcctccttgtggcaagggacctttagtttggggcgaattcaaatgtgggagcctatttctgatccactcatacaagtggcccaatcagattaggttttcaatttcgtctttaagatttttaccctcgtttgtggtgtgaccgatgtcgttgtgatagtcgcaccttttgttgggatccctctaagagctatccctatacaagggggaggctttcgataatgcatactttgttgggtggcgaaatatacacgttcctgagagtctgtgagctcagtgtactgcgtgtattgaggagtataccccctccgttggctcttgtcctcagtccgcgtgctacctttagaagatctcttactccaggagctttgttgggctcctgccatactggtggctagtgtagattgggacgaaagttgaacgctcaccccctagggattgcttacgggtgccccaaagtgcgacagtgccagggctaaggcgaggttctggttgtatcctggagtagcggagaactgtattctgctcatttggggagcagcaggaggtggagcccctagaagttgtgctcttggtgtatatctcgacactcccgtcgggtaataccctccataagccactatttgggcctcttctaggttaatgtatttctggactctcttctgaaagtcttggaggctagccgctccttcttgttgcaattcgttctagaaaagggttcctgtccggatcccaacttggagtagggctaactgttgtccatcatccacctttttagtttttgaggcttcctccttgaatctctttatgaagttttttaaggtttccgcaggcagttgttttatattggttagggcactgacctcaaggttgatcttccttgctgccacaaactgccgccggaaactcacttgcaacttgttcctacagtccaccgatcctggctccaatttcttgaaccattcttcggtagacctgctcagagtcagtggaaagcatagataatttgcttcattactaaccttaatgatggtcattaccctgttgaatcgggacagatggtcactggggtttgagtctcctgtgtacattgccatttcatgcattttgaaaattttggggagttctacctccaggatgttcctggcgtagggctctcgatcctcgcaatcagaatctgagtcatctcctttttatctctgagagaccctagctatgtctttgtagaggattgtcaattcggccaagattccctcattcaaagcgtctcctgacacgggtatcacctactttttcttttcaaggtgctttctcaagtcaccatgtttttcattaattttttgtcttaagtcaatcgggggatgtctttgacttttcctctctctttccccgggctcttggtgcacagacacgctttttcgg

SEQ ID NO: 218616 - DNA, 3132 bp, Cannabis indica
tgtttttttttttaaaaaaaaagaaatgcaaacagaattaaattatacattgaattattggacagtatttattgatatagatatgagagaacaaattcatcgtgaaagaatcatggaagagaagatactagtaatatcattgctaatataattcatatatataaacatatcaaaaccgcccatgcagtaaataatatatataaaacatagcttttgtgaaaagttgtgcatcgatctcaaagtcccaaaccaaacccaactatatatatgtaaattacaacacacgtcttcttcagtccttcgtgtcgagtcatgtactaatgatgagtgtgtgtgtggagcccatatacatatacaaattaatatttatatgtatctatattatatataacgtgggccaataatttattgccaagtgttcctactctccaacataagcacgactttgtgtgtagattgcatgggaacaagtagattttcttaatatattccctcctatatgtacacaccattgatgatgagatacgatattttcttttaatctttctttcaaagtatatatctatttgcatttgcatataatatatatattattttgtatatatcttcaaatttaagcacacagaacaaaaccctacgacacatttatatagaaatagtttaacctatatagttttataattttatggtctcttttagatcgagtgtcatcctatatctttctttttgttcctcttctttagttattattgcaaatttttgaactagctagtatttgtttggtatactcacccacatcatgaaattaatgggccccatatattgtcgacctctcaaggggtactaaataatgggagaatgtgttaactcatcagacctaatacaatgaaaattaatttatatatatatatatgtgtgtgtatgtgtgtataatgtacatattgcttgacctaagccatgtgtgaaagtagaattagtacctccacgagggagacatatcatgacatatattggagtatatatatacttcatgcatattgatccgacgattattaatggtaaaataataataatatatatcaaagaaaaaagcttggaggataaagtataaaagaatattttcagagaaacaatagttttgaaaataaaccaattaatagctaggagagtatttaaaaactagaagaaacatgagccacgtacgcaacgttttttttaaatgggatcaacatgtaaaagttaatgaaaaatttactctgcaatttggcaagtaaaaaaaaataatccaatataatttatatatagtattatatatacattcttacatacaatattattgttaaaacatagtatttctcatattgataaaggaactactcttaaaattactgtatgtttttgaggtggaacctctcctcggagttgtaataaatgaacttttttttcttctcatttgataattagcttagcggtccagacctgtatttaataattatcagtataggactttttaacattagccaattaaaaatcaacacatgaacttggatatggtaaaatatatacattcatgttgcttgtaaggtggacagagagagctaaccaagccaagttggtgtgcccaaccaacctgctatagctacgaaaagtcaacatatgataaagtataaagacctagctagctaggcgtagccctataggagtgatttttattcgtaagtacgtatatggatatttagacaggaatgatggggcctgggaaggtgaaaataaaaaagaagggttaatagaaaagtgaaactatatatagctattagggttttttttagataaggggacaagagagaaggcatcgataaacagatatgggggagttgttgctctaaaataggagacactcaccatgtgatgagatgataatctacaatcatcttgtctttacatctttactcttttctgattttatttctatttgtttcattgccttattcattatgtctttttaatttattttatcatttatttcacacatcataaatgcccgggtcgtttttttgttcatcaagttaatttttaattattcaataaataatagtatatatatttaattattactatataaagatgattattaattaattaattaatatgaaattttatttgacttgtaagtttgtacgtaattattaatgtctatatgtttgactgtacagttcaaagtattaatcaagacagttgatcgataaatgtgtatgtattttgctgcaaataaatattgttctcacttctttaggatttaatatttaactcttacaaaaataacttgttagaagaaaaaaaaaaagcagacacataagaatgttgttagctagctagagtcaaacggacacatttatatatataaatatatatttatgccatgatcatcacgctttgtattcttttattcatttttttttttttgttgaaaggtgtaatttctcattccatcaattaagtatatatatagggacacaattgtgtctgttttcacagaatgtatttcgtaatgtacgataaccgttagatgggtgagttatttgatctgaaggctagctagggttgatttagaggtaattaagtttaaaaaatggtaacgtacccgagacccatctaatatactacggaatacattccgtaaaagtatatcacgagaaaaaatcgtgtccctatatatatacaagtacaagagaaattactatatatatattatataaataatactttatatcgtttactgaaccacaccaatgaaaatcccattgatcctttatgctccaagtgtacatttgtacacatttatggaccatgctatatataataatttgtgcgtgactctagtttcctagatataatcagtagagccataaacttaatcgtgacaacaaaaaaaaaaaaaaaatctagttaatctaataatatctttgattaattaatctgatttgtacaaaagcattaaataagtgaggtttggtttaaacaaacaagtccatgtgataacgatatatggaacaacaaatacactgatggaaaatgattctgttggatgggaaataaatatatacaaatccagtaaactgagtacgaactcac

SEQ ID NO: 218617 - DNA, 3268 bp, Cannabis indica
ttttgtacagagagaatttagaagaagaggagaaagaattctaaattgtgtctctgactatagaagatgttggtatttataaggtactgtctaagagtgttggagagatagtaatgttctcaactaacttaactgctaaaattgaagcttaaacaaactaactggttttgactgaatactaaccagacataactaacttcaacaaacaccacaaataggattaagatgggcttaaagtatcttattctcaaacattaaaattttattatctaactttcttattagggtatctctcttatatttgtcgtattttatgttgctactcataaattagctaaacatatccttaaaatagataatgagttttcttaaacgaatgatattccttttaatagtactttcttctcttctaaggtgatcatgtaaaaaaaaaaatcaaaattaacatatattaattaacatacatatatagaatttatttacatttcttttttcatattacacaagaaagatataggttgaggtgagtccctctccttaacaatctaacttagttaatcactcgccacactcaaattattattacaggaaaacaaactaaatatatttttttgatacaattataaagatctttcatgacctttagtacgtatagttacgttttcctttacatattaaagcatatttataattataattaatatatggaccatacagcaaacgataattaataataataataataataataataggtactatatatagcttattaattaataattcattatgggcatgcattgtccaaacgaggagccacgtgacacgtcactgggttcttcatctccatggacagcctcaggcactcggagaggtccacaggctgagctgggagccacttgtactggtgcagaagcctagctagccagaggtgcacagaggccaggcccagggccttgcctgggcaaactcttcggcccgatccaaatggagccaacctaagatcagagcccattatggtcacatcttcttcaacaaatctctcgggcctgaaagcccatggatcctcccaaatggatgggtcgtgagttatggcccacatgttaaccattgcggttgttccagctggtatgaaatgcttgtctatatggacatcgtggaccgccagacgggcccatgagagtaatgggcctggtgggtggagtcggaggacttccttgacaatagcttggagatatggaaggtttggaatgtcagtgtctcgcacgtgcctgttgttgcccacgcacgtgtcaatctcatgctgtactttttcttgcatgtcttggtgcaaaaccatcctggccattatccattccagaagtatggcaaccgtatctgtgcctcgaaatatcatttcctgaatataaaaatagttatgattagaaatatattaatattcctagtattagtgtataaatagaataattgaggccaccaatgcttaaagttcaatggaataaggaatgttttgtatggattgagaacgtggagagcacaaataaaaatgaaaagcatttatgattctcaagcttgaatatatggaccatagagtgacatcatattcctgtacatgataccatattataatttattatagagtaacattattttcaaagtggataaataagttccaactataagatttgtctggcacccaattttttttttttttttttggtataaagttgttatatttcaataataacgaatgtattgtgtgagggtatataggagagttaagattttgggtatggtgtggagattattggtttgctgtgactatccttgtcttctcaaaagattgactaatgagtcaaatggttttttgggctgtaagtgttataaaaaaacaagttgtttgaaagtaaaatacccgtaaaggacaaaatcataaagccttattaaggataacaaagctgcaaaagaaaacactacctatcaacttcaaaagaaacactacaacttttatctctcaaaagcagaaaaggggagttccttctttacataccaaaaaaatctttttctcttttttgtttgggtgtatctaatgagatgtcttgtcatatcataggctaactatttcttttgggatttgatcatggactttactttgagttaaattaaactttaaaattttataatttagtcacacgtgtgtgggttgtgtttcgtagtttgatgaggtaaaaaaagagtgcttacccatagtatagccaccatgtccgaatcacttaattggtcctcttttggcaaagctagcaaagcactaagaaaatcattatcatcaggttcagattcagtagtaccaaatgatattttcctttcttttactatttgactcacgacatcattgaccttagccgctaatatgttgcactttcttttgaccccaaaaaagtccaaaaattttagaggaaaataatcctccaaattaaatttggaaatcaattcatatccttcgttgaccatatcccctaaacgttgaccagcttgattttctaaacccaaacgactcccaaaaacactctccaacacattagtaagagaacccttttgtaaaatacctctaagacccaccaccacacctctctcatccatttcttgccccacgcgcgccaacatttcgtcagccacgcgctggcggagcccctccagagtggcaatacgccttggggagaacatatgaacggctgcgactctcctaaggtggcgccaataggttccggctggagcgaaacctatggctcgctcgaacatcagcaagcgagccgagtccttgatcggacggtcagtaaaggaagatccacccaagatttccttggcggtttccgggtggctactgatgatgactggcgtaaagccgaggctcagcgccatgacgcgtttggcgtcgaaagaatcggccaagctggccagtttgcgatgagccagtgggcccatttcgggtatagtccctaagatgggccagcccattgggccttggagttttgagaaacggtggtttgactttgaccatgcaaaacctccggggactagccaccggttgagaaaggagtatacgaaggagaatagtattgagagaaatagagtgaaaggccatggtgtttggtacaaaatgacgccaaaggaaaagagtgttaagagagtgattattttagcttgaaggaatggtttcattatcacaagcttgaagttaactggggttttgtatttttttttttttaag

SEQ ID NO: 218618 - DNA, 2473 bp, Cannabis indica
tttagaacctccgtgcaagattgttcttccaaaataatgcgctttcgttcccagttggaatgtgaagaacacagaggctagctgcagctgcatgatgatgaaatctcccaatgcagtccgaaatcctttctctagaccaatttccatgaccattggcaatactagcaacaaccccaattggaagacagactgcgtagccaaagcctcttcaagagccttggtttgatgtatagttggattttccaagatctccctttccactccactcataaccatgtaaaggcgtccatacaagaacacatatactgttagcactgtcacctgagagtaaggcaccagaaaatgtcaccatcgaattgacaatacaatcacaatcaatgcaaataataatacataatttcagctcacataccatactactaaagtagaaaccaacagttgtgaagtaaaatgagagcattctgtagaagtcaaatcgacgtccaagccgataaacatcacgacttaatgtttgttctccatttccattagcaaccttagcctcaaagtttgaaatctgattcatacccacatcacgcccttttcccacttggatatactcatgatgtgtaataaatcctccacgcaaagttgaattgtagcctgttcattattaatttataaatttatattcttctaaacttaacattcaattgttgtcaagtattaatatccttagagctcatacaagtaaccaaaccaaataatacctgcaaatatatcttcactcaaatttatgtttttgaagctttgcttatcccacctcttgttagatggaagattctatcaaaaatatcagggtggccataatgaaagcgaaccctgtaaaaacaacgttattacgaaattacaatagcaagataaagttaatgtgtccaacaccatatgaggaaaacaacaattagtgcaatttatttttgggtaccacatatttaaatttaatttaaaatatgtaatatccggtctcagataaaaaaaaatcactataagaatttagttagcataagatttacaggaaaaaaaatgaatattagacttacctaagaggatttgccaaaattcgttgaccaatagttacaaaactagtctcctgattagacatgaaccatgcaagtgaagaaacactgtaaaataaacaagcaaaaaaaaattacaccatcatcaattgcgagatttgcattaccaaacattaactgatatgcaagccatcatctagagatcgaagagaataataaccttccagtgaatatatgctctctcagacccaatattgtgggttttcggtccccaagacgcggcttaataaattctgccaatacgtttctcattttgaaagcttcttcatagtagttatcctgaaaaaaaaggggttagcaagatcattgtttaagctttttgtcttgcttgtactttcaaatgaacaatgaaaaaatgttacctgattcatgtctattgtctgcaaggcttctccacgagtaaatataatagcatgattctgattttcaggcttcccttcgccaatgactgttggaggtcctggaagcttgattcggtatatttcctaaaaatttgagaagtttcacatgttaggtagtagagaatgaattcagcagtagaaaggggtgttcctcaaattgatgttacataatctgagaagattatttgcaagtgtttatcattgtatgcatcaaacctaaatgaaatctttaattagcaaataattcgtctttttataaacgtataattgaatctgtcttttttcctttcatcccacagcctttgtctggtaagagctttgtctagccttcagttcatctactctactcctatctagcaactctattttcataaataagttttcttaaccagccttcccacatcattttctcctcctagtcactccgtgcctctagtcagtggccttaggcctaacctaatttatttattttctctgataaggtttgagttttaaacaaccacttctaatatactacccaatttaggaaagaaaaaataatgcagaaaatgttaaaattttccatacctcatctaacttgtcccctcccttgagcaaaacagaataaaaaaccttttgaggccttccattcactgtgtcctctcttgtatcaatgtaagcaacacgtaacgattgatgtctacacaattgacattttgaaaaaggacatcagcatttaatacatcattccttaaactgcatccagtacatcattttatacaattgacgactcacgttagcattagtttcaggatactagtgtaacaactttgatccctaggatcattggatttcttttgaacaccgtaaagttggcaagacacaacataggtaaacttcaaatcggccaaagcttgtgcacggtcagaaaaggtcttctggtctttttcacttaactccaaggttcggtagccactg

SEQ ID NO: 218619 - DNA, 5623 bp, Cannabis indica
atgtattttccaaaaaaaaaaaaatgtgttaattgagaaatgagtttctgaaagtcctcttacttccaccccactcgattatgatatctgtagatatagtttagataaaaattattctctattattcatcttcacctctgcttttgaattaagatatatgtggaagtctaattttagtaaaaaaaaaaagaattttattgtgaatattataattcaactatttaattgttaaaaaattttaatagggacttgtatataaaaataaaattatttataaatgttaattgctaaaataggacttgtcaaatattcaaattaaaattatttattttaagaaaataattaatttaattttaaaaaaaatttttacctattggtaacttgctattacaagtcaaaaaaaaaaaaaattaatcatcatagttacaataaaaatctaaccatttaatagtcacctatatagataaataaacatattttattcgctattctttctcaaatatacaaataaaaatatccaagtatatatttcttgtcttctgacatggttgtgtacgctctcttagggtgttttcgttcattgctttcagttttgaaaagtttgttttgtcgtgattaatagagtttttaggagttctgttatggcttctagcagtcgtcaaggtatggtggatgaggaggatggttcgaacatatggttagaggaagaatcagatgcagtgctggcatacaataccaatgatcaaattgagaaaaattatgatgatcggtggtgccttgttggaaggtttttgacagagagatcaatagactttgatgctatgcaacaccttttaaggaatcggagacaaaccgatttttatttcagttttatcacgaaattgatattcaaagtgtcatcgaacttagtccgtggacattcaataaattccttctggttttttcgaggctgaaaccaggggagaatcccagattggttgagttgaatgaggtaaatttgtgggttcaattgcatgacttacggtgaggatttagaactgctattgtggctgaagatgtagcaaattacattagtaaatttgtcgagtctgatgagaataattttatgggcctctggagggactttcttcgagttagagtcactatgaatgttactaagcccttcaaaagacgtatgagacttcggaatactgttggaattgagttttggacaaacttcgaatatgaacatcttcccacattttgctttatatgtgggattatgggacactctgataaattctgtcctcggaggttcgatgttacaaatggtatgatgtttaaaccgtatggtgactggatgagagtctagcctaggcgtatcagtcaacgattgggaagaaatggctaaaaaaattcagggtggcaacggatgagtgtcagatgcaggaagaccacccagattcaggcatgataccaaaagaactttgacgggacaattaatgtcaccagctatttcgaatcaaattactgtgatgaaggagaaaattgggggtcaagtatcatgtaataaaggggtagttattggacagaatggtgaatcaaatattggagagagatgagggttgactgatgctgattgttaggaaaataatgctattaatgtagatgaagattgtttgatgatagttgactcaaaaagaagaagaacagagatgggccttggtgttggttcagaagataatttggaagggaggaattcggcccaagttcaaagggattcaaaaaatgtggatttggtgggttcaggtttacaagcccaccaaccattatgagtcttttatcatggaattgccatgggcttgggaacccatggactgtacaattcctaaaggatattgtcatccaaaagaaggctaatttttgtttctttgtgagaaactctgtagacgtgatcaagttgagaaggtgagagtttctttgggttttgatggtataattgatgtagaagtgaagggtaaaagtgggggttttgctcttctatggagacatgaagaagaggtttctcttatccagtttgctaataagtatatagacatgaaagttactattgtgggacgaatgaaatggaggctcacaggcctttatggtgaacaaaaccgaagtaaaagaaaggcaacatgggatatgcttcggaatttagctgttatttcaaacctccccttgtgtgttatgggggatttgaacaacgtaatgtctcatgatgataaataaggaggcaaccgatatcctgatttcttgattcaagggtttcaacaagctcttactaagagtgggcttcaggatatggacttatgtggctatccattcacatgggaaaggggtaggggaactgtaattttgatcgaagtgcgccttgacagagggttggttaaccaatcttggttagacatgtttaatgcagctaaactttataacctcgaagtgtcgacgtctgaccattgtccaattttcatggacttaacttgtgagttaacgaatccttcaattcaaagatttaggttcgagaattcttggcttcgtgaacccttgtgcattcagcttgttaaggagagttgggatggttttcttggcagttatgtccaaagtaaggtggcagcctgtagtagacagttgcaatgttagggtaaggagtatactggtaattttaaagaaagaattgggagatggaaaaaggagatgaatacatggaaatctgggcgtgatgacatctctattaaaaacttcaaacaagaaaaacataacttggttaaaacgtatgcacagcaagaaattttttggcagatcaaagtagctttggctccaatatggtgataataaaagcaagttttttcatgcctcggtatctgctcgtcgacgaaacaactccatttagaacctgaaaaattcgtcaggtatttgggttaattggaagactggtttacccgatgtcatgatgaattatttcatccacctgtttccttctgctcaaatgaattggaatgaggttacaactgctgtctagtcgcgtgtaacagatactcaaaataaagacttgatgcagcccgtttcctttgaggaggttcgtaaggctctcttccaaatgcacccagataattctccggggcctgacagtatgactctaggcttttttcaaagatgctgggttgtggttggtaatgatatctttaaccttgttaagtctttttttgaatttggctgttttcctactggtataaatgcaaccaattttgttttgattcccaaaaagaagcaacctcaagatatgggagatttttgaccgatttccctctgtaatgtcctatataagataatatctaaggttattgctaatagactcaaaagagtccttcctaccattatatctaagacgcaaaatgccttcttgcaaggccgattaatttcagacaatatcatgatctcttatgagattatgcattatttgaagagaaaaagaggaggaagagatgggttcatggctctcaaattagacatgagcaaagcttatgaaaggttggagtggggttatatcaaagctatgttagagaggatgggtttcgatggaagatggattaatttagtaatgttttgtgttagttctgtgtctttttctattgttcatggaagacatgaaataggccctattgatgcttcacgtgcgattagacaaggagatcaattatccccttatctgtttattctttgagcggagggtttctcgtgtattttgcgtacctatgagcaaagtggactacttatggggtgtaagattgctcgtcacgctccaattatttcccatatgttatacgcgaatgataactatatttattgtgaagcaacggaagaggaagcatataacatcaaggagttgctacacacattcgaattggcatctagacagaaaataaatttctcaaaatcatctgttttttacagcttcaacactgttgctggtttgcgtgatacaatctgtgacttgttgggaatttttgaagcggatgaaaatggttcttacttgggtcttccatattcgattggaaaaaataaaaattccatacttggttttcttaaagacaagctaaggaaaagaattaatggttgggaagggaggatgctttcaagggatggtaaagaggtgctattaaaatctgttactcaagcacttcctaattacgctatgaatgtattcttactgccagttgatacatgcaaagatcttgaaagacttatggccaagttttggtggagtacgggttcaactcaaactagaagtacaagttggatgagttggagtcgtatgtgtcgtcacaaacatgcagggggatcggggttccgagacttacgagattttaacatggctcttcttgggaagcagggttggagactgttgactcatgtttcttctcttgtggggcatgtgtttaaagctaaatactaccctacagcaacgttcttgaacgctgagttgggtgataactcaagttttgtgcggcgtagcatttttgaagcaaaagaccggttggtttctggtgtttgtcgatcgattggttcaatggaattagtctccattctcaatgatccgtgtctccctgatgaaataccatttgttttatccaatcatcctactttaattaaccattctgttagcagcctcatgagaattgattctagagagtgggatgaagatattattcgtgatctttttgaggatagagatcaggctctcattttttcaattcagatgagtgataatgtcttggagaatcaatggtgctggaagtttgagaaacatggaggttacacggtcaacagtgcttatagacacctccaggtgcttaagggagcttggtctgctgctcaactgacaaacctatggcgtactatctggaatcttaaagtgcccccaaatgtctgcaatttcttgtggagggtagcttctggtagcttgccaagttgtatcccattgcagaagagacatgtacctataagtgcaatctgtcctgtttgcaatttggataatgaaacaattttttatgctgttgttgcttgtcctgttgcaagatcatgctggagtagatcattggtcgatgttggtattactgatgatgttgatttttgtaattagcttaggcggtagtaaaccgtgggaagattaatgaattggaggagctggcgatggtggcgtgggcgatttggagagcccgtaatgaagcaagtattgttgcgcctgcaagatcatgcctagatcaatgtaagatttctcaagaacgtagaggcttttctctatctcatcttgctgagcatgggaatagatctgagcaatggttcagacccaatgggaataagatcaaggtaaatatggatggagctttgtttgctcaagaagatgttttggtttgggatgcctggccagggacagtaatggtcgaatgattgaagattttactttaggaaagatgggtcgggtccaacctgaattggcagaaatcattggtatcaaggagactttgtgttggattgataggtgttatcccaatttttgcactctgacgtggcatcacatgaatggtaacacgtggaatcc

SEQ ID NO: 218620 - DNA, 10665 bp, Cannabis indica
gtaattagttttggtcaaattagccctccatgaagtcgtggttgagtgactgtcaaccctacttggtcgagtagctcttaagttagggttttgtcgaatagacacgggacacattcattggcctggtcattccttagccgactcttaaagtcggtttctttcctttctaaagagtaaacgttgactaatctagagaatcagccttgttaatttttggggttaacagtttcataacctgcctttagtaatggtgaattcctatccaaatctaatactaaaattctaaacaaactttacaaaaagtgtccgattatcaaaggttgacacagatctgatgttaattcatcaatggcctgacaaaccgcttaataagttcgcaaattgatttagtggagagtacgtgagtatcctaaagtgtactgattcaattgtaacaaaagtttttatgcaaggattggctcatggatcagaattaaagaaaaacataatagtatataactaggttagtcacatacaagagctctaaccatggcttgagacgtagcacttgaagtcaaggaaaagcactatacaaaagaaatgttaaaggaaacttttgccatggaagattcattgctctatcatataaaaaaaaaaggttgccaacgatgcgtccccacgaaggaatgaaataagacaatttagtgataagggagtagtaagagtagccacaacaactaacactgcacaagtcaggcaaataagtggacatcggatcaaagaagaccttctccagatgattatagcgttaacaaaactaatgagcaacctagagtttttagaatgcaaggataagatgagaaccaatgcttagtctattcaatggacttaagcaaacttctcgttcatagtatcaagagtgtgatgaaaacatcgaaactcatgatttattaatgcactgaatttaggctaatgtgataatcggtgatgggatttgcttacaattagataagtagaatgtctttttcaggacattagtaaagtaaactagcattagatgtattggctatacatcgtactggaccaatcttgacagtgaaaaagatatcataaacttattgttatatatcttctaagtcaatgtcacttacttgatcatatatcatttaatcttaatcctgagatggttaagctgtagattaaatgtattgcacgagttctttaacttgtttgttactagcttacccataggactagcacatacttacatattgagaactcggtagtgtaaatgagtggcagtgttaatcattgatatggaaatccatagcttctgtgtctattagaagtgaaacgatagttccttagagattggcttaacacgataaatgatagagcgctcattttgataattatattagttttctgaaatatcatttataagtatctaagtattttaatgataaagtacattgaaggttaaaatattaattttgtccctactcaatgtaaaccgtttatagaggatcaatgattgttgtgattgaaataatggataatttatagcgtatctatatttaatatatagagtgttctatgtaatcaggagtgcaattctaaatctatagtggagtgccgcaagcctcagcgttttggcaccggaggagccacgaacccagaccacagatctaccacaacaaagccccaagcctcgccggaagggttcgaaaactactacaacccaaatgaaagagtagtggatgagaagcacaccccgatgaatactgccaaagacccattgacgcacaccccaacaagctccacaactccatcgctgaggcacaatcattgctgaccaagaagcccaaagcttcgttcctccccatagaaggtgcatccgaaaactctacactcgccgaactccccactccattcaaaagagaaccctccatcatcaaaatccaacacctaaaagtccccctcggctagggagcatcaagcacacaacaactgccagtgacaatttccctagccaagaagagaaaatagaaaaacaaaaaaccctaactaagaagagagaaggtcaggaaatgagaaaaaaaaggagtagttttctattgtgttatatcctaacatacaattctaaatctatcttaactaccttaaagtaatatataaataaatataaaaatattatatatttttttcaagagaaatactaattacaacctcctattataatcttttagtcaacctccacgctcaaaatcacataccagaatatttttttttattttttttcatagcggtatttgttgtagttacagtatcattcctataaattttttaaaaattctgaatagtttacaatgccgaaaacagagttcttaatatttcagtttaccacgtgcattcaaacttcaaacgtattttcagcactataaactattcaaaaaatttcaaaaaatttacaaaaataatattataagtataacaaataccgccataaaaaaaattaaaaacaaaatatattccaacatatattttcaaacacaaaaattaactaaaaaattataataaaatctccaaaaggagaataccctcccttaaccactaacactttagcataattttaaattttatttctaaatgagaacataaataagctatagtcataccacgggggttccactcactttgaaagttcaaagtttcaaaaaaattaaaacaaaaaaacaaaagaaatcatataaagcttaaaataaggcatatatggtccctccaatccatcatccacacaagttttcatccgttactaataaagtttaagccttttattttattttaattttaaatttgatatataaatagcagctctatgctctgtctttcttgttaaattactactttgcccttttccctttcctttctccctcgcatattctcagagcagtcggtgagaaaaagcttctccaatggagtcgactgaacccaaaggggttctcacttacggaggaaagtacgttcagtacaatgttctcggcaaccttttcgaggtctcctccaagtatgttcctcctattcaacccgtcggtcgcggtgcatacggcatcgtttggtcagtccctctctctctctctctctctctatatatatattttcatggaatctgaactttttggtatttttttaagtaacccttttcggcttagaatagtttgtgttaagagatggtatcagcttgttgtgttgtttattccttttttttttttttgcatagtttgattgcatactgtttgtgtttggttctgaggaaagtttaggagaaaaaggtgagaaaatggggtctggttggttgaatattcttggacaaaaaaacaaagaagctttgcttggactcattcatacgacaaagactgattttttccattagattgactggttttaatttattttcaaagatttgattttgtaaaagttaaaagcaagttttactaatatggatttttgaggctttaatgatcttatcttgatagttttttttttaaagtttatctctttaatgtatttatgaatgtgttgagttttacccaatttggtaaggttttctttttacttataacagttgtgcaacaaattctgagacgaaagaggaggtggctataaaaaagattggcaatgcatttgacaacagcattgatgccaagaggactctcagggagataaagctcctttgccatatggaacatgagaatgtactgatttggaaatcaagaaatttctaaagtttaaatatttttactctgtggttactttggcgaaattcttaatgaaaacccctttttctttttctcttttggtttagttgttaaggatattgcatttgctaataagtaaggtattgttatcttgcagattgttaagataaaggacatcataagaccaccggatagggagaagtttaacgacgtttatatcgtgtatgagttaatggataccgatttgcatcaaattacacgatccacccagcctttgacagatgatcattgtcaggttagtagtcgtcgttgttgcttgtgccattgtacattcactctgtttaatcagtgtttcatacgttgtctgtgcttcccgaaagccttcgaggaaaaaatttgaagggatatgagatgatgatacatggcaatgccagcatccatctcttgtcctccagacattgacacaatcatcatcagaactatatttggctatttgatgggggaggtttataggttcagtatgatgagtttcagcttaaatatttttattttcagtgcaatgctgcaggtgctaaatagaattggtcatggttttctatgcattttgttccaatatgtagtttttttgtaatgtacatgaaaccaagatcattagtaggatttataggttatcaattagagtaattctagacacacacacaacactcaaattctagtcataaatatttttaagtaggtagcgcctccctttaattgtatgactgattttaatacgaatcattactaattatggcttgccattcatgttaatgttttataacattgaggtgtaattgattgaaaactaaatcagtttttctaatgccttggacagtatttcctatatcaattgctgcgtggattgaagtacatacactctgcaaatgttctgcatcgggatctgaaaccaagtaatcttcttctcaatgcaaattgtgacctcaagatttgtgactttggccttgcaagaactacctcagagacagatttcatgacagagtatgtggtcactcgttggtaccgagcgcctgaattgctactgaactgttcagaatatactggcgcaattgatatatggtcagttgggtgcatcttgatggagactataggaagagaaccactatttcctggtagagactatgttcagcagttgactttaataactgaggtactttaattttccactcttggctctcaagcttttatctttttgcactgtttatttagaagatctttgtactagaactgcaatatgaatggttaatgttattattagtgaaatattgataaagaaaactactaatcatttccataaacagctaattggctctcctgaggattcagatcttggattcctaagaagtgataatgcaaggaagtatgttaagcagcttccacgtgtccccaagcaaccttttgcacaaaagttcccaaaagcatctcccgaggcaattgatctcgcggaaaagatgctagtattcgatccatccaaacgcattactggtacgtccttcagcacttaaaacttgaacccgggcaacttaccatttgaatttcttagcctttctcaaaatgtatcttgcttaacacttaaacctgtcatgtttgcaaagttgatgaagcactgaaccacccgtacttagcaagtcttcacgagatcaacgaggagcccgtatgcccatctccatttgtctttgatttcgaaaagatatccctgaacgaagaagacataaaggagctcatatggagtgaagctctgaacttcaatccagagaatgtgctggaatagtctctctaagttattatccttttgtttctgttattttagctcactagataagataaggattggtttcggtttgtaactatataaagattggtatgagttttctgagggtgagaggttctccctcattgtattgagaggataaattaaatagtggtgttgggaagttggggttgctcattttgagaaccttgtgagagagtggtagccatggagatgagatgggatggttggtatgcataaaagtgaaggttttgatctgctagccttctgagcttgaggcagtgatgttagtgtgtttgtatatgtaaatgggaggggatatcatatcagtatagggagagaaagatgctcataataaacatggttagaattttactattatttggttaaaataaatataattttgttcctcttaatccttgattatacattttggtttggatcaaatttcatgaagttctcaaaagtataatgtttttatctcatagagtgaacctaacgagaaaaattacttttttttttaattagttttaagattttggttaaaaaaaattgtttaatcttggtctttctctatgaccttgagaagtgataattacaatataattttttttaattctttttatagcaatatttattataattacgatattaattttttaaatttttgaatagtttatagtactaaaatagtatttttgatatttcaagtttactattcgtatttaaaagacttcaaatttatttttgatactgtaaattattctaaattttttatgttgtatatattaaagttaaatagagaagaaagacatcgataaacatactactttaatatcacaatataggagtataattccaaaccaaataagcttaaacacacatattaatattatacataaaatgaaaggtaattaatactattaattattattattagccagaagtgactgtgatctcttctcataacgaaaaccattcttcttagaatcatcagcagaccaaataaagattccatgaagctttccctgttgtttcagctgatcacaagccttgaaaaacccattctccggcgacaaaccaccactcccatcactaataaagcttgtcaaaaccttcccaccatgatagtttgagctttgagtattgaaataatcaatgaattgagacacagtagttcccttatcataagcatagaattggaaattcacatagtcaatcaaatccccatatttattccacaaagcctggtaatggctctgtacttggtcatcatcaaagggagcaatggaagcaaaggagatcacattgttgttcttcaaagtctttattaagcgtccgatgcactcggtgaaagtatgagtgtctgagctgaaatgctcgtaatcgatatcgattccgtcgaggttgtattgttggatgatttgagtgagagttttgactgcattggacacccaagaatcaatggagaatggcttgaagaaggctgatccgccactcggggcggtatcgccaccgaggcttaggcctactttgacattgggattggcttttttgatggctgagacttgagatggggagagattgtttgagtcccaaaagacgttgaatttgccattggttggggttgagcctgatgacgtgtcataatctatggcgaaggagagaaggaagtgaaattggagggttggattgattggtacgtctgagaatttaacgttgttgaattctgctcctatgtattctgtgaaaacgtttgtgtttggaattggaacagagttagtttgggataagatgataaggaaaatggtcatgaaaagtatgtttggattcatattgttctttttttggctttgctttgtttgggtataatatttatgtttttggctttcttttgttttgtgttttgatgagtaaaatagtggagggtggtggtgtttatatatggtttggctttctttggttagttgaattatatgttgttttttattgtccaaatcattattctttactaaagtaagtctttttttttttatttccgtttctaaattgtgaaaataaagagtaaagacaaatatttgtgcttccatcactagtaaagataatccaaaatttgcatccaataataaaaagagttatccattattcttgtattatttttcctccatgatgtattgttttaggggtcaacagtcaaatttggtgtattttgaacaataattttgataattgaaaaagttaaaattttcattccatgactgaaagggcacttcacaaatacacttttatcttcattattgaaataaaaaaaaattaatcaattttaatatattggcactcatgtcatgaatcatgatactattttgcattattgactgagatatattgggttcaaaaactcgtaaaccatcttcatactttagggtgtaccataatggtgaggtgaactataaatcttcctagttatatgattttggagcttcaaatctaatttcgactatgaatcatcattttctttctcgatttttcttttaatgtcatatcatacttagagttgggattaaattgaataataagaaagataaaaaagcaagaaagtttcaaagtgacatgtctaataagatgtatcataccataccaccacctaaaatgccaaaaatgcttaagagatgtatcataccattactatatcaccaacatgactagattgaggtgcatagcatgagcaatagagtcaagagattattatttggggtcaaaaatatgtgcacttttggcatggaaaggcctatattcttttgattggtttcttttttgtatggctttgattggtttccttaacttatttgaaagccaatttcattagtaattataacttttctaagctattccaatttcattagatttactatttgatttccgtttttgtttaaacccaatcataaccaaccttactcaaagaaataattagtaagtttgaattatacttaaaacaaaaaattgatctaagcttaatgtactcaaatagcctcaatttagcaccgggagaggatgggatcccaaccccgatctagcattcacccatattttttataagtaatttatacggtaaatattcatgtttaattctctataaatttttaaatttaatttttaacgataataataatatttaattatattttataatttcgttattaatacatacattgaattttaaattattattatgataatgtaaaattaaattattttgataatgaaaaagttgaaaaggtatttaaagctaaaatcttctgtttggtttctcgtccggcgattcagccggtgagctcatacagagatgggtctccgccgattcctcgtgaaagcttcagaaatccgaaacagaaagagattgtggcccatttccactcgttctttctctaacatctcctcccaaatccaatcaactccgttcgtatttcttccttccttacattctttccttttcattgtttttctttttcccttgaatctgaactgttgttagggtttgatttatttgatagagcttcgttcggtattgccttcgacatagacggtgtcattctacgcggtgaaactcctattggaggctctcctcaagctcttaaacgattatacaacaactctggtctaaattttacttcaaaacaactctcttttcttatgattttccttagtaacttttgtaatcgtttctttctttcttctttgacaggtgctttgaaaattccttatatatttttgaccaatggtgagttgtttgactaaaccgagtaactgttgacttgaatcccaatgctggaaatgatttgattgtttgcttatatgttattatgtaatctggattggtgttactcttgttgaattttcttcaacaggaggtggttttagtgaatcaaagagagcccttgagctaagtaaactcttgggtgttcatatttcaccttcacaggtactcttaatttgataatgttggttgacccttttacttattatttttccaattttagatctttgttgactacttggccaatagtgatttctcaataatgagtgtatttttcaccattgaactccaaaggggtgaattatgtctcttctaattacattatcttactcacaggttgtacaaggtcattcacctttcaaacagttggtagataggtactttctattgactatgtgtagactttctttgaagttgcgttgttgaagagtttttttcaaggaagaaatgaaatgtttgtaggttgttagttttcagcttttgcattccttttactttcataatcaagtggaattttttttatgctactctgagttctctgaaaaatttgtagtacatggctccaatggatgctgcttatatagaatttacagaaacagttacatctggtccaatttaaatatgtgccattgagtgttgacacaggtctaattaaactttctgtaggacaaaagaatagtgagttaattcatgtaccattaatttgttagacatgatcaatatttgtttttaatcaatcaaagagtttattttatattttacagatttgaaaatgaactcgttgtcgctgtggggaaaggcgaacctgctacagtgatgtctgaatatggatacaagtaagtttttggctgcttatcctggcttacttgatttgtgcttcatgtcaatatttttcatcagtgtttttggtcttgtgagatgtcactcctgaatcctgattttcttgtattctgtaacagaaatgttctttcgattgatgactacgcatcattctttgagaacattgacccattgttaccatacaaaaaatggaacaccaagcagactgactatcaaaatagcaatttcaaggatactgccctaaaaaatgatgtgtgctcacagagagtccaggcagtttttattagttagtgactctgttgactggagtgaagcattcaggttggtgttgaatgtattattttctcgatcattcatcttttcgaccataaagaatcttatttgaaatcgtccaactcatacaccatgatgtaataacaataatattgagattacagcaaaaactg

SEQ ID NO: 218621 - DNA, 4214 bp, Cannabis indica
tcaaaaatagacatttcacacaccaaatctcaaatttgagttattaattataataacttagggccagcactatcgatatcatacgactccagattcattactattaatacactgacaatagcaatagttgtggtggtggcctcttcttctgtcgttctctcccgaacgacgtcgtttgctgataactcttgtaatttaaactgtggcaactcatctttcttggcatttttgtaaacgaggtagattatcatttgagcgattccaaatatgaatcctaagatgtttggtgactgttccaataaataattcaattaattaattaatttggtatatattgtgttaataaattaataatctgcttatttaataaattaaagaaattaccgcaataaataaatcgtttactaaaagaccgtagaagaaccacataacagcacataatgtcaaggagaatgataaagcaaaaggcatgtattccacactctttgttttaatcacaattctctgtaaaaaaaaaacagagaagtttgttattagaaatgataaattaattaatattgaattgaaatttcacataattaattaattagtaaattggtgataaattaccataatactaagaggagcagcaaaaacacaaacagaaaacactgcacaaatccacccaacagctgtgacacgatgagaacggtttgggattatgagggaagtagatactaagatcaatccataagctccaatgttgaacagaatcacaagcttaaatgtataaatctgaattttatataaatatatatgtaaagaagaagaagaagaaaaattaattagatgtctatatatgtagttttcttcatacattaattagaagaagaaaattaattaattaatgtattaagtaccctgattgctcttgaggcatatatgaggtagacaatgagataaatggtctctatggctgtaccaacagaattgatagtaatgatcatgaagccattggtcttgagaaaaccatagtatagggtcagcatagcactaaataatgctactgaatatggtatagattgaaacccctcggtggacttcttgctccaaattctgtagaacgttggcctatataataatatatataattagttgagtttaatcaagtatgatttgttacttaattatatatatatattataatgagagagtacttacagtggggctagatagacaacgaaggacactgcgttacctgttgaataaagaaaatgaaaatgaaaataataataataattagtggaattgttaaatgaataattaatacaagaattaaataattagggaagggaagtataccaagaatgccaaaaataacagccatgtgggaagcgttcatggctgtcattcttggcttcaaagcaatttaattgagagaaagagaagagttgttatttgtgatgagatgaaattattataagagagaagagtatatatatatatatatatgagttgaaaagggtatggagttttagatgagttgattcgggacgttttggccttaaaattgaacaaactgcgtgtatatgattaggatttattacatgagttcagccaaatgagctgggaaaggtccctttgcagctgcttacctttgcttgtatacatttcatggttctctactacttcccatgcatgaaatatccatgtatgtatatatgtatgtatctatctgcatatatcatgtattctatctacatatatacatggctcggctcggctcggctcggctactctacctacctacatatacagcttatagctgatccaaccgcctttattattaccttaaaaaccatatattgtattatattagggtaaatagccacataagtacgtacctaaagttttgagtttgtgagtggcataaatttaattatttttttatgtttgtaaaactgtaattttgctctattttcgttagtacaggctctgttttaaatttattaaaagaagatttggaagaaaccgatgctacatatttccatctagactaaataatttagaatctgagttttactatgtgccttgtttaagacaatagcagattctgcactgatgaagctgaaagaaaattacagttttataaacattaggtacttatacccgaaaaaaaaataattgagtttatgccgcttacaaattcaaaattttgattacttatgtcactatttatcttatatattaattaatattagtaaatcttttaagttttccttatttggagtacagtacatatcatgtttaatgagattttgagtttattataattaaattaattaagcagcttgaaatgtaaatgtgagagtggcttgaagccatttggtgacgtgaagcaaatgattaatataataaacaatattatattaaaaagagggtgtgagtcgtggaggccaagactttggtttacgtttaccaaagggagaggtgggagtggcacgtgacatatgatatgtcgtatatacctcatcactactatatagccgttacgttcaaacggttttctattttcttcttcttcttcttcttttcttcctttttaattacactactattttgtaccatcattattcaaaactgtacatattatccatttatatatgatatgtgtatatatatttagtagctgataattcctgattgttgttacaaaaagaaagaaaacagcaaccatcaaaagaaatcttaattttacacatgtatagctaggtatattttatattgaacaataatgtttgtcatttgatccatgacataactgtattgtttttcccttaaattattttcacacgatttctcacacatgcttcttttaatggtttaggtgtagttatagtactatactactactagtactagctagtacttttgtttttctccgtaaatacttgaaaatatatataaatataataataatttcgtttatatttattgattaacaattagggggatcttgatgatgattagatacgtacatttatcaactaagtactacaccaccaaatagataaaaaaaaaaagtaagttctagctacttgttatagatgatgaggcaaaatttataccctaagatattccatatttataatcatatattttaatagatataattaatgtaagagagttatatatctatataggataataaaatcacaggtctaattatgaactaattgcaagctatctactatatatagacttgtgcaaaataattaaaccactcggcacaggtaatctaatttaatctaatatagtctacttttggtatcatatggtaatacacctgaacaacccttttattttcttttaaaaaaaccttttattttcgcatataaatattatatttatatgtatataaatttgacaaaaagattatataaatattaagataaatttttatttcgattggtttttattttattttgtttgcatatatatttaatcagttacactctttctgacataaaaacctcatgcttgtggaacaaacaaaataagaaaagagaaaaggaaagcctgattttcgttctatctagctataaaaggtagagctttttctgttcgtttttttgttcgtatgcatatattaaaatatatataataaagatattattctaaatttatcttaaattagtaagaaatatatcgtacactcttggattattctttaatttcatttatttttgcttgaatgtacactctttagatcaacacttttagaaataattaataagcttatatgaatataatatcctcttttgacttaatcagtgtgaatgagtaatttagcgaatagtactctatggatttcataatcttatttaattcatttaatgaaatcatcataatcatattaagctagcatatatatatatatattgcttaaagcttataattatggctaattaaatagtttggtagtaacaatatataggaaatttagtggaatttagattgttaattcaacgaatttagttagaggggtcaatctttctctccatcaaaggttgttcaattaggaaatagtttgtatatacatctttttcaaatgaaatacgtgacttaatagagaggggaaaggaaatgaaaaattgtttatactatagtgtataaaatcttcttgaatatcgatattcttttttttttagtctatatatatatttatatgagtg

SEQ ID NO: 218622 - DNA, 2571 bp, Cannabis indica
aactcattgaaatctattttcccatctctatttgcatcacaagacttaatcattttgttgcagttatcaatctcagaaccttccttcaatcccaatatgcagagcactctcttcaattccatggcatcaatgaaaccatctttgttatgatcaaacacatcaaaagcttgtttaatttcctccaaactaggctcttcatcttcaaacaaccccgaaagctcatcagagccgaaagagttcttaagctcctcactctcggggctgcaaacaagtcccaaactctccatcaccgtctccaaatcttctctgtttaatttctcatcacccttttcggcgagagtgaggagcttaggctcatcatgatccaactcggagttgaagttttcttcaacccgagatttggagtttacaagacaagattttgactcaaaaagagacttcaatcttggcaaaaaatcagatataatttgttcccaatcagggattaacatcaagaaaaattgaacaagagcaaaaattggaaaatattgagtatttacatttgatgatgatgatattgttgttgttgtcttttccattgtaatagagttgtataagttagaaaccagtgttacctattttttagtgatcaaaatgtttcccaaaggacctgaaaaaaaaggtggtaaaacacaaaaatctatatgaaaatctaaaatattgtaattttattagtacagttggttgatgaacatgaaaggtgggaaatttgtgtatatataggctgtttttatgaggttattgaagtgttaaggaatcaaaaaaaatggtcagctttgaaagacttggtggtttgggaggaaaggtctaagaagagaaggaaatttcttgtgtatttcctcaaaagagaattagccccaaaatattattatatcaaatgaaaaaacaagtgtctctttcaagagaaaatatatattattttggggacacttttttttgtcttgtttgtttggatttgccacgagtatgccgtttcgatggtttgacaagttaatccattgaaattatttattattcttattttattaaaataatttatgctataaatatttaaatttaatttttaatagtaataataattaagttaatttttaaaatttctataaatacttacctttaattgtcaaataaatggcatatgattagttcaagtcattaaatttatatttttttatttaaaaattaatttaaatctatcaataaaaaaatacacgtgaataataacttgatacgtaattgtcaggtagttaagtaagtttcaaaaatataatctaaatattattacgtaaaaaaattaaatttatataagatatttatctacaattacaataaaaatttaagtatttacatcataaattactcttattattaatattttaaatagaaacttttgaagttggtttgaatatatatattgagagaataatagtgggcggccgaatagtagtaggggatcaatttccattgtagtttccatgaaagtgggattgtatttgtatggtgtttttggttgttatttctttaatatagtccattaaatgaagtgtatgaagagtgtgtgaatcatataattattattattatgagtaagtcaattatgtggttacctaatttccttgacaactaaattaaacctaacatgaaatgacaaggaagttgtaaatgaaagtcctgtggaatttggatttggttttctcttttcttctctattttattggatttgatatttttgtcttctgtttttttgttttcgttctacttacggaaaacacaacaacataagtgatcaaacgtatgagaagggcaaaatgatgggagggatatttcttttagttggggtaagaaacaactaacaacttagaattcaaaatacaaaagacatgctcgcatgtaaatacttaagtggaatttgggtctttcaaaatggagtctcgtgcaatggctcaagctccttaatatttggatcggtcctgtattgcaattatagaagcttagactaagtggaatgaatgaatttaaaagacctaatttgttttttaaaaatactttattttatattttatttagaaaaagacctaattattttcatattttaaatttttactactataaaatacatttaaaaaaaaaaaaaccaaaccaaaaaacttttggtgtaaatatatgttatgttttggtgtgataagacgttgtgctgaaggataatgtgagaaggtttttctaaagaaaaagaaaggaaatggtcataataaaaccacaaaaggatgaaaggtatttaagaagataatgacgcgtataataaattgtttgaattttatttttgttgtgttaaattttcttaaaattttacaaaacaaatttaaataactataatgtacacaatcataacagaataaaaaataaatccataaaggagtgtatcggtgcatccttttgacatttaggaattttcaaaaattaagctaaataggttcaacccccatttacaaatgtggaatttagattgtatatccattttactttatttatttt

SEQ ID NO: 218623 - DNA, 2640 bp, Cannabis indica
ggtctcttgtgtgtgcaacaaaatcctaatgataggcctaatatgtcttccgttgttctaatgttgagtggcgagaaaatgttacctcaacccaaaccaccagtctattttactaacacagatttgtgggaaggagctcattcctccgctcttaagcccccatcttgtaatacaagcataactgttgtcgaagggcgatgagaattcacacaacagatcggtggagtttcccacatgaattttgagaatttatagcatgacaatttctttttgtttggtttgaaattgcaatgatgattggaattattagtatatatgtagtatttgaatctatgtcaaaatttagtaatggttctcctacaatgtgctaattatgaggagaaaagtgaatgttgaaccttttcttgattataataagccattactagaattttgtttttgtcaatatttaactaatattgctttgaagtgttgcaatagtttataagtaatgtgtattacaatccaggttaaggcattttatgtacacataaaattccacaagaaatcttcgaattgatgcataaagctaccaatcaagtgtagatgatcatgacatattttaatcaatttaccattgatgtatttggttctgcactttctttagagatgaaataacttctggattaatgttacaaggactggctggaatgcagatttggcctatgaatttctctacaaagagaaattaaggaagcttatctttttgaccaattatgtgtgaatgtctaccacatgctccgaacaaataaaataaaaaataaatggcaaagcaaacaacactgccttggtgattttatgtgatgatgatgatgatattaaatttggtttaggaggtaagagctttctcttctggtttgttacacattaatatgttgtggtaattggttacaagtaactatatggtcttattcagtttgttctggtttgttacgcattcatatattgtgctaattggttacaagtaactagtgtcttattcagtttgccacatggataattgtcattggctcggtattgcagaatgtcaagaccattaatgttgtcattggccggtttactatataaggttctattttattctttaagtgagtcagttcattattgtaatacagagagagttaagcacttgagaaaagctttcctcctaaagtcttgtaactcgattgtgttcctaagagaactttctttgtaatatctttgcaatccatttgttggtgatcaataaagaaatgatgatgatgttttgttccccaaggagtagggaatcacactaggctcgaaccttgttattcctagtcaaagtgattttttcatgtaaatcgatccactcttgttctacaatttcagggcagactctttatcagcaacttctctaaggacttcatctcctaaactcaaaacaatagcactatgtgctttcacctcgatctcttgaaaaaccttcttcacatcttccttagaactagtcaccatgatcgcatccgcaaatccttgatgcacaaggagtgtcttcatcttaatcctccatagcccacattcagacctgtaaacttgtttacttttatctggttatagccattcttgatgagttcttgaaactctaaaacttgattcttgaaatctcgatctaactgtgaatggctgaatcaaacaatgacataaactagaaataaatgtggaatcaactaaatgaaatagagacaaagtttaacaaggttcatcaccctttttgtggtgactaatccacgggaggaactgccctttggccaagcttattcaatcttcaacaataaagaaatacataggagaatacaaagtttaatctcattaacaagtgtgtcttgcaccttacaaatcaactcacttgagagagatgtgatcaaacacacacacattttctttaacaatcctcatcactcattacaaatgtaataatcatctaaattcctctttagatcgtcagctaaagaagtactcaaagccttatatatgcaactcaataagaggggtacccaagttactaataaactgaaataattaacttgtgggctgactgtacagacttgcaacatctaacaggtcatcagatgagactgacaatagtagcagaacccaagttactaaaatctcccacaaatatatatgttgaaaaatgcatgttgataaccctatggtatagagttatttttagtgcttttaaactgaaactatcatgataagagtaatgaaagtgtgtttgttgcttaacttcatctagtttttatctttattttctatttagtaagctagcttttaagtcttgtaaaaattgttattttagttgtgtttatttagttaaatgttacttgtttgctgttgagaaaggaaaattaaattgttagggaaaagaaaaggatgcaaggacaaagtgggcataaaagctgaaactgggccaaattgttaaaacaacgaattcaacattctgggcaatgacgtggaaaaaagttgcagaacaaatttcattcgtctacatcagcacacacgtatcagccactcaaagttacgatagttgactgttgtggagggaggagacaaaacctagtgggccaagattggaaa

SEQ ID NO: 218624 - DNA, 2709 bp, Cannabis indica
tccctgaaaatcaaataatgaaagagttacattttttctagtaggtatagaaagaaccagcagtaatcttgagtaagaatatttattatctgtaacaataataagaaaaaaatcttccagcaaaataaaaactgtaacaagcaaattggacattactttttctgccatcttggaaaacttgtagatgttgtaaactagaactgaagaaaattaatacagcagcctcttatatgtgaaaacaatttttttggaatttatacatagacaagagccaatttagtagaggtgtagttcatgtaacaattagttcaacaacggtggtaaaaaattgctgtgataaattataatgtaaaaagtgctgtgattaaaaattagatgtggtaatatttggtatactctataatcaaaactttgtgcaaatataaaattacttaaataaaccacattgaaattgaagtactctccaaaaaaacaaaccaccataaagtatcttataattaagatttaataaatatataattacatttatattttatacatccagttaataatcttgaaagtgagacaatagatttattaataagtaaaaattggtagtgggtcatgctagctttagatgagtaaattctttaataagttgattaccaaacagcattaatccaaaaaaatcatataaattaaggagtatatccctctcccttagtgtcttatgaaataaagtttggtcatccaggtcaatgatccgaggcaagtaagcgaaaaagacaggcttaacttataggttttctaaaaactttaccaaactatgcctaggtatcccctctgtcattaaaatcaagccaagaaaaagtgtttactttctagacaaattacagttcagattcaacatgactacagtaaacaatataacaaagatattataacacaccagtcttttatcttgtaagctctttccaggtgctctttcttaacacgagtcaaaacttctcctatgtgttctgaagcatcttccaagtttgtgacacggacctgacaataaagtatcagcataatctctcgtgatcagtatgtattacatgacaaacatacagcaataaaatctacgaaaggtttatgtatatccccaaaaaaaaagtactaagaaaaacaaaaacagcaacttaccactcccttcaacacaatatctgtttcagtgtcatggttgttttgataaacaactccgggacagtcaattaagaaaatcctctttgtaagtgtgatatattgccatactttagtttccccagggataggagcaaccttgcaaacctgtggtaaaatagaacataaataagctaaccaattaagaaacaaactacataaatcgcaatcccatgactatcgaaaatcagatgaaaaggatatataaagaaaaaaaaaagtataaagaggcaaccgagcacaattctttgaagtacagtcaaagcgttacgaacatattatttacaaggttgaatatgtgcatcaaaacatccgaactcaatgtcaacactacttaacatctctcaaacaaaatatcatgcatgatttattaacatcaaaagtaaagcctaaaatctgtaattagaaaaagcatggacagacaccttaacaccttaaaagatgaatttccttaattgcatggaaccgatacctcgtttgatagccaaaataaccatgaaatatttttcacaaccacaataaatgttttcattttatttttaaaaataagaagtaataaatgttattatgcaaagaacacaagcacaatatattgtccaacacaattagttcttttaggacactatttgacattcaaagtaggattgaaccagaagcatcaaaagagatcaagattattacagtttttgttcgcaatgtgttgataactgatgacttcccaacattgggatatcccacaaatccaacagaaattgcttgcttgtcactcttcaatcgagcaaattgtctcaaaactgagagaagagaacccttcaaaaacaaaattaaaactaaaattaggtgacgataatataaactgataaaatcaagccacagttaacatagtaaattgcatttaatgaaattattaatatatagatatactatagctaccttgccaaatgacttgttgacgctagcatggaaagcaagagttggatattccttggatagtaccctcaaccatccttttgttgcccatgcaggaatcaagtcacactgaggagaccaactattaatattttaagaagttacaggggaatttaataataaaaaaaaggagcacaagatgagatacagaccttgtttaacaaaagaatcatgtttttgtgtttgcaatgctctttcaaatgcctttctaagtggcgacatcttgttccttgtgggtccctcgcatccaaaacctgcaaaataaaagttgagaaggaaatttagagtaagaatgaaggataaaaaattcattcaatagtgtattagcaaatatttaagatgatcatatatggtaggacagcagaaaactatctaatatagcacactaagatatagtgatttaccgataatgcttctacatcactaataagtaggaactgtgactaaactaactggcaatgcttctacatcactatttgaattaaaatcaattaaaattatcaatctagagtgaagtacacacctggacaacaacatccg

SEQ ID NO: 218625 - DNA, 4846 bp, Cannabis indica
acggaattctacatagaaactcacattgcaactagcgctgtaacctaaatcgcaacaaaaaatcgtataaaaactcttattgcaactaacgctttaactagtttagacactcaaactgcacgtaaatttgaaaaaaatattaaaaaaataatatataaagtaattctccaataaataaataagcatatatatgccctactacatattcaactcttgaaaaccttggccgtgtctgacttgtattatttatataattatattaatattaagaaaaatccacacatatcaattaagttaaccaaatagagaacttaatttctacagtcactcctgaataaaaaaaaaaacaattttgatcaatttattatttctgctcattcttaattaattttgtggagttgcatgagatgaaaacatttatgagtataattagatcagaacttctttgaaattcttttttgtttttgtttttgtattatataaaaaggagataaatatatatatttatatatatatatgtatagctaattaacaatcaaaataaaataagtgtagtacctctttcagagctacaaaatgcagaaaaaaacaaaataattatcggaggaagaagagctgcaaggaatctccaccgtccaacatccatttgtaattagatataataagataataattaagagttattaataatttgagtagttggataatgaagcttggtagctttgtcagcttattatatatacaaatgaattcagataagtagaaagggagagagagaggtgaatttgacgatctcaacggcgataactttgaggggcacaaagatttcttcttgctttcattgtttgttgatatatatctccaaacgattaaagaccacaaagttaatcacgtacataacaaagtcctcaaagatccaagaaaataaaaaatgcatgcataatatttaattatttatacaggaaaatatattattaatatgtatatataccaacatggacaacaatatagtccctatatatatttgttcgcctggctaattgatatccacaaaaatagaataagatctaattttatggtgtgagaaaagagagctaggtacgtaattaatattttgctacccattttttattattatttattattaggctatttgaaaggcagtttgttttgctaatataacgtgaccaaatttgataaattggcccagttaagttaggtgcaacataacttctcctcgattatcttgtttttgcttcattttcattactttctggtcactggtgaattggactcaccactaaactaagtaatcaattaattagaaaaaaaaaaattaaattgggaagctcgtaaattatattatgagtaatggtatgtaatataaaatatgcaccaatacaatacacatagtgatatggtagaatttttcagccacatctaattataataagatccacattttacaaaagcactaaacacattactatttggtgtagtattattttaaatgaatgtatcactaataataaattagataatataaagatgtttaaagtccaaagtgtgagtagtgtgtataattatgagtttatgacacacaaaaaaatgtttagtaatttatagttgattctaatgatttgtgttagaattataagatgcattatataattaaaggataaaaataattaaagggtattaaataattttatcctaataaaagcatgagaactgataaaataatgtggcacacaaaagaagaaatgtaccatttcactaaaaaaaagaagaaaaaagctgaagagcgaagctgagttcgtaatagcttgaggaaatgagctcaataagcaaagcagagaagaaagtgtacgagagaataggacaacagagccatgtggagtaattcgagaagagaatattaaagactaggcagcaccaaccccaaaattcaaacaaagcacgaatttttaacgacactattccagtcgaaacattgccgaattgcatctccaagaatacactcactacaagaaatgccacttttgccagtgcagttcgctacagtactggtaaaagtaacttttaccaacacatttcacaaactacgctgaacaaaaggtaaaagttttaccagcgcacatttatagtggcaaaattctaacttttactagggcatttacgtgctggaaaaagtcattttcgcgagcactttttattttgtgccggaaaaaattctactaccaacattaatttgccaatacatcaaaagtagatttaattttgccagcacaatactaaatttttgccaacgcaaaaatgtactaacaaaagtgacatttcttgtagtgacttcactcaaatctgagttcgctgacctaagagaagagtcaccactgatttagaagaaattgtgtaatatagcaaagctgtaatctttgattgagatgatcctattgtaaagaatttgaagtgcaatcaaaaatttattgctgagctgattttcaacatgaacaactggcatcgtctgtgggaatcagaagaacaaaaagttgaagagtcggctacagtctaggataggatccaaaaaagcgtcgaataatgtgcagaaaagtgtggttacaaatgaaagagactcatcaaattggatcattgatatatccaaccactactttgttgcaagcaaaagagatgcgagaaataaaccgaagaacgatttcactagataagtataataaggaactacgacgtctctcccaaaagagaaattcttgtaagaacaacgtatcactgaggagaggcatcaacatgatcaagataaaactcaacaacattcatcaagacgttatgtagtgttaaaaaattttcaagcaataaatggtagatatgtgtgcaaaaatgaacaaaacataggcactgcacgacactagatagacgagcaatggaaatctattaagtaatgatgagagactttaggagcaattgcaacaactaagaacctctcgaaacatagtgaaagaattaaaaaatgaaccagaagtgataacaattaataaagattttcttaaagagataagatcaaatattgtaaagaaaggagggtttgcttccttgtcaatttctaaaaaacacagatggaacaaaacaagcacctcagaagcacgttcgacaaatatgtaacgacaaacaaaaagaagcgagaccatgttatgagagaagtcatggcaaaaattggagaagaaagagtcatggagctagatgattcaaacagagtggtcgtgagaaatgtagcaagatctccatttgccaaatagatcattgaagagtcaaaacttaaagacttcacaaaactaaccttcacattgttcgatggagaaggcaatctattagaacatgtgcttaaatttggacagaggatggtatttgagacaaataacactgcgatcagatacaaaaccttctccactaccctagcaggatcgactttgctattattcaagcagttgaaggaagggtcaattaactcattaaatgagcttgcacaatacttttccacacaatatgagagaaatgtaaaagtagagaagaacataaagacctctatcatattaagtcgaaagagggagagcatccccaaaaattctagtaaaagttcttcaacatattgtatcaagtgagtgaagtgagctggaaggatgcagttaggtatttcgccaagaatcggcttaaagaatcattattgagtgagtagctcatactgaaataactaaaaataatggtagagataatagtcagggctgagggactctttgagctgatgtgacaaattgaagaaagtacatgagggaataggagaatagagccacgtggaccaatctgaggagtgaatagagactgtgcatgtaacgcctttaaataattatgcacgctacccaatttacttaagaaaccataatcccctaaatgggattactaacaaaattagcccgaaaattaaaatttattaataaacggaatgaaaataacttgtaatagtttaaactttataatttaaaagttacaaaagttgggataccaaaaatatttacaaaatactattacaagtccttttccttcgaccgacctagccggcaaaacagagtctcaaaatgcatcactggtacatcccaacccgcttggtctagtttggctcggacatgtacattcttcatccagctcctacactcatggctgatcagaaatagctttaccctttcctgcacagtagagcacccgtgagccaagcccagcaagacagtataaaataatgataaacatatttatcacactatataatcagtaatgccattcacatatgtctgtatgacacagacctgcatgttacgctcacatgcctatttatgtctacgtagcgtagacctacgtgttgcgctcacacgtctaattacaataaggccttagaacggttcctctcggttctaattaccgagtccaacctggttatgccttgaacacataaccctaaatcttacatattcatacatatatcatggcatagcattcatacaacatatatcactagggtaataaccctaggcaattaaaccgctcatgttagggtaataaccctaatcacagttattgattactcacatatatcatttccaatataagcgccaccgcgcataactcaacgtgctaactactatcttacctgacgtcccgcaatagtagagattccaaatccatgggtgctcctgaccaggtgccagtaatcctagtcacaatatcgggattttacacaataagggttaacccctaatttaacattcataaaatattcacatgg

SEQ ID NO: 218626 - DNA, 6462 bp, Cannabis indica
aataataataataataagtagttgttgtgtgtacgtttcttgctttcactttcttcccttctttgatttttttgccttgttgttcgtataaagggtagaaaaaaaaataggcttaacaaaagtggtttggagtgtgttgttcgagactcttttttatctctctatctatatctataactataaatatatgagtattagtatgcctgtcaatctcaacataatgaggccaaataaatgttgagaaagaaagaagtggaatttatttttgtgttcgtacaaacaaacttcacaattaacaatattttttctttttaatttcatttttttttggtgttttattaaggccccccttaactcacttttttacttgcttaccccaaaagcttagattagctagatttgcgcaagcaatctctgtctttttttcttttccatatataccctttattaagctttacaataccaattatacccctctcttaaaaagtttgtttaaaaccaaagaatgacataacataaccctttttagtctaatcaaacacacttttttttttataaatggaaattgttttctatttttttttctctcttttcttttttgttgtgccctgactataaaacctgaccaaacaagcaccgtagccgaggccccaaaaaacaacaactttgttatatatcgagatgaccaccaaaaccctatacacaacagttgttcaatgcctaaataaacattcttttatggattctagggtagtgtttctcatggtttaaagagctttataatattattattattattattattattattaaccccaaaacaaatccaaaatatcctcttggttcaagaagaaaaaaaaaaggattttgaggttgacccattttgccctttggccataaaattccactgctgagctaaaagagaattctccactctctcccccacctttgtggggcttgagtggtccacttttcactttcgaatacacaagggtattttagtcattttcattgcagatggataaaagttccccgggttttacgtatcatgatagcagaaagtttcttaggtatgaattttttttcaacaggggtataaatgtccaaatggcaaaaactcacaagtgggacacgtgtacggccaagaaagtaggatgcaaaatttgggaaagtgagcaaaggtgtaggtgatttgaaactctctcactctctaacaaaaatccagtttcgaatagagaacagcatgagacagaatagtcattgaaggaaaaagttttaagagagagcagaaaaatgcaatgaaaaagttgggtagctcttaaaccaagatgagataaataatcaaacgatccagattcaaagttgggattttattatcatcattatttactgatcaaaagaatgaaaaggggtctgaattttgagatattgtaagagatctctctaatgagttattatgtccatagtacaactataatacacaaagcaaaaaaaaaaaaacttgaaaggtttctgatttatggcaaaaaagaaaagttttatgaatgaaaggctgtgaacactaaattggaaatgtttcagttctgatcacacatacacaaacaaggattataaagttggtaacttgttatgatgatttggatacccaaatgattatatatatatataaataataaaaaaaattactactttttttttgttatttgttaacatatagaaagagtgttaatattgaaaaaagaatgagagagtgtatgtaccttgtaattttgcagaggaaagaagatgataaccaaaaaaagagcccaaagtagaagtagtgacttttacaaactacattttctgaagaacaagttttatgtattattttgtgtctctcttgaggaaaaaaataataaggtttagaagagaaaaagaaaggagtctctcaaggctaaagagtgtagaataaaatagttgagcaaattatatataaagtgttattagcccgacaactatgtaaaatataataaattaataatttatttaatttttttttttttttgcttttgtttgcaattttggaaagaaaaagtagaaaagagggtgttctagctagcttctcttttcacagtcacaaatccagacttctgagaaaagctcattataaaagctttttcaaattttttttttttgggtccaaagataattaaatcataaagtgaaagtaaattgtgtatatatatattttttttttaatgacaaggaaggtgacatactgtggccctatctgattttcttttctctagatagttttaaccaaaatcttgattgaataaaaaaccaacagacccttttatttgcataaattaccagaattgccacttggttcagataagaagttcagatggtaatcctgtgttaagctgcagtgaagttttgatcagtgtcatgctttagtctatttgatcacaaatctcaatcctaatctcacatagtgctgtaaaataggggtccaattttttaatatatagcacaaaaccatctgaaaagaatgagcataactagccacgaaaaatataaatttgggcacgacacggcatacaggctaaggcaaattaagtgcccactcattttaggggcttaaataaaaaaaatatcttttaaaaaatatatatatttttttaataatttttaaaaatactatttatctttatagtaaggatctaataatattttcttacctatagcatatttcaactcaggatcggccatgacggcacaatattagaaattgacacaacacgatactaaaaatatatttttaagcacgacaaaacacgaaaggcacgacacataacacaaatcaactagcccaaaaagcatgacaagtgacaaatttaaaaaacacgacacgacatattagaaaactctaaaatttattataaataataatatatatttatttatcaattataaataagttaaaataataataaaaattaaatataatactaaatattttaattgtataattaaaactattaaaatgtgttctctaaaattatatatcaatttatttatagagtgtgatataaaaatttgagtatttataagtaaatattaaaattttaataatactaatattttttttatataattatctgtaaaatattgttgagaagttataaaagatacataaaatttagttgttatgcccatatttcgagcaacaatatgatcacgacacgtgttaaaaaaggtggataataacccgttcgtagttgaaagaatgtagaatgttggttaactcgctttagagaatgctggttaaagacatgtttatgtctttcctcaattaattaaagacgaataaaaatgccaactttcattagacaaaccagtgagattaaacaactgacagaagatgtatatctcaggagatacacaatacagaataatcaagacaaaatgatatgtgagttaaatgaaatagtatgaaggttcccatgctaaggagtacaaaagatacaatcttaaaagcttataacttatacaagaagtttcctagcttcaacatggggatacataaatgaattatacataaatggataaatgaattaacgatccaacaattgtctcgcataagtcgtctcgtcaccataatgcgcgaggcaaacaacaagtatatcctctcgacaaaataattattatagataaggatagaaaagggttaccagcagttaattcatttatcccatatgttgtaattgtaaatataaaacgtggggataattcacgctttatgaacaatttttttagacaaggccaaaggagataactgtcagatgagaaatcatattaataagggcaaaacttacagtgcatgggcggccaaattgattaagggatcaccctataagaaattcaccatttattgcttacattccttaaattttgtactctgtaacacaaaaacacttagaaataataataaatatttgtggactacgtagatttaactacaaaactacgtaaatatcttgtgtcagccttattattatttattaatactttaatatttttctcaaatttattattttaattcacaaaaatgtctcatttattgttaacaaaattctgagttaataatttagcgcttttattgagagccatttttctaaaataaaacttttagaaaaacgcatctcccaagaaaaatataattttttccttaatggaaaacactcagcaagatgagaatgccaagcaagaaaagacaatgcattgtctagggaaataacctaaaggaactcatacccatgaaagaccaaactaaggaagggagcctactttgagaaattttgaaagggattttaatgaggaagagattctagagagaaggaatttagatgcttatggccccacaaggtacgtcccaattgtggagttaaaaaattgccaactttggtgaagactcgctgagtcgaactaaagaaatgaggaattagaacgagtggttgctgccacaagaacaattccaaacgatgcaccacctgttcaagaggaacagccttttagacgatcatgaggaagacccgtgggtcgcgagcaagaagggcacaaggacccaatatcacagaacatgaaccaaacaacccttctcgcccttaggagcaacaacgagaggagatgagggaggttcatgttgatagagaaggtttgcaaaatcaaagtgccaccacttctaaggaaacgcgaccacacggccagcagtcatctcatggaaatcatgaaaaatgtaaacgagcaaccacctaaccgattttctcgtcctccacgtccacctcgtggacccagaaggaatgaaagggatggtatgtatacctatctaagcagggacggagttataaatgtatgtgaaagacgaagaccaacttgtgatgaacctcgagggtctcaatcaaacacggccaaaagtgggtcgagagggagctaagggcaaagttaatcatgtagatcatgcacatgggaaaatccaccgcgaggagagagaactcatcgtcatgaatatcgcaaagaatgagaaagcgttagcaacttgcaaatttatcaatcagaaagtgtttcgccaagtctatcggtgagcaattacgatgaaaggcaagagcgatgccaggatgtgcacaaacttggccttcgacagtaattgaatcaaagatgtcctgactcgttaccaacttattctggaataggcactgttaaaggagatcaattaacgatgagacaatgttgtagtgtaaagctaaaagaaagagcaacgactcgtcagataatggtataataactaaggaagtcaatgaaagagaaattgaagatttggacccaaggattattgatgaacaatcacaacttgggcccgtggaagagttggaaaaggtgatactagatcccaacgatctatcaagatagtgaaaattggtaaagggttgggggaagaattgaagtagcaattaatttgctttttaaaggcagactaagatcaattttcctagagccattcaaatatgattgggattaacctaagtgtcatttttcatcatcttaacatggattctcattatccaccaaggcaacaaaagagacgtcttctagactcagaaagaccaaatcctttaaaagaagaggttagcaagttgttgactaataacttcattgagcttgggtttcaaacctagtcttggtctcaaaaacaaacggcacatggagaacttgtatagtcttctctgacctaaataagcgtgcctaaaatattgtttccctttgcacgagattgatcagcttgtcaacgtcacaggctggcacaaactcatattattcatggacgcatattctaggtataaccagataagaatgcacatcgatgattaagaacatataagctttataactaacatggggctttattgatataaaatcatgccatttggattaaaaacacgggagcaacttaccaatgtctcgtaaatggaatgttcgaacatcagattggccaaaatatagaagtttatgtggacaatatgttggtaaaatacatgagagaaaagatcgtgtagttgatcttgcaaagtgtttctcagttctgagaaaatataaaatgaagttgaatctaaaaaaatgttcattcgaggtgtcttctggaaaattcttaggtttcatagtgaatgtgagagaaattgaagcaaaacttaagaagataaaagctctactcaaaatgcctttcctaaagaaactgaaagaagtccaatcattaaccaaaaaaatggtttcattaaataggttcatctcgaaatcaatagataagtccttaccattttttaacgtgttttaagacaataaaatgtttgaatggacaagagaatgcattgaggcattatatatagagcattaagagacacttattaataaaactcatttcaatat

SEQ ID NO: 218627 - DNA, 8617 bp, Cannabis indica
aaaaaaaagttaattaattaattttaaaataatttatttatttttaattaagattatgatttagaccaataaaatatcaataagtaatatttttgggaactacattagaacggttaaatttgtgagaatttttaaaattaagaacttatctacattaaagtgaactttgtagagatatatacatcaatttaatattaacacatgatatttttaaacaaatctattaaaataaagaccaacaaacttataaaaattttaaatttaaagactattatggttatttttcaaaattaaaaacttatatacgtcaaaataattttgttaagacttttgcccttgctaaaataagcttcctataagtttccaaataccaaaatttaacaatacaaaattgactttgcatatatatatatatgtcccacttgaactgagtgttcagtgttcacatggcttcgttttttattaaatatccagacaccgtacatgttcttctctttatatatgttaaaactaataactttatatatatataaaatattaaatatacggtgcgttctgtatattaatataatgttgcaatttaacgtttttttttctgttgaagattacaagaaatattattaatttaaataatatattttttaaataagtttaattaatattaatttgttctaatctaagctagaataatatttataattcataaaagagtttttcattagcttatatttattatagttatccaacactaaagaaaacaaacaaaaacaatatactttctataaatatataccttttatttttaaagctaacgaacagctatttaaagcttacccaattttgtcaaaaagaaaagcttaccaaacgaacgggtatagttcgatagcaactcgtgctgaagcttcttcatagctcatataattgtgatgataagataagatattaacatcaaaaaagtccaagagaagatattacagctccgaattgagaacaaaaaccaaataccaccacaaaaacgtttagttgtcgtcttatgaatgaattattgtttatatcttatatggtgtgatactgtgatgtaacaatttggaccacttacaatctttataatgcaccacttctttccacttacattttaaaatatatgttacttttaataatagtgcttttctctgctaattcattatcacttcttatatatatatatgctatatatacgatattcaagaaaaaaaaatcactattagaaaaataaccaggttacaaaagtttatattgtatgtatatgcaattgatctagactaaattatcggcattttgcagctggctggatggcttagctcccaccactattttttcctttgcttcttttctaaactgtggtgaaacattctttgatgggtactactttctgtctctctagtgtgtcactgtccatcttagtcaccgttttttctctttcactacaaaagtgatcaccactactctctacttgatcaatcatatacacgattgatagaatcgatcgaatgaaattgagataataatattacaaaaaaataattaatgaaatgatatatctaatcttaataattaacatttaatcatatatgtactcaaaagttctctttgtgaaactcaaacttggtcgaggtcttgtgggagaagtcggaagccagttgtttgagttctttggtcagtgccggtgccccacagtaaaacacgcctgcatttacattaatatgaccattaattgctatgaaattaagataaaccttaagaacaaaaactataaacaaatatatttataattattaacggtactttctaaaggttagtttcttaccaactcgagaattagggtgttgaagagcaatcctcttgtacacttggcgccagtttggcttggcaaaatgcgatttgacacgagtgcctgagacaacatccacaccactcttggcatggtgaagagactgaagcatggcaatgagagctgatctcgcatctccttcttcgtatacactggtgcagtagttgtggagctcaatgaggcctctctcgtccatctcagccacctcattaagtatccctttgaaccactcgaacgatccctgttcccttgtcacccagtagtaataagctttctgggtcctgaacactgacgaagacgagggattattcgatctattctcctcggccttcatgttgtttatgatgtctttgacaatgctcaccatgggagtggctcctatcccaagtccaacaagcaataccacgtcgtatttcttgtagtcctgtgctggagctccgaatgcaccgtcgatcaaaatcttggggaagctcgggttattgtttcccccaacttgaatgtctgctctcaatagaccgctctttccacccgttggaggctgacaaatctgttaaaataacatcaaataatgatattaaaaatgatatacatgaatacgcatgatatgctttcagagattatatataggctaagttggctgacctctgaaaagacagttttgagttgccgagtccaatcgccgagtgttcgaatgtgaacgctcaagtagtcatctccaggcgctgatgtgatagaaaatgggtgcctgcatatacgcaaacatatattcatgatgaattagtctatccatattgaatcttatacaatgcaagaaaagggtaagttagattagtattttttaatgatgcataccattcgaagggggatacagcagcacagttaacaaacatgtactgaccactcttgtatttgaaaccctgtggctttgtcatgtgaattgccaacacatttccaggatatacagccactttcagaatcttaacagctttgatgcttgatctaagtgctctgatcaacctttcacaagcgtaaaggcacactggtactgccaaatacatccatgtctgccatatataatcaaacagttgtaattcattagaacattactcgttttatagaatcatcaatatatagctaaaattgaattaattagttacttaccgttttttgataccatgtctttgtgagatagagataaattccatggacaataaggagagtgtagacaatgacaaaaaggtgatgggagtaccaaaaggcattgaaaccagtcagtctctttaagaacttgggcaggttgagcttgttccgcctgaaccatggggtggccagagtgaaagcaatggccatcaacacaaccattataattccagtcacaccttcgactcctttaacaaaccaccaatagctttcaggctgttcttcaccaaagtaaggttctatgagctcgtacttgtcctctgaggcgtcgagaattcgaggaaagtcacatgtcaagtgagcccctgcatgaagccccacgccaacaacgattgccgcagcaatcaccttgtggaaattgagattgtcatcaaaaggaacaacgacacctaacttggtcttgttcctgagccaggtgatggtgtttcggcagacaggtagtaagatgagtgccatgttgaacttgagtgtctcggcgcctcctttagcaatgcaaacacaatatcccatgacttcgaaagcagcctcgttgttcttgtactgaataaacttataggtgaaaagacccgaaactattccaagccacaacatcataacccacaccctttgccaattgtccattaaggagtacctggtcctctcccaccaacgagtcaaggcattgctctcctgagtcggttttagtttctggctaagcatctggcttaaaatcctgctgtcggtcaccctgaccgattggtttggagcttgaagtaacaacatttccaaattatgaaccatgatgtaaccagcgttttcagggtctagttcttccatgatcattgctgcatactcttctgattgtttctgaatgttagatagtttgtttgccgaagcgctgagactgataatctgtaaacacaaaaaatcgaaacagagtaattaaattaatgtttacgagaccaggacatatgacattgataatgaccatgtataatagttaattagttaaaataaataaaataaatcattttacctctctgacttcttcctctgtgattcgcccatcagcatctctgtcaaccctgcataataattaataattttcagtataaattgtgcgcatttaatttattatgttatgatagcattaattgtgtgtaatacttattaatacatatatatatatatatatatatatataaattgtgaagcgcgtacatgtcgaagaaagtctggagtctggagtcaaagctttcatcggcgacttgttcccagaactcttggagctgtgccttgttgatgtactcaccacttatgttgcgcctccgagccagtgcccggaaaagctcccctgcaaattcttttgattctttgttcattcctgtaacgtaatcacatacgtaatgtcaaagtcattattattattattattattattattattattattttaaattctattcaacttttatcattccctaacatttaccataataaaaaaaagttatggatatggtttgggagcaaacaagaggtaggactaggtagtacctatgcattcgccgaagagagaagagtgaagaaggccatcggaattggcagtgagctggtcgaatcgtttttcaacggcagaccaggcggcagaggcggtggcgccacctgtcttggcggcaataaacttgaggcccttcaaggcgtgtgcggctgcggacttgttgcggttgaagcgcctactagcagtggtggaagaagatctctttgagtttgaggccaatcgcttgagttcctgggaaacgtgagtgatgacacgagatgaagctgtacggaaacgagatgagccgaaggaagaggatttagaaggcttgttgatgtcgtgaagagtcttcttggtgagcagagcaagctcagggtcctcgttccctgtcgtggttgcttggacgctatgaacggccactgtgtcgtcgtggatgtccagagtgacctcaacgtaggcgtcgtcgtcgtcgtcgttgtttttactgttgtgattgtttttactcatttcgagaggaccactgaaaccagctcctctgctcatgaaggaagtttcatcatcgtcggcggatgatactgccagttcttgatgatctttcgatgatgatgagtaagaggccttagtcatctcacgatctcctcctcctctcctcttatcactgttacttctcctctatttttttttctagatctctatgctatctcctttggccagccagattccagatttgtatttcttgagttaatgtcaatagtcaaaaatgagagagagatttcgtttttttcaaagaaaagtggggaaagtgggtgggataatgataattggagcgagtggaaatcttgtgttttagaaaatggaaatatagatatatagatatgaggaagtttgtgctgtttatgtatatatatatacataaatatataatagaatattataatggtggtattgataataaaagtcaaagtcagcagtgatgtcgtacttcttaggtatggtaaggcaaggcaattgttgcaacacagcgaaatcaaacgaaacgcaacgcaacgctaaaatgagaaagttgtaggaaattgggttgggggaggaagggtggtcaaaccgtatccgatgaccaaaagaatttttaataaatggagttatttatatggacaaatttatttcaaaccatttagctacagcagccaaccttatgcttcttttccttcttctaacttcttgttcttactcacctcaccacccaccaataccttttctgagtcaactacaactattattattttatcacgtatttctttttctttttccttttccttttatttttattgtctttgttttggttttctctgctccatttcagccgtgtagttagatatatgattgaacatgttatttgtttttttttttggttctttgggtgtttacaattaatcaaactcaaaacgtttaaattgaaagatgtttttcacgtgtgtgaatactgatcaataattgttatatataacatatatatttaatacatgcatgggtttccaattgcgtacatacgaaccgataatttcataattaatatataattatatatcatccagcttggcccttttctgaaattatattatcgttaccgatcgaatattaatcggaatgtaatgcatgttgacatatatatagatataaaactttttgtatgtgtatcttcttacttctaataaataaaacaataggttacactattattatttattattagttaacaagagcaatatagcctgggagaagaggcctttacgtcatttacaataaatcacgagcattgctattaggtactagtgatgactagtaccttctcgatatgtcgtgttgcgattcactaacgatattccttaaaatctattatattaaattatatgggacccgatacttaattggaccaataacaatattgacacatagaaaggtattagacaccactggtattctttagcatttctcatcaatcacatgtatgaatattatttatttattttgtataaactatgtatcctcggttgttaaaagaaagaaaagtaggtttgacgacttggcaaagacaattaacctaatttattggatttatttttgtttataaaaagtaattagaataataaagaggggaaggactcggtgggcttttgggcccaaataaaagagagtgggttgacggagaccatggagttggaacagggctcctcctgtatacttgggttccttcttgaaaatcaagcctaccggcatttgttgttgttgttgtttaataagttgtaaagaacgcgttttcacataattttcacataaattgcaccacagtcaaataattcgactatccgactaagtcttcctttcctgaaaaatataatatggtttgttattatgacatcattacattagtcttcttctttgacattaacacgattgtcttttattaatttcttgcacttttttgacaaaaccacaaaaaccattatatcttgttcgccacttaaagacacacacacacttaaaactagtgtgtatccactattcagtttgagaatttctacttttatcatctcaatttctttcgaaccctacttccttttacacacacacaccactcaccactactcaacactatccttaatcatatatcattatgactccgttgttattatattattatctattccccatacgtatacacttattatatatgaaagacaaattaatgtgaacgataaagctgcacctttatctctccaccgccgctcatacaacaagccatttcatatacattatattatacgtatgcttttacacgaatgatgacattttctttccttaaaatatcattttagtagattgcaaaatcaaattgtcatcattttaaaatgcatatatgagtttctaggttactttaataagaacacgtgttcgtaagtatatgtgaattagaagataaatcatttagatgtgttatcagatggtttttaaaccttacagtctcgtataaaaaagacacatgaccttcaagcgtaaggatcaggagtaagaatcacttattgggggacaaatcccaatatgtagaaataagtagaaatatatcctcgccttaacatacaagaaggtaagcaaccgaaacacaatctagttattcaccatgaatcgtacaataatagcaaaatatataaaagcggaaaataaagagaaataaacacaatggcgacatatattataaagtatgcaaagacaaaatattatccccctgacctatataataattttaactattaacaaatgatatttttaatatggaattataagtatagtttattaaacactaaatagtaatgacgagtgatttttattcggatcacatatgtgttagatttatgtcctgaaaaatatgtaaaagatattttaattttaaatataaggtaggaaattcagtattccaataatgcccctacaccagcaccacaaagtgcaaaaaactaaggtcaaacttacctttcccccttgtgcggatcacaaggtatttccctcaaaatcctatcccctttgtggcagtataaagcttttcttttctctaaccctagtagccccttctctttacttctcctttgaaaaaacctagcagccacttctttcttccctaagagaagcttcagccgaaccctagcagcaaccctcctttcttcttctccttccttcttgctgcaatcgtgagcctcctacagtcgacccccatagcagctccttcaacctttcttcttcttcttcttcaagctcagtcacacctctccataaccgaacctgtacaaccaaaataaacacccaaaaatgacagcaaagatctaaaatgatctttgttggttattgaaaagagacccgaaaaactcaacagaaaaaataaagaagaacacaatagttgatttcggagttcccctcaaaatcaagggcacatctccgcaaagatgcttgattattcactatccatgtcacactaaaagaaa

SEQ ID NO: 218628 - DNA, 2448 bp, Cannabis indica
aatgtgaatttttttaaaaaattatattaagagtcatttttaaaattattttaaacttaatttttaaaaatattagaatatacttatcattttgtggggtgtaaataaaatttctctaacaaaaatagcataaaagtaaatataaaaaataatgcattgatgtaaattttgcattgaccatattgtaatttaaatttagaacttttagcacaatattggtgcaagtattttacaggataagctataatttaatgctctaacatatcattgagtacagaaacaaaatcagattacatctttttaacaaaaagccatattatatcagtaagaaaataggctgcaaccaaatcacagactcacaatagcaatagtctgacctaaaacaatgatcagaaaacagtcaaacatgtttaaatgtacttcaaatatcaaaaaaaaaaacctatatgtactgtagatccagtatcagaaagaagaaagatgagaaaaatggtcatatcatgctttcttctttttggatttgagtatcactaatccaatgaatatggataagaagcagaggagcactacaccagcaaacacaggaaacaatatggcatattcttgaggtaagaagtactgttgtataaaatggtcactgtctacaaatggctgcagtataaaacacataggcaatagtcaagactcaagtcaagagcaagttaatgatacatgtacatcaaagaaaaactgaccaggatgatgacccaaaatgtgtaataagtgaatatagagagactgattaacgataacaaggctccaacagccttatctgccaattccattctgatattctcaactgcctgtaataaaaatcggattgataagcattgatatgagtgccaattacaaatgaacatgaatagcaaacactcaacagcccgcccattagttgtccaatattaagattctaaaggttctggtattagattgtgcctctccttcgaagcataaaacaaccttacttgataaagttgattcaattttgatgtaattgcaaaacatttcatacttaaaaattcatttgaaatataaaaactcatttgtttatatagacaggcacacaaacgctaacaaggatcagttttactaaaaataaatttcacaatctctttccagcattgataagtagtttgtcgttactcaatggaaagctgatcaactgaattatatgaacaatataaagaaatcatatacaatattgtaactatgttatcataaaatgtgaatggattgtatacatagaatagcatatatttatataaaaagtttagaaagactaaataggaaactactaatacaaatagaaaattacaaaatacaatttactctaacttttacaattattatacaactaatattctaacactcccttcaagttggagcataaatgttaatcatgactagcttgttacaaagataatcaatccgcactctaaagaaagcctttgtaaaaatatctcctaattgttctccggtcttcatatatcctatgtagatcatgtcttgttgaattttctcacgaacaaaatgataatcaatctcattacgctaagttcgttcgtggaacataggatttcaggcaatatgaagagcaacttgattataacacctcaattttgctgaaataaaagtcttaaacctgaattcaatcaaaagcggttaaatccatattatctcacacacaaactgtgtcatagctctatattctgattcaacactggatctaaacacaacatttagtttcttacttttccaaaagagatcagactgccccaacaaatacacaatatcctgaagtggatcgtctatctatcttgaagcttgtccaatctacatcagagaaacactcaatttgggtatgtccatgattggtgctcctttcaagtaacatataatttgttctaatgctgcctaatgataaattgttggagaagacataaactgactaacgacactatctaggaatgcaatatctagccaaaccacagttaaataattcaactttccaaccaatttgcgatatttctcaagatcttcaaatggttccccatcacatgtaagatgcacaactagattcattggatcattacaaggggttttgctcccgattttcctgtctcagttaacaaatcaagtacatagtacctttgagacaaaaaaatatcttgtttactccaagtaacttcaacacacaagaaatagttgagcaaacctaaatcttttgtgtgaaattaggtatgaatgaaagacttgagggataagatgcattcagtataatttccaataataacgatttcaacataccactaacaaaatgataccggcagttgatcttttatagaacacaaaatgatcttacttacttttcaacaaaccaaatttctcaacagtctgactaaatttacc

SEQ ID NO: 218629 - DNA, 3133 bp, Cannabis indica
aataaataaataaaacaagtagtcccttataaaattctagtatctttcaccaccacccttgtcaaataatagtatttacaatgacacccttgaattttattaattttagtgatgaaagggatgatataataagaagggagaaagagggggataatgaattttattggaattgaaatcccattaagagcttgacagatttgtatttttctccctttctgttgtgaagtgggactgctctgatgccttgtttaatatcagagaccggtagacatgtttggccaccaaaatcatctttctcggatttgtcatattctcgtacctctatcctaagcaatgccaactcaggtactgtcaaaggaaatgtgaattcctcgttccaaacaggtgcccaatcatcactaattatctctgtcttcttttttgaacaatcagctggtacaccaactatgtaaacctgaccaaaagtaaataaacaaataaaccttttttctttttaagagagattaaattaaactaatcccatcaagaaaataagtgcactccaagaatcggtttaatactatgtggttaatgtcatttggaagaaagagtaaatgttatgttagtaagtaaagtaacctttgtgtaaaagtcaggtggtgagtaagtatcaaagtgtgttcgactaaagtcaaggtgccatccatcccccatatatactttaacctgtttatttaagataaagtaattgtaaacttcattaattacatgcacgaacgaatctatcaaataatttctcttctaaagtaaacaaagataaaggttcacctttaatgtcattttcacaggcctagtttttttaggatcaaacacctcatttcttggaccattttgcatcagaaaatcaggttttttcacataaccgcagcctccattggctctaaacatcccatgcatcagccaaagtgattttccatatccctgttattattgaaaactaatttaaaatgtgctagtagacttacaggtggtataaaccaggagatgttatacaacatgctcatagaattaggcttataaaagtaacagcaatggcaagaaccctctattgcatgattaaagtcttaagaaaatttaagccctcatcagatgatgattgaaatttgttttatcgagttcattatgtaacatgtacagatataattcattatatatatagaaacaactcagattgactaaaatcttgaatgctcacctgcatattaaaagcaaccatttgagctccatgcatccatccaataatgggcttgtaatttgaggaattgaatcgagtccctttggggtacactcttaaaacatttctctgagtgaaactagacagtacaacagcttgtatcaaaaccaattcactaaaagaaagatttagacctaatattaagaggacaaaaagttattgcactgagtttgaaaatttaccttacaaggtcagttgggtaagaggcagcagccctttcaagtgcttgttcattcaaactaaggcgtcgaactttgtcgcttgctactcttaaagcttcccttagaccaccctttggctttccagcatggattgtaataagacgtttatactcaggtggtggtgctggttgacatgatttattatcgccacaggcattgttgtcctcatcatcttgatcactttcactctacattatttgaaaatagataataaacagaataaaacagatacgaaatgcaaggtattaagtttcattccattacttcctactcaccctatcatcggcatcgaattcaactccaaggcctccatctacagtgtcctttcctgaggtttcttctccagatgattctctttcattagccaagacatttcccttatccttcaattctagaaactcttttgggggtttcgttgatataattattctattcttcaaggattctggtgaagggaattctgtcaagcattcagactcaggataataaagcaagtctccaagagttcgagttaccatctacattcaaaactactacaacttcataaaacaaatactaaaaagtgaaaaaataacaaccgttgtgatttgatgatgtaaaaggctaacctcagcaactttagcctgaaggcttggtgtaaggtggtcttcaaaagttataataactgggtatggagatgtaacaaaagcatgttctttaatgcacttcaaacagttaatcaatggcacaggagtagtcaatgtcctacaacaaatacccagaaaaacaatatctgaaaaaattgaaatttttgttcaagtctagaattatagttcaagatggggttaggagaagtcatagttaaactaacctcccatgtagaacattaatatcatctttggaagatggccataagtcaagttcaatgactctaacgcctccttgtaaagcctttataattgggacctcgctacaatcactgctaagttgattgcctgttaggtatgaattatgccctgtatatatgaaatagtgtgacaggggagctgtcatatcatggtgcacctgaaaatcgcacattataggcttatcatttgcaaagaacaaacaaaagttaccaggtccccacccagtaataaaagaagattaaaaaagaacttagcttaatagttaaatgcatccaaagtgtacatcttaacaagattctaaactttaattaaaacctaacaaaggaaaaatgagtaagaagatttgttgatacttaaaaacttgactagatatatatttggctggtttacaaatcttataatcttttatgggtatttttcaactttcatctcatcttaatggaaacagtaaaaaagagttatactaaaaacaaaaccttcagagccttcaatttttctttttttttaacaaaatgaatttgaaatgtttcaacaatagttagaaaaagacagaagttattaaggcaaagttacctgggagttgcaagggccattgagatcatcgaggaatagtaagtagaagaaatcctcgaggataagccccgtcgtttggtcttgaacgacgtcgtttttgcgtctactgaggacctggcgtacgattcccctcggcgtcagagagagtaatttccgtttcaccctggtgctcagccatg

SEQ ID NO: 218630 - DNA, 3407 bp, Cannabis indica
ttcgtcggtcacggtgcttctaggttcgtggtgcacgaagcttcgtcattggtggtccttgatgggttttttttttgtgctgtgaacctttgatggtgtattaatttgtatattttgatacaaaatttttagaatctgattgtaaaaattgtttcaaggaactgatataaatttttttttgagttttttttattgtatttatgactgttaatcccgtttatttcataaaaattgggatgaaagtctcttcttatcctggtttttatgtaataatcaggatacatatatcccaatttttattttagcaaaaatcgggataaaatgccttaaaaatcgggattaaaggcctttgttcgggattaaaggcctttgtttgtagtagtgcatgtaggtctagttcctccacttcaatgctctgattaacatgatcctttggagggaagggctttccatcctcgaacgttaagatcatgtacttgagtacgtggccatcgttttgcacgactctgacctacagattgattggacggattagccctggggcatgagcaatcctttctttctattggggttggtcggctgctcttcagttgtcctttggaacattatgtgcaggtattctgggagggtcacccattatactccttttgcattttactggagcaaatggtcgacctacaaattggttaaaaaatttagcaggagggttttcttctgcgaagttagtttttgcttgtagtagtacaagagcttcttgcatttgatgttaaacttctttttggtctgctaatctcttttcgaaatctacgagctctttttgtagctgtattacttcagggtcttgctcataatattcttcacactccttgttgtaatttttgtcgtagttaccttggggtccccatccgccaatactatggtcagaatctagtctcagacccaagtcttggactcgactcccgaatcgaaccccaatcctttagccttggacttggacctcggtgtcggccctcggcctgaacctaacccactttctctcaccttataaaaataaaatttataaaacatacatttaattttatttttaaaataaaaaaaaaacacacaaaataactacagaacatatttttgttttttaaaaataaaaacttgatttttaattttgtaattatttaaatacgaaaagacaaacatattagcgaaggcacctaaaacaaacatgccttgtatatctcaataaccttgatatacaattctcacacaacactaatctcattcaataagtgttgtgcaaaactacaaagtacaaaacccatgtggaagacacaacacaaccaaaccaaaaccaaaaccccacacacttcaaactttaaccaatactaaatacattagttgtgactaggactggcccaaaccacaccgacacaatattttctttttctttttttcttttcttattattttagtaaatagaattgctaaagagcactattggtaattctcctcggtgtcataactatattagtataactaaatatcaaatttcatataacttaagaaaataatttttaaaaaatatcgttaatcaatcgtaggacactacctataaaaattgtcaagcaccatcaatactcaataacaatagcgtttaacaaattatattattatattattaccctgcctttcttttttttccattgcggctatataacactttctgttctcttctcttctctctgtaccgcactcacatataaatacgtgctatccacacaccattcttcttcattcatttctttcttcaaaccaaaacaacaccataacataacattgtaagtatataacaaacaaacaaagaagctgaacaatttgattcagtttctatggaattactaagcttattattacctagagttaaactctgtgctactctcctatgtatcactgcttctctgttgctcaccattgttaaggctgaagatccttacagattctttgactggaatgtcacttatggcgacatttacccgctaggtgttcgtcaacaggtacctatactctactgctattattattattattaatttttaattaattatttcgatgtgatgatctgaatgtactaatggaatggaactcgatctgtttgtttctagggaatccttatcaatggacaatttccaggccccgatattcattcggttactaacgacaatctcattatcaatgtccacaatagcttggacgagccttttctcctatcttggtaaactaaaatcactctctatttctaatcttactttttctagactagattaatgtaaggtagcttaagaaaattgtagttagtgactttattctcagatctgaaaatttcataattgatattcccttttcacaattggattttaaattccaataatcaaggcaaaaatgtaaagcccatccgtgactcattttccacctaggctatatatcttcttggtcattatcaaatcggttgtcgttaaacaaagcctggttttccaagatgggtcccactaatagtgtcaaaagtccaatctggaccagtttaacatttcaataaaccaacaggattaatttaatgtggtatcattagtttagtaggaaatattaagtatcaatccattaataataaataattattagaacagtgacactttgaagttcattttcctttatttaaaacattattattttaatggagaaaaaacgacagctggtacaaagggaaagagcgctagaatccaaatccttggcagaattatgagtatgagaggtgaaaaggcaatagctttttcaattttccaatttcgatatattcctcgattcctgctaatttgatacattttgagaaaaataatatatttatacctcactcaaagtcaattttttttattttattttactgaacatatttatattacactaaacatccagatacgaatagtagtgtgggggcttatgccttcaataaagaaaaaattagtcttaaaatatatcactactagtgtttagtactttctatagttggtgatacttaatgatattttttaaaaattattttcttaaattatataaaatttaatatttaattataccaattacaatatattaccgaataaggtactagacaacacaaaaatcttaaatctatcactgtatacatcaccattaaggccactcaaaagactaatttagtcttacaaataaataaaattaggtgaattgtctcgtatacttattttttaatttttttaattatttttatggtttaggttgctcaaatagtttctatgtgggttgcgatttagtttaggttatttcgttagttgctatgtagatttccgtaaaaatacaaagaaaaattactttaaagtgtaaaa

SEQ ID NO: 218631 - DNA, 2614 bp, Cannabis indica
ggtttggtgttgcattttgtttttctagttttcgctagctctagagaaaatttattaatatgggaaggttgttttttcaatgtgatgtggtgctgttctgaagacatagcttgattgtctaaatttccggggacagttttgtcccatgtgcttcgggataagaattctgcagcacatggtttggcaaagcatgcccttcggttagacgatgagctatcctggttcgaggaggtgtctccgccgattgtggattgctgctttgtttaatcatgtgtgattttgatcaccgcgtcaaaaaaaaatgggaaaaaaatcgttgcagcagagaaatattctattgatgctccttcgtaatcaaatttgctaccacaccattatgaggtctaacataacaaagtagaagaaaagaagggtgccccagaatccaaggatccaaccactcctaaccaatctccctttcccaattttccaatgtaaactagatttcaacagatcacgattcaaaaaaattccttgtcaagtcataaaaggagagtgtctaagatgtgcctcaaggaaggtattgtgcgggtggtatcaactcttgatcaacttgcttagtaaacagtttagaatttgcgaaatcttagcagcttgcttagccaataaagattgattgaagtactcaaaagattgaaatcccaataccccttgaagctttgtttttacaaagtaaattccaattaagccaatatattttggtgccattttcattggatccccatacattatgaattcaagttgtttgcaaaaagtcaacggtagccgaaaacatctgatggcgtatgttaaaatagactgcaccacaacttttaaaactataaaaatatgaagtcgcccaatcacctccttaaaaactatcataaaaaaaaaattgaaattactatcaacttatgaaaaacttaaaaaagatgaatccgaacacccgcccacaccatagaatttctcaatgtttagttattctcaaccattgaaaccgttctagtactaatcgtcttagtaatcgagaaagccttcccgtccttattctttctttcgttatttgtttttaagaggttatttctttattttcgttttacaaagtattctcttttccttcgttttttttttttttgaataattcctgtacacagatttcgattaaagtataacacgattagggttacaattatgattaggattagggttttattgtctgttttcatggtgagaaaaggtgagccatagagacgttactctctaactaacccagaaaggtaacattaccctttatagatttgattgtctgttttcatattgaagatgtttacagtaatggaagctgcctatgacgacacatatttgggactttggattggcaacaacactttgtgcgccattgtagattttcatttttctacatgggttgtttgtctcaaggaagaatgtgccaatatgctaatctgaggcattttcccatacttatatattcttatttatttgctttttatgaaccaaccctatatgtccagtccagaaatggttatgtttgatttttattttattttttcgaaatggaaaaaaaaaaaaagcaagatatttgacaaaattagtcaagtatgagaaatttgccaattgtaatctaagaaactgttattgacagaaaaatgacttctttatttttacagttaggagtctcccaaaataaatgagtgaccataagtactcatacatgtgtaacatgcatttatgccattttataataaaatatttaaagctgttacaaaacaaatttctttatctcatgcaatttttgcaaatgtttttttttcattctttattaatgagtaacaaagtgaaatgagctaaatgacttgtttttgggagtcaatagtaaatgtttttgggagcttttgaatgttatataaggcaaggtattcgttttattttgggagttattgggcaaagaggtctctatgtaatgtaagtgttattttttgagtattatgttaactaacttacatctgacaaatggcaatatgtacactagttcaaaatatacatgcaagcttttgaatggtaggttgcacagttacagaggatggccctttggtttgaccaacaggttcatctgtaagaaacatgtttgacttgttgctgcaaagtaatgttgagaaagtatatactgactcacatctcatctataatgcttcgaggataagtaaatttgccaagctctatataagttctctacttcttaaactaaactacaaactataaaatatatatttgctagcaaagcagctgaatcatttcagggatatctgcgtgatacactagtgttaagtctgatcaagtcttgaacatgggacctggaggtccgggtggtggtcctggtggtccgggtggaggtcctggctgggggggtcctggaggccctggtggccctggttgggggggtcctggtccaggtggccctggttggggtcctggtttttggcctggacctggtggcttcttcggtggctttgctgatggtttatgcagtatgatatcatcttggtatagattctattgagaactttgatgtgtcata

SEQ ID NO: 218632 - DNA, 2441 bp, Cannabis indica
gaaattcatccccgtttaatggctcctctaacaactcttccaccggcttaactgacactagtagagataatgacgttcttgcccttgatattaactctttcagctttggctccattatggttctgatatctgagccttcttcgagcccatctaaacacgtggcatggttggtgagtacggcactgagccatgcatgggcgtcatcgtaggaatgagagtacaaactcgtaattgagtcagtaactctttctcttgaaatgtcaagtaagtcaacgcagtcatttagagccgcacgatcagttggactcatcgtgttgatctgacggctgacaacgttggctatgttaagagcttcggttatttgaggtgtggttttttgtaggaaggtatttaaaaggtggtggattttgttgtgtgatgatgatatttgggatgatcttgcggctgttgataagaccatagataaacatgattctttttctatggatttatcacagacgtgtgatgctagtgaataaggagtaaacgaggtcgttttgatggaattgaaagcaaagaaagttgtgcttataatagcaacaaaagagatgagaactaggagaagagtttttgtgtgggaagtattagttttgggggatatgattagaggctcatgatggcttattgccatgatgaaatattatctagtgatatgtggaaaaagagtagtgtgtgtgtgtggaataaacttgtgtagtgttgtgtttaaatagatcttacttagggaccatattgtaaattaaatattttattattttctacaaggccatggtattggtatggatggatgagatgattatatatatagatataatatatattatatatgcatgttcgctggattagtagaaagtaacgtttttttattccaaacataacatgcatggttatggttatatattctttattcaaacctccaaaaaactattatatataataacttattaaattctgtgagatccactagttttatttttattaattttacaaagactaataaattattaacatctattaccatccaaacaattcaataggtataattagtaggattattttttctagttgaattacttaatgtgagtatatattaaaaaaaaaaagagtcatgtgagagtgagagaggtaacttctcacccattaaatattattttgtgtaatgaaataaaaacgacagatcgatctatgggggtagcttaattaattttcaccagatcacgtaaccacacgatcgattacaagaatttgtaattgatgaccagtattttttttttatttagctgtcttttaagtattcgagtgttaatttttttgtgtattaaatataccaattacgtacacagtaataaattaataaataaaaaattaggggttataatttttttgtgtattgtatatataccaattacgtacacactattcgtgtgtttgtttaaattttttacttcatttctttatattacaatgttatcaatttccaaactgtgtacatattaattgaaaagtaattgatatatttcaaatattattgtgagttgagttggattaatggaacaagtagctaggttgctgctggtttgtaataggccttagaagaaaccaattatgtaactttgacaagatatatataatatatatacatatatatataaatatatatataaataaaatggttggtgctctcaataatgacatgacattactcatatatatcatctcttcctttttcaaacctgtcttagtggttctactggcatcttttatgttttatcatatatagtgggtttactgaggttataattacaatactgaataaaataaataaagtaactgtatccagcttttcatacatcttataaaattatagggacatgattttgtcccatgtacttttacggaatgtattccatgatgtacgacaatcgttagatgaaaaaattatttgatctgagggctgaagttgatctaggagtaattagaattaaaaaatagtaacttaccctgaaacccatttaatgtaccctgagacccatttaatataacacggaatacattacgtaaaagtatatcaccgataaaatcctgtccctaaaattatatattatataaagggatcacaaatagacgcacgttttaacaacaataaaataatagaaagtaaatatattcgtagccaataatataatgatagtaaaaattaaacacttatttatgttaaatttacagtaaattataattaaggaccaaaaaaattaaagttgatcacatatgttgatatctgattaatccaaaagagagaatcacatgtacacgtgtccttttccgttaaaattaatttgataaatttgtcgttgatgtttgtcattatttctaatcactaaaaaaaacagttatttttagtg

SEQ ID NO: 218633 - DNA, 5943 bp, Cannabis indica
gatgtcctgctctttctatgtcttttcatatgattggcccgaggtggtactggcacattttctctacaacacttggaccttcagaattgccaatgtggtcatcagaatcatttcgtaaaggcttttcctttggctgctctacaccatccactccattcacagcttgcttgtctttcctcaaatgcttattagttttcttcttgcttttatgttcccctccggcattatgagttttccccgtgctccttcccaaaggactgtttggatggttaccatctgggagttcatctccaggaaactccttagcctcacttgcattcccattagcttttacatctggctctgcagaccctatatctgaagacctctttttatggtttgaagcatgactatcaatgccatttttctgctgattaccttttcgagccataacttaacaattattgaatcacagtttggcggggagtttagttatgacatgtcctgattaataaggccaccataccattaagataaattcttcaatatgttctgccaacaaagataatagacaatcatattggagtgcatacagtaacatcaattaagaaatttccatgagctaaaaatagatatatgacaagtatgactagaataaaaagtaaaaaacttctaccagttcatttagtacaaaagcatgaaaaggatagaaaattaacaacaaacaaaagacttttctaaactacttcttcttctttttcttttaattttggtggcaaaaaacttttctaatctcaaggcaaaacttacaaattcagtcataaacggcaaaaggatgcaagcagagtaaaaaccttaaataagtaaaattcatatcaatgaaatttaaattaccttagctttttacactacctttctcgaaacaaattgggagataacaaagcaccagtacctgacatgcatgtcaacaagaccattgaaaatcatccattgaaaaatacaaacagggccctaaaatggagaacacaacaagaagataggcctaaatttcgtatcaaaataaaaacccattgtcgcataatccaaaacagatgcagcaaataaatgaattttgacaaacaccgtgtaagaacaacttgaaaaaagaagaaaacaaagagtttgaacaatacccaaatgaaaaaaatactgccataaattacaaattttaagagcatacacatacatacctgaaacaggttcgaatgtgagagagagagtaagagaagggtataaccaaaaaagaaactttgatagatatagaaatagttatggccgaaaaagcaataaagatcaaatttttagccagttgttgacactgtgtatatgaaattggtccgatttgggcgtttatcacaggcgaaacatgtcggaattttgagacgggagtagatacacacgaagctctcaaagacgatgactttgagattttccaatatgggcttttttttgggccgacgagagcccattaggcccaatatttaataaaattaccatataaatacttgtaagttcttaatattacccatttctgtcgagtgaaatacccaagtttagtactatttataagatcattctagtttttattgttcaaggttctaaagtaacgtgaaataatcatgtactatgctcttatttaaaacattggtgaaatagccttttcttgtgataagatgaaaaattctccattcaaactaagtagccttttcttgtcatattttgtgtgtgattaaatgcactttatatattttatatatgtaataagaatagaaaataataatagttttgttaaatataaaatgatatatccaaaatgtagtaattataagtgtatatttatttgtttttattttatttattcaattaacaaaaactttcatgagatttggtagcttttagattaaatattattattcaaacttttagattatttatttcttgtaattatatttatataaatatttattcaagtaattagtgaagtttattaatgtaaatgtaactgactatttaaaagaaaacaattattttactttatttctcgttcctagatttatagttatcgaaagttatttttttctccgatcagacctgccggccctccttaggcttaggtacggcttggtcggagttatatttttctactgttattcgatttttgttaccgtgcttaatattacatcatcattgtatgtgtaacatcttcagaaatttcttgaggaaaagttagaagatgaaatcagtattttgtactcttcgagctctccaataggggcttccttttatcctcatgtggcggaggcatcggctgtcttaaatgagttgttgttgtattgttgtttaggatacaattccattactattttctcaaattgcctttgtcttgtccaagtttttaataggaagaataagtatcaatgaagctagaagttggtgttattattcattatattttacatgtttggccttattttcttatatttttctttcttattgtaaaagagctcaaaatgttatagctcattctctgacacgtttggttttatctcttgaattttctcgagtttggtggtcaaatttactgctttgcctataatctttgattttgtattgatctttctaattttgtgcttttcaatgaaattttcttttgttaaaaaaataaagaaaaaaagataaagaaaataagatcgaactgataaaaaattgctgatgatgatgatgcatcaaaatattgtgatttttccaatacttcatctttctctttcgtcttagctgaggatggttcttgtgcattggtctcaccaaaccacatatggttactttctgattcgagatctatgccatagtagtaatgaatatacaccaactgcttgtgtttttgtgaaatggttacttgtcaatcaacatctactttccaaagaccatttataagtatagttacacacacaataataatataatatttattcagaaaaaatattattttaaattccgtgttgtataaaaattataaattggtacaaacttatattttgcgacataatatgcgctaagctcgattttaattgactaattttttttattaaaaaaaaaaagtctacagaattaaaagaaaaaatctacctttttgttattgaaagttttattgaattaagttttcttccatacatttttctttccacaccaaacatgaaatttttttctccatttttctcacattttctttccccaccaaaattcaagttccaaacataaggtaactataacaattgtcaattgtagttcaatttctatcctattcctaacacgattttttttttaccaaaatcaggctcagtggtatcattatattttttacaaaacacaggttctaaattgtcatttaacaaaataaatggaccaataaaaaattcaaaataatatttaacctctatataaaccattcacatttttatgatgtaaatacactatatacatataaagttttgtttggaattagataattgttggtaaattcaattcaaaatatttattctaatatgcaatgggataggaggtatcaactcccttaccaattatttctcctcttcagccatctcactcacctcaactattaaccttctctgttttctttttattgaaaatgaagattgatcatatatgttcaagctctaaaatcattaaaaattcaaatctttgcctgtatcataagatactattcaccttgttctccatgaactttgtcagtacacaatacctaatcaagtcattagttgaaaaagaggtcctcaaagacaaaataatacacacacaacaccaacattgaccaatgtaatcaacagcagaacaatgaaggtacctaatcacctgtaaaatatacacacgtgttggaacaatgtctagtgtaatctaatatgcatacacttgtgttgaaaacatgctttatagacactaaagtaaagatgttctaaaaaggcaaacctactcaatggcttcagttgtgagtgtgtgaatgtggtttgttaagagttaggaggactcacgttcaaaccacacactttctttacaactttggattgtgtctgcaaaagagatcctaaaaaagctttgattttaaacaaaatcacattgagttacatttttgatcctaaaaagggtgtttattaagaaagtagaaatgagtacttcatatttcatataattattgattttttacataagcaaaattacaaagtgaaactagaatcaacaagtaaatttaagtacatatatcaaagctttcatggaacagtacaattcttcctcccaaggcaatggcttgtttgacattaatcatgaaaatatgaaacagtaataatttctaagaaatttttttggcaggaaatttatgtacagtaacaaaagaaattgtaccaaagtaccttcactcacagctattgacaagataatattgtgctcctaaatgcatgtgctgagaaccacaatggaagtgtgcaactatttttcacagagtacatctctttccatactctactcttgcgttgatacaccaatacttgcttatgggttgctaagaaaaccacctcactagtctgacatatagggaaaatacctggtactaatcctttaatacatctgagactcaccctatcaaccaaaacccattcttgtttctcataattcttcaaagcccagatattcatccaagtatcagaaatctgtatcacagataaacaaccatctaattccaacaagtaaactctattccctgactcctcactcacttcatatggcaatgacatcttcctccacatatcacactccaaatcaagaacaagtataccagaaccacttcttcctgttaaccaatgaagtccattattaacaaacacaacttggttcttattcatatgtgtaaattgatcatcttgataagaaacacatttcctccacttgtttgattcagaatcaaatactaaacatatgaatgtcccatctggtctatgaccaaaattcctgtgataaccagctaaaacaacattaaacttgtgagttgataaattacaagccaaccccactagagctgcctcaccatcaggataaaatctagtcacaggcctctctctactcttgggaagaagcttaaattcacgagtcattggattacatacataataaacacctctatcaggaatactagagcaacataataaaccattacaagaggctctaattctgactctgtcctttaaaaaatccaatgaaaattcagaaacacccaatctattgtcaacacaaatgaaactagactttaaatgtaaggactcagaaatctccaccaataacatgggattcttagctgaaacttcattgaatagctgaaggaaatacttatcagaacacaatctataccataatttacacacaactttgattctataaagagactttataggtaatcttgctagaatttgaaggacaacctcatccgggaaaatcccatctctttttgaattcataatttacaaattaataatcaaatgaaaaatcccagatacccaattatgaaaatcaagagtaggatagagatttcgcttaccaaagacaaatctagaaatgggtgttggataaaacttcatttgatgaagaataagaaccaaagggacgatgatggctttaaaaagacgccatttttggtcaaacccagttaatattattaattattattattaaagaagaagaaccccaaataggagatgaagcgatgaacgaaatttggggaaggagaagagtggagagtgaataaaattatagaaagaaactcgctcgctaatcatagtcatacacgaaacgagaatatatccttaacaacaccaatcccttattataagttgaaaaatgcctcttttattcatcaattaa

SEQ ID NO: 218634 - DNA, 5257 bp, Cannabis indica
gttgggcccttactatagagataaatagtatttttaaaaattattaaaaaatatatatattttttaaaagatactttttttatttgagctcctaaaatgagtgggccctaggtgcgggcctagcccgcctatacctagggctgaccctgtgcctacccttagggccgatatgggtttcgggaatcttgtgcgcgttttgtgtttttgtgaggtaattacattttggggtttcggtagtttcaagatgagcacaaggaaagtttacatgaaattacataatttgggttgctctcgtgaagccagcccatctgctgattatacaaattggatatgattgaattggtcaaaatcgtgtcctataattgtggataattattcatgaattaattatttgatctccattttaggtagttttttcttttagcatgatacgatattctgtcgtgatctgagtagcatttacttttttattctgtgtgcttgaataaaaagagaaactggattgatcttctaggaacacgttttctgacctttcgacatcacggtactagagttgcttccgaatacggacttgtcactggcgaaagcccatttggtcatggaaccaatgtgcattcttagaaggttctgtgtgacttgggcttgcccaaattatcttccttgggacctactggtgggtctttggtgttgacctagattccacgtgtcccttgccgaaaacacggataacatagtttggcattaaggagaattttttggtcttttttttaatgatcatgtaccgtgttgaaaatagggttcaaatatttgttacactcgtgactgttttttcttatacacatggtaattaatgcttgaattttatttttggcattgtaaactatttaaaaaattttaaaaatttatatcttaaatgactgcaacgtacaaaattatgaaataaaaaaaataaattaaaatatttttctaaatgccaaaatagagtagaattctaccaaaaatacacaaatttttctttaataaattagtaaaattccaacaatatgaaaagttatctataaacctatatgaaatgatatgccaatttattttaggcagtgaaagtaaaaaagaaaacataatgcgagcacacgttttgatgtgctcaccacttcagatatgaatataaatggcactataagccactaagccatggcataacttatgggagagtagtgtgtatggtgatatcaaagactcaaagatttgaaatcattattccttgttataaattggaatgaaacaaattaaaaattaattaaaccaccagtaaatgctcctgccactagataagtggatatatatatttatatatttatatatttataagttggttgatgaaaggagactatgatgcatatctaatgctgtgtgaataccactataagaacttgactgtctctcttcatatctcccaccttcaattaatatgtgctaactacattgaaagtgaaatttacaatatgaaaaccattgttgctactgttaacttggctcacttaactctgctactctcattttttgctctatttcatcagcacataattgaactttgttcagctgataagctcattagtgttccatgcattgaaacagagaaagaggcactccttgccttcaaaaattcactcattgatccttcaaatagattgtcttcatgggttggtgaagagtgctgtaaatgggaaggaattggttgcagcagcattcagactcaaggacatggtcatgtcacaaagctcaatctcagaaatccattctctttagtctacaatagtggacttgatgacccaactagtgcctacaaaaggtcatgtttgagtggtaatgtaagtacttctttaacccacttgaagtacttgaattatttggatttgagcatgaatgattttcaagggattcccattcctaatttttttggagagatggtaaatttggagtatcttaatctttcttttgcatcattctctggtttgattccttcaagccttggaaatttgtcaaagttgcagtttctagacctctatgcagattcttatctcaatataggatcatgggaattaagggctgacaacttgaattggatctctggcctctcttccttgaaactttttaatttgggatatgtcaaactcaatggggttggagaaacttggctccaaaaaattaatttgcttccatcattagtgagtttaaatttgtatttttgtgaacttaatggcttacctgtttcacttcctttcatcaacttcacttccctttcagtccttgatttgtcccaaaattcctttaattctccaatgcctctatggttgttcaaccttaccagtctcaggacacttcacttgagttggaactttcttcagggttcaattccttgggagattacaaatttgaaatctctagaggtccttgatctatctgataatttgggtcttgagggtcatattccaggatttttaggacatcttaccaagctaaaggtcttagatctttctgcaaatgaatttactggggggattcatgaactcttaaacagtgtctcaaataacaatatattacagacactggatttaagttccaattctctagatggtgtgttgcctgagtcactaggaaagcttaaaaatctccaacatcttctcttttctagcaatgccttttttggttctattcctgagtctattgggaacatctcatccttagaggttttagacctctcttacaacaaaatgaatgggacaattgctaaaagttttgggcaactctctaaactagaaaatgcaaacctgttaatgaactcttggggaggtgtccttaccaaaacccacttgtcaaatctcaaaagcttgaaaagtcttagaattacattagatgaacccaactcccttgttttcgaaattcctaataaatggctgccccctttcaggcttaataccctccaaatcttaaactgtaaagtaggtcctactttttccatttggattcaagttcaaactgaactcatatctgttacccttaggaatgttggaatatctgatactataccggaacaatggttctcgagtttagctcctcaagttacccaacttgacctatcaaaaaatcaaatagaagggaagttgccacaccagttgaaatttccaaacttgaatagtattgatttgagtttcaatcactttgatggggcattcccacattggtcttttaatgcaagtcagctatctcttgagagtaattctttctctgggcctattcctgaaaatattgctgaattaatgccaaggttggaaaggttgtatctgtctcataaccaccttagtggtcaaatttctcaatccttatgtgatctgcatagtcttcaagttctttctttgagaagtaatcatttctctggtgagcttcccagttgttggggcaattcatacatgttgtggggatttgatgtaacaaataacaacttatctggtttaatcccaagctcaataagttcacttcgatcgctcagtgtattgatgttaggcaacaataatttccatggagaaattcctgcttctttacaaaactgcactggcttgaccaccattgatctaagcatgaacaatttcataggaaaggtaccatcatggatagaaggaagagttttgtcttcgcttttcatgttacgactcaattcaaacaaattctcaggctttattccatcaacattatgcagtctttccaatcttcatactttagatctttcagaaaataacttctcagaggtcattccaacatgtttggataatttgacagcattggtattcagcaagagcagtgaagtgtttcaaaacttagtttatgttgttttgagaggaagagtacctgagtatagcaacttcattggccatgtcaatagcattgacctttcagggaatgacttaactggaaaaatcccagatgaaattacaaacatttctggtttgcaaagcttgaatctgttgagaaatcgtattagtggaagaattccaagcaacattggaaacttaaaaaggttagaaacacttgatatgtcgcgtaatcatctcgcagggcctattcctcagagcattactgacatgatttctttgagacacttgaacttgtcatacaatgagcttgaagggagaattcctcctctcccacagttcaatgatgccaccattttccagggaaatccattgctatgtgggcatccacttccaaccgaatgcaagcacacttgagcattttggttctaacagctaaactgatgagtgttcaaaaaatgtatataaataaatgtccaatgataactattcattgatggcatgaagcaggggacaaacattagtattgtaacttctaaaacttgtttgttgaccaagaataaggaataaacaaatgatatataatgaactgaagtatttataaacaaaagagagcaatctttttataccgcagtttattctcatcaattcaatcataatatttgtaagaatttattgaattcgacgagtaatgtgtgttatgatttgttaaacgttttgctaaccgagttatgcatgggtttggggaacagcttttttatttgttattttgagcgatggtcttaaataatgaagaataaaaaaaaatatttaaagaggtatttcttattgggtgattctacgatgcaccctcttcaaagggatgtattgatgtatcttttatttgtttcggtatcaaaaaaaattttttaatctaatttttttcatattcgtgtatatttagctatttaagatatcctacaaaattttgagaaattttgaataatttataatatagtaagtaatgttgaaacattaaaataaaatagtcactcatgcaacacattgtttaaatcctatttttagtgtgttaaatttttccgaatttcttaaaattttacaaaattacttaaataactacatgaccatgcaaaaaatttaactacaaaattatttggaatactaaaagaagatataataaggaggtgcattatactatttacagtgtaaacaaagaaaacttaagtttagtcacaaacatcagtcagttttcctagtcttgtccaaattagtttccgcccgcgctgggggtgcaagtcgattcaaagactccatttctcattctcagttctcagttctcacaggctcagctaaaaaagaaaagaaaatgtcttccatgttagggcactgat

SEQ ID NO: 218635 - DNA, 3777 bp, Cannabis indica
agtactgacctggagagcctccacctgttttgacaatgttagattttcgtcctgtgcttcagtaagctcaaatagacggtttgttgctagcatctgtattagatattcaaatactgttagaatattaactgtatattagttgtaagaattagagtaaattgcattttagtagtttcctatttagtctaccacatgtatacctttgtttcctcaatcgaaatcttcaaatcacgcaaacttattgtcctctcggcagacttctcaggtgacaagtgtccatttactgctcctgaaggaagaataggaatcccagatgcagcatccttttgcattttcagattaattaattttcttctactttcttcaagttcagccatagtatcatcaagctcaccttttatcaataacagaaaaagtatacatccaacagatttaaaaagtatgtcagaaaaataacaataacaattacagttgaggaacaattccttttcatgaatttaatagtctctgggtaattctaattagctgacaaatgcatggccataatagagttggcatatatgatccatccatataaactgctaacaatgtttaatatgtacatatttataaaattgcactctaatttgataaccatcttaattacctgcgagacgtttaatttcagattgatcagtcgattgattgcttttataagttgcaatctgttctatgtatactttatgctttgaatgaagagcatcaatcacggaacgcaaattattagcctcctctttcatcatatcatcaatcttagatagcacactgatggcatctaaatcaaaaaataaacagaaagaagcaccatttaataaaaatgcacaaacatgcttactgttcatcaatggaagataagaggttaatttatttcttgataaaactcataaaagataagagaaaaaaataacaaactcagtatatgagattaatatgaggaaatggactacaattgaacctcattatgatatatcctgaccttttggaaataaaactcctcctagagcctgatataagctctcagttttggccatttgagcgttaacactaccttccacgcgtgtcaacaatgcccgagtagacgcatggcgaaaagaaagggcttcttcaatatattttataataccatcattgtcattagcttcaatggaatctttttgcaagagcctacacagaaacatctcctccacaggacatgatggaattgaacctaaagtgtacaccatcatgtcaatccatcttgtgtgatatagagaaattaaagctcgaattaatcaaaatatttgagcagagaataactatttacataaacatgagatacggatacctctagaaatatcaacacaatccaaggtctgtaaagcattttgatctccaccaatgcatgctccgagaaggattaaatcatcaaccagctaaatataaatttttacatatacttttcagaaaattttaaaaaaaaatatatcatattttgactggaaattgagactactagaacaacatgcgctaaataatacatccaataacctgattccatagttgattcactgcaatcaacatgtcatcataagaaccttgcttttcttgtgatttttttattttctcttcaagatcatgcaactcttgcttttgtttctctatctgctgatggagtttctgattttggtaatgaagagcttctgcatcaacctagacaaaaagaaaaggccgaatccttcaaataattttcctcccacattgaagtgattataagcagagcaagtcagatcaatgcctacgtataactccaatttcactccaccgaaggcaatcacagcaatgcatgtacgtagaaagaattaaaacaatactgaaattcacacctttatgtgaatttctactaaagttggggggtctcctaaaacagaattgcagtcatgtcatttcattcaaacaatcaatgttcaagattactagtggaatctatgccagtgtattacatgtaatcaaattcatttatttcttatatttccaagtgtcacactagatatgcatagtgtcacaatttcttgagccttgtgattcaactaagatatattctaaaactcacttaacatatgttatatttatttgtgtttatcaagcctaaaaaaatttgcttttgatctaaaccattctagccttgcctagaattggatttgatcatcaaattctgtttccattcttctcaattctctcaaataagcatagccccattctaaatgagtcagtattcagttatgttaagtaatctaaagtgagtagaagttcttcccatttccaaaacatctattctaaaccaaattagaattccaagtgagtatatggatttgtttcatgcattgacaaataccaaaatgaagtctctgcacccattaatcttaaaatacaaaacacctgaatttcatatatatgattggaaattcgctctatacaaaagttatattcctaaatgtcgttcattttcatttcttaatatttccaaaattcactttgatgcatgttctgcaaaaatttcaaaacttgcatatctaataactaccaaaatttcagcaaaagaataactaactaccaaaatttgatggaaaccctaaatgggttctctcactatatctggaaaaactgttattagaacactttgaaatccctaattgcatcaaataaatccccactaaccatccctatataagataaacaagcataaacagagtaataatgcgacgaaattcaaactttttgaaacaaaatactcacaaattgtaatactttaagcaactcaataacttcgataaaaaaaataataataaggaagattttgtaagtgtcaacgattgatgaagaaattgacctgaagcggttcatgattttgggagaaaatatccttattaatcccattaccctccattatctgactcttcttcccttgtagactaatcgaagtgtatgagcaatagcatcagttgattttggtctttttcttttcttttcttctcgtttctgtattaattacagaataattaagtaagaaataattataatggaaaataaatgaaaaaaaaaaatccaaatttttgaaataataaataaatcatttcaaaaaaaataataataaataaataaataaaatataatgtcaagtaagggaagaagaaaagtaaacagagaattacgcattaattagaaacgtttttagtaaaatcctcattttttaagaaataacgtatacagctttcaagaaatgctttttaagaaataacagcgtttttcttttttactgaagagtggttttcattcttgagaatagtggtatggggtgttcacggtccgagtggtgcggtttttaactatttttttaaattaatttgcacatgtggtgtttttaatttctcaaattatacccgcaccgcaaaactaaaaaattgtagaaaccacacagcaaaaaatggtgcgatttggtttctgcgatttctgcaatttggactattaccaaataattaagggaaatttaaaaaactatccataaaaatctctaaaattatttccctaaatctatacctattaaaattgcccatatatgactacatttgattttttcccataatacccctcccatttgaaaaacaaaatcccaaacaaaaaatcaaaaattctctctctccctctcggtgaccacgcaccaccatctctctccctctcgctgaccacgccgccctaccacgc

SEQ ID NO: 218636 - DNA, 2252 bp, Cannabis indica
agatagcttatagggtttctgtgtttaatgcctgttgcatgttaaatttatcacgagagtagaaagtttgcatgtaattgaggtttatatatctgagaagactataaattaccttagtaaacctgctattgcattggaattaatattagggaaataatcatattagaccatattcaatagaaacaattgaaatcgacaccctagtttttattaactttaaattttcttgtataattgtttcttactagtttcttattcttaattctttctttattttttatttaaccaaatagaagtaaaagtttaattttaacgtacttaactacactccctgtgggatcgacctcactcctagtgagtctactactttaaacgatacgtacacttgcgtgtgcaaaaatatcgcaacaaattcttatgcatatgcttatatatttatatgattggttacatagattaaagagatgattaatatatagttatttgtagattgtagatgaggaaccaaacaaaaactatttttcaccagtgaaagcgataccaatgatggtgaatgcattaggagaattggtgagaagcttcactctaccattatggaagggtaatgaatataaagaagggagtttgatgagatttatgaggataataggtctgctcattccaggaataccagctcattgtcctcaagattatgtcaatgcaacacgcctcatcacctcccctcctcactttctccttccacccaaggataaatctcagtagtttattgtaagtacatgtgggctctaaaagggttccatatataatatacttaatataatatttggcatacatatcatattatgttgggttgtcgtattatgtaagatattattacttttataattcagaaatatatatgtcaaaatatttgcatgaagtatctttattggtaggattgcttctatttggaattgctattataaaattgggattctagttgtatattgtgaggtgaatagagaaaggagaaaggaacaaagagaatattaatgaatagagaaatggacaatatttgtaaattaatgaatgagatcaattgatcctttgataagatcatcggaccttcttttagattgagaaaagttaagcttaagattacaagaaaagattaataccagaattagttagaaaagttaaagattgaaaactaaccctaactaactaactaatagaatcgctagttataacacgcccctcatgaatctcatgcataacaacgcttattttagtccaagcgcaccttaagtatgggatcaataatcctctcatgaataactttccatatccatgattacatacacaggggcttggtattgtatcttttgtgaagctgctctatcctccaggagcatcccaaattctagatactttaggattggagccatccaggaagttgagtgattaataccatcacccctagtgcttttatgcttggagtacatagatgggcgatggggagtagtttgtatttctctatgtttggatatgtttccaacttagttagcatgtccgcgaaggcatttttatccatgggaatttcttgataaaatagtgcttaaaatattataatagctccctagactttgctacgtaactagccattcttcccctttcatctggtattctctagatacttggttaacgactaactgtgaatcactatacagttcaatttcttggcgccaacttctttagctaattgtaagccaatgatcatcacttaatgctcaacctcattattttaagcttcaaattcaaaccagagtgcactttggagttgaagttgttgaggagagattagaattattttggctccagaacctttctcatttgacgctctatttacataaatcttctaaatttatagctctggggtggatgtttcaggatcattgttcatccctgtgcattccacaatgaaatctattaaggattaacctttaattaagattcgtggctgatactaaatatcgaattcgcttagctccctttaattgaaatctattaaggattgacctttattagtatttttttattaatattaattatattcataatattacagttgatattttattatattaaaagatatagtttgtaaattttgaatgttgaatgcatgataagaagtttttcgtttatgttatttatgttttttttttgagaaatttcaatgttattataactggtaatcatttacaataacagag

SEQ ID NO: 218637 - DNA, 5616 bp, Cannabis indica
tactttttaacaattctcatcaagaaatatatattagaaaattcttgaaaattgatcaacgtatacgtgatgatcatcaatatatatgcctttatatatttctttttcaaataattaatataaacaatatacatagtacttgaattatcgtcaatgattaataagttatcatttgatggtatggtctcatcatatataaataaattatacactgataaactgtgtaaaagtaaacctacataacataaggttcttaattatttttcttgtgtgtaaaaagtaggtagtgatgaagatgatgaatcagattctaacaaagaaaatacttagttcagtagtggcattatgagtggtgtgatcaggactcatcatgtggtaagtctcagagtctttagacccaacaactctctcaaaaaatgctctcatataagtcaactctccttccttattatcaccatgatccgtaggcaacactcctgctcccatagacaccgcattcagcaactgcatcaccacaagatcatcctccgtcgcctctctccgcaccgcgtaccccgacttcctcccattgcagtacaaagcccatatcggctcttgtgccatcctcgtcttctccgaagggtgtctctcgcactccaacgcaatccgcaccatacctgtccccatgtcctggagcagcttccctgttgggattgccagctccaggacaagactgggaagacacctagggttttcttggaaagcgagatttatcctcgctttcctgtacccaaataaggttcccgtcatacgcgtaccaccgtggatatggccatccacgtggtgacgtgtgacgctgtgtgaacccggcatcttgcatgatgctggggtaatgatggggaatgatctaaagacagagcgaactcggcggaggagcttggcgggtttggagggtggtcttgaggatgatttgtgggatggttggagagagatgggtggtctatgcctgtggggtgatgatggtggtggtccttgcggttgttgttgttgttgttgttgagacaccgccatgggagatctcaatgactattattattatgagaaatgataatgatgatgagaatgatcacattataattagttgtgaccaacctatatgtactatatatgtgtgtgtaaacgtttttcgggggtggaatttgtttttgtggtatgcacgttttgggggtatgttttggttttggttagtttaatagagttgaaaatgtgatacatagttttgacaaatatgggtttatttagtagttagtactgacttatggtttaattaattccctacattattaattaattgtagatgaggagtgttatttaccaaataaaaatggttacgtggactgtgatctttgttttttttttcctttttgtggtctaacactaattgaattaattagtccttttgttttgtaatatatgtcaatggggttactagctagctatatgatatttgtgggaagactttttattttcaataatataatttcatttgtttcagtgtacccagataaatttacaaaatatccaataatggatcaataatagtattttaagatcattgatgtaagtgtttacattttacttgcaaggttaacaagtttcaggttcttttgagaaatgttcaaaatggctagaggttttgtataattggaattcattactatccatttatctgggcatattaaaatgtcattatgaaactaataagttatgctaattcatttagctggtcatccttttcaaattaggagttttgcaaacacaaaaatcaataactaacagtggggatgttcttcaaacaagattttcattgctttagtaattgctctaacatagtccaaattttccaagtgagataaggaacatatattctgtgtgcaaattagcactacacatgttacatcaaaatccaaaaagccataaaccattccacaaagaccggctacaagagaaaatatacgacattgctagacaccatcattgtgaaacaaccaaagttccagtcttaagagcaatgcactacctcttatccatttgtgtttccctatatgcacatcctgagtctactgagatatgtatccagtcaatatataagggggctattaaatcagtcatggtgtccatattgcgagtcgaatgaagattcaacattcttctctttgctgcctgcgttcgggctttcctctgctttagccttctgtaataattgaagttgattttgtaggttctgtagaagaaaatttatcactaaacagaataagtaactataagaaatatatgtatgatcattgccccataaagtttataggtcagaacaatattattaatgaattattatacctctatctgctgctgaacaagcttcagttgagcttcccgtagataatcttgtattttcggatcactgttcaacctctgccaatcattagaaaaatttgcctgttcgccactagattcgataccagacgaactgggtaagggttgctgcacctgggggcatacatatccaggatacctgccatcaagaggtaaaattgtttcaatgtttttgtataatcgctcttgtctgacatctaaagtggtcactactcattacaggagcagtaaaacattggcaacaatcccaacaagtttttgtgtactagaatgcaaaattaagactccatatacaggaagagaaaataggatgaaactccctaagcgtatgcctatttcaactcttacgcacttcaaaactttgagtagctaatatgttaaaacatcttatggttgtagatataggatagggttccaaagagcatgcttccacaatgtattcagttttaagatcagaagtatatgcacataattcatgactgcatccaggacaatacagaaaatacttatatccaggaaaaatagaatttggtataccattggttggaacaaaaaaaaattagaaggcacgtaccatgctggagtgtttgcagaaggataaacataagatttctcatatatcgaggcagcagctgcggcagcttggagcctggcctgatgctggctcaaattaccaccagctgaaccctgagcagatgaacctgaagttcctgttcctgtttccccaatacggttaaatagttacttaaatggttatgcagaacttggacataatactagaacattataacattataacattaaatgaaccggagtatcaaatgaaccaaatggcattataacattaaagccacgcgaaaacatcaatcatgaaataaaagtgcttggattacactttcacagattattaatctaataatatagttggatagatggcatagtaggtgttcaagcaattagaagctcctctcacatgttatcttattttggaaaggttattgatgagtgcaaatatctcctgttaagtttagttgataaagagatttctttaaagtttgttaagcagtcagcaaacaatgtagcgcactgtcttgcgcggtctacttgttatatttctgatcgtattttacgagtgagcaatgctctcccggagttcgtttatgtattgatgaacggtttgatttaatgaagttgatactttatttaaaaaaaaaagaataatatagttgaagctgttaatacttctgcaaagtgattttaatacaaaaggaggaaaggtttggagagttataaggggacaactaccccaataaactatctagtatttaagtaaaatataaaatatctaaagaaaacccccaacaaataactcaccttgatgtgtatctgatcgagatacattctgtcctccagttgcacttgttgcattatcaggaggcacaactaaagctctgcaggtaggacatgtatgttgtcgctctaaccatgaacgcaagcaatgcacgtggaaaaggtgcccacaaatcaatttcttggcagaggtcatctcttcacggcaaataatgcaagttgcatcagttctgcacgtccataaataaaccataacactgtctgtaagaacgtaataatcataagaataatgcacaggagactgaactaagtctactcacgcaatgagctcttcaggtgtcgcatcaggaaatcggtcattcatatttgaagtgatctttcggtaacgaatgtaatcagctacacgaatcttaaagttcctaaacgtctcatagagctcccgtatcaagtgtagaggtactccataattcctggaaaccgaatcaaattaacgaagatattataaatgagagaaagaaagaaaaaaatatgcagcccaacattcaatggttgattcaataaaaatgagacatatgcaatgcaaatgaatggccagcaggtcagataagatatgaaacatatattacacatttttctatgtgagaaaaaagggcaatctgggaagcttgttagcacctataagaaactgtacaactaaaggttggaaataatactcacatgaaaatcacaaggaagaagcacagatacatagacaagtgaagcaagtcacgtatgagttccaaataaaatgtatagacaggcttcttctcccactgtccctccataagcatgtcactgacatagaaaacatatttgacgaatgttgacactgttgttgttgcaaggatcatgtaccttgacaaaagaagaatcaagttgtaagcattttagcactaaacaggatctctacgcaactgtatcacttcacacatgatcataagtagagaggcttcaattaaattttaatatgcgatcataagcagaaaccataatatcaaaactcatcaacaagaccacaatgcaagtcaatggataagattacttactcaaatgaaaagaaaagagaaactgaagctttccgcgactgtatcaactcatttactgaagtatacaaaaagagactgtctagcgtaagaaggaaaccaagaaaagagacaatccgaatatgagataatgttgttactgatggtgtagtctcaatgtattcaactctcttttgagccaaccaatgcaaagccttgatcaataacagagcagtaaccatggcaagaaatgaaactgaaaaatcttgccggaaaatagtgattgcgaaaagaatttccatgacctctctccatgattgctcatttagcctctcgacctcagcttctcggagggttccgaggaaaacccgcttagttaattgccacaagatacacataataaccaaacccatgttgagaagtagtaccaaactgatctttgaagtagataaataaaccatggcagggtaaaactggcctctactgttaaatgcatgataaataactgctagagtagcaaaaaaactaagccctgcatacgactgcaacctcatcattttcctatgtgagctgccacacacataaacaaccaatcaacacaattacaacccacaggcaaagggaaaattaaactctcaaatttgataatggctacacacataaatctacctatctcctggttggattggatccaaacaatacataaagcaataaaaatcaaaaaattgcccaatagattcaaatccaaagcacgtctttctttcctcttcatccatttcctatacatactaat

SEQ ID NO: 218638 - DNA, 1332 bp, Cannabis indica
tttttctttttcctttttcatacaaaaaattgattattgaaggcaatttcatcaaaacgacataacattaaatacaatctttttaggaaagatggtcattcttggggtaagattttgagtaaaaatctaaactttagtagggtagtaatatgtaaatccaagaagaagaaaagggtcttagtttctttacttaccataatcttcgataaatttcgtatggcgattgtaagcataaaggccggtaatgtgatttgatataatatgatgaaaaagatgatgaatgattattatgcaagtaataaagagaggaaaggaagtaattgtaaaggagtggttttggttgaactcaaaaaccctaacaagtgtgataatgatcatgtgaagaaggaaagggtgaggcttttagagtatagtgacccatttatgggtgaatatgaattagtagtatagtagtactgacctcctgagagtattaccatgatctcaatatggatgttttgtaagctatgcttgttggtctggtcactactgctctcaactgctctctttcttttctttttttttttttttttttgtaataaaagctgaaaactttaattaaaacaattcttgcgcaattacattactaatgttatttggaacagtgtccaccaaataactacgctcagcatataaccatgagactcgagcaagaccatgagccacacggttagtagaacgtttaacaaaacgtaaacaaacatgattcaaatctgaaattattctcttgcattctgcaatgcaacaatcgaaaagagaattagtattcaccgagctctggaaaacttgaactgttatgaggctatccgattccatagtgacatgagaaagttttgactcatttatccagcttagtacctctctctttcttttctttaattcatataaatctctgtattttagttttaatttaggggatttttaaaaattcttaataagtcatttagaataaattgtttttcttttctaagaattataacttgtagaattttgctttgatttttttagtgaaaaaatgtctcctggattttaaaaagtattacaaatgtttttttagagagaaaagcctcactaaacactattaaagagcaatacggtcagaaggggcaagaagaactacaaatattattgatagattggcatcagctcaatcgagattcttgatatagtttgaccatatgttttatatattttgagttaaatttaattcaatatatgctatagaatataaagctatatttgttctaatttttatatttgtattctaatgcatatggtgcatattagttttgt

SEQ ID NO: 218639 - DNA, 6306 bp, Cannabis indica
ttaaaaaaataataattatgtatttttaaaaaattatctaaaattcaattaataattaacaaaattatgtaaaactaaattacaaattataaattaattttttaaaagtaataacacatgtggcgttgacatggtattgatgaggcaactgtttaagcagttatgttattattttatttgccacgtgtgataaaacttaatgaaaagactaatttataatactgcgaataattcaagcacaatttttaacaagttgaaatttttttagaaaacataataatgcacaatgagaaagtttgaataatagaaaaagaaatacatattgtgaattgtgtaaccaccatctttatttttcttttgatattaccaatggataaatatttatattatattgtttagataatttatttctaattctattacaatttctctatattcatattatttaaattgctatttcgatgaagaaataagaaagaatataacatataaaattgaagaaatagtgaaaaatctttagaaaatgatgtgggatttttctaatttaggttagcggatctccatgtaaaagaattagattgtgagtaaattgtgcgtaacaaacgaacccttaatctatgattattaaaatgattcctctaattttttttctcccgctgaaatctctaaatacatatcaatatcattacctacagactattattaccatatttttaatgacagaaaatatgaaacatcattgtccaaaattattaaatagaatgtataccaacctaacaatatagaaattgcccatgtataccaacctaacaatatagaaattgcccatttcagtgagagaaaaggtgtggaaatatatgcatgttcggtaaaatttacctatcttaatacctcaatctctcaatctccagctcagctgtgttcatagggtgattctatcctattccattagtcaattgcgtactctctaagtaaaagaccaaacctttctcaaatacacacattatattttggtatgagtttcatataaaatattaaaatcataagtatattcttggcataactataaatcgaaacccacctgtttgatctaaactatggagacacaaagacaaaacaaagtacttgaacttgtttttttaatacatgatgatacaatccaaacatccttgttttcgagtttttaatcctaaaagcgattgctacaagaatgaaaaatattgggtaatagggagagattgtggtttaaataaatattaacaactttactccattgaaaccataaataagctgagcctgagcacgtttttcttttctctaaggaaaaaacaattatggaaacaccatgtcataggcaaggaatttggttagtccatattcaataataatatattaatatccatgcgccaaggaaattatttagaattagtaatatttttaatattgaaaatttcaaccacgtgatctacgcatgccattagatttggacaaatataattaaaatgtatacattaaataaggaatattaggaaaagaaaaaaaaaatattggaatatccaaaattcccaaaaaaaaatgggtttttgggtattgttcaatttcgacatttgaagtcctttttagggtaaaaccgagttaaggcaagtaaaacacgcaaaagagggcctcaagacgcttggaattgtgaaagtggaattgtaaggagaagaggttgacaccacacacacattaacattataacataaacaaacacattgattttgtaactcggcgttttcttcaggcattacctctcttccccaactctggacaatcctaaccctctacgactctttctcttttctcaattttcagcgacagaatccaaatcttgtgtcctcaacagggtctttcctctgaggtacatctactgtttcttggttccaaggcaaactcttataattttttatttatttatgtatactatattttaatttcttgttatacccacttgtatttgagcgcggtttggaaaaagttgcttgaaatttgaatgtaattttaaatctttgaaaaacccatggttcattttgttgaatcatacgtcgattgtttcttaatagtctttgaatttttgtggtatggctggttttttcacatgtgagggaacatttctttagtgggctgaatgctgcgggggtttctcaaatttcaaccttgccttttttttttgtttatttctgggtctgcaatcaaattgataaacaatctttattttgattctttcctttttggttggtgttttggaaatgtttctgttcatatttgtgtcacatggtacaaatgcgtttaggtggaaccaaattggaaacttgggaagtggatcatgcgttaatggtggtggtctttgtctccaatgacttgtttaattctttattatggaattataatttaagttctgacttctgagacatgaaattgagttatcacagatccgttattggattatacttagagggtgttttgaatgttgattaaggatttgatgctttgtctggaaaattggcagttattagctgcctctagtttagttacttcttcagaattttgggacaaccattagggtaactttagtattatatatgagcttctgtattggactttaagtggtcttgaatgagaaggtttgtggacctgttagattgagatggacggaaaatatgaagttcttgatttctagtgagaatagcatgatgctttagagcatcagaagcaggcaaagtcagtgctatgccatcctcttcaaatttatatgtcgtgctgctatcccttggtattgaatgtattgcaaagaggggtggtattatttgtttatgtttttgaagttgatgaaaagtatggattcttatgctaacagtaacagtcccattgagctaatataacattctcagttggaatttttatttattttcactgtagtttcttttgaattgcttcccttatgtgcttaaatggatctttgcaagctctttttttattcataagtagcataataatcaaaataagatattttgaatagaagacatttggaaatgtagtccacattcgatcattaattttcttcaacaattacacaatctgttgatagaacttgcattatattaggagtctacctctctttataagctaaattgcacaatactatagttagtatagaagtgaatatgttgcctatgatggtgaagaatgtattgcattatttggcatatctgtttggtactttgcagtttgtatagtgatgactattattcttttagatctctttggacatgcaatagcactaaaccattcagtttgctatctttgtactggaattttagcttctagatgttctgtagtatttccattgaataattattctaagtgttactgactgcttttctgttttctgcatttgccaaatgctgcatccagggtagcaacaactctctagtgaagaatcattagaaacagatgtaactgtgattattatgtctgaactaattgaaggtctccctgacgcggttgctctcaggtgtcttgcacgggtccccttctttctccatcccaagttggagcttgtttctcgttcctggaaagctgtcattcgtagtcctgaactgtttaaagctcgacaggaagttggttcaactgaagatcttctatgtgtgtgtgctttttacccagaaaatttatggcagctttttgaccctcttcgagacctttggattacactccctatcctcccctcaaaaatcaggcacctttctcactttggtgctgtctctactgctggaaagctgtttgtacttggtggtggtagtgatgctgttgatccacagactggtgatcaagatgggatatttgcaactaatgaggtttggtcatatgaccccataattcgagagtggtctccacgtgcgtcaatgcttgttccacgggccatgtttgcttgctgcgttttggatgggaagattgttgttgtaggtggtttcactagttgtaggaaatcaatatctcaggcagaaatgtatgaccctgacaaggatgtttgggtttcaattcctgatcttcatcgcactcacaattcagcatgctcgggaatagtgattgggggaaagcttcatgttttacacaagggtttatcaacagttcaagtcttggatagtaaggggcttgagtggactgttgaggactatcattggctccagggtccaatggcagttatccaggattcactctacgttatgagtcatggatcaatatccaaacaggatggaaatgttagcaaggtagtggtgtcagtgtctgattttcgccggaggatcagttgtgcaatgactggcctgcgggatgagatttatgtgatcggaggcgtcattggtcctgaccagtggaactgtgatattaggccaatgtctgatgttgatgtcctgatgatgtgtggtgaacgaccaacttggcgcaaggcggctccaatgacacagtgtcgtggaactattcttggctgtacacagttgagaatttagaccttactttgttctccctgggccactgctgtctggttgtgtaactttacatttgtcgaggaattggtcatcttgctggctaacttgtttatttgtaagccatgatgatgtatggccttgtttcttgtagctcttctttagcaaaggtgatacttaatccccagtaacattgacaggggaggggcaccatgttaagagtatatgaattttagtgttatctcatggtggaagagttttttttttttttctaatatataaactagtaaacaatctgctatttaaattatatataaaaaataaattaaaaataattcagtaataaaattttattgaattttagccataataatttttattttatttatttattgaataatgagaagctttctttattaggaagattttatgacattttacatgacttcatagttcatagtatgagtattatataataggatgaatcacaattaaaaaaaaactaaatttatttacatttatttaaatttaaatataatatttacattaaaaaaatcacaatttttggatttagttctttaaaaatgttatgaacatttttattataaaaaagttctaatatactaatgtttcctcaaatattacattatattttgataagggaattcactgatcgttgataagttgtctcgttgttcttcaattcgaataacatgactaggtaacaatacatccccttatcagtatggaagcttgtgtattattagtttgttacatgtattttgatctggttgtacccataataggtatccatgaaggataacagctcatgcccggaaatcgattgttagtaaaggaaaatagtctttgggacaagctttattcaaatctgtgaagtctatgaagatccaccaagtttcgttgggcttcaggattaggccggggttcgcctaccactttgggtagtacacattgcggatgaaaatatttgctaacgtcttgtccacctatttctttaatgccttctcttttatggggtcgaagggacatcaattatgttgcaccgcatgcatatctttgttcacattcaacaaatgacaaattttattcgggtcaatcccaatcatatcttcgtgacaccatgctaagacatctagggactccttgagggtgcttatgatttcttctctacattcgggatcaaggcttttcctaacgcggataactttagtcgggtcttgatcacaaatttaaatctcttcagtttcttccataggcttcaatactttctcgtcccctatacatggatctagctcatcctattgactacaaggaccaacaactttgtagctacattataacattctctagcctctttctagtccccacaaaaggttcccactcctgcacattaggttggaattgaggcacaagtgcggatcgaggcacaaccccaaaatccaccgacgctaactgttctaggatggtgttgtaggcagtccgacagtcaaaaataacaaaagtgttgtatatgaaggtgccctgaggggtatccggacacagagtgatgggaaatcacacttttcccatggggatcaaagaaactccattaaacctcgtaagttgcgagccactgggggataattcttgatctgtgaggccgatggcaaagaatgcatttttgaaaaatatattcaatgagctcccgctatcaattaagatgcgggacaccaccttattttctatgggtgattcaatgaccaactgatcatgatgaggaaaa

SEQ ID NO: 218640 - DNA, 4539 bp, Cannabis indica
ttaatcccttatagctctctaaattattattatatcggttgccgtaaacctcagtcaactgtgtccaactgaagtttgatggagctatttcagttgatacacaaggtagaagtggaagaataacattgatttggaggaataaggatgatgttacactacttgggtataatcaagattatattgatgttcaaatcaattctgctgaaggcaacatctggcgtcttacgggttgttatggagaacccagtagaagcttgaggactcgaacctggaacttgctgcacaatctctcaggtgacaacaatttaccatggtgtgttattggggatcttaataatgtactgtcacaggaagataaaagaggagggaccctttatcctagctggctcattgaggggttcaaccaagcgttattggattgtggtttatgtgatcttaatctctcaggttatccctatacttgggagaaagggagaggctcttcgaattagatagaagtgaggttggattgtgctcctgtgtctgatagttggctcaacattttcaacagtgcaaaacttttaaatttggaggtgactagctctgaccattgtccaatcctacttgaacccactgtcaaaaactttaactctgaagttaaacactttagtttcgagaattcttggcttagagagccattatgtatccaaacggttaaagatagttgggaggttaataattcacttgctattatggagaagattgctctttttggtcaagatctagccgagtggggtaagaactatactgggaattttaaacaaaggatcaactactggaagaagcagattgctcattacaagggtggtagagatgataattccatagtagcttttaagaatgctgaaaaaggagctgttcgaagtatatgcaaaaagagaggttttttggtgccaaaggtcgaaacaacttttgcttcgtgaaggtgatcataacagcaggtattttcatgctgcagcaacaagccgaaaaagaaataatgctattactataggctgcagaattctgcaggtgattggtgtgattggaattcgggcttgtctgaagttattaagtgctattttgaagacttagtttgctcctcaaatgtcaatatagcaggtgtcattgatgatattcctagttctgtaactcctcagtaaaatgacaattttcttgcaaatgtcacagaggaagaaattcgaaaggctctattccaaatacatcttgacaaatcgccaggacccgatggcatgactccaggatttttccaaaaatgttggcacattgtgaagcaagatgtatgctctgttgtaaggagttttttctctgatggtacaattcctactggtctaaaccgcacacatattatccttgttcctaagaagaaaagcccgagcaatatgggggatttgagacccatctcattatgcaatgttctatacaagatcatatctaaagtcttatctaatcgtctaaaggtagtgcttccacatctgatctcagacactcgaagcgcttttgtcccaggcagattcatgatagacaatataatgatttcttacgaagtcaggcactatctaaaacgcaaaagatgaggaaaagaaggcttcatggctttgaaactcgatttcagtaaagcatatgacagagttgaatggccttttcttgaagcggtattgcttagaatggggttcgatcctaactggattttccttgtgcttcaatgtattacttcggctgagtataaggtcattcataatgggttataggccctattattccatctaggggcattcgacaaggtgaccctttgtcctcttatttgtttttaatttgtgctgaagctttctcatcattaattaaacattatgaggtttcacatcagatcaaaggcattagagttgctaatggtgctccttttatctcacacatgttgtttgcggatgatagttatgttttttgtcgagccaatgaaaatgactctgcaaaggtgctaactttactaaaggactttgaaatggcctctagacagatggtaaacttctcaaaatcatctgtgttctttagtgttaacactcaactagctgaccgcatgcaaatctgtcaaaaaatgggcattattgaggcagatgactctagcctttacttggggttaccctgcatcatcagtagaaacaagaaggcagtttttggttttctcaaaaataaaatgtgcaaaaagattcaaagctgggagggtagattcttaccaaattggaaaagaactcttactaaaaacagttgctgaagctctccctaatcatgctatgtcagtgtttctcttgcctttaaatacttgcaaatcattggagaatgctatgagtaattactggtggaaatcatccaaacaaagtagtggtgtttcttggatgagatggaaaaaactttgcaagcataagagtaatggagatcttggctttaaagatttaagagattacaacattgctcttcttggtaagcaggcatggagactacttgtaaatgataatgctttaatcagcaaagttttcaaggcaaggtattttgctactggttctttcttgacatcttctctaggaaataatcccagctctgtggggagaagcatctttgaaactaagcaacttatgcttgctggtgtgagaaaaagtattgcaagaggaattgaaacctctattttggaagatccgtggcttcctgatattgcagacccttatgttcataatgctcatcctagccttgtgaatcagaaggtctcttccttaatttgcatcgatagacatcaatgggatgaagagatattagaagacatgtttgatgctagagatcgcaacttaatcctcagcattcctctacctaaaactattcagcaggattgctggacttggagtaaagaaaagacttggatttacacggttaaaagtgcatacagatggcttcaaaatcacgatgttgctactggtttggactctgatttttggacagctttttggaagattaatgtccagctgaaagtattgcattttggatggagagctttaactggaactttggccaccaaagtccaactcaattctaagcatgtgcctattactcaaaattgtactttctgcaatattacagccgaatcaattcagcacattttggtggattgttcctttgccaggtcctattgccataggtcatctgtcaattttagtccacctctcaaatgccattctatgagtggtttcaacatgccatgaagatcaataatgcagtgcaagttgaagaagctttaatggtggtttgggcaatatggaatgctcgaaataagctactttggaatcagaaaaacacaatagctttggatgtggttctgtcagcaagatctaatctttatcaatggcaaagtgctcaacaaaatagatttgatcctcttatatctccttttgagataggtaaagaggaagagcattggactaaactagttgcaaatatggtgaagataaatgttgatggagcgattgaagcttacaactcttttgaatttggttttattgcccgtgacagctctggagctattattgaagctgttacttcaagcaaaaccagtagcgcttcccctgagattgttgaactaatcggaattaaggatgtcctcagtgggataaaaaccaaaggatcgagttatgtcgtacttgaaaccgactgtcttatggtagttcaagctatccacaacaacacgtttcttccatctacattcgggatgttggtccacgactgtcaacatcttatatctcagttgtctaatgttaatttgtcttttactaagcgttctgctaataaggccgcatatttccttgcgcgtagctcttgttatttttcagatcgatcgcacatgctagaaattcaccttctgagttgaacattgtaatggttgatctcaattattaataaagcatctctttcattcaaaaacaaaaaagcctcacacggccatgggccaccaccacaactacgtacgtacccactgatattgatttgggagatagagatttaaacttaggtgaaaaaatatgtatatatgcttatgagttatatatatgaccacaaccataggagatacattgtactatttatattcatatttgtacatgttcaagatattttgcatatgttattcaagaaaaaagaaattttgcatgtgtaaacatctcctcgccacaaaaattatataaatatatttatatattatatataacgataaaaaatattaattagacttatatatgtacctatgattacgtttacataatttttaaaattagtatttaaaataattatttatagcaagtgagaaatgtcagaagtgtaaaatatatatgaaaaaatattaaaaaatattcttcaagctgattaaaataagaattataattaaatttttaaataaatgataaataaaaatattgagataattatgagttaccaaataaagcgtaaaatatatttggtgaaaat

SEQ ID NO: 218641 - DNA, 5996 bp, Cannabis indica
atgggtgtgggattttttgagaggggtaattttgggatttaggtaagtaggcatatttttcatagtataaatgattaggttcaaaaaaaaaatttgaaaacttttagatagaaaatcaaattccccaaaaatctaaaactagtgtcttttcatcaatcaacaaggatttaatttggccattaatccaaaagtggaaaagaaaaaattattgattataaaagggtcctagctagctagcaatttagcaaatataagtggtgagcactgtgttaattaaaagcctaatcatgtgtccctactaatactatatatataggtaataaaggctatatttttttccctttaaattattgtttttgacatgagaagaatataatttgatatgatttattagtggatgtcaataacaaaaaaataaaaaggaaaaaaaaatggtaggggaccatacatatttttgtgattgaagtttcatgaatcatgcttcaaccaagtcattcaagtacatatatcatgaatagatataaatatatatatcaactttaatttaactaataataacataaatatatatagatgtagttaagaaattacaaggatatattgttccaattgcctagctatgtagtgagattaattaatcaaaaccagagtaataaccaactttgaacaaaagttattggtttcatgattattaataatcagtgatttaatgacctaataaatatgtttctgtaactcatgtacacaaaaaccctaattagtttactagggatccgaaaacacaatattaagaatgaatcaaatttttctggaaggattaaaaacatagaaatatgaatagaaatagaaaaaaagtaatcaaatttaaaatgcatttttttttatttctctttttgtattagaactctgattctttctatatcaaaataaaataaaatatactgcacaatgacattttaatactttaaaatataaccaaacaaaaaataagataaaaattaattattttcaatatttcttccatttcattatttctaaccatactcacctaatatatcacaatatctacaatcacggcggttcagaaataactttttaatatttaaaaattcagtatataacatggtgtgtatatatacatataatttttcttgtattctaatgtaattatatatatatagatcatactctatatatattcacgttgaaatatcttttatatatattacaggtaacaacatattaggaactacagggttatgatactagaataaaaaacatatgtcacaattaaaaaatgaatatatttcttcctttgaaaattaattaaaatctgtgataattatttagaatattttcagaaaaatgagccaacagctcattaagaaaaaatctagaggatcagctgtgagtactaagttcatattgataaaatattaatcctaactaaattattacatcattaatgataattacgtacgtacgtaaacgtaatactatgtttcactaattaatactaattagtgaccttttcctttttgataaattaaaattttcacttcttagttccaccacttaaaatatgacatatatatttacaaggaaatatatgtatttatttaattatataaatagtttatatttatgacaaaaaacaggtcatctaaaaatgagccctatacataatttggtttatacaaactccctagtcttttcacacttttggtaacttaaatcaacaatatttaatatcgattttccttttcattttatttttttcctttaataatttatcacctatttttttctttgacttgagactaaataatcagcctaaataaatatacaccattaattagaatccacctactattaatatatataattaataaagagaatctctcctattcctatacatatatataggtctatcaatatatagcacaataatcaatgcaaacaaaaattatagccatatattgcagaaactatagctactaccacatgtttcaacagtagtttcaaaagatacacactcagaattaattattaaatcatcacataattaattgctgaataaatactcaaaattttatttacaattttcctcaaattttgtcacatatatttctttttgaatttataaaaatataatttagatataattcatattacatgtttttatttatgtcttccatgtatcctaattaaagaaaaattacattttttttttattttccttacaaactcaaaattttatttatttacttatgtgattatttacttttaaatatcaaatatataaataaataaataaaattagtagtacatacctcttcttgcatgtaaaggagcttagcttttttatgctgttgttgttgatgatgttctcctccaatattactaataatctcataattattagaaccacccgaacccgatccagaacccgaaataccaacagaaacattatcagtagtagtagtagttctagcattgatgataggatgatcttgattggacccacaacaaaacccatccaacaattgctgggcaggtcttaaaaatttggaactctttaaaattgtagcgtaacccgtaaacggcccgagtggacccgaattcctatacgggtttgaaatggaacccatataagcagaagaagaagaagaagaagtagaagatgataataatattttattagtttgatcatgatgaggtggaggaggatttgatgaagaggatagtgaaagagaaagaccttgtaaattattattattaggcaataatgtggtagttattgattggttattattattagggaaatttgggagaagagcaagctcgtttcctgacatgaccattgcctccaagtagttattaataacctgatcacctgaatttggttggttgttattattattcttggaaaaactgatcatttctgaggaaagaaaagttgggtcgaaattgaaatgttgttgttgttgatgatgatgaagttggtttgattgttgaactcttaatttgtcacgtctactttgttgtgggacatgagataattgatcagtgttattacccctactaaacaaatcaccaccacttattctctccataatattattcaatatcctctataacagaaaaccaaacaaacaacatgttagttctctctatatatatatatattatataaaagaccaattaaatgaacatgtacatacaggaaataaatggtatatagttatgtttggttatatttatcatgactattaataaatttttattaattattacaaaaataatgtttttcactcttaatttcctctctatctcacgtaaaactctagaattaaaaaaaccctagctagtatatatataaatatacagtaaacatattcttgaaaaccctaatatttctgcagctttctctcttataaatagaaaaatattaattctaatattcatatatttctaattctattccaaaagaataacactttccttgtcgatatatatatatatatattagaattgaaatcaagactgacagagactatacaattatatatatatatagatccatatataaaagtcttgtatgtgctatatatataattttttttcacacacacacagttatcagtcgtttcaataacagtttttctttttttagataaaattaaactagaagagagacacaacagtactactacataccaaattcaaattataaaaattataacaaaaatgaaaaaatattcagtaataataatatattataaattcacacatacaaaaataaaaataaataaaacatttaatatattttaattttaccggattattcttggatcgatcttaattctgagacaaaccctttgtaactgatcggccgggatcggattatttcaccggagaagtttcggcaatgaaccgtagagagagagagagtttaatataaggtaataaagatgactatagtgctttctctctctatatatatctctatatagctatatagaccacaattattgggaagcaaaagtagccgttaccgttaccgttacaacatggaatctgccgttagagttaacggagtgtaaacgttccgtgaattaaattttggttgcgggtggttcccgataactgaaactgacgtcattaatttgatttttattaataataaaagaagaagaagagggcacatgcggtggttgaaagaaacaggcttggtaatgggatttaattacgaaaatgccactgagttgtgaggctgatgacgtagcagcttatgtaaattagagtactaaattgagtgttttgtacggtttagattacagttggcggaaaacccacctagtaaatttgtctacaatagataactcattattatacactaaaaaaaaatagataatttattatttattaattaaaaaaataaatttactctaaatttattattagtaaagggaaatttatcacttaaaatgagtgtataaattaatcaaatttaattataatttaccgatctaattacaattgactgtcaagattgatgagtattcaattataatcgaattggatttgatgttacttttgtattagatcgcaacatataattaaattaattagtatttttatttagtttaaattaataattaaattttatgttgttacatacataaattatatatattaaaattaaattcagaatagctacatgcagatgatatttgtttgatttgtgagcaagatgctgaatccatgcaacatctattctttgattgcccatttagtagaagatgttaatttggaggagatcaaattttggttaggatggagaaccttgagtacttcattaccccaaatcttgccatccatcaagagatcaaaatagtcagatttcaagagataagtggttgccacggttgtagctgctacagtttacaatatttggaggagtcgaaacaccatgttttgggacaaatgtaaaatctcgctgcctatgttaatgctccgcattcggaatgaggtaaaagttagaattgtaacaattttgcctaaaaaaatgaagcaaaaggacttggaatggtttgagcaattgtaagtttagcacaaatatttttcacaggttgtatagattacaaaggtcgtcctcgcgctaagttgtaaatttgatttgaagcaatacaatgattctaatttctcaaaaaaaaaaaaattaacattataattttactctaatttttttggatacatatcaaatctaaaatattgattaatctggtctgatccaaaaaaaaaatatttggtttaaaatattagataaacttgatttttttttaaaataagataaacttgaattaaaccaatagatataaatgaaaaacattcaacgcgtaaaactgatccagtcaaatatccaatggatgttggatcaattagttaattaactataattaattagatctaattggatgataaaatctaatatccaatatataattggatcacagctggatatgcctaacaacaacattggatgtagtccaatgaacaacccttcttttatatggcacttatagaattcggaagcacagagtcagtcctgaaatttagtgggctataagaaaaaagattaggccatgatttagtaaaaatgtgttatttatcaaaatcattaaaaatatataattttaaaatgagaaaaaaaaaattaaggcccctggcacaggcctaggtcatctatgccagggtcaagcctagtaatgtatatgaggttcaatcctaaaatcaattactaataagatgagtagttcattcatcttatatatacagtagaacctctatttaagaatacacttgggaccaagtaaattatattctaattgggaggttataactaaatagagttacactaaaaaaaaaaaaattaaaaaaccaaaaaaatatcaatgtaacaataataacaataaataatcattaatactata

SEQ ID NO: 218642 - DNA, 5659 bp, Cannabis indica
aattccgcctaacatgttttttttttttttgtgacaatagtagcattcaacttctcccctagagtgtgagttagcgcgattgtctcttttgtcatcatatcttcctcttgatgtaatcctaccccgacaccgacttgactctaaccttgtcaaaagagcttgatcaatatcaaacatactacttagttgcttgatactatctatctctaaaagagtagttgacaccacatccgcggttaaagtaacatctccaaccagaagtttagtcactagtatctcatatgattttagtaaagaggtcaacaaaataatagttgtatcctctccatcaattttgatcaccacacttaacaattgagttatatacttattaaaattatttatatgatacctaacatcatttctttggatcatcttcaactcttataattccttattcaaatataatctattttatttgaaatttttacatagcttttctaacttttttaataactcgagtggatatgttacgttcaatctgcagtgtctttaagagttcttgttgtaccaacacatttttaaccgtaccttgccataaattaaaattattatttccatcgacaagctcaatctcaaattttatggaaaacatcacccttaatattttcggtgtaaattttaacgctgtccctagataccacttgttggaaaaaattaccaaactctacgaaagagatattttcctttgacttcaaaattacatataatcactatctcaatctatacacctaaatcccaatgcactttgctttttccttactctcactcttaccacactataaactcactcacttttctatttacaactcactatttttctcccacacctctctctctttcacaaagactaaaacttaggacaccaaactctctttcacacaatttaatacccaaaatgttatagcttcataaaatataaaaacaaaattaattttagtcaaattccaacataagctaccttatttttgagttgagagagttcattaaggttctgtttgaagagagtaatgacagctttgttaatggagaaatgatttttccgcgaaagagattcaaaaagatcgaaactctccttgaccgtgggtgatgaagatggaaccaaatctgggccttgttgaagcttttccttggcaaaagatggtgaagtagcaaaagctattaaattaagctttcccactcggtgttcttcgaatttgagaccctgaaacgatgaaggaattccattgcaaagctctataatctttttccatgattgttgtgggaaatcagaaccaaccaccagattttccatttctgaaccactgctaaatctggaaatcaacaattaatacccaaaaaaaattataaaataattaaaaattgtgaccaaataccataaaaagaagattatgaaaactgaattgggcaatattcagaacgccccactgctatttagtgttataggtgtttcttagcatttttctatgaattaagtaagccattgactaagtcagtcaacgcaggaagtaggaaccttctaatataaaaatatataacactctacggttccgatttcttttctccttccgaagcaagtaaggatagaattaaaaaaaaaaagtctccatattaggtctctttttattcaataaaaaatcgctacttcattaaatatttgtatatcttcttaggctgcaaagtaagtgattaattttcattcttcgaagtggtgctttttcgaaactctgtgccatagacgggatattctatcgtgcataacaaaatgcaaaaattgattgttttcttttgttagtcttagtttatggtggtaggattacaaagtctaatcataaatgtctatttgtttaccaagaaaacagtaaacatactaaaaaaaattacagctcattgatcataagaattacttgatatgtctacttggaaaaatagatgatcaaaataataacttgactcaaaaaatgtgagttttgagcttcatgtaacttctagtttagaaatttcccttggcataatcttcatacttgtgagtattcatgaagttagtgaggggtgagttatagttccttcccataacttccttgtaatctttccaccaaaggctaaaactactacctttcaagaatatctcaggtgaaactgcatagtttttcagtaaatcaaatacataatcctcaaacagcttcaacttttctttgcaagattttttctcttcaacacttgatgattctgtttccttcaagagtctgcatgtaaggatagactcctctacctttgcccaaaagcaagaatcttcagtgagactatcatttatcagtttctttttcttgtcattcggggtatttttctgttccttcgatcccttctgccattgctccaagaggatgaggtgtctatctcttccttcctcttcatagtttcttccatccttcttgtagtacttggcgatatgaagtggttccaccattcttctgtaatttgttgcagcgaaaaggaatcgtttcgaaccaaacaatcctttatggggtttcttctcctcttcttcaaccatgtctatccaatagtttgtaagttttttgcgaaattcttcaacatccatatcagctttgaacagttttttcttgtagctatcatagtatccaatttctttatccttagcccaatatttgtaccattcaatttgtgccatatattttttttattgcaggcaatttcttcaacataatcaaagacttgttccttcccatcaagaactttctttgctgtttttccatcttctcagctagctcatctatcttcagctgattatcatgctgtcaaaaacagaaaacagttcagaaacagaatccaattttttcaactgtaaaaaaaacatgattggactagtttagttacctggggttgtgttgttgtgatccctatggcagagagctgtgtgataatgcttgccttgaaaggatttgaggctgagtctgcatcagagttgagtttgcacaaggccttactcctaaggcggtttaaaattttctcataatcgaacaaatgctgcatttcttgaaaaggatttcgatttgcagcctcctgtgagggcgcagtttccaccaacaaatgtgaaatggtttcgggatcctcaaaacatgaacaccctgattcagaacacaaaagaaatgtaccaaatggtttgaggtctttgaagatcctaggcacgggatctttgtctgaggccaagtgcaggaagtaagaattccatgagaatttggccagtgtgttttgcaggaaactgtccccaataaggggtgagccaaaagtgatacaaagtagtttgcgcttgtcccgatcctttgtaaagacaccgctttctaacagcaacaaggtgaagagcgaggcgattgagcctcccagagagcagccagtgacaattagtggcatggaagggtcaatctgtatttggagtatgaaagttaagaagctaaagccaaaccagttatcttatcacgtgtcaattgaaaacaatcaagaggtgggtgaaaaccacaaaatgtaccaggcacagcaggagctcacagattatggttcaatagattcactatttttatttagagtaaatagcggcataaatactcaaacttttgagttcataaatggcatcaattcaataatttttttagaggcgtaagtaccaaatatttataaaattataattttcttctaagacccagattctaaattgtttgatttggacataaacatgtagtataagcttctttcaaatcttgttttaacaaattcaaaatagagttgtactgataaaattgaaaaaaaattacaattttataaacatcgaatacttattatgttgctaaaaagatcattagatttagctacttaaccaactatttacccttttgtttatgtctaatttggcaaaacacactacattacatgaaaataaactatcacttttccaacagcaaaaaaatcaacaaattataaatcagtgatatttttcatgatcgtgctagttcttgatcataaaaaagaagtaaaattcaaaggaagtggggcaagtgaaaggtaccttatttttgagttgagaaagttccttaaggtactggttgaagagagtaatggcagcttcattaatggagaaatgtgttttctgagtaagagattcaaaaagatcaaaactttcgttgactgttggtgatgaagatggaaccaaatttgagccttgttgaagcttttccttggcaaaagatggtgaagtagcaaaagctataatggtaaactttcccacttggtatttttcgaatttgagaccctgaaacgatgaagaaattccattggaaagctccataatcttcttccaagattgttgggggaaatcagaacccaccaccagatttgccatttctgaaccactgctaaatctggaaatcaatcaatatttaataccccaaaaaataaaaagtaagaatttttatgttctcaacttaattgtgaacaaatcccatgaaaaaaacattaaaacaaatcgaattgggcagtaaaagattcttacagacactgattcatctttaagtctgacccttttgagctctgcctagaaacaaagctagatagataaatggtgtgattattggtgtgtatggaataaagaatgagttgagccaataattcatcataaaggaagccattgattaagtcagtcaacgttcaaactatagaggaatcttctaatgtaaatacatttaatgttatggctcttgcaaaattgataattcttcaaagctttttccattttttctccttcggaaacaagcaaagaagtactagaataaatttctcaaatttcattatttttaaaacaatacattatgtggtactaatgcaatgttaatatgcgtaataatttattaaattagatttcacgtattataatgtccatgaccacacaaagaattttttattttttttttctgtttttagacaagaaggaactttcctttttttaatgcaataaagacttttataacattttttttagttttaaaattaaaaaattcaagagacaaaatgtaaaattttatttattctttagagtataagaaaaacttgtactacaatagaccccaatccattttagtatttatgaggattttttgttgtaatatttaagacagtttgtaaattttattaaaaaaatttaataatttacaaaaacaaaaataaaatttaaacaattatttactacaaaaaataaatcacttatctaataaaatatttaaatttatttaacactgtaaataatttaaattttttcaaaaaatatacaaataatcttaaataattacaatacacacaattatataaaataaaaataataaataaaaaaaaaactcctcaataataaaataaagaatctactaaaatactattttaatttttatttaatatcttttcatataagtcaccgacaactaactatacatagttttaccgtacatggaatattaacactataataaacaacttctattttctttcaaaaaaaaagcttctatctcttaacactaaatatgatttatagttgctaagggagcgcctcgtgtgtcacata

SEQ ID NO: 218643 - DNA, 3002 bp, Cannabis indica
gagagcgctcaattgaatttgttttcctgcattgaatgatcaatattataaaaaaggtgaaaacagaaaagctaatggaacccaaaagttttcttccatattcattgacaagtgttcaatgtaatacatagttgaaatttgaagaaaaaaaaacttgtttggcagtacatgagatgagagtgcacctcacatccaaaccatcttagtaggctctaatgtgggggaagtttaatagaattccaattaggcacgtggttatatagttgataattgtcgtgtgagagctcaactaccatgctaatcttttatttattatctaaaatgacaaaatatctctgccaacagaaataaaatttccaacagtaccattatgggggaataaaaaaataaaacaaacgcgtaggctaccattgttaagcttattggggatcgagaaatacaggatttaaacaaatccacgagtcattttttttattactccacgaattgaaatgaaactgaaattaatttggagataagccatacttcattgttcgtaagtcccaaaactgaagtgaagattcactagtcgccgcaattgcattcacatcatgtggatcccatgctcctccagataagtggtgcataccagctgattcttgtgattgtacctactaatcacaaaattatgcgaacaggtaaagttaatcataattttgagctcaaaataaattcagttctaaaagtttattcgtgtcatttattttaattttttttttactaggacccctgcccagccctcctaatatgtttggacacgggaaactataataatagctatgtaaatacccagaagagactcgaactaaccctcttgggtcatttgttttgaacttttacatgagatgataatgtgggaacgccaagaaagccagtggtctaagaaaaaatatatttacaatacgttcctttcataaaaattatacatcaaatgaaattttaaagcagcaaggacaagtagtatggcaactagttgctctaccataattcttagtcattaaccccaatttaggtttaatagtacatcccaatagtgggcaattatacttgttcaatttctctctctcaacttggatcccgtgaggcagaccttagagcagtgttgaaatagaaatggaaaactgtttttgcttagccaatgaatatatgggataacaaaagtgtaagttcatcaaattattaatgttcagcttttaagttccataagactgtacctggatagcttttcttggcatatctaagctccataagaaaagattttcctcattaatacttatcagcttatcatgccttccagatggccaccaaagaatgctgttcatagtgtagatagccacatatagcacataaggtaagctctaaaacattcaacaaagataaatgtttgttcatttcaacaggaaaacatactgaatctatttataactacataaatgaatcatatacattattgtgtcattaaagcgggccttatccatttcccggataattgtcaaatctaaaataccattaagaaaaatagggataatcaaactcaccacttaatcttaccaacattgtccccaattggggtaattttttccaactgaggggaattcagctcgccatataactcgggtatctgccatattgcagccccatacgattcgccttgaaaaaaataatgaaatgcaaatcaaacgagtgaccttatttaattacttttggtaaatacgtacggaccactcgatcagaagcataacacaaatatgggaagttattaagtgaaaacaaatcaaaatcctaaagccctattaattaccagtaaagtagacagtggagaagattcgctgatcgaagggacaagaagcgagatcccagatctcgtttgggtgcgaaaacaatccctcgcatactagttcagttcctccggacgaaatccggatcaaatggacctgtaaaccgaactcctttacagtcagatccaacaataacgatcaaaatcagaacaagaactgattttagagaacaaaaacctcattttcttctttcagactgagagtggcggtgagaaagctcgtgtgatctgtatcagctttcacatcggatatgcacctagcctgggaaatgagaattgttttgagagtactctctaaaaaaaagggaaaaagagagagaagggagaagaaatgtaagggtttggagggttcaaggacctgatatttcagaccatatccgatgcctgacgaacctccttgcattggttcccttccactacctaattccgtttcacgatctccgggcctctgctgtatcgagagagagagagagagaactcacacacacacgcacttcatagccgcgtttctgcgatggattggattgattgtttgtttcttgaacagttgaatgattgtaacggtctcttacttactcctccctcgttcgtttcgctcatataatggatcacgaacatttgggccgggcctaattctaacaaaaaaaaatctttattaattaaccccttctaattttatatttaattgaaacatacctcttttatatgtactatatccaaaatacattaacagagtcacatggagagtatattgagatgacagtgacaaaaataataaagtatttaaaaaaagaggtaaaaatgctagattttaaaaaatagagtaaaaataaaagaagataatataaaaagagaattttcataaatatgggaattgagagtatagtttacttttttatggcataaataaatgacactataagcttatgggttttttttttatttttttacatttatatggttttttttatgctatatttttgtaaaaaaagatagaaattccatatttgtaaaacaacaataagttttgccagaaaaattaccggcaccgggaaatttgccggaaaagtcaccggaaaactcaataccgccggaaaagtcaactgaaaagtcactgaaaaagtca

SEQ ID NO: 218644 - DNA, 4836 bp, Cannabis indica
actaatcaataaataattaattttgtgttttggttatagattcttacgaaggttttgaaagagaaaaggtgaaagaatggtacttttttagcccgagagtacgcaaaaatggaattcgtgctactcgaaaagcacacttaggcttttggagaatgtctcaatcagcaaagccaatccaacataatggcgtagacattggcctaaaaagtgttctcaatttttatatggggagcaataaaaagagcatcaagacagaatggattatgcacgagtacataataatcgacgacaataacgattcgaataatagtaaaaatgattttgctttgtgcaaaatatacaaaaatccaaagaaatataaaagtaataaagatgaggagcagcaacgaggagctcaaaatcaacaagaagaactacaaacaaccgatgaacaacaacaatattatcatcatcaacaatcacaaccgcaactgcaatcacaaccattcatatgcaatgatcattatcaaccgcaaccacaatcagaatcgtgttcatacaataatgtttataatcaaccacaatcacagccctatacaaatgaagaactcctttcgcacaacgatcattatcaattacaattacaacagcaacaacaaccgcaaacacatacattcatacaacaaagtgatgaagaatccctttcacacaatggtcaatatcaactacaacaacaacacttgctcatacaacaaagtgacctgagtacaaatgaagaactcctttcacacaatgatcattatcaattacaatcacaacagcaacagcaaccagaaacacagacatttatacaacaaagtgatgaagaatccttttcacgcaatggtcaatatcaactacagcaacagcaattgctcatacaacacagtgaccagagtacaaatgaagaactcctttcccacaatggtgattatcaattacaattacaacagcaacaacaaccagaaatacagatatttatacaacaaaatgatgaagaattccttttacgcaatgttgaatatcaactacaacaacaaccacagttcatacaacaaagtgaccagagtacaaatgaagaactcttttttcacaacggtgattatcaatcacaattacatcagcaactgcaactgcaaccacaaacacagacattcatacagcaaagcgatgaagaatccctttcacacaatgatcaatatcaaccacaacaacaattgcagttcatacaacaagatgatcagagtactaacgaagatgaatcccttttatattatggttatgatcccattagtttgttttctactggacaatacctcacttaagtaaaaagaaaaaaaaaattgtagctcgatcgagtgtaattccaatttgagcgtgtatgtaattctaatcagtcaatctttcagtagttatttttattttgttccataaattaattttattgttaaattaatgtataaatatatatatatatataaatattcttatttcctgtttaatattactcatagtattgctcaagtccaaaatcaaaagtaatttatacgtaatatttttttttttgctattaagagaatgaattacagagctaagtatttatacttaagcttttacaacttaacagtaacaagttgttactgaaaacagttacaaaatagtaacagctatatataaacactaactacttaactaactaatttcttttcttggtttaatacaactactactacttctacatttaattgtatgaaacttcgatctgtaagactgccttaaaattgaattgtttcacctgattcaagatttcctttcaaaaaaaaataacatggattaaagattatcctcaaagctttgctcaactctcttttaaaccttcttgtagtaattgataaataaataaataaacagaggaataaaaactgacccttctagtatgttgccatgtcaaatgctgaaccaaaaacagttacagcaatcaagaacaataacaacttgaacaaacaatcaaaaaacaaaaagagaaatcaaaaaaacgagaaattccgagctatatacactgctcattgagtctaagatgctgaccatcattgtaattaaatctcacattggtgttcccttgggcaatcacacaagggacaattaacaaccctccacacacacacaagaagagttgaacagaaaagagaagagagaggaagagagttcggaattgtgaggctcaaattgattgcttacaccaaatattgtgtacccttttcaacatattttcattaacactagtgttgataactttcttcattacttgattgaaaactttcaaaagacagaagagcaaataatgccgcctaggaatattcaaattgtttggacataaaataaaaaagacaaaaaaacaaaggaatatttagtccaatgtgcttaggcccttggtaaccaaccaactaactttaactaactactacctgtattacctgtcacaactaaaattttctaaaaaaggtgaatagtttttttattactattattttatatctatctgttaataatccaacatgaaaaatatcatagatgcatcaagctgttttcagctgtgtcgtcggtaatttagaaagtagagcataattcagttggccataaggccgagttgtagttttttgcctagttaattagcaaggagagaggagaaacaaagaaataacaatgtgacaaaagttgttgagctaagcattttgattttgatgttttttttttttacatttttagttaagaaaaacaaagacaaaatcctctgtttaccttcttgaaagcacaatctgctgcaactgtagcaccgatgcagcggattagtgcgagtaatcctttcagtaagtgccttgagaacaatgtcgaattgcagtagcaatggaattgagttaaccaacagagacatttgtatttcacatgatccatacaactcttttatccttgtaccatagagcattgtactatacatagagactattattaattatactaatgtttacaagccccacaccacccaacaataatgatacaattcaacattatttcaatatttaaaattcacattaatatattaagatattgtaatgatgactgctcatcttccgtacattcaactaaaagactcaagatttatggctttcaagactgtctaaatatgaaacttccaggaatttgaggcttaaactttgtaactggagttgatcatttatctaaccacaatttctcaagagaaggggaacccaacaaaaacttaaataccccatcatcctttgcagtagatgaatgttgaacatatcacaatgacaatagtaggcgaatggatctaataatggattattataattgaagaaagctccaaaaatatctcacctttactgtcatgattagcatattctaggatcgaagtagccattcatctaggttgaatttctgatagtctctcacatgaattgatataacaaatgaaatgatgctaaagccctaaaaatttacatgaaaatttgtgatttgttgtatgaattctctatcgcccctcgagagttgttatgcttaaattgcctgattggggccgattagaggaggaataatctacatccgaagaatatgtgctattgcaataggccggcggtttgggttgaggcaacaatctctcaccactcaacattagaacaacagaagacatattcggcctatcaacaggcatttgttgcacacacaaaaggccaatgtggatgcaacgcaatgcttcttccatgttgtcatttggatcttttactaagcacttctcaataagcttaaattcattgccttccttcattgaattccatgcctaccaaatattaaataaaacataaataaatggacaaaattcactattaatgtaacattaattaagtatttttgtatataaaacttacatatccaacgagattgagagtactattttcatcataaagggatctactttttctcccacttacaatttctaggatcaatatgccaaaactgaatacatcagtctttattgagaatatgccgtcagaagcatattctggcgccatataaccactgcatttgcataataatatttataattagtatgcaatagattaatattacaatagaactgaattttttaaagatgacttactaggttcctactactttgtgtgtgttcccttctatttggtctccaccaaaagttttagccaagccaaagtctgcaattttgggattcatgtcttcatcaagcaaaatgttactagctttgagatctcggtgtattattctcaatctcgaatcttgatgaagatatagaagccccttagcaattccacatacaatttggaagcgcttaggccaatctaatagtatgcttcgactttcatctgcaaatatataactttttctactttcatttgaacaaaattggcaaattttacaaatagaacatcacatgtgtaaaaacaatggcaaaagagtgttaccgaaaatgaaatagtcaaggcttttgttagacatgtactcataaattaatagtttcatttctctatgagtacaataaccaaatatcttgacaagattccgatgttgaagcttagcaattagtttaatttcatttttgaactcattgactccttgtccagaattcattgatagactcttcacagcaatttccctacctccttccaaggtaccctaataaatcacaatgaaactattcataattggtaaaaagaaaagagaatactctgaataatataaatgagaacttactttgtatacaggtcc

SEQ ID NO: 218645 - DNA, 2948 bp, Cannabis indica
tttgtgcaaatatagcacaatttttacatctctcattagagatggtcttaattattagccagttgccccacatggattaaatataaagttttatatttataataaattatgctattctattcatcagtgattagttttgagatgaaatctcatgactcttgtcatggtattagagttattttcctagcgaccaatattcgatctacacttatccagatagtaagccagaaaagcaaaaaaaaaaaagtgcatgcacaacaagagactcacttagtgcaaaaagagtacattagagatccaaacaaaataagctaccatttttaagggggatattggataatattatcctacgtggattgaatataaaaatatattgaacaatttataagaatatagattatttaactcatcactaattgatttacaatggaatctaataatttttttaggagaaaattctcaaccatcaagtaccaaaagcaaataaacactttaaaaaagtggggagcgatgatttattcaaagatagcatcttctaataatagttcatggatacctaggattacctggccaccaaatcacactactattagtcgataaagcgagtttgaccaaataataagcaacaacattacaagatatataacaatgaacgaaaacaacttaaaacctattacaatgactaaaaatttcatccaactcaagcctcacagaaacaataatagacacattgcttttaattttaagaacaccactcagacaatcagattcaataataatattgtcatacctaaaagaaagacactgagccaatgcattgcaaatagccaagtattctgccactctaggttcaaaagtcgtccaatctccagctcgtcgaggctcaaactacactcaactcatctcgaatcactatgtccaggctactatacatttgccaactgaagcaatagttgcatttgtattaactttgagataggctaaactctaaaggaggaggaatccatctatgaaccatcaaaatttagtcgtcaaccgagaagaagcgggaaccaccatcgtttgcttcttgttttcaaagtttccaaggtaatcacagacccaattaacaactaggactgacgacaactcaatgttgttgtggacctttttgtttcgctggtgccaaaatctccatattatcaccatcaccaactcgatcaatatttttcgagagggaatcaatatatttataaataacgttcaaagcaaactcacaaattttcctacaaagcatctaataattcttgtcactaaccattgaaagtctaaacaataagtacaataaattaaaggacaaaatccattgcttagttctccttttttatatatataaactatgaacttcttcatcaatttttgaagatcacttctagtggggtttcctaatacattaatttctccattaacaaaaatgaacatatcattataattaggactgaggttttcatcttttaataattatattcattaaagaaataaagaaaaaagtaatacatgcatgataacttgatcatacttatcacgaaagcctatttaaaatttgtgtctacgtatcattaaataggaagattttcataatatatagtttattaaatattctcttttagcctttcatttttccaaattcagactacactttttattgtcatctctagatcagatttctccatatttgatgggctagttatacctataaaattaatattaatctatatctatatctatatatatactactttatcatatttgtacatgtgtctgtcgtgtaaagtttcaatcccatgtagataagatttttgtcacctttttttttttgccctataagcatcaccctcccctttctctcctagtccattttttaatatatttatggggttttaaagattctcttaggctattggtaagatgtaacgcgcaaaaaaaatatttttgaatttttatttaaaaaaataatatttttcaaatagttgaaaaaatatatataattttaaaagagaaaaaaaaattaaaattttgaattaagtgggcattaagctcaagtctaatctgtctatacctaaagtcgaacttagtaaaatggaagtaggatagagaggatgtagagtaacaaaaagatggataatataaattaagagggagataagtagtaattcataaaaaaaaaaaaagtgggatgatagatcactatttattcatgaaattattaaattattttataataatttttgagagaataatttgtaattttgaacaaataaaattgaagaatatgaatccttttattaatgaaatgatttatatatttgagcggatttattatcctcactttttatatcctttttaatattattcttgccaaacaacagaatttgacctctcccactcatttttcttatttcctttccttcccccactttttcttctcactaaacctagtgtttaggctacgtttggtaaggatgaaaaataggatggatgaagagtttaaaaaagatgaagaatataataactactcttttttgtattgtttagtatgaaaagtaaagctgaatggataaaaaatgacgttaaatatttattttttaaaaggataattttagtatttcatatatttatttattagaattagtcagtctcacattgttaatatatgtaaataaaatattaagatgaatgagctatacttcgatcttatttttaatatgttttgagatgaaactcatgcaccttatcaaaacattacttctatttttcttaaattcttacaaaaatgaaggtataattagacttttgggatttggaggagggtctccgtgccttgatctttatcctactaaacaacaaggccggccttgaggtgagacgaaagaggcgtccaccttaggcctccaaccgctcaaacccca

SEQ ID NO: 218646 - DNA, 4153 bp, Cannabis indica
aaacagttttttaattatgatgccaaacatgcacttagttatttttttattttttttctaatttcccttggctgttctttttgatatttttttttcccacaaaataattttcaaaaaaaattatatttttgtaaaaatgaaaattctccggtgtcaaaactactctctcccatgccaaatgccatgtttgatccaatatgtaattatcttaactttcaaaaatatatatattatttgttttttacagcaactgtttcatgataaattaaataattgtgagaataaattagcaatattttgttgtcgcattgagtaaactatactctttggttgatgaaaaggaataattggtgcatcgaaaaaaaaaaaagagagagacagtacaaacaatatatctcagctcagtacaaaaaaaaaaaaaatgtaagaaccaaggactcatttctacgtagtttttaataagattctttttcttttagctcaattccccaaacttttaaaataaaacatctaagaatactactatagtactatacctacctcattcacattattaattaaataataaaagtgaaaaacaaaacacaaaaaggagtgtccctctcatgtgtatccaactagtgctccacctttttatgtctcttttttattttatttactcaccacaatacacaaataactatatttttactacttaaaagttacaaatcaatcaccacaacaaatcttgtatttactatgctttatttccaccttagtataaaaaaaaaaagtttaacgacagtaatactttttgttactattttgtgaaacgacaaaacatgttgttttgaagcatatatattttgtatgcaaattaaataaaataattttaaaatttattttcagtattgtgagttattaaaatttaagacaatcaacttgaagataattcataatacgaacagatgtaaaaatctaatcagttttatcataacacatttaggtcagattattattaagttttattttattaaaaaatcaattcagaatcctatttgtatcattttggaagatataagatccattttattatttaataaaacagaaaatccaatctataactcttacaaaacacaaaatctaaaataatacccaacaaattttgcaaaatttagtgtaaattcttaaataaataccatatatattgtgaaattataatttacatgccaaaataaaaagcacttactagggaagacagaaggaaagcactcactccctttttacattgaaatagtaagagatgttagctggctcctaatatttcaaaataaaataaaatagtgtagaagaatagaagcatcatattatatatacaaaaacctaaccaaatataccaatgtgtttttgttactacctttgggacaattgttattgtcagcaaactacaatcttactcttataccaaaaccaaaaaacaactcccaaacgtgtcaaagaatatattaaataatatataaacaacaaagattgtgaaacttgaaataaattatgtaaatatagttttatattgtaggattttttgtttttttaactggttttattccagtctaggaatattaatccaagcaagtttgataagtgataacatataatatactgcatgaacatgtgcataatataagaaatatatataatatgatgaaaagtaaaacttgaataagtagaaagcaaagtaagcctatgttatactttaatatatatatatataagtataatattataacatattaggggcatcatgtagatgtatagattattcttgattgcagagtttagcaccatagaataatacttatccattaggagaggaggaataaaataatagtgggattttttttgtttttttaaaaggaataatagtgggaaacttgagtacttaatttggatgtgaaaatactattgacaaaatcataattttttaagaaggaatttattaacaagaacaatcatgttgttcacgagaataatgttgttacagctacaactcaagtggtcatagaaaatattggggtgcctatgtgggaattatgggatcaaattatagatgtgtaactcaactaatgtatattacagactcttctataataattaaaaaaaaaaagctacaagttagaaaatctccaaataggctagctaattcaaatttctacccatgctacacatgaaaaagtaatgccaaggtaataaacatgaaacaaatatacactacgaaaaattgttacttttagtgataactttttagtcacaacataaattttttgtgactaaatgtgatttttagtcataacaaaaaattatttacgactaaaacatagcatttagacatagttttagtcacaataaattgtaatttttgtgactaatacatttagttacagaccttttaaccacaacataaaaataataatttataatcagtcacaatttttttatttttaatcacaagttttattgtgactaaaagtgaaattttttatagtgatgtgaagtggaataaataatattgatacaaaatgatagaagccaatagatttgatacaaatatgccttcaaatagataaagaatgaagagagaccttagttttatttatggctaattatgagatgatcgcacaaattttaatagagtaggtaaattcagataataattagagggaaaagaagattgcgtatttatttatttatgcctatatgaaattgtggtatttttccaaacaagaaaaggtagtttgtggtaattttgtacaaatgggttcaagcccaatagatatttaggcaacaaaagtaatagagaattagttgttttcattatcaagagatatatccatacattttcatgtattttgtcctaaaaagacaccctcctaaaaggtattcatacaaaagttttagtctaattttttcatagtagtgtatgttgtagtataattcaaataaattttgagaccttcaaagaaatttaacatgctaaaaataaagttcaaataatctgttgtatgcgtgattttttttattttatacacgtgtgaaatatattgtttgaatatttttttttctatattgtaaattattctgaatttcttttaattttgtataatgtcttcaataactataacgtaaaaaaaaattctttcgaatgctgaaacagataaaaagtgcattggtgcaccctttttagggatgtgcattgtagatgtaccatttactatttagtttattttattgatagttacaaaatagctatataattttgtttggcacgtaggattggactgaactagactaaactggacaatgtcactaatttagtgtttggctatgctaaattattggataattaatctagttaatccatatgtaggattatttatcatatccaacagtatcaaaacataatctttgcacgcaagattattttttatctttcttttttaatttttaattttgtaaatatattttaaattcaaaataatttaaatggaagagttaaaattttatttaaaatttattgtaaaatatttatttattaaaattagtgaaaacatgtaataatttgtttctaataaaaataatatgatactatatggtatatggtgtattctctttaaattattaaaaatatttatattaaaattttaataaaataatatatatgttaaaataaatgatcagttagtttaaaatattacttgacataatatatttctttttataattgaaatatatttatctcgatattttattatttttcttttttattgtattaaagcattaatttaattttcatatttaatatattaaagtttacaaaaacttattatttatttatgattcaaattttattattaaaatttaatttttgttatagcatatgtattattaaataattttttaattttatttgtctttatttagcttttttttaaaaaaaaacaaaataaaaataagccaagctgcacttaaagctttacaattgggtgagcagaaatttatattttggaagtcgtgctcaacttattcactcagttcttttgaagattagaattttttgaaagagcttgtttatcttgcctcaaaaagtgagtgtcgccatcgacaaatattgtagaga

SEQ ID NO: 218647 - DNA, 5253 bp, Cannabis indica
aaatatattgtaaatgcacaatgcaaaaggatagcatccttaaatttctgcatggagaacaaaaactagatttacatataaactctataccttagcaatctccaaacttgcactgttattgttctcattaataaaatgaattcaccgaaaacctttcttactattcatatagcggtaaaaactatttttctatattggacaagtcgagatttactattcattttgtttcatttatatttaataatgaatgtaaaaaaagtatatatgtgaaatagtttatgaatgaaataaataagtcttaatgtcaaatagttgtcaaatgtacatatatgctgaagcagaagtgctaagaacataccacaacacaagaatttgcagaagatgccaacttctccatgtcatccacactatctatagctctatagaggtacattaatagtgtatcaactccctcttttactgatggagtcagctctttattgcgagaaacctccaagtacctatagcacatatctatattgttaaagtatatttggaaaggaaatatttgttcaaaatggttaaaataacaatactacttactaacacataaaagaggtattgaaacaaggataaattaaactgttaaaacagtgaccatgaacaccctaaaatagagcaaagttataagttagataatactattaatacaccacctaagtaaaggagaagaagaagcaaatgctagatcaattatatgaaaatgaagaactgcacagacctaatcattgacttgatggcagactccaatatataggctcggcttggtgggtttgaaagaaaatcatcatcaactgaagtttccactcctgcctttctaagaagtatagccctttggatggctgacaatccttcacctacaacatcttccagaggtgcagggggaggatgcaaaccccaataccggtttcttggaaccttaatatcaccaaaatacaaagtaataaatcaaataaattcaaatgctataattcaaagtttagcggatatctgaaattaaagttgaaatacaaaatggagaaaattgtcttctgcgtaatgtctgtacaataaattatgaggacatgagaaagcaagcccagtagtaaacttccatttttctatcctataatttcttcccgtttttgacaattgacattacaatgaaatagccaatatgcaaaactcttagggcattgagaccaacataacatgtcatatcctataaattcttcgtaaacacaaccaacaatttgaagaattcaaattggaaagatgtcaaaaaattacctatcttcctattttttcactttcctctttagtttaatgacaaaaaatgacaacaaaacaatagagaaaataccagtaatgaccatcgatttggatctcgcattatgaatggaaacaattcagaaggctgcaagatatcagagagcagaaagtgattcactgcttcctcaaaacgcaagtcaaaaatcaagagaaaccccacttgagcatgtacaaaggagaccatgttctttgttatttcaccttcacattcaagctcctcaactaacgaaatagcttccttgaagttcttttttctcaaaaggtctttaatttgttcttcgggagacaatttccgatagcacataacctagatatataagacataataaaaacaacatatcactagaacattaagcaaagaatgcgaataagtgaagttcatatatcactccagtaggtgtggcaatcatttacatatacagaaaaacataaagttcataaactcttctactgtgaaatttcgtacagatactgaaatccaacagcattgttgccataaggcttaacaaatgaaaaaacatatcttgaaaggaaaaggatgcatatttgggaataaaccagcattgatgccataaggcttaacaaatgagctatcataccagacagcaaacaattatcacaattcattcacacaatacaaacagcttaaatttttttcatctgaaaccagaaagaggtaaatatgcgtaaaataaaactcatagagctatatagtatatactaaacagttagaaacaatttgacaaaccttggtaggtgatgcaacaacaaaaagttccccttccgaatcttcctcatctgcaataatacaaggcccaccaacactctcaccaccaaaactaactctctgaataccaagtacccgatttcttatgatacaaatccatctttccatctttaacagccacaatatataaagacacctctccaaccgaatccgggtctaaccgaaaaacaatgctcccagaaactggttgcccatcagcattaactaccacaccaacattgtccaccaacaatagcacattccaatctttacataaaagtttaagctttggcaaactagaaacatcaggcaatgaaaatatcacaccactctgtccactaacacaagaaactaaactatacccattagcagtacctataattatcgaatcattaagccaaaccatagtcgaaatcccatcaatacactgataatccttaagaatcgaataagaaacattcaactcatcaacatttgaatcaatcccaaccaaaaccaatctattaccaacaacaacagcaaaagcattactaccttcacaattcaacccattcaatttattttcactacttctcatccgcttagtaaaaaccctaactcctttcaaaaaaactcaatcttttcgcgggttgcaacaaaaacgaatcgtacagatacaaaaactcaccggaaagaacaataaccttcccaattccaccaaaaacctgtacggactcaaccgatgaaccatcggtgactgtaacggaacgaaggagagagagtgtggagtgatcggggtttgcagagagtaaaagaagggtgccggagttggttccgaggtagatgagagtttgggaatttgagagattgtaaagagcaatagatcggaatgaagtagtgggtggagtgaggtggaaattggagagaggttggaggactgtacgagccctagaattggggttgatcgccatgggagaaggcattgatgaactccgttcttcacgccttcaatttatcacttctttttgcttttgttttttttaaggttacacttaaataatttttagtaaattgttgcaaaaactctaatagttttactttgttaataattaattcgtaaaatttaaattttggcggtaaaatttttaaaactcgtaatctatgagcaatttatcaatttttatctttatttaagtgttaattgtcatgttaaattattatgtgtatacaatatattattcgagtaaatacattatacacgtagtataattttattaggacaagtaaataaatatttaaaaattaaaataaaatttataatcatataaaaaaaatacatctcatatactgtttttttttctttattatttttactaatttgtagtgtctttggttgattgctacgtgagttactatgtggatttgagttacgatttaggttgctttgttgattgttctgtgagttgctccgtatatttctgtataaataaaaaaaaatgatttttgaaatgtaaaaataaaaagactcctaaaaaatatgtaaaatttgttgaaaaataatttaatttttttcctctttctttctttcttcatcatcgttcaaaactatctctcccttctctcactctctctctaatattgaaacattggccatctctaatattaagaacgcccgctagttgttgaagaccgtcgaccaaacccctttctctctcaatcctgattgtctcttcttctctgtctcatttcgttctctcctcacgaactccgatggaaattagaggcccaaaactaagatctggtctggttggtgctacggatttagtcttcttgtcacctctctctggagtccactccttctccatcatgaaaaccccttgaactatgctcctccccgtgaagatcatctctgcatttctccactcacaatcactcggccagtgccttctccggccacaagaaggtgcaacaaaccctaacctcaaaacttcgtccccattttgctattgtatgtttctcatcaaagtctatctctttcagtcatgattttccccctcttagtcttttagaaatatatttgaggtttggggtttagatttgagagtttcgtttatgtgtgtgtgtttgtttgtttgtattgtggtttcattttcaattaaaataagaacaaaattgtgtgattttagaggtggtggtgttgtggtggtggttgtaaagaccgcttagtttaaatttggaaattagcagataattagggtttaattatgaaaattatttattgatatttaaataattatttatgttgatttatttgaattcagaatgcattttatatgtcatatagtgaaatttcataattttgcattttcggtgcccggcaacatggaaagcggtgtatggctcagtagaatcacaatctaatattttagtatagcgggacggtttagttagacattgggaatgtcggaaatttagaatttcccaaaatacccttagtaccctttttatgtcaacttagtgtgagagggcaaaaaggtcattttgcccatttgtaattattgtcttttatggatttttaattatgttagtaatctgatttttaatttatgcatagtttatagtgtcaaaaataagattcaatgagttgcttaccatacgtataagaaaaaaaatcacgcgttaacaaaatatttgaaccttggcattgtaaattgttcagaattttttaaaaatatacaaatgatcctaaataactgcaacatacacaatcataaataaaattaaactaaaaaactcttataatgtctaaataaattagggtataaaattaggcaaattttttttatatataaaattcatcaaaaatctcaaatttatccatctaagctcctaaacatgttagctggaggtttgattttcataggtgatgacttgtgaaatagtcctaacaacaaattttgttacactattacaaattacaatttctcttgctagaatcgattttgttgttgtttctccatggatttcgttgagaagaattgtgttggagtctcgtaaatgatgaactctagctaaaaataaaaggaatgagttagcgatttcacagaataatgacaagttaacaaattagaaattaaattctacagagctcaattcaa

SEQ ID NO: 218648 - DNA, 6094 bp, Cannabis indica
tatatttacttacctctctttcattgcacattggaatctgaacaaggacttttgggaaacttgcagggtcctcagtgtcataagcatttggctctattgtaggctttaatttcttgtacttgatccaaaaacatccaaaacacaaaactaaacgatcaagagattgaatcaagaatagtacagtacagaatcttgagagcatgatcacaacaggagcaatataatcagccctgaatgaaagccatgccatataagtccattgcacaagaccttgaacttcccatggttgaatcagatttaaattccagctcttgaaatgagcaactaattcaataaccaaagcaacaattgacaaagcaagaaaagctttgatgaatctgtagagctttcctctggttttaggctcatcatcattatttaagtcagacaaagcaatccttttcttggctgcaacaaacatggtcttagaagccatggtcatccatgaaagacaagctagagttctttgaactttgagaagaaaaacccatgtgagttgctttggactaactgctttttgcttctcaagaaacaaagatgattccataccagtcactcctaacacagacttcataggtttctcaactgtcactacaactgtattatttggagccatttgagagagaatccacttgaagaaatagtaagaaaaatcaacacccagatcagaaaaatgacctgagactgaagaagtagtggagtgagcagaacactcagctctgagatttgtatgccattgttgttagaatgagagaaagtactactcaaagggggtcaaattttatataatttcttatgaaatctagatctttgagtgaagtttgagaattgggaatctaagtcaaactgagagagagagagcttgaactcacactctcctaactttcctatcaactataaataaaggagaagagaagagtgttacttttggtaacactttttcatgtgtggtaagttcagttctattattatacctttcttatttttgatcaaacttattatacctttcttaatcatccaataatcaagtggaataatcaactttaaagctgtacaaacttaaactttttctttcaaataatggggaccacttgctgcaaatcctttcctaatccctttgatagttttgacaatactggaactacgtgttaattataagggtcttatgagttatcggtatgcactttaaggattctcatctcattaagaatgacactgtcacagcaagctagccttccaaagaatcaagcacaatctctcccagtgaaagatagtggtggaattcgaatcctgacccgatattagtaaaggcatccctacacaaacttaaccttgattagtttgagttagacttttatttagtacgtactaatcttgagttaaaatttaaaatagatacaactaaactacagccaatttacaagtagtaaccccacaaaatgtacttcttgtctgctattttgggcaccatgcattacatcaatggttttttttccctctttatcatcattatgggttaaactagactaattccttttttcataatataatttcccattaacttcaatgagatctacttcttttatatacatttattttaaaaaatatatatagatatttttttattttagctgtcaccttgaaagatttttaagcatttgaaaatattcaatagaatgacaatatctagctggttccattttttaataatatatataaatatttttaccaagaagaaaagaaaaataaaataaaatagaagattgtgtcttttttacactaatagccaaacacttggtatttgaagtttgtggataccaaaactttctaagaatgtataaaagagaagagagtgaccatacaatatttccagacaaagcatgttattatattctgataataaatatttaatttttctgtactctgagtctgaccatcaatctgtaatgtatcattatatatcaagatattgatatgaaaaaactgtactgaaacttattatttaagtcatttttcttaacttaagatataaatataagcagagtcaaacaaagcccatattattaattatcaaaagaaaatttaattttagcttgaaacatcattaaagaagagtagtttatgctagctactactattatctttaatcctaattattcctttttacaccttctgcttcttctgggtatattccttttctttaactctaaaaccacaaatcatttttttacatccatggcaatcaatttttttaaagggtattttttggttccacattactataaggtatcactggtatctagcatcatttagaatttatgtttttcgattagttagtgatattttataaaagttaatgcattaaattatattaaatctaattaactcttaattataccaaaaataatatgataagttaaagggtactaagtaatactggtaccttttagtatttcttttattggacactagtaatacttagcacttaggtgacatattacgattaattaacaaaattattatattaaattatatttaatttcactcgatattacaattgctatatttagactttaccttccacaaccaacataatcaattttatcctttatttattggatattattcttacatgtaaagaagggtactttttttttacatgaaaaacaaaaaactagatcataaatttaactcaaatttaatacaaaagactataaagagatagatctgacaaaaatgggtccatgtaagccatgttgacagttccacactaataagtatgtaagacaccattattggtttaggtgagcaagcatgcatatctccgtgaccataatcacatactacccgggaaaatcttctcttctccacttattgaaatctcaccattattttcttaaaaaaatactaatatttatttttcttgtgacaacatttatgatcttagaatatgcacctactaatatttatatatatatatacacactttatacaatctttcttgatatgattcattcactcactcactcactatcactactgagaattaagattctgaaatcataaggttaacatttatgcatgtaatttgcaaatttgagttgttttcactccttttccttgaaaaaccaaaccaaattaaagaccacttattatgaagagagagagagagagaaagagaaagactatgtggtcaaacttaaacaatcttaagcccttaatgtgtggaagttcaataaatgtagaagccctgaatagttgagtcagttatttcagttattttttttacagcaaaagagtatacattttcactaaactataaacaattcattagaagaaagaaacttctgtgtgggttcagggtaatatatatactagtgcatctatctatataatgatacagatgtatagcaacattaaaaaattggttttatgttctaaacactttaatgtttgtgtctgtgaattaaatgtgtccaggtagaagggaaaacgtttttatcttcctatgattacaagacaccagaacatggctgtcatgaaagtgaccttttagaataataagggtacttcaattttattcacatactcttctcattttggtgtaaccaaaaatcaaagcttttttagttttaccattatatatacatattattccactatattggatagttagtctcttgttttatatatctgcaattttcaagaaacatgctgcccttaacctgtcaaccaaaatagtacaaatttcaataattccaagttttatcttttacattggcacaaaagggtattgattatggacattggataagaaggaatagtattagtcagagaagagaaattagaaaaggcattattgcatagcattttttggtattatattgttattggtacaattaaatataggttttcatataacttaaggtaataagttttaagaaatatcgttaactaattgtaaggtatcacctctaggtactaggcaccactagtactcaataacaatgctcgtaagagaaatgctaaaagatatcagtggtgtctagcaccctccaagatgtgatatcgatattagtacaattaattatcaggtcctacatgatttaatgtaataacttttatagaatatcattaactaatcgcaagacgtcacttctaggtagtgctgacactattggtgcccaaaaacaatactttattcgtaaatagagaaaggctaaacgatattgttagtgtctaataccccactaagtataatatcctattggtacaattaaatatcgagtctcatataatttaatataataatttaaaaaaaattattattaactaatcacaagaagtgactttcttcatgatacctaataacaatgtggtattagtaatcacatataagaaaagggataagaagtttgtcactttctcaagaaaatgaaatgaagaaatggtgtttgtagtgtgagtaatatcttatttgtgtaatgggtgatgtgtcctatcaaccaagcagtgaaaccccaaagccccaaccagccaagtccaactattagctgaggatatgccagattatatgcatctcaagagtgattttgtcttgggtgttggcagagtcacatgtgagaccacactaatctgcattacaactctacaagtccccatgtgaccagctactctggccaccatggatgtagtatgcacacatcaatttttcattaaaaaaatatcatttttgaattttcagtacataacatactatatgttttcattttgttattggtcaatatgaacatttttataacacatgctattgtttttatatctctttaatatttacatagttaagataccttcccaatgaatttctagttgtttattaatttgattctgaacttaaagcctttatctttgtttccctagagaatgagtactcccaagtcccaaaaatatgttataaattaaggtaattatatatcccaaaagttttatttgacaattatggtatcatgtttagaaaccactttaatgaaaaaaaggtcaaatttgttaggattaccttagactttttagaagcaactcatgtgcaaatccataagaaatttcctaacaactcttatcattttatatgaaactctatttagtatattatatatatattagtcaaaagtaaaagtacttaaagggggtctcaaatgacattaaataatgattaattgaattttggctttatttccatgtctaataaggaggacttctgcaaaaattaatggactcaagaaatgttttgtttttatctaaaaaataaataaataaatttgtttgcaaatgacattcatattgcatgataaagtggcctttttaggatgttatccttaataataacaagattattcaaatagcaaatttgagaagactaagctaagtgacactttgccattttctattctaattaactttagtttagtgatcaatctatgcaatatgttccccctccataacaagttatcataccattgttttcacatgatgtagttaagagaaaggaaaaacaaaaacaaaaagaagaaataaggtgaaaatttaatatttgatttatttctgatttattatgtgaattatttgttagcaaaaacaaatgaattattattaagaggacctactcattgggccactacattacaccaagaaccatatctacccaacatcatctatccatccaaacctcaataaagggtatcattatccccctttctttctttttattattatttttctttaaataaaaattcttttacacatattcaggtggataaccattattgattgaataagttcataattgatacatgggtaaatctgatgaagtttgtcacttgggatgaaatcctttcattttctgtttttccagagatgatttataatgacccatatcattgattcacttgccgacacaatagtaaaaaaatgacacataacacaattagcttattattagtgaggctatcattactctaatatcaactaaacgagcagcaacacgaactactaattttgt

SEQ ID NO: 218649 - DNA, 4881 bp, Cannabis indica
agtcatgaagaacacaaagaacaatgtttaagttcttaaaaaatgaagttttttattctcaagagcctctggccagcacatagggtttgtttgtgacccttgtcggctcatacttctaagttaggactttggtcggtttgtggctcaagcctttgaaccctggctaatttatgactttgaaccccatacctagtcagttcatggttttgtacccaaggtctggccggttcatggtatgtggtttttgtgtcattgggttggccggttctaaccaatacttagtctttgcaaagactttgtatggcttttcgagattatttcacctttatccagtacttgattcctgtaggaacgatctgtatggcatatcttaggttgagactctcttggccaattagcggcctaagctcaatgtctgtttaatttcttgcacctggatcttgtacattgccaattaacgactttgtacattaggtttgtctagctaatacccttagttgacctgtgctttgtttaagtctttttatttcgtccagttttttgcctccctctgccttttttacatagatgaacccgaatgacttttggggaggtgacaaccgaatcgacgaagacttgctaagtcttctctacgaggatcatcgtccagttcattgaaccagctcttcttccaggggttctttgggtagctcctcaagcgattttgaggttagcagcggttctttggagcttgaggtccaacaccactactatttggagcaaataggcggtgaattttacggtcagtttatttgggaattgaaccatgggtggaggcagttcctccttagaaagtggacctatattgtccaagatggtgtgcctgacacgttgcccactggtcaagaaactcttttagatgaagatttccctacaactgagactgttgtcactgttgccagacattccgagccaaatcctaccatgacaagaacaaaacaaacgtcccttagggcatctccttaggaccctcatattgctaagttgatgacaagatggagggtccgtcatgtcgacaaggatgaacaacctcaagctaaatagcatggggcctccaagtagaggagcatgtggcctagcaacccatggtcgaccagggtgaggagactgcgaccggtccaaatagttaatctgcagtcgagcaatctgaatctattgtcaggccaagtactgccaagaggcagtataagacttgtacagtgatcttaactaatcttttaggctctcatgatgaggtcaggcaacctttgaatgcccagggtcatctaccagaagtcaggattaaccatgtcgaagaaaagaagaggcccccaagacatgggtccttaagtacggggatcaacagcgatgggtatctcctccatcttccttataagctaagaaacttgacggaatcaaggaagggggactcgtgggaagagcctaatgtgtcaggcctactagggatcagttggtgcatcatcttccatccaacaagaaggcttagttggctcctcatatttagcaaggggcgattctacccttgcatccctatttcagggacatagaaaacttctttaagctgtgtctaacccagattaccttgaaaggtatcaagtaccttttgacgctcttcattctctacatagagctaggatggccacaaccttcaccttacgagatagggtactacttttagctgaaatctatttcgaagcagggaaggtccggatacttctactttagccaattaggctatcagtggctagcaggcaccaacgacagggctatgttaaaaattgggaaatactcctggaagtgtttccttgcctggaatatgaggtacgtcagtcaccactttcaaagggtgccaacattcattcattcaatccccactctccagctgagggatagagccaatcatatcttgtctctttttatggagaagtgcgacatttgtagcctgacttgtgaggaaaattttaggaagtacgacatgtatcctcctgtgcatagtactaaggctactgaatgccctctcgaaggtctcaacgacactcctatggcagaggaggctagtcaaggggaaagcctgcacctaagcaggaaaaaggcaagtctggtgatggcgttcccctagctaggattgctagaactacaaccaggagagaatgggatcttcaacaatgtttagcatgacgaggcacaactgataatgcccatatgttaatcaggctaggaggataactttgctaggcttgccagaccaccacctgtgtccagagataaaggcaaggcttctgcctctaaagatagccttgatgattcctcttctgaggatgataggcttctagattaccctttaaatggtagtaactttttactttcacttacatttagtacttataacttgtattctaactttattactggtttttttttttttttgcagatatggatttcaggatgacaaacctggaaagaagaccttcaggtggcacttcttccggccgtcctcaggccaaggtgggctagacttttgggtcttctaacatgactcaaactgtcttgcattcccctcctttaggtcctcccccaggaaaccaacctatggttatggatcctcctccgaggagtacacctcccactcataggtcatcaggcaaggtagctcaaaggcatagccaggcgacttgttcatccaagggtaatagggcgatcgaggtagcctaaaattatcttggcaaaagtttgccaagtgccgatgaggagctccaagagttagattttgagaccctggattacttgatagcgagcactcttagagatgctacctccgtaagctatttatttgtctaactttttgtatgcaagccttgtgtaaaacttttctatctttttttgtctttggtttcaggttttgttgaagctcagccatgcccatgccagggctaagggctctaccacaaccttcaagaagaaacttgagggccaaaaaaactgatcttaaggcaatgtcagctgctcttgtcaaggtgcaggttgatttggacttggcatcgacccgtctgggtgagatccaggatcagtatgagggtttgaattaactacttggtctccataaccaagaggtgacaagtctgattgttaacaactctaggttaaagaaataacttgagaaggagcgtaaggagaagtaggtggcgcttgatgggtaaccgacaattagggatgagttcttagactaatctgcagaggttttgtatgaggtctttctgtacaatctaaggtcaaccttaagtatatggagtcacatcttcatgagagctctctatctcaagggaaggagctatatgagagtaggccaccgtcaggctaggccaacagagtgcgaagatactggctggccaaacctctgagatgcatgctggccagcccattggtgccttcaccggtcagcctgttggctccttcgatgaccatcctgttgagtctttggtcgaccagcctatggacgaggtgtcttccagttagcctcccattggccataccacaaagcctgctccagaagcttcatctgtgtagagttcagttcacttggacccatttactcctgtgatcactcccaaggatatttagagaattatttttgtctttttcatgcttttattttattttttttttgttattgtatggcctataggccctttactttagaataatgttcgtatatggccttaaagcccttttctataaacaaatgaccgatcaagtagtctttaatcctagccttaacttcttttgttagacatataggtgtccaaacttactctttttatgtctaatctgatgtatgtcatttaacctgaagtgcctgcttggccatcaacccctatagagggaaaaggaaaagtcgtcctggtggagcaagaagactcttcagatgatgacgctccatctgtgattgttcagaagaatgcccctgccagcgtgcagagtacttcaacttgcatttatttctttgattttcatgctttcatatattttatgtctgctcctaactgcgttgttttatctgtgcggagatgtctcagaagatgcttcaatccttgaagaagagagcaggagatagctcaggcttgtctcctctagccaagaggtccaagggtggtgagactccatccaaggagaaggcgctagttgacgaggtcattgatctttccgaggagcgacccgttgtggaccctccagctcagaatgtcacaaaatccaagagttcaagaggagagacctcagacggatctaaacaagttaaggctggatccgaataagctaggggcccttcaacaaccctggcgctgtgcacggaggccacaagaggcaaagacatgcttcaacactacttgactcattcacttcctgaagtgagcaaccagttgtcaagagcggacagcgagttatccttagaactggtcagttttgaaggaagttactcggataaaaattcattcttttttatttcattcttttttggatagctctgattttgacatatttagtatttaccatgcaaactgatgtgaaaatggcttctgcttactcttgagccaaattagctactgtcaaaaaccttgccgccactagcacgatgcagagggatgtggacttggccaagaaggaaactgaagattgttaactcaaacttttaggtctccttgttttgatgattaacaaatatttgattattatttgttactaataatttgttaattttgtagcaaatttaaaagagaaaataaattttcaagacaaaattggtatttttaccaaacttcataaagtgacccaaaatggattcaacaa

SEQ ID NO: 218650 - DNA, 7216 bp, Cannabis indica
cgatgacagtgcttgttgctttgttgggatataaattaatcaattgataaggtagttgaatcctattatttcgattatttttctcagctaaatcgaatacttattttacaggtgaccagagacaataacagtaaattatacaataaaactgagagcacccaaaatggcacaagctggggttttgaattaggaaacgagctccgagcttgtcccatagtcgtgaaagatctggaaaagcaagggcaaatgcttattgaggttttgacagctagaattttcttcattttggtttttcaacgaaacagcttccattaaaatttattaacttatttcaattgcaggttccatgtgatgaccacggcctttttctggagatcactcaacttatcaagcgattagatttgactatcttgaaaggtgtgatggaaaatcactcaggtgactcgtacgctcattttgttgttgaggtaaaattttactactacacattttttttctgtttaaatcgttgattttttagaaattgcagaaggaaaagggagaatgcaatccaacaccaacttcacacacaacactgagaacttaattatcattatcactgttcttaactttaataaaactaataacaatagtacaatcaagttaaaaagcttactaaaattacaattttctaaaatttctgtttcattggaatttaatccaggctaccaagggttttcacagaatggaggtatttttacctttgttgcatcttctacagcatgcaagaaatcgcatctccaacaagatttgatccatcatcataagacacggcaaaaggagaggcgaaatctttagctgtactttttataagcttagtgtacaaatcagatcatttccagtgtgtcgtttgaatgagagaaaaaaactaagctttcctgagaagaataatagtatgtacaatgttggtgttacacaggactaaaagtgtgcgagagagggagagaatctgacaaaccaatctgagtaatgtgtcttctatttctagcaaaactgtcacgttatgtcatgtgtttttttctctttagcatcatcaactgtagctcagttgggtgtttcagccagcatcaaggtgtgccaccaaccacatgcaatgtttatcggcacaacaccggagattcttgtaacttgcgatggggtaccccggtcaactgaatcccccaagccaagctacatccaaatagaatgacagatttttagaagggatcaaactcttattagaaacttggtaaaattagagatctaaagaggaatagtttggtctctcttggatatatttcaatatgtaaaaacttaatgttagattgagtaaactgcttcttagaactttatttgagcctttttaaagatttggtgtgccaaaatgggtaataaaatgtaggactatttgcaattttctttttgtggactcatttttaatgttttcattcaacaaaggtgggagagaatagttaaagggtcatacttggccatatttgttccacccccagctaaataactcaccgtcttctgcaaccaccatagcaataaggtcaacattaagaaaagttgcttggatttaaacaattgaaagtgggagttcttaaacaattgatatcaatggcaaaaatcatagtgtacattttgtgtgtgaattaaaagtgtccctaatattaccctagcttattattcccagctagatttgacccatgccttttttctgaatacaatattgactttttatttgggaaatttgaagatctttgtttcaaggggaaagtttgttttggactaaaatatccctattatattactcttgtcctctctcaagctataacctgaaatctcccacacaaagtaacaaaaaaattcaaatagcataactaagaacgcaaaatttagcaaacccattaaaatgccaaattgtactttaagggaaaattcacgagttatacctctggaactaatgcattgacgagtatagcttcaaagtacaacaataaacatttggtccagttttcttcctatttttgtgttactcttgccaattgttattgaattccttattatgtgcaaaatttcaatgcaaatataatagatgtttgatgattagttcgatggtgatttgatgctaaattggtttcgatgttcttagtgtatgatcaatccaacaactttcgataattagcatagttgtaccaaaaacattaatagatgctatttaaatgttatgggaaaaaaaaaaaagatcacttacacactgagcatggaaactcatttggcaataaacatccatcaaattagcaacaaattgtaatgtgaaaacagaaccaaaaaccatcaaaatacatattatacttttaaaaccaggaccagaaaactataacaatttttatttaggtaaccctaaatggactcgaacctcataacttgcaggagcaaaccacatgcttgataatttgagctaccttcttaggtcaaatgtgtatttccatgggtcaaaaccatcaaaataattgtacaaaagtaacacataattaagactaaaactactcaaaatgtgtgttgtcattactttaaggccatatttatcaatagtacatgaaatctggaattacttatacatggtttttttccccctttgaagaagcacgtaagatgttgggttttcatgagcctatgtttcttaattttgcattttaagataggatacttgaatatttgtgtgtttttttttaaggagttttagatttgcaggtgtaggggatctaaggtttagtttgactgaggataagaatagtcaaagaaggcttattttagtccaagacaaactttcaaccatattattcaaatgtttcacatgtaggggatagttttataatgaagtccaagcaaagatcttcaaatttccctaatatctaaaaagcataataattgaaggaacttaaataagcccctaaactttcaagagattgagctattttgaaaacataaagctatttagtatttacatccactaaagtcatcaagtgatatttaactgaaccacaatatcaaaggaaagcacagattcatctaccaaatgcttacctgtgcttatgatactgtgacgagctccacatgataccattttagcattcttcccttccaagcatgaagaatccaaaagcttgggtacagtcttgagaaagtgaaagtgaatgttaaaaaaactctatggtcagtttctacaattccgaactatatttgacaataaaagtttagacaagaaagagacgccaagccaaattttaagcactgaacatttaataattaaacaaaattgaaaccagcagagtctctttcaaaagaaatactatttttttgggtttgttaattgtcattgacaaactgtttttgacagaaatcaattacgatacatatctcgttctctataataaaaatcaaaggtcttttcttttctttttttttaaatttttttttattttctcttcattagcttttgttgaatatatatggtgcacaactaaataggcaatcatctagcagcttcataattgaattaccctagaatgttatcaaagaggaaaatggcatggaacaagttactgtaaatacctcaatttggtcggtgccagttcccaactgtccaaactgattacccccaaaagcatataccagaccctcatcagatacacagagagtatgccatagtcccgcagctaccttttccactcgaacagttgataacgaattcacatatgttggccttaactgatcatatgtaccaccttgaccacactgaatcgaagatgccaatcataaaataagaaataactaacaaaaagtactcatgcatatgaaataaaattcaattataggtatttaactggcccaaatacccatgtctccatgcattaagtgtgatgctatgctggaaataactgtccagtgagttgagtttctaagatgcgtacactatctagaatttggataagtcatgttcccggccatggattttattagggtaccaaaaaaagggaaaagcttttcatccaatgcaggcaataaaatcacattctatgactaaatccaaggagatttacctgtccgtacaggccccagccaaaagtgagcaatgccccagcatctgcaaattagagtttttgttaatggaaaaaaaattatacatacctaaaatacaaaaagccatccaataaaacagataacagtctccatctagttcttccagctatttccactcaaagcaagccatgaagaacctaccagttattacagcactgtgccgacctccacaagcaattgccttgataaaacttccgggaactttagaagattgggctgaaaaaatcttgctatcttgtgaaaatgctgaagatctatctttcccaggaagagttgggtcaatgcaaggtatgagatgaggggtagacaccatctttacccgagaacccaagcctagctgtccttcgcctccatagccccaaccccacacctgtcccatatctgaaacttttattaatattatgattcatcatgtctcgccctacatcaaaaatcttccaaagcttcgtacttcatgcaacctacaaaactatatggggagaccacaaagaagacgcaactatcctgaaatacggcctctgctgacccatgagccgtgacattgtggattacctgacaacgctaaagtgtgcctgccaccagcagcaactgtgattatccttattccagcacccagtgttacaatactgggtgaaacagcaaagaactcttcactagacatcaagttttcagattcttgtttcgcttgcgtaatttttcttttcttcacaacttcttctccggcctttttattctcatgagaacctgctccagctgtcaaactagagccttgagaccttaagttacctgtaagacattaaagtctcaaatctcaaacatatttgtctcctacaactagctggtattcatgaatgactctctaaaacaattaatgtttcagaaaaacaaaaaaaaaaacaaattgaaggagaaatccaccttgttctggtattattgagctttgtttacctactgtatccttctgcaaacatcctacagtagccaaatcacagataattttcccagatggaatgcattctttccagccccatgtgaatacttcacctgtctctgaaaattgagatgaaaccattatttacatggaatgggtaaaaaatgttagaaggcaataaatagatctagccattacaaaaatagcactgtgccatctatacattgtccaaattttcaaataaaatacaaatgaactgcttctcgtatgcaaagcatgcaaccaaaaaaatactactaacttaaaaaccaaagattacctgtaactgaaacgcaatgggcccagccagcagcagccgccttaactaccgaagcctcagttggcaggggaaagggttctggagtttccttaacaaaagccaaggacataaaatatccaaaatcaattcccacactttatacttatcaaaaacctgacaaattaaagggtctctaagttaccgaatgcttccctgaagtcagatagatttgggtttcgtcctccacagaaccccacgttataagtttcccattcactaaatccacatacaatcacagttaataaaaacctatgtcaatcaccatcatacaagcattaatttgaaatagcaacagaacataaaatcgcagtacatgaccagcataatgaaagaagtagccgttgaaattttatatgtaagatacaaaaagcatggaacttttactctacccaaacagaggtcatattatatgttagaaacaattcagaacttaaatctagatttcattatgaactttttatataccctttattctaaatttcattggtcttatgaacatatacttttacctttatattttgcttggattagatccaaataactttttatcactgctcattaaagtttgtcgagattcaaggaaaaaataaataaaaagttactcatacctaattaaccatttttataaaaataaaataaaaaattgcagaaattagaatagagataaagactcaaccagagatagccatggcaaatccacaacctccaccacaaacgtctttccaagaatctccatttccaggtaaccggaccggtaccggagatagtatcggagatttctccggcgaagctccgggtagataaccccacatatacaccataatatcttccttacattcctccatttttacgacttcttctcctccatctacttcattaccattcatctctcgtctgacctcgaattcgcagcagcaccagaagcttattgttcttctcactctctctaaactccaaagactgaaaatcaaagctttgaaacgaagaagaagctcggatctctatcttctttttctctctagaaaataataattaaaaaaatttaaaaaaaaaaatgtttttgttggttttttactaaagagaatactttggacgaacaaaaatggggccgagccgaatcaattgcaggcatataacggatgccacatcagatgccacgttggatagtgacacgtggcgacatgttgaccgcacagaaggattatttttgtgaagtcacgagtgagctagaactttcgggaaaaaagaagtgcattacttccccgtaatcaaggctgtcctattgcttgccacctttcatttaattaggacacacttttaaaaaaataaaaatgtgtttcctaattatatgtttttaaattttaaaaatgtagaaaataaaaatgtgtaatatgttttgtaattatttttgttttttaatttaagaatttcttcatatatagctttattagagttaaattttatatttttattactattagagaaaataaattaaattaaaaaaaattagttttttttcttcaaaactacgggagtcttcttttctaaaaaatttctccttcttgacagaataaaataaagtgagttgctctctattgtaggcaacacttcaccaaacaatcaagtgatggagatctaccagagttgtaaaagctttttgtgatctccatgaatgccgactaagaacgattgagggagatctcttagaattttcataccaggacgctttgggttttctttaaaaaaaacaaatctaatttttt

SEQ ID NO: 218651 - DNA, 6019 bp, Cannabis indica
cggttttaaaactgatcagttatctaaatcctaaatgatacttactttgtatataaagaagtgaccaaattaaataaactaagctgaaatctttgcaacagtggactaagcagactaatctctaactgaatcattataattctcttgtgtacttattatttcctgcatatattccgtttgtttattagttaatagtttaagtactcgctactctaattgagtactcacacgttttaattaagtgttcttatttgtattaaatactagcacaaatttagtgtttatctaaatttctccctgttaataaagagaaacctaaaaataacaaaacataaaaattatagttaaattagtgagtagtttttacaaataaagggtttattattcaaaatagagttgcataatatatattgtattttgacaacgcacaaccatttggcatttactctaacagaaaacaccgagaccttatcgaaaagcttttggagccctacaatggcgttaactgcttcagcagcagcgctttcacctgtcaatttcaacggtatgctctctttccccctctcacacttgcacacacttttacaattaattgaccccattttctcaatttggtcattacaggcagcggggttaatcaaaggaccaacttgtttccccgtttttggagcagaaaagggaccaatttgacgttcctcacgaattctcgaaacaaaggagctggtttagtcgcttctgctgccactggggataatggaggtgtcactgcacgcaaattcgaggctgaacctgcacctggattgtactcttggccagataataaggttccagtttatatttatttactcttatccccaattaacaaaatgacttcactcatgtagccatatacaatattaagaatttaagggctcagggtatatgcatttgggtaactgctagacgaaatcaatggaaatttaaagttgtagtgagttctgttatgtaatttcttggacatatttgatgatttagttattgttttcttgccattcattatcttggcgagtagagtaaattgacataaaagtgaataataaacttaattctccagctgcaaaggaccaccaattgttgaattgtatgttaagcaagaaaattcaattagataactaaattatacggctaaacgacagaaacagttaatgattatttatgaacaaagtaattataatttcacataatatattggcatgagagacatattgacattggaatacatatcaagtttcaccaccagcatcgatggatcagtttgattatatatttcttctgttttatagttttgaaaatgtcttttttcttttttctttctttttcattattatggtcagaaattttgtgtgaggagttattatgtgattcttttagctactctgatctttaatttcagcaacagttttttccttgcagagaccaaggatatgtatactaggtggtggatttggaggtctatatactgctttaaggctagaatcacttgtgtggccggatggaaaaaaacctcaagtaagttgatattcaaatttgtcttcttttcaggcattatgtttgtcatagtatatggcatggttatgtgcttaatgcatcaatttcacagcaaggtcatagcaagaaatactgttttgagaatgatttttattttttttttatttattatttattatatatatatatattttttttggagaagataatattctcagtgattgtttttggtccttttatgtcattcttttttgaaacagtgatacttatttccatgtacatctagttaatcaatctaaacattttgttctcagtaattgtcttgtcttgattgtcgtctgatctataagaacatgaagggaaacttgtgcaaaccttttggtctttttatgccattcttcttaaaaaacatggatacttatttcccggtacatctggcctatcagtcttaacatgtcattctcaataattggtttatgatccacaagaacataaggggaaatgtgtgcaaaccttttgctcttttatgccattctttgaaatgttcatactcatttccaggtacttctagtcgatcagtctgaacattttgtttttaagccaatgttgtacgagcttctatctggaggtatgttttttttgagttaaatatcatttcttcttcttcttcttcttcttcttcttcttcttcttccttttgctgggtatgttatttagttaaacatcactttttctttgttgtcttccattttatttaattttttatgacattaaactaatttatgtaagtttttctattacatgcaccaacttgattgttcgcagaagtagatgaatgggaaatagctccacgtttcaaagatctgcttgcaagcaccagtgtcttgtttttccaagacagggtcaaatctttgcatccatctgatcatttaggaattaatggacctacaacatctagttgtggagggactgtgcatcttgaaagcggtcttcttattgaatatgattggtatatctataaccttccttgaggcatttttttatagtttttattaggcctagaatgtgaaatgctgctttaatttcggagaggcagaatgggtaagctgaatattattgaataaaatgtaaatgagttacaaccaaaaagtctttttatggactgattaacagttcctacatgaatggaaattgtgatttatgatgtataatgagctggatttagaaatcctaatcctactctgataaaataaagaaatacagaatcctcgtagtagtaggacatcttgttaatatcaactttgttatcacgtgatgtccaatatcaaatcctgcagttagctattagaaacctgtgcaagagcaaaacctttcactttgtattataataagtagcctggtaaagagtggcccatagatagctcaattactctatttgatagaatttattagtgatgcagtacgtagttttaaacctgtattagagtcattagacagagtcaggttggtttgatatatcatcactaatgtcatgtacactgtcgactcttttgtggattttgtgtaaaatatatcgttaattctgatatgatgttttacttttcatttctcgctcttgttggctctggacagacaggctggttctttcgttgggagctgaaacgaaactagatgttgtgcctggagcactagaatttgcattgccattctccacccttgaggatgcacgtgtgagtttcttaccagttgaagaacctgcttagcagtccatttgggctaacattttcagtgtctacaccataccttgtctgcctttttcattttttgacatttttgtgatgcagagggttgaccagaggttaaaaacactggaaagaagaaattttggtaaaaactccctaataaatgtggctgttgttggctgtggttatgctggagttgagttagcagccacggtatccgagagattacaagatagaggtatagtaaaggcaatcaatgtggagacaacaatttgcccacaggcatccccaggtaacaaggaagctgcattaaaggtaagttgtattctattataatgcttgttgatacctttaaagcatctatctttgttttgatagtattatggatgatattatttttctgggtatgcttaaaagttgtcattattggagatgatcaatctgaactcaaacgtgttcaaaaacaaaaaaaaaaaactgaactcaaatgtggttaataaatatatcactattaaagttattgcttttattgtctctttggtaatttatatactattgtaatacttgttaataataccgttaaaacatctatcttttgtttctattattatggatgatatttttattttgggtatatttataagctatcattatttgagatactcaatctgaaattctaaaatgtagttaatatgtcactgtcaaagttattgcttttaatgtagttctgcattgctttgtctatatacatatattgcttttattgtctcttaggttctctcaaccagaacgctcaacttcttttgggttgcctttattgtgtctcttaggttctcttaactaggaatgttcaacttctattggggtatttcgtccgctccattagcagagtggaagatgttgaatcttcaattaagccagatgattgtgaagttgtacagtgtgattcagagaaatacatattggaacttaatcctgctgagaggggattaaaaaggcaaagtttggaagcagatctagtactttggactgttggctctaaacctcttcttcctgagctggaaccctgtgaaaggccccatgagattcctctaaatgccaggggtcaagctgagacagatgaaactcttcgtgttaagggccatccacgcatatttgcacttggtgattcttcttctttaagggattcacatggaaggattcttcccgccactgctcaggtattctaatatccgatttccttcgaaggattaacaatatcaatagtttgagggtaacttttcaagattagtttatgaatatagcactcttctaaactgctttctcttttttatgattaatctctatagactttcaaagaaaactgtttgttatctgatctttggctcattgctacttccaggttgctttccaacaagctgattttactggttggaatctgtgggctgcaatcaacaaccgtcctcttttgccgtttaggtacttgccccttgctccttggccctggtattgtcattaaaatattccatgttcttttaattcataaagtgcacatatctaagatgaacctcaaaatcaaattgcgtggaaattgtgatatgttgcatatgttgttaaactagattttgaagcattcaatactgttgggtttttgctaaggctttgacttagagaagcaaagtgaaagggtttattctagttatggacctattaggaaataatgtttgggaaaaaaattgctttgtgttattgatgatcctaaccaatccccctcatacttggggttgataaggatctaagtttgagtttgcttcttagctcaaagaaccttgtactagaaatagctttagttagtaggttagctacttgatctagagaaggtacacgttttatagtgagaatgccatgaagaactttttctcagacaaaatagagatttagctcaatgtggttggtcatagcatgctcaacaggattgacagagagcacaagaatgcttagattgccgtagcaaacaagtaaattgctatgaagcttgatttgtagctcatcaagaagggatttaagccatgtaatctcagctacaacatgggctagactttgatacgctgctttggttcttgattaagaaaccatattttgtttctttgattgcggggagatgaggttgttgccaagaaatatgcagtttcctgattttaattgccggccatccggatccgatcccaattagcatcacagaagacttcaatggtattctggctagattgaaggtggagtcccatgtctaatttgccttgccttggagatgcctaagtattctctttaccacttgccagtgtgctccagatggattttgcataattgacaaacccaattggcactaggaaatttcgggtcttgttttggtagcatattgtaatgctccttctgtacatttgagtgtctcgaactggatgaccatcatatgctgttatcttttttgtcctgaggtcataggagttgtttgtgagttgtatttctaagaagtagttgagatctcccaagttttttagagcagactgtttgtttgtaattattttgattgaaggaattagaattgtttcttgctttaattttgttactcccgccattgttgttgaagtaggcgggattgttgttctacctaggcatgttaaaagtaaaggaagagttttgggtaacaagatttgcagctgcttttgacgatatcatggtcagtgaagggtttt

SEQ ID NO: 218652 - DNA, 6111 bp, Cannabis indica
ttgcccagatgctccttttatgtgatttttttttatgcacgatgttttgatgaacagttcaagagcttttgtgtgtacgtgaaataaaaagggaagcttactttctttctttttttggttcgaagacacttttttaatcttgtattctgggcatgctgttgtttttattcaaataacattgatatatttttcatgtaagagaaggatgaatgtgaatttatgactttgatgctgttaatattctgtgtgaatatatatattttttataatttttctgtgcaaataacttttgaagcaaattgagttaaaaactttatagtaaactaaaatgcttacaatttgtacaaaaatgatctaataaattgccgaaaactaatgaagaaagtattttcactttgtgaccaatatatgaggagatgagtgaactttaaaagtggcgtttgacatcacaggacagaagctgtaagtaatattatctacgtggggtaaaaatgttatttacagtcaggttcttgatagttcatagcagaatgttttgactgatgatagggatagttgaaatcttgatatgaaaatgtagtggtagtggacaacataaacatttctatggagtttgattgatggtaacggtaacagatgaggagagtttctgtagttgttttggattctagggatgtaattgtaaatagatttgtctaggaagtgtatattgacataatttaggaggtgcctgtgtaactttactttaaatttgtgattcatcttaattgtgaatttgaaacttctctcaagttctaagagttatcacagatggttcagttttggggatttttctatttgtgtgggaaaggttgggaaaaagatggtaaaagaaatagtaatggatgtatggagatctgacactggtcttctccttttggtttttatttcttagtcaagaaaacatatatactatggtaatgtagcacagttctgttctatgtttcacttaaatgtatttacttttcagggtttaggatttcactgctcgacttctgaattccacaacattttattttaggttcaatttgagttgattattacagacccatggttgatatacctgtttcaatttgatttttatttgcaatttcattatttaatttcagcttagcattcaagtttacatttggaggattgagcatgacattcaggactatactgtaaattttttggtcataatgttttaagtgaattccttaagtttgttgtttatgccatggttgtatggaggaaattctaatctcaatgagctgctctgttttcaaatcataatgtgtttttgcttctattgtgccttttcttgtcaagtttgatttgaaatgttcgttttttattttttaaactttattttatttatttatttctttttttctcaaaagagataaatagtgcgctcaatataatcagctccgatcatctggggaaatagtcatcacctccttttatttatttcttgactagtagcaactaattttgtatcacttttttcattagggtttgctgccaatgaaatcaattgaaaaatgatagaacatggaatttctagtgttgcaatctggggtagctgtatttatttagatcaagcagctgcttgctggctgataacaataaatttataataagcatataagaagattgaccggtaaatggagtgtaataaagatgaggccactagggcaaaagagattgccgaaaagaagttcttggcaaaggacatgttgggttccaaaaagtttgctttgaaggctcaaaatttatttcctggacttgaaggtatccctcaaatgctatcaacacttgatatatatatttctgctgagaacaaaataggtggggaggcagattggtatgggatacttggtctggatcaacaagcagatgatgaaactgttagaaaacaatataggaagcttgctcttatgcttcatcctgataagaacaagtccatcggagctgatggtgcatttaagcttatttcacaagcatggactttattgtctgataaagctaggagactagcctatgaccagaagaggaaggtgaacatgagccagaaagttcctaatacaagtgggggttcaacagcaacaccaggggtgaatttcacaaaatccacaaaatttagcaagcctccgaaaagtaccagtcgagcaggtcactcctcaaatcccacttcagctcacaagcaaaaacccaataccttttggacagtgtgccatcggtgcaagatgcaatatgagtatctcagagtttatcttaatcataatcttctatgccccaattgccatgagcccttttttgcaattgaaacacctccacctccttcaaatggctctaagtcgtcagctgcatggaacttttcacagcaacgacataattcaaagaatcacaaatcaaataaaaatgcttctaatccgggaaaaagcagtgctgcttcttcaaaagcaggagccgaagggctcaatgattctgactcacataaccaaaacaactttcagtgggtccattctcaagaacaggtggtccttcaactgctactcaagcagcaactgtggtacaacaggcctaccagaaagtgaagagagaacgtgaggaagcacaagcagccaccaagagagaggaagctttgcgaaggaagaatcactctaagaaaatgagtggttcttcctctgcaggtcctaatgctgcaaagaggagagaggtgccgaggatgctggtttaggaaactctggaaggagctctataaatcagatgggtgggaaaactggagctgtgaagtcttctgggtctaagcaggttgattctgaaactagcagaagggctgttcccgaacttgaattacataatttattaatggagaaagctaggaaggaaatttgcaagaaattgaaggaatggagttcagccaccataagtaaacctgtgaccaatgaagaggagattcaggacagaaagacacatgagaaagaaggcaaagctttgagaaacagtgacatgcaacagcatgatcaaaccaatttaaaggagccagtgagtactaatattggtaaaactgataaggagcttcgtgggacatcatctagtgtcaatataaaggctgaagcttcggaaataatgtcaataagtgttccggatccagattttcatgattttgacagggaacgaactgaaaagtcttttggagaaaatcaggtttgggctgcatatgataacgatgatgggatgcctcgatattatgcctttattcataacgtcatctgttctaatccattcaaaatgcgcatcagttggctcaactcaaaaactaacagtgaattgggtcctttaaattgggttgcctcaggtttctcaaaaacctgtggcgattttcgtttaggtaaacatgaaactaatgactcactcaattcattctctcacaagcttcgttggtctaaaagcgcaagtggaatcatcattatatatcccaggaagggagaagtttgggccctttatagaaattggtctcctgattggaatgaattgacagcagatgatgtaatacacaaatacgacatggtggaggtccttgaagactatattgaggaactaggagtgaccgttgttccccttgtcaaagttgctggtttcaccacagtttttcatcagcatttggatcctggggaggtcaggaggattccgagacacgaaatgtttcgtttctctcatcatgttccatcgtacctgctaactggtcatgaagctcctaatgctccaaaaggttgtcgtgaactggacccagctgctacaccccttgagctccttcaagtaatagcagaagctaaagaggaagatattatggagattgatgaaaaagttaaggaagataatgtagtacatagtgtcgaaaagtctaatgacaatggggttgctgagaatttaattaaggccggcaacaaagggaagagatgtttcgaagatactgaggtaataaaactcgatgaaaatgcagaagaaagcaaataaagagcggtgagagagcatggcaaaacttctgatgttggttgagtcatgtgaccttatttgcacagaattatgatctggttccacattttttaagcattttgtgtcttcagattgcccgaggccccgccatttgtttcgaataagtcatggaaaagctcttccagtaattctaaccttatactattggcaacttaaatatagcaactctaaaagttacatgttattgttgctgtctttgagttgcaaaggaggcccagttcaaggatatatggaaagatcaaggcttccccaacaacaattttgttatctcacactgttcctttgtgttctatttattggctttggtgatctttttcttctatatgatgtttgcttaattcttaggttagatctgactgtaatagatcttgtatattctttcaaatctgcttttagcaatttagtacccattgttaaatttgattaaagataaaagttatagtgtagatattgatattgatatcatttggtttacaaagtgtgtaaaacccatgttcatgaattacagtgtagtgttattattattattattaactattattttattactgttgcaatatgttgtttgtatgtgtaactggttttggaaatcaattttgaatgttcacaatacaaggatcagctttttcccaaagaagctttcctgggtttaaaaagctgtatttatatttgttgtctctcgtaagactcatcacactcaccttgtactgcaattaatccctactactcatgtttttttctaatgcaaattggaattttattaatttgctaaatcagtcaaaagacaagattgtaattcaataagaacatctctcccattgaaaactcgatctggaaaagaatatgatgctctaacaaagttgtgcgcaatcatattagtagatcgtttaataaaaagcaaagaaacattgtttgaaatagatagaagctttcgacagtccatcaccactctcctaagaggcgaaaccatggtgatgttacttcgaatagcttgaacaattgagagacaatcggactcgagttcaacattatgtcattcatgatccttgattgaacttagcgcctctttaatggctaaagcttcaaccatgtctggtgccagtaccactgccaaagaactaaaagaagaaaaaaaaaacagagcactcaaacccaatacgaactttgcatgtcagaagacaagacaccatgacttacaatttatactttaggtcatttaatcacttgtggtgggttttttagtcggggaagaaaggttcagattttatgactgaatttttaaaactagaatctaatatctctaatcctagccgtatctgaagaggagtagaaagattagaagtttgaacgcattagaacttaaccctatctgtgatctgaaaaagaaaaagagaagaagttaaaaacccattagacccgtaaccggatataacaaacttattttattatattcattatttatgtttaaataataaaatatagtaaaatattactctagtggtggatgatgtagtctcttttcgatccaatttaattagatatcaaaatttaatataatactaatgcaactaaaaatttaaaatgactcattgtacaaaaaaaaaaaaattaaaataactaatcaacaacactgttaattataaaatagatcaaatatataaaattaaatacacaaaacaattaagtattataaattcaacaaaagaaattcactaaaaatattattaaaatatatattatatattgtttttattttttattatatatagataaatataaacatttttttaatatatatatataaatatatataaatgtaagtgaatttgatcagtttttaaattttgagattgacacctcataatcaatctaattcaattagaatttaatttttagcatccagtttaatccaattgtatttagattctttattatgtctagtgtggttcatggagcctcactctcacaatcacttattttgaattttcttccgaaaagttcttgttatattttataaaactgttttta

SEQ ID NO: 218653 - DNA, 5734 bp, Cannabis indica
aaaatcaaatgaaagttcactgggatggacgctatccagtacgtatctctgaaaaacaaactggactttttatgctctcttttggctgtgaaggggacaaagaaagagttctcattggagaaccatggcacttccagaatcatcacattgttctctatgaaccaactgctcttcaaactgttactcctgctgatcttaaattttcaccattctgggtacaagtctacaggctccctttcttaagtaaaacaaaagggttagcaaaagctttggggaatatcattggagagttcatagatgttcatgaagattctttgcatgaagggtggggaccttttttgagaataagagtcaagcttgatgtcacaaagcctttgagaaggggtcgtaatattcggttacaacaaatcaaagacaagttttgggtggaatttcgatatgaacgcctccctgaatggtgtatggaatgtgggtgcttgggccatccttaccaaaaatgtttagccttcttggaacttctggacaatggaatcgaaccagaattagcatacggtcctgcgatttaaggtgctgctttaccaacttcaggctacgacagatatcgaactgatttttcaaaggcaaatgcttggcctttgatgacaagattggctagaaatactttctcagcaactataccaggccttacgctacgcgatcagccacaaccaagaaagcttctctatggagaaagttccaacaagaaccaaactgaaaatctgtttaaggaaaaagccactcgaaaccatgatgcaattcctatgaattcggcatcaacaatcccacacattgccttaccaaacaatgatctttggagaacacaagacaacaatattggacatctttctgcctctaatatttttcatcatgaacacaacaagctgatgcaacaatccattcacaagacaacaaataattgcagcaaaggttctcttaacattgcagcagataaactccccagtagcagtgttcaatctgctatttcatctccaccagactcggatttgactggcatttttttgccgggtgttggactcccacaaggttacattgcaacataccctcctgatgttaaatctattgttatgcctgatttccccaatgtcaacgcttatcctaagcaacactacctaaacacatcagattccatggttacaactactgctgctcatgatataaacaaggagaaccaatcaccgaatagagtttccaaacggcattcagaacaaatgtcattgcgaaaggttcttaagcgagtgcggggaccaattccttctctctcaacttcagaattgtccactgatgctgagatcaacccgatggcttctactcctgctgcagatacatctggttccaaagacaaaaatgcgggtgctggtttccaggcccgcagccagccatgaaaattgttagttggaatgcacgtggtctggggaatccaagtgcattccgtcatcttcggttgcttgtaaaacagcaagatcctcatgttttatttcttatggaaactaaattagcttgtaatgtagttaatcgctttcgtcaatctttacattttaataatggacttgaagtccctcgggtaggcttaggaggggggttgcttttgttatggaaggataatgttgatgtaactcttttgaattataatgcaaatctctttgactgctacatgatgtgtgacaatggaccaacttggcatttctctgccttctatggtgcacctgaaactcataatcgcttacacacttggaagctcctagagcgttgtaaggatgttgcaccactgctgccttggctggtgattggagacttcaatgaaatattatcaaaccagaataaaaatggtggagctcctcgatctgaaactcaaatggaaaactttcgaaaggtgcttgatgtctgtaatctacatgagttgccctttgagggtgatcctttcacttggactcgaggaaggcgaaaactgaatgctctcaaggagcgcctcgactggtgtttcactaatgatcaatggcatgacgtttttgagccaattacaatatgccatttggattacttcaagtctgaccatcgagccatttctgtgaatgtcaatcaacgaacgggcaatcaaaatcaaattcaaaggcactctcgctttaggtttgaaaaaatatggctcaatgacacagaagcttcagatctaatattgaaaaattggaggactaaccttactggttcggctgtggaaaatttctgctctaacatacaaggttgcacaacttctcttcaatcgtggcactctcaaaaatatggaaatatgaagaagaaaattaccaaggcacaaaagcatgttgctgatctcaacaataccaacccacattcagcagcaactatagcagaattggaaaaatctgaagacattttggatgaacttttagcgcaagaggagacctattggcaacaacgatcgagggttgattggttacaatgtggtgatgaaaatacaaaattctttcatgcatatgcctcaaataggaagtcaaataacactatccgatcattgcaaaaccaggcaggggctgtttcaacatcaaaaaatgacatgactgacattatttgttcctactttgatgagttgttcacaactacaggaactgatcatgatgcattaaatcaggttttacacactattcccacttcagtaacaaccgagatgaatcaacatttactgactcctttcacggctgaagaggttttgattgcattaaactccatgagcccggataagagccccggtagtgatggtatgtcgtcaatgttttatcaacactattggaagattgtagggccagatgtaactaatgtggtcttaaaagttttgaatgaggatcatgacatgagtgctttaaacaaatctatcatcactctaatcccaaagatcaaaaagccgaaagctatgggtgattttagaccaatcagcctctgtaatgtaatatacaagctgatttctaaagttttggttcttcgattcaaagatgttctcccgtcagttatttcagaatctcaaagtgcgttcctctccaatcgtctcatcacggataatatattggttgcattcgaacttgtccaccatcttaaacataaaactcaaggcaacaaaggttattcagcgcttaagttggatatgagcaaagcatttgacagagtggaatgggattatctatctgcagttatgggtaaaatgggcttcgatcagagatggatctctctaatcatgagatgtctttcatctaacagtttctcatttcttctgaatggtgaagtcgtgggtaatgtatggccaacaaggggattgcgtcaaggcgatccgatgtcaccttacttatttttgatttgctcagaaggcttctcacgtctccttcatcatgaggaacaactgggtcatctacatggtttaaagcttactcgacatgctccatcaatttcacatctcttatttgctgatgatagtcttttgttctgtcaagctgatcaagcttcagctttagcaatcaaaaatgtccttgctatctaccatagagcttcggggcaattattgaatactcaaaaatccatcatgtcattctctcccaacacttcagatgtggcgaagaatttttagtcaaatacttggcatgccaatttgtgagtgtcatgaatcttatcttggactccggcttattcaacacataataaaaaggaaatgtttagcagtatcaaggaaaaaatttggcggttgctgcatgcttggaatgataagcttttctccattggtggtaaggaggttttattgaaggctgtggtacaatcgatcccaacatatgctatgagttgtttccgattgccaattgggttttgcaaccaaattgaatcaatgatggcaaacttctggtgggggtcaaacaaggacgggtctaagatccattggaagcgatggaaaatgttgtgcaaatcaaaatttgaaggaggtatgggcttccgttcttttgttgatttcaatcaagcgatgcttgcaaaacaagcatggagaatattggaaatgccacactctctcttaagccgactgttaaagcatcgatatttctcaagaaattctttccttgatgcacatttaggacattcaccatcattgacttggcaaggaatttattggggaagagagttgcttttaaaaggtctaaggtataaaataggttctggtttgcatgttaggactggcttggacccatggatcccagggcatagtgagtttcggcctgttagttacattggtcaacctgatatgccagtatctactttcattcaagacaccatggaatgggatttgactcttctcggtgagtactttgggcaaattgacattgaccgtattgtaacaatccctttaagtttttaccaagcacaagataaactcatctggcatcataattcgactggaatttattcagtcaaaaccggttttcacctggcaaattcaatcacagatgcaaatgaggaatcaacttctgataataataacacttggtggaagtttttttgggcactacaattgccaccaaagattaaaatctttgcttggagagtcattcaacaagctctgcctgttgctaaagcattgcacaaaaggaaaattatagattcagcaacatgctctagatgtcaatgtgcttgggaatcgattgggcatgcgttattcacatgtaagtttgctaaggctgtctggaagcaaactcaataccgtattgattttactggtgcccatgccatgtttaatggcgattatgttatccacaaagcaaaaaccatggataaggttgagtttgaaaatttcatctgcctactgtggagtatttggaatgatcgaaatagtgtattacatggtggtacaaatcgtgttgcctctgttcttgtctcacaggctcaaatctatattgataaatatagattagctaaagcaaaaggaagagagcgaagccatacaccagaccaagttgttccaaaccagttgctgccacagtctttaaggccaaaccagcaaagtaatagccagcaaggtgcaacaaaccagcaagtttctcggccaggacctgatattcctcagcaattgcaacataactctgataataatgctgctggtccaactgctactgctgcaaatgggataccatggaagccgccagatgtcaattgtcttaaaatgaatgttgatgcggctgttaatgctatggataaagttttgggtataggagcagtagttcgaaattgcaaaggggaagtcgttgctgctttatccaaatctgtccaaggtcatttcagaagtgacgaaatggaagccaaagcactttttcacagtcttaattgggcatttcagcaacaaataccaatatcacaagttgaaacagatgctctacgggtttcttcagctttggccacgtcacgtaaagatttatcttgcttttcggatctcatagatgatgttcgttgtcttttgtcctttttccctagagttactgttacgcatattcgtaggcatgctaatcaagctgcccacgggttagcgaaatatgctctagagttggatgaagatgtcttttggatgggagaaatacctcatcctattttttctattattgtaaatgaactttgatttataataatagtgaaaatttct

SEQ ID NO: 218654 - DNA, 10005 bp, Cannabis indica
aaagataaaaaagagatctaaaacttttatgttttgactttttccaaaatatgatcagaacatagtcgaatttaggcttgaagtttcagctttattctctttcaaaattttctctattttatagatcactgttttccgaaatttgtccaatttatacattccaagtgttgaaacctgaaaccaaagaaaacaagcgtaattctattccaaaaacaataataaagaagaaaaataactataaaatgtgatccaaaacttaggctaaaaatagcctaacaatatatttatatagattacctcacttgtggcagaggaaaaagaacaaaaaaccacggaaaaagtacataaaaggaaaaaaaatggtgtgaaccttacgtcccctctcccatacactagagacttccattctctacacaaatctagaaaagataaatcctcaaaatgtttagacttgtatacccaagtagctgaccagaattttattttctcccaaagttcttcctttgaactctcgcgaccctcaaagattctagaatttctttccaaccaaacagcctaaattaatgccataaccactgttctccatagtttgcttttgcttttgctgccccttagtttactcaccatcattagtggaacacaactgggcatagcccaaacaagtttgaactcatttaccaagtgcagccagattccacgaacataacgacattctaaaaataggtgttccaaatcttccccgctatttttacagcacacacaccagctaggagaaatacaaatgtaaggtcatctcgtctgcaacttctcatgaacattgactttgcctagagccactagccatccaaagaccttaacttttgaaggaactgagcttttccaaaggatccttgcccaaaaaaggccactatggtttgggtttgaagtaaaccagctaaaggcagatatacaagagaaaatgcctccagaattaagcctccaaattctgatgtatacatctatggtgagcagccagacatgctccaatcgctgaattaagctgataagactagggacttccctatccaaaaggtttcttctgaatataaaattccaactcttctctaaattgcctggcaacccttcgtccaccactagctcccttatactttcattcttggctttggagatcaccgctaacatcggaaagacacttttcaaagctgaatctccaatccatacatcttcccaaaagcaaatgctacccccttttcccgctttaaaatacactagctccaaatatttgtcatacaaatctgaaatatctttccagggtccttgtggagataaccgaacacctttttttgagtcccaaagattctcggcttgaccatagcgactcttaatcactctatgccataatgaattcagttctaaagaatatctctaaaagccacttcataagcggccccttgtttcaaaaatccaaatttccaatggcgagccccctctcattctttggcttacatacctccttccatgaaatcaaatgttcactgcccaatgaatctccatcttcccaaaagaaatcttttatcatcttttccaaagaccgtgtgactaattttggagctttgagaagagggagagtatattggaagggaagataagatagactgaataagattaagcctatcttccctagatgaggagcagttccaaccgtcgagtttcttggcacatttatccataatcgaaacctgaaaactcttcttcctaggcgagtcacctagaggcattctaagatatgtcataggccacttgcctacttcactcccgatttgaagagctcattgttccaccactttttcattcaggcgtagactcaacagttggctcttacttaaattcacttttaatcctgaaataccacagaaggctgcaacaattctaaccaacttttgaagtgactcctcatcatttacaaaaaatagagtgtcattcgtgaattgtaaatggctgatttgcactttatctttgccaacactgaatctcgagaaagaacttgaatccaccgctttattcaccattctctcaaggaaatcagacaccaatgtaaaaaggaatggagatagttggtttccttgccttagtccccgagaccctaaaaaccttccccttgtactcccgttgatgaagatagagaatgatgttgttgagatgcatcctctaatctatttcctccattttctccaaatgcctttttcaacaaaacccactctagaaaatcccaatccaatttgatatgtgctttctcgaaatcaatcttgaaaacaaagccactcttgcctcgtcatctataatcttcgacgacctcattattgaatccaaaatttgtttgccttccatgaaagcagactgagtttctgatattgtgtcacccaacactcctctaagtcttgtagcaaggagaatgactttggcgataatcttgtatacactagtaatgaggctgattgttctgaagtcttttaccttgcaactgttgagctttttgagaataagacaaatgaaagtttcattccatctctttcaaaagctttgactaccaaaactcccaatggccgggagtagtatccaagctttgaatcttgatctccagatacttccaataaatcttctattaactgcttccttcttaacttcttgtaaaactactagatctggattggccttaaaattagttgctttaattgtgtttctcttctttttatcaccactacctctaatattccaagaaaggatcttcattaatcttttttcatggcccctatctttttgtagctcttatcataattcacattgaaggtcaggtgatttagctctttgcatttctttctcccattcttactcgctccttcgctctgccttcctatctctttgttttgcagaatttccaatcccaaatccgccagactcaacaatcttgtcccacaaagagtcctccaaattaatacccttttttctctgattcccttctagacttaactgattttgagatacctcttcctcctctccaaagtccctacatgtcacaaataatgtcttcttggtcttctttctcatcctcatttgaagaattccccatccgcatctgacgagtcacactccgaactaagttccagaaagtcttcttccaaagatctattgcctttttccaaattctcctagaagcttcccaaattctatccattaaattcttcacagaagtgatctattgctttccttttcctattgtaaactatcaagtcttttttcattcaccacttcctcttcttgctcatcttctccatccttgtgtaatactttattttctcccattcttttgttcatctcaaagtcttcccagaagctaattattgtcgatttaaagctttctctagcttttggttttatcgacccaagtagtcctttgaagaattcgtttatcgctagtacgtggctctttttaacgcttagggccttttcgtccttccccgacccaattcttcttgtcatcaaatagtccttggtctccttttcgatcctatttgagagagtagttgctagacaatctcggcccatcactaaactgaaaggcttattacaatagtaaattaattcccctggtttaagactatgaagcccatcaaacccccagtcctcactccttggtccttctacatttcggccaaatatctcccggcccaaactatgatcatactgacacatgttttttaaaagggagaaagcacctagttctggactcttgacaaaatttggtacacgtgtcctagacaaaccctgaaatagccgaataaatattctcttcaagttatttgacttctcacctccgcatgctctggtttcgggacttgaaatatcaatcaatgtatttaaataactacggctatccacctcgagatttgctgaatcaccaatggcttgctccatccccatcttctcgacttcttcctcaacgcaatgattctccaccagcgtctggttctccgatacctgaataccatcttctttctaatcagtaatggcctaaccatccttcaatacccccgtatatcaatcaaccaccatatcgtccttatttgttccttcaatcgagcattcttcaaacccctcatcattatcttttaacagacggcacatagccatgtcttgaaaccagagtgtattgaaacctccattaaatctataattcttttcgttgagtttgaaaaatttcaataccaagtgaaagttgtcaattgttactgctaaggtctgaggaataaagccattagaatcaccctccaatttcaattttatgtgaggcaaaaaattcatttcagtagtctctttatcaacgtcaaggggccttctgcataaggcttcgattttcctcattgttttcattttccagagatttataggaagcccttcgaccccaattcaagaccccttgcactcaatcttcacgtctttgctctggttttcaagcgaccaattgacaaaggtcactatcgcatttgtgcctgccactttcttctattttatcttcaacaattcctcctttttgttctcattcttgcaccatataattctcatgtcatcaaacagttgatttcaagtttttttcccacttccatgaataaattaaaaaagatgcaactccaagaacttttactgttatctctaaacataataactgccaacttccagtctttaatacattgctttgcactcaaataatccgtgaagtttttctggttgagccgctttgctggaaagttctttataaaccagaatccttgctcaaaagtgggtaaaaaattccattcaccaagattgccatatttcatattcccctggtgcttctggtatcctcccctttcttccctgagtttgttcccatttttttgtggtgctacttcttaagccactgattgtttcaccacgttagcccatgaagctttattgtggtttcctgattttaccacatggatctcttctactctcctcgtggactttcttctcaataagttgctaagacaatcttcgaactccttccagcccttcaccttaacttcttcagggatgatcaccatcttcacaatgttctttttcagtacagtaatcttaagaaatacacccttcgcattctggaagacttccaagaagcagctgtttgtattgctctgaaagaatcttttgaatgagttcctctgcttccctatttcttctgtatctcctccaaaatttccagaatccaaactgctgcatcaattgttacagcaatcttgaatcctgctagtcctctcgcagattctcacaaatccaccatccttggacaaagttagcatgaatgctttgtgttcagttatgaaaatccaataccgatgtggcctagaactttcagactcagaacacttttcgactcccaaaccagtagggttatggatgtttttcttcccatgaccagtggagtcatggtgccaggacaaccggtttttcccatggccagtagtagggccatgaaaattccttacgtgcctgaaagtttctttagagagaggagagggaaaaaatgtttaaaatgtttgtgtcataacaaagcacaataacaaaaccgaaaataatagataatcaaaataatacaatgaatcaaagagaaagccataggaaaataaataaagctattatgttaggtgctgccaatccaaatcagaaaataattataattaaaccctctcaccaattccgaagacaaaatacccttacattcacttacattaagtacattaaactgatttttattgttctgttcactatactaatttattgtttgatctttagggtgcaccaacaactgtgttgaaagatttggagacgcttttactgaaaagttctcaagaggtttggacactcttacgttttaggttgttttgtccttctatagtttgattcgtccctattagattaatacaataagagatttgacctctctctttttctcccttgctattttacctttaaactcatcatgaagactattttcttgtgttgacataggaactaagtgaagtgagatattgtgctgtgagatgggcaacatcattgtttgattcacaacattgccctagtcgatttatttgtatgctcggggcagctgatactagtttggatatcaggtttggtttaatttaaactttgaattacgtgccgagatcacattttttttcctgtttcattacacttttatatttaagtaaacattatgtttcatggaggtgagtgttttatttttatgtttgtttttctcaattaagtaaactcatgtataaataatgctaatttgctattgctctcatggttggctcaaatcccacagttaattaagcacagtagaataaaactttcatcttttatagaatatttaaacattattaaaactttctatagttactttgcatgtttcttttatctgtttccaatgtgacttttgtcccaccttttatttttaatttttctccaatgctggactttctcaaatcttgtatgcaaaaaaagatcaccattttgtatgtgccatctttagctcagcctaggcttttaagagactcgtaatcgaaatgactaacaattagattgactagtagtcgaattcaccttcaatcggattgatgaataagaatctgtataagctttttactttactgttaggaatcaatatcaaatttgacagtactccatttcatgtttacttcactttggaatggaagtaaataaaatgcatgttacaaatatacctttatgtaaaaattagcataacaaacagtagtcataatcataaaacaatgtcttataattccataaaataaaaacttcttatttatctataaagaccaaaccaacaaaagctgaggaatgcatcttacaaacttgtgacaaatgtaatttggcatcctgatatatctcttttttcagggaaatagcaaatgaaggcctttttttgaaaaacgataatgggtttagcatgagcggaaaatctgatgtgcagtatccaaatctggaagccatgctagattttattctcagacaacaaccaaagctgttagaatcatctgagatgagagaacaaaggcttctttttccttcaaaaacatatgtggttatgatcaaattcttattgaaatgctttgagtcagcattggagaaacacaaatctttagaagaatcaccgactgttcaatctgctattgaaaatatgtgttcactgttagaacatgctatggcttttgaaggatctgttgaattgcatgccattgcttccaatgcattgattgctgttggatcttgtgtcccagaggtcaatattgctgatacttttgtgcggactaaattacttgttctgtctctttgttatatatataggaaaattcttaactaggggtatcacgtttgctcttaccatagggttattttgtattttcgatatatggacaaattataattccattttttcaatatataacggggtacattattgttacagtacgcatgctcctcagttctagaaaattataaataatttacagtgctgaaagtaggattcaaacattcaattgcatttgtaactttacgtgtgcaattgactattttgaactttatgtttgacaccgtaaatcatttagaacttttcgaaaatacgtgggatgtttgttctaactacaatatataatatcatattaaaaaaactgggatataatttcttgaggtaaagaaaatagaaaacactcctatgttagagtcaaaagtgatacccctacttaagaagttcccaatgtatataaatatgtttatatatactgttacatgtgctaagtttgttgacctgttatttatagatgatagcaactcgttatgcactgaaagtttcatggataaggcaactacttagtcatgtggattcggatactcgtgaatctgcagcacgtctacttggaatagcttcctctactcttcctgtagctacatcatcaactataattagtgaactagttgcttcaattcgtggagtacagaaactgaggtttgtagcatctatatttggggttaaagcttgtaattattcaagccaccttctgttttcagtgtaaattataatatggatacttgaagaaaaaatcaattttgttcagatttgagactcagcatggagcattgtgtgctataggatatgttactgctgattgcatatcccgagtgccctcagtaagtcgtaattctatcctagcatctttcagacatggtttatattcagcatcttcctgattgttggttgcttttgaggacttgaaataataatgttctttagtacttctgtgtcactcgggcttatgtcttgacataatattatctcagattccagaggcattgtttcaagagacactgaagtttcttgttgatgttgttagctctgagactgctacactggcttcagttgcaatgcaagcattgggtcatattgcattgcgagttccattgccattacttaccaatgactctaattcaggtaagcagtgtagacattcaaatattattgactgcctgaatctcccctatcatttcctgtcagccaatttcgaaatattgttaacaagtagcccataattaaactgcagttgacatacttacaattttacaagaaaagttgaggaagctgttatctggggatgatattaaagcaatgcaaaaaattgttatagcaattggacatatttgcatgaaagaaacatcaacttctcgtctaaaccttgctcttgatttgatctatagtctttcccggtccaaggttggtagaactatttttgttctctgctatttactagcttcattcatttacttggttgtatataatcaaatcaatttatttttttcatggtcttattacattaagcattattatttccaagatagtattaataaaagatcaataggttatcattcacattgtattactgcctaggcagtagccagaaacctctaaagattacaaccgcaatcacaattgcaatattttattttttctataatttttttttctagcacttgagtggattatagatgtctaattcctgcagctattgagttgtgtaggttgaagatgttctatttgctgctggtgaggctctatcatttttgtggggcggggttcctgtgactgctgatgtgattctcaaaactaattatagtacactttctatgagttccaactttcttatgggagatgtgaacttaacattatcaaagtatagtaccggtgaaacatgtatggttgatgaagattttcattccactattagagatgcaattactagaaagcttttcgataatcttttatatagtaccagaaaagaagagcgctgtgctggatctgtctggctgttatcaattttaatgtactgtggccatcacccttccatccagaatatgcttccggaaattcaggtttgccagttacaagcaatcatttctcttgttatcttctttttccactttagatatttgacctatcacagtggatctcatttcaaactgtcttcttagagctgaattataatgtagatctttttgactcttcctatgcttttccactaggagtgtttttttctttctaatctgacttgaaaacaggaaattatgatgaacttaattgcgtggatgctttctactttgccctagttaaacactatatactagaactctttgacaaaacctttacatatgaatgcaggaagctttttcacacttgcttggtgaacaaaatgaacttacacaagagttagcatctcaaggcatgagtattgtgtatgaacttggggatgaatcaatgaagaaaaacttagtaaatgcatttgtaaacacccttactggggcagggaaaaggaaaagagcaatcaaggcaagtttattctctttctctctctctct

SEQ ID NO: 218655 - DNA, 4367 bp, Cannabis indica
actttttcttttattttgtcaatattattcagcgatcgaccccctttaattaaagctctcccattataactctgattgctttaaaattacacgatcaaatcaaattgaaaactctctcaatcatatgaaataatgataacatgtcaatagcgatcgatatatataattttcttcagactgattttgatagtaagtgcgtttgaagggaaaccttctttcccgtaattttttgatgtagaaatatcgtgggtctcacacatatggcttttaattagtgagtaatataattttttttttattcttgagttttacattttccatatttgatttccacaccccatgcatattaagctggcatttagttagagggaataaaataaaatagaatggaaataaaataatttttattttatttttttttgtttagttttattttaaaatattagaatgtcatttttatttaagttatatttttattttttccaataacttcatttaatagggtgtttgtgatgtaaatttgaattgaacaaaatagaatttgaggaagtaaactttcagggaatataaaactcatgtgttcgagaagattaatattaccacggttttaatttaaataaaatatgagacttattagaaaatacaaaccccttgtcattcaaatttagtttaaattttacattctctcattttcatcatttaaaccacataccgaacacttcataacacttaataaacaacctatgagtgtaataggattgacgtccgacattgctcgtgagtgaattataaaatttttaagccttaatcctatgataaaatttttgtaatcatcaaataaaagctatgtttggtgtgctaaaaataataatttgttaactattttatcgaaaaataaataaaaaaaattaaaggttgatgtacgagagagggagctgaaaaaggtggtatgctaatttacacttgttatctttaaggatggattgagctgtaaccaccatactcaacatggtgggtagattcccaatctcatttctcaactgtaaaaagataagtgctacactaacagatgagttggaatcttataatatcagtaatataaaaggtaaaaagcaatttaattagaggatataaatttggtttttggtatctttttgtaccttactttgtatagcttcggtataccatgtatgcgtttcctagctagctaggtcaatttgtgtagatctagcttaatttatgaaagactaggcctatttataatcatgaatcatgatttggtttattttaataatgagcttaactaattagtaaatgtttggtagactcaaaatatatatatgtattaatttttttattttaattttaaaaggatatggaaaaaagaattttaagatcaatacgagcacttctaggtcactaattataatatgaatctcgtccaaacacacttataattacgaagttatgaaaaaaaaatctagtgcataaagttatttaatttaattcacactactacaaaattatcctttagtttcagttattttgggtctttagcttgggttttgataaaattcataaccgaaggcatttcaaaccaaacgaaagaggtcaaaaaaatagaagggaaaatagactctatgcccaataaccgaagccataagtaatttatatatatatatatatatatttatatatactaatataaaaaaagaaggtaatttgattaaagacgaactgtccaaaatgatattaactgtgtattatgacaaaagtttttgataattataagtacattaaagaaattgtacctaactatatatagtagtggtatactatacacttttaagggttttttgtggccgggtggagggtcttgtgttatatagtaagagtggaagaagataaatattcgtggggtatatatttagattccaagaagataggaaaaaaatgagtaattcacaagatcagtatggcctaatgaatgattgaatgggttgcactctctcctttagccaaatatggctccatttactttcatcttattggaagataaaaggcttccattatcagacccacattgcatgcttctcatatgaagtgaaaaagtagtgatgataaaaaagccatcttttttacttgctgtctctgtcaaaattagtctttggaaattaaaaaagattggatgcctcaaatagctaggtaaagggtatatatatataatgcataatatatataatgactcatgacccatgatgtatatacgtacttcggtacttatatgcatcattattatttgagtactttgatcatgagtatgtggttctctgttgaataagagatatgtagctaggtagtggtaaagtcctaattctaaggagttttattaattaagaaactgactagtaacaaacaaagatgacaaattttcaaaagaggcggctttgatggagcaataccatatcaattaatatatgtgggaattatatggttaactatagcttgatcagttcagtaagtaaagagaggaaatatttgtaggttaatatattaatatactaggtattattaacatacaatgcatgtttattaaaagttgtattagaggtgttattatttaattattaatttaaagaataataacaataataacattaaatctcatataatttaattatattttttaaatttatttataaaaaaattatatcaaactagttttattaaataataagcaaataatgttaaatattttaaataatataactaataaatttattataaagtatgattaattaattaaactaacgtcaaattcaaatttaaattaagttctatacataaaaaataattatttaattttgttatatttttaaattaaatttaaatatttaatttttaaataaataattaattgattaatttagtgttagtcgttaattttaacggataaataaaaaaaacacagttaaactaattactaaactgtttaacagaattaggtgttgccctaacagattgaaattatataagaatataatatatagaaagatgaaatactatacatacataattagttgttatatatcaaagtataaagtctattcaacgtggtttacattagctagtagtatagatacacaaaagtgacctacagagctcctggaaagagaggatttggcttcaccaaatgagaaagtatacatatatatatatatatttatagtgaaaagtttcttttagcgatgatcgatcgtgtgctcacttttggaatcactacttaataacatgcgggatagagagatatatataaagggcagagcaatgatcgaacaagacaaattgctatagtgctatgcctattggggttgtaacttgtaagtagtatagtaatagtagtagtagtggtccagccacccaatgtacaaaaaaattaattaattaattaattacctttaaatctatataccaaataatacaaacatactgtatatgactatatgagtagtatagtataccattatataaaaataattaggacgtacatgtggatgatttgatctgtacttagaaaaataagtaacacttttcatgctagctaatcacatatatatatatatgaaatgaatagtataatagtggtggcagaggtcgttgaagttggttctaatgcgatctgacgagaggagagtggtgttctttggcacacgctcaaaggcctgcatgtcttgcccttttcacctatacatacgtaataataaagtagtcatcacatcataaatactactcatcagaacatcacgaccacttcttttatttacaatttacacttacagtaatattgcctccacttctgcctctacatatattattaattatcaatattaatattattcattacccaaaatatatttgatatgattttagtaaatgacttatgtttgtatttgagaaatttcaaaagctgttaaggaaagtaatttttcacattcacgttttcttataaatttttttatttgaagtattggaaaatcatattaatacgtaagagtaatctaaaatatgttaaaaaatgtgcattcttaacattcccttcaaatacaaattcaataaaattaacatattattaattaataattttaatttttttcatcacaacaatatttaccaaaaaaagtgagactaattatttataattattatgacaatgattaaataataaatttatgttgttattgtagtactagatccatgcatggtcggtttaggaattaaaagctaggtggtgactagtgtccatttaaagttattgatattggtcctccaatagatttttttttttcgaaagatcctccgatgggtta

SEQ ID NO: 218656 - DNA, 3680 bp, Cannabis indica
gatctaaatgtttattatgataatatttcaatagaattaatataatttatttattaaaagttcataaataaatttaaaaataaaacatttgtgtttattttgttttaagaaagaaaactatatataaccaaatgtgaaattatgtataaacattatgtttatattttatattgataatgtttataaattattataatctaatatatttaatggggtttttttatttttacactttaaaattagttttttttttttttttttttttttttttttttttaattatttttacgtaaattctacataaaaatccctattgcaactagagttgcaacttaaattgcaacaaaaaatcgtatagaaacccctattgcaactagcgctgcaaccactttagaaacccaaaccgtaaatttgaaaaaaaaaaacttaaaaaaataagtatatatgaagtaattcacttatatttaatatatagttttataaacaaaatatgtatatttattttattttactttttgttgttgtgaggaaaaatatgcatgtttattgtttttttttgtaataatatttagaaaaaattaaattactttaaatagattgtatagaaagttaaaattatgtttatgcatgtaatatagaatatataattaaatataaataaaatattttatatttaataaaattatataatatatacaaaattataaattattttccttaaataaataagttaaaagacatatggaaaaaagtcttgtcatatgacatggttgtgtacactccctttgggtgattttgttttctgtttgtaaagtttgtttttgtttgcggtaaagtgagtttttgggagtttctgttatggattctagtagtcgtcagggattgagggatgaggaggacggttcgaacatatggctagaagaagaatcagatgcagtattggcgtatgataccagagatcaaactgagaaagattatgatgataggtttgttgggaggttttttgactgagagatcaattgattttgatgctatgcaacaccttttggcgtctctatggcaacctggaaaaggtatgtatgtgaaagaattggagactaatcgatttttatttcagttctatcatgagatcgatattcaaagtgtcattgatcgtagtccgtggacctttaataaattccttctggtttttttgagattgaaatcaggggagaatccaagattagtggatttaaatgaggtggatttgtgggttcaattgcatgacttgaggtcaggttttagaacggctactgtggctaaagacgttgccaattacattggcaaatttgttgagtctgatgagaagaattttttggggctctggagggattttcttcgagttagagtcactatcaatgttactaagcctctcaaaagacgtatgagactacagaatacggctggaattgagttttggacaaacttcaaatatgaacatcttcccacattttgctttatatgtgggatcatgggttactctgatagattttgtcctcagaggtttgatgctacagatggaaagttggctaaaccatatggagactggatgaaagttcagcctagacgcaccagccatatgattgggaagaagtggctaaaatagttcagggtggcaatggaagagtgtcagatgcagagtaaccaaccagaatcaggccatgacaccaaaggaactccggtggatcaattaatgtcaccagctattttgaatcagattgatgtgatcaaggagaaaatcgggggtcaacgtccagcaaatggagagggagttaatggacataatggtgattctacgattggagagaaatgatgcatgattgattctgattgtgagggatttaatgcttttaatgaagatgaagattgtttgatgatagttgattcatagagaaggagaactgagttgggccttggtgtggatttagaagacattctagatgggaggagttcggcccaagttcaaagagattcaaaaaatgtggatttggtgggtcctggtgtccagccccacctaccattatgagtcttttatcatggaattgccatgggcttgggaacccatggactgtccaattcctaaaggatatagtaattcaaaagaagcccagctttgtgtttctttgtgagacactttgtagacgtgaacaagttgagaaggtgagagattgctgttcttctttggagacatgaagatgaggtttctcttattcagtttgctgataactatatagacgtggaagttaatgttgtgggacatatgaaatggaggtttacaggtctatatggtgaaccaaaccgcaataaaaggaaagcaacttgggatcggctccgcaatttagctgctacatcaaacctcccctggtgcgttatgggagatttaaataatgttgtgtcgcatgatgataaacaaggaggcaaccggtatccagaatttttgattcaaggatttcagcaagctcttgctgagagtgggcttcaggatatggatttatgcagctatccattcacttgggaaaggggtagaggaactgaaagttggattgaagtgcaccttgacagagggttggttaatcaatcttggttggacatgtttaatgcagctaaactttataatcttgaagtgtcaacatctgaccattgcccgatcttcatggatttaacttctgagttaatgactccttcacttcgaagatttagattcgagaatgcatggcttcgagaacctttgtgtattcagattgttaaggagagttgggatggttctgttggcagtgatatccaacgtaaagtggctgtgtgtagtagacagttgcaaaattggggtaaggagtatactggtaaattcaaggagagaattggaagatggaaaaaggagatgaatagatggaaatctgggcgtgatgaatcctctattatgaatttcaaacaggcgaaaaaaaacctggttgaaacttatgcacaacgtgaagtgttttggcgccaaagatccaaacaactttggctttaagatggagacaatagcagcaagttttttcatgcctcagcttctgcttgtcgacgaaacaattctatccagagactgaaaaatcctgctggtaattgggttgattggaaaaatggtttacccgatgtcatgataaattatttcagcgatttttttgcctctgctcaaacgaattagattgaggtcactgctacagttcaatcccgtgtaactgatactcagaacgaagacttgatgcagcctatttcggttgaggaggttcgtaaggctctcttccaaatgcacccagacaaatctccgggacccgacggtatgaccccaggttttttccaaagatgttggactgtagttggtactgatatctttaaccttgtcaagtctttttttgattctggctgttttcctattggtttaaatgctactaacctggttttgattcccagaaagaagcaaccccaagacatgggagattttcgaccaatagccctatgcaatgtcctatacaagataatatctaaagttattgctaatagactcaaaaaagtccttcctactattgtatccgagacgcaaagtgccttcttgcaaggcgactaatttatgataatatcatgatctcttatgagattatgca

SEQ ID NO: 218657 - DNA, 3510 bp, Cannabis indica
gttggttgtttctttgttttccaagaaacgaggcaatcaccaacaaagatacagaagcctgttgtggagcgtcttgtgatgggacaggaggcccaatctgagtttgaaaaaacttgtaggtagagggaggaagaggcagagtatagtaatccttgaccgggagagtttttcaagtatcgaagcacatgatggagtgcagtcatgtgagatgtacgaggggcagacatgaattgactcaatgtattgacggcaaatgtgatgtctggtctagataatgtgaggtagagaagtcggccaatgagttgacgataagtagacggattctcgagaagttccccttgttcttcgtggagtttgacacgaggatccatcgggctctttgctggtttgctaccagcatagccagtgtcttccaacagttgtaaagtatatttgcgttgggagataaagaggtcgccattagcccgagctatttcaaaaccaagaaaatatttgagggggccaagagtcttgagctgaaattgttgattgagattttgctgcagttcatggaggatggatagattaggaccagcgatgatgatatcatcgacgtagacaagaagggccacaaagttatcaatatagcctcttgtgaagagtgtataatcggcctgggactgtgtgaagtttgcaaatgaggttggtacctgtacaagaagaaggaatagtgaagccttgtggtatttgcatataaacttcttcatctagatgaccatttaaaaaagcattatttatatctagttgaagtctgtgccattgttttatggtagagatggcaagtaaccacttaaaagtaaccatcttggcaacaggggaaaaagtgtcaaacgaatcaagtccttcttgttgagtatagccttgagcaacaaaactagctttgaatcgttctacactcccatcactgttgtatttgattttgtagacccatctacaaccgatagctcttttgtttggtggaagaggcactactgtccaagtgttgtttttgagtagagctattatttccacatccatagctttcaaccaatgcttatattagatggcttgcttgtaattttgcggttcaatagcagttgtaatggaaagaataaaagcttgatgagatttagacaattttgaataagaaatgaatttatggagagggtgaggagtggaagtttggtcctgtatagcagaataacactcaaaatcccttagataatcgggttgtttagtgattttgctggttctttgaaggggtgcagcaggatgttgggtggttggtgcatttgttgcaaatggagaagttgatgtgtgctcatgctgctcggtattgtctgctgcattttctgcagcagtatctgtattactggaagccgtatcaacctgcaaagaggggttaggagtaatattgctaggaatagctgtagtgtaatcagcaataggagtatgtataatgtcatgtgaaggcaagacaaaagtggagaaaggatcaatatgatcatggtcaatatttattttatgaaaaggaaaaacattttcatgaaatatgacatttctagaaatgaaaaattgctgagaatttaaatcatataaacggtaacctttaacaccagtaggatatcctatgaagacacaagctttagcacgaggttcaaacttagttctatgtgaggtgaggatagaggcaaaagcaagacagccaaaggtttttatatgagtgtaatcgggttgtttgtcaaaaagaatttcacgaggagatttattttgtaaattaggtgtgggggtacggtttataaggaaggcagcggtcattacacacttcgttcagaacttaatgggaattttggcttggaaataaagagctcttgcaacatttagcaagtgttggtattttcgttcagccagagcgtactgttcaggggttttaatgcaagtgaaatcatgcaaaattccatgttttgagaataaatctttgaatgtgagttcgggagaattatctgatctaaaacatttaaagatgcaattgaattgggtctgaatgtaagataaaaattgtggtataattgctatagcatcagatttttgctttaacaaatatatccaagtgaatcttgaatgatcgtcaattaaagtgagaaaatatttatggtttgagtgagacgtaatgtgataaggaccccaaatgtcacaatggattagatcaaaaattttgatagcaaagttgtgtttatttggaaaaggcaactttcgttgttttgccataggacaaacatgacaaggttcatctttgtgtaaatctttagtgttacattgtaaagtatctttgagtaaatctaaacatttataggacaaatgacctaatctagtatgccaagttgcagtagaaacagaaaagaaagatgcagcagctggtgttggttccaaaatgtagaggccatttgtggaatcactttgccaatcatcattttgctgcgtttttcctgtatgcaaaacttgttagcataaaaaattatggaaacatctttgtatttgaaaggcaacttacagagatgatgttatatgtgaaagtggagacataaagaacatcttgtaagataagattgttggctaaacacacagtgccatgtttatgaaccatgatattgtcattgttaggcaaaattaattttacaccagcaatagaataaagactctgaaaagatttaatattggagcaaatgtgccttgtggcacccgaatctattatccaagaacatattttgggttgtatagagttatgagatagaacaataccattggtacctgtagaagtctcaggatcgatagtattcatactttgctactgcattgcaagaaggttgagaagttgctgatattgtgcagcagagagttggggaagcatagtgagattatccccaacagtggcacacttctcagaatcgatttgaacttgatttgctgcagcttctttgggcttattaggcttgctatagcctggttggtatccatgtatcttgtagcatttttcaatggtatgaccatgaaaattgcaatgagtacagaagggcctgcctttcttcagtggttgctgccttgagttttgattatccttgctccctgaagctttatcaccatgaaaagaaaatgcaacattcggatttggatttgtaatgggattatgtccccttctttgattttcttcttgtgtaacaagatgaaagactctgttgatttcaggcaagggatccataaccagtatattaccatgaacctgagtaggggtgtgcagaaagtcatccaatccaatcccaaccgatccaatagaatcggatatccaatcataattggatcggatcggatgcaaattttaaaaatccaattggataggatcggatgttggatgagacatccgatccaatggataaccgaaccgatccaatccaatatcatccaatgtccatccaatcatatttaatatttataatt

SEQ ID NO: 218658 - DNA, 6598 bp, Cannabis indica
tcaatatccgacctccgaccataaaaattcacataagatagcaaaattagcaaaataacaacaaaaactttcacaaaactagtgttcccactccgacaaaaaaattgttatttggaaagaaaatcatcaccctaaacacgattctcatatttattaaaatattgatcacactcctgtaaaaacataaagacaacacaataatataaaatattataaactatcttgtatacatattcaacaaatatattataccccaatctatctaagtatacatcgtaaatcgaattatacaatatacattatctaatacgatttacacaaaaaattaaatcggtataaataatataccatattgtatactatatatacacaaaatttgagccagtctcataatgcaaataaacactcaaaaaaactaacctaataaataacacttacaatatatatatactctaaactattacatatataatttaataagcatacactcatacacctaatctaagtatacatcataaattaaaggacataatatacattaatttatacaatatacacacatttagtatacataaatatgcacaatatacactaatttatgcacatacataaatacaaatccgtatagacaacacaccttattgtatactatgtacacacggaatacgaagcaattacatacgttaaaccaaaacacaaaaacttaaactagtaaactacacatcaaatagtaactattatgtatctattttaacaataatacattacaacaactacatataactatacagtaatatacacaataaacattaaattatacaatttgtatgtaaactaaaatattatatacaatacactttaccgtatattatgtatacataatgcacaaatcaatttgtatggcaattctagagatcagtctcgtcacttccaagacacgaagataattcatatatttgtgggattgagtcagagaataaaggcaatgcgcctcagtttcctatgttttacattgtaattatagaactaatgtagtttcctactttattcattatatattaagggaaactattcttcatatattaagctcctatataatggcataatctcactattgagggggacgaaagaattaatttagagaaacaaatcaagagaaaatagtgatttaagagaaaaaataacttagagatcaattgtaagagctctagagagaaagaacactttattatttctctcaagttaatacaaatacaagggaaataggctattaccattcttacggggccgaacctctttaaaatctggtacaaattcatcttcaactagcaaaagccttacaactttaagctttgaggattgggaagtcagtagtgatcactcagaatccccacagcttgtagtgtagcatcattagtaccctgaccagataagtggagaagggtaaggtcgatttatttaggaacagaagaaaggttggagactatatcttcctaattcctggacatatcaggtctgacttggtgttgttgacacactcccagtacgctggtctttttcatctactaggcataccaccgtagctgatgttcctgtgaatgttgcgagacacacctctaaattgaagctgctgtccaagcgtagaatgatggcacatacaaaatacactatgaggaaggctttagagtttgatccccacttcgctcagctgttcacaatggctggggtagaacaggctaggcttttgagcgaggaggctgaagttgtaactggggacgttgaagtccaagagattgaggaacagcgcgaggttcgtcctgatggtccttatgacgctaaaggagaaaagcctatctccgagctaggcaacatgttggtggagggtcaggactatgttgatgaggagtacaaggaagctcgacccatgagcaccaaagggaagaaaggtcttatgtgggtctcacctccatccatactcactttcaagagattaactaatctcttcgaggaaggtctcctcaggaaggtagatgcatttctacctagcctcggtgctaggggtggattttatgcgtggtcaggacctcacgccaaacatggtgcattattacccttgcacccttacttcaaggggatggccaactattaaaagttatgtccgaccaaattcacccccataggaatcaagtacttggccacgttgttcgtgttgtatgcttctcaaggatggggtcaaccttccacccacgacaccaactggctgttcgatctgaaattaaacccaaagtaaaacatgtatgggtatttctatttctcctagaatgaataccggtggttaagaggtaccacggacaaggtggtgtcccagatcggtggatttggcaaagattactacttcatcaaagatatgggtatcaaccttctttccttctagcacatcccttcttactgtcgtcctttatttaccttgggtctaaggccaagagccaaaaagattcttcaactattgaactctactcagaacatttccctcttgatcaccacagttaatcttatcaagtacgggccttacccgtctgaggaggtctaggagtctgaacaggtagtcgagggggttactactgagtaggaggctccgaagaagaacaagaagaagaagaagaaaaaagaaaacctataaggttgatcttgtaacacttgaaaggcctatcataattagggatgccctgaggaagctggtcgtccttttgactaggtgatagggaaaaggaaggtcgtggtggtcgaggaagaagatgggaattcttctgatgaagatgccccatcgttacttgtttgggagggttcactccctgaagtacaaggtagcaattttttctttcacttgtctctatttattcttatttgtttctatttttaacaactgttttcttttgtgcagccatgtcgaagaaaatgatgcgtgcactaaggaagaggttaggtgatgcttctgggtaaaaatctccagccaaacgtccaaaggtggacaatgctcttcccatgagcatggctgagcaccaattaagacacttcaagttaacattgagagaaggtcaattaccatctccacgaacatccctgaggttatccctccggccaagaagacttccaactcttaacctcttaacacttaggccaaaagctctaagagggctaacaatgaggggcccaacctgccaaaaccagtagctagtccgcccacactcctaccataaataaagaaggccaaggagatgctcaatttctaccaagatcgtctgatgccaaggttaatgagcagctcactggggcggaagagatgtctgtggaactcctagtcgaaagttctaaaagaagtcatatgggtaagtgtttatctactaatttctctgtacgagtttttttgcacataagttttaactttgtttctccttgcaagttaatctaaagttggaatacacatactcttgagctaagtctacaactttacaggctaccatgaccccattgacttgaagaaggcattggaagaggctcataaagatgctgaatattctagccatcaactgggcaaagtgaataagcaactcgttgctgtgaataagtccattgatgatttaaagtaagagataaaggacataccatccagagtcaagcttgaggaggatcttaaggcagtatccaaggaggtgcaggctctgaccgatgagagggaaggacttcgcacactccttcagaatcaagaagccaaagttagagagttgaccgagaatttaaccaaggagcctagggagaagatttccttggaagaatcctttggttctgagcaggagacattccaaaaggaggttgaagagtacgaaacagccaatatggaggtttattatgaattctggaaggcaaatcctaaagaaaattttgactacctcaaggacgaactccacgctggctttcttggatattgtaaagggaagaaagttgaggaagaagcgaagaaatctgatgatgattcttcttgaaactcttttaactattttaacccacgttattatcataaataaatcgatttaaccaatattatctgtctaaaaaactgaatactaatctcataacagatacaccataagagtagcttaatcataaatttcaattgaatagaatccgtattttagtcaattatcgcaacaccactattatgtagaatttcaatataaaagttgtttttggggaacgagtgattattactacaaattaacaaaatttaaacaaatatcttgtacaatagagatgtacaaactctctctctattgcacaactatgtctgtttcattgtcaaaatatctcttaccaaattatttctctaacaacaaactatcaacaaataatacccatgcaacgaaattgaagccctagatttttcaagtttatagaaaaacaatatagcatagagtcttaaaatcttaatcaacagaacacaattcttataaacaccctaaatatataatggcgaataaaaaaaaataacctaatacagaaaaccatagtcatttacatattaatgaactaaccctaagcccttgaaaaattagagaatagattcttaggtgaggaggttttttaaaacggttaccttgattaactcttaagtgcttcttcaccactcttggttggcgacaaatttcgaagctccgactctttaagctttctctacaccatcgattgagaagaagaagaagatgagaagaaaatgttgttgagtgaagtgagaagaaaaagaataaacgaagaaaatgagaatagactaaagtaaaagataagtagttcaaataagtataattgaccgactatcacattaagtatttaaaattttttttttttgcaaaagctagccgactactgggcatttaaagtaaatatccctactacttacatgtacaacactattcaatctcagctgttagatcaagcacacacaagattgaacaatccacattaaatgcgaaatggttttagcttggaggatactatccttcccatataattatattttattaattagaagacttaaaatatttaataaaaaataaataaatatttttccttataaactttgattgtaaaaaattaattatgctacttgaattgttattgatgttaaatatttttcatgaactgtgacagtttgtgataatgagatttttattaaataattagtaattttactttcgaactatgatcacttttatattatacctcttaaatttttattactatcgaaccgtgtccctctaattgaaggcaatataatgtaatagtgttgaagtttaggaacaaaatataataatgatcagaataaaatttctaattatttaacaaaaatctaactaaatctatatttttttttttcatattttactaacttcaaaattaaagaaaaatatttaatatcactaataattcaagagacaccatattattagtgataccaaatttgttactttatacttaaaatatagattattgtataacatagagagaatgaggagtaaaaaggatgaggaggataattaatatcttcttaaatgaagagaaaattaacaaataaaattacaaaattgttatttcgatggtaaatatttataactttttaaggaataattattatattatatttaacaaattttattttgttgtttttttccctataattctgttgccatttttttcatgtctgccacctatctctactctaccaaaagatagtattatacttatatagagtagattttactgtagtgtaaaaaaagattattaaaagtaataataagaaaggaaagtgaggagcagagacaatggagtgagtggagaagaaaatagccgcaatggcagagttagcagtataatagtgtgtgtagtacttttatagtagccaatttacattagccaagccagcgaagcaagtcaagtgatgagctggaagccttgaggtgaggagacgacgacgacgacggtgtggtccaatcaaatgtctaaattcgtaatttaaccaaaccaaaccataaaaaaaattaaataaaacaataaaaacaaaacaaaacaaaataccccattcattactaccattaccacttttttttttttttttttcaattatcggatacagctcatcacctcatctcattttctcttcctcttcttttgcttcacccacaagcgtaaaaaaaaaaattataatatattttttagggacatattcgtcatttcctctgactccatcttctcttctctcttaataaatatcccagattcttatttaattacaagcacacacccaaaaataaataaataagaaataaaaagaaaaaggaaagtaattatatttctttttttttttttaaaaaaataatatttattttattatataatttcgaacgtccttcccttttaagtgacacctaagtccgaatattttttcactcaagccttacccaccggcaccactgactcccgctcctccggcttcttcttcttcatctctctatctttatttctatctctttcttttttattttttttt

SEQ ID NO: 218659 - DNA, 6914 bp, Cannabis indica
tctctctctctctctctctctgaaaaaaacgcgtttataaataaaagtgaagttagacctgacggtcattacaaaagatattaccaggtatagtagatatctctaccatccccgtaacattgttggtaaacgcccatttggccatattatgggccgcatagttactgtttctagaaatacaagaaaaattacaattagtcataaaaccagagaggatcttgcattgtcgcacatagttctcgattccccaaaaggagtcagtccctcttaggttcttgataacaatctcagaatcactctccaccataacaaaaggatgatgcaatgagacggccgtctccatagctaaaagacaggtcgcagcttctccagtgagtgggtccgagaagtgtagtctttttgccgccacccacaaaactgattccttatggtcccttgcaattgccacagcacacatagtgtcgcctccgacctttacatcgcaattgattttaacccaatcctccagaggtggagaccaagcaagagtttcagaaggctgtggtggggaaaacaagcaggagccataatctgcgtaacaagaagaaatagagttaatataatgcttaatgttacccattgatttgttatgtaccttgtcgttgcgagctctgaaatcgtatcaaccacaatcgaggcatagaggaaaagctcatcagtatcgactcctctggatttaagattccagagaaaagtaacccagtcccacattcgggctccagaatccaggacaggcatgacccccaaggagaagacctccaaaagtggaaagcaaagttgcagtacaggaacaagtgctctgtggtctcctcatctccccacaaatagggcaggagacctcctcaaaacccattctcttagcaagaagggctcttaggggtagtgcattggagaggatactccaccaatgaactttgtgtcgttctaaaatctttgagttccagagtttgttccataatgtcggagcaatggtgcacgaaggcgcctcagcgagcgcttgtataagataggcagacttggttgaaaacaggccattaggttcctttgtccagacccatctatcccttctctggccgcttggattaccgcctcttaagatgtttctaatagtttcctagtcgaaaagattttgcaacttagaaatgtcccaattcccgtcgggtaaaagtaattccgacactctctccaaactccgatgttggcgatcattaggcttagggtggaaatccgtactatggataacccaagggtcattccaaatacttgtctctctcccatcagatattagcttgcatgccccttttcttaaagtctctttagatcgcaccacatttctcccaaaccaagaatctgagctcttaacctcacagtcaagaaactgcttacccttaaggtacttagatttgaggacattacagcacatcgactgttcttcagtaagcagagcccaaccccacttggccaacaacgcttggttcatctccacagtctttctaaatccaagccctccccgggattcggggaggcacaactggtcccaggctttaagacagatgcctctattaccttgctcacaaccccaccaaaagtccctcatcataccatcaatccgagatgcaagctttttagacagctttgtcgtatgcatcgagtagataggcaaagccagccccaccgacttgatcaacgtagcacgaccgaccttggataatgtttttaatttccacccatgaagttttgacaccaggttatcaaggatgaagttaaagtccgcatctttttggcgtgacctaaaaagcgggagtcccaaatagtttatgttacccaattcacagttcaatcctgatacctcgtttcataccatcacttgtgttaccgctaaagaaaatagagattttgagcttattaattttctgaccagaccaatcacaaaacttctccacgcaatgccacaaactcctagcttcttcaaggtttgccctgccaacaaggatcagatcatcagcaaagaaaaggtgagagagtttggggccatctctgctcagctttatgcctttgatggtacctctatcgatggcatgctcaatgatacgcgagaggattttacccacccagataaagatgtagggagatagggggtctccttgtcttatgccacactccggagtcaaactgttaaactttcttccattgaggaaaaggttgaaagaagttgttgtgatacactgactgacccaatggtagaatttgtcagtggccttgaaactacgcagaacgtgattaataaactgccaactcaatttatcatacgccttaacaaggtcaatcttgattgcaaaaaacccctctttcccttttttcctcgtaaaagagtgtatgatttcctggataagacattattatcttggatgctccggcccgggacaaacgctgcttgggtaggacaaatcaatctgggcaataacactctgattctattcgcaatgatttttgagattaccttgtaaatcacattacacaaggagataggtctgaatcgggacactttcttagggttgggaaccttaggaatgagggtaatatttgtagcattaaagcctctatgcatattccctgactggaaaaagtccaccactacatcacagaaatccttccccataaagttccagtagtgtttgaagaagagaactgacataccatcaggacccggggccttcaagcttcccgtagagaacatcatttatctaatttcctcgtgatccgggatcacctcaagatcagcctgctccaaaggggagagataatcatggattaggtagtctaagctctctagtgggccctaaggcgggtttttgaagatgtcacatagaaaagcagtaaactcattaccaatgacagctttattggttatccacacaccatccttgttcaagatactatccactgagtttcttctattacggatcgtggcagagatgaagaaaaaattagtacacttatcaccatccttaatccaagaaaccctagatctctattgccagtaaatagctttccgccttaaggcttcattaagctctttcctcacctcggcttccgttgcccacttcctttcaccaacaggcatactttggataacatgtaactggccctccaacttagagatgcaagaatccagcttgccaaattgcactcggttccagttactcagagccaagctggtcgcaccaactctcttaaacactctagccggggccccaacatgggagacagaccccaagcttgatctaccaccaatgagctacgagggtcccttgtccaccaagcttcaaaacgaaaaggccttctggcgccagagactgatgcttcgtattcacaaagaggggccgatggtcagaattacaggtagtgagagatcgaaccaccgttttgggaaagattcccagccaatcattattcacaagagctttatccagggccaacttaacatgattagtaccgtctctatgattgtctcaagtcatgatatcccctttgataggcaggtcaactaacgcatgacggttaattaactccgagatgaagggaataaactgatccctccccttagacccaacccgctcagagttgctcagaacaaaattaacatcgcctaagattaaccaagggccaccaaatttttccccagacagcatcaagctagaccaaaatttcttcttctcatggaaatatggaggaccgtacacacacgacaacaaccaggggctccttacagggtcagagtacacaaaacccgttatttgatttttagaaacactaatattttcaaattcaaaaccccctttccaagctaaaattaaaccccccacacatcccacagccggaacaacaatattattataaaagtgaagtttcataagggaacgtaccagacttgaagcatctactttgagttcggtaatgaaaatgaaatcaggatcgcacgaccgaatcagggctttcagctccagaactgtagaggtctgccctaaccctctacagttccaagctacacctctcatggctcctgtggaggaggttgcacatcctcctccacaggggtcatcttcgcaccatgagcacccactgcagaacccacatcctcaataagtagcacataaggggttggaattgaaatatccaacggtctagcacatgctttccaggcagtaagtctagaatactgccccaccgaaatccgattctcaacttgatgggactggtcagttgagatcttagcacctccaatcttcgcaacctcgtcactatccatcggctcctccgaagacgcatcttggtcatgagaaataggttctggagtcccaccaaccggcccagtacctctaggatagtctctgaccactctcttaaccctacagagagggacaaacggtctctttcctagagaggaagtttcaaggtccaaacgccacttcttaaccggggtagttctctcattacaatcagaagttggttggacaccaataactataccaaaagatttccttttatttttacctgaatacccaagggcatcaagttccttgatgtagtcttcttgagcttgaaaaaaactagccaaagcccttttttcctcatgttgggaagaggagtcacggcccaaaaaggaggtacaattaccgcccactaaataatcaccctcgaaaatgttcattttagacctcacagaaggtgagagcccaacaggaataatcatcggtccaggcccacccatcaagttagcattcgcagcagtcaaagtgtcatgggccttaatcacgcggcccgaattatccccaagaacagcgtccccaagcatttgagtattgagcttattaacccagtcatcacggcccacaaacgaacccggcccaatgtctttattacccaacttaaccagcccaacagatttatccaataaagggactggggtcagaggagacctttctttatcaccttcaaaaatcacgcccaaatttgaattatcctccaaattaggaagcgcagcaggctcattaccacggtccatccttgggttcgtcctgctcttaccagaaaaatgcaacactctcgaacccccctcctgagccttcaacaccattttagggacccacgccttgaagaatctggatcgtagtcgctgaccggcactcgagacaagagctttcctcgagccaggcaaagacccatccccaaccgccccagaaccattacccctcatcgacaccggagaagagagtaaagtcggcatcctcttcttaccatcaattcttttagcagcctttgacgattcacgagtgccagactcattgagcttaccagaaagcagcaagcataagaggagtttgaatttagccatggaccatacagtgggtacttggtaccctgagtatcctcaatggtgaccggagaaccccaagagcattccccatgttggtgtcccaagcatccacagaaaaagcaaaagttacctatgttctcatacttgatttgcacccagcagttctcaccattcaacattttaaagaaacaaccactaaacaggggcaagttaacgttaatctcaacctgaacctgtatccatttattccaagaaaatggtctagactcatccaaatcaataaagagcaccttacccgcctgagctcccagaatgttagcattaatacgggagaaatagtcgtgcggcaagaaatggatttgaatccacaggcggatgttggtgaacgaaggtgccaaagtgccgaagccaggaggccaagcaaggagaaccagagaaaaacctttgacacaccagggtccattgtcgagaacccttctcctatccgccaccttctcgaagccaaatctaaacacgttcgtagcaacccgtccagagaagggggtgtccaccttcacatgagttttccaagggtttccacagaaggcttccacttctctctcccccaaagatctggaggtcagcacttttccaatgagatagtatttagctagcacctgtgaagtagtagcactagggacaagtttaatggtggcctcattaagagagatgcatttgccccacgaggaagcaatctttttaccaaccaaatccattaatgcacaaacggccaccaaccgacaaagttaaagacaaatacctacccacccaacaaacaccaggaaacgccacacaatagatacaccccaaaaggaagacaagcagaacagtaaaagagagggaaaaggaaaatgaaacacagcaaaatggatactaagagcagacaaagtcaacttcccaccccaagaaacatagataaataaaagacaaagtcaaaacagtaagaaaacaagaaagaaaaggtttaggaatgaaggagttaaagcaaatggaaacgagagctggtagaagaccatctctcatgaaaagaccaaagggaataagactttaatcatccattttgacctaaaataagtttaatatatggtgaaatttgtgtttttgaaactcctcaattgtttaaaagaaaatgccaaagaggattttttacaaaaatataaattatcgttttttcattgttttcaaaataatattatttttacgttggtgttacgggaaaacatgaacacaacattgtttttttttttaaaaaaaaatacaagtcaaaaacttgtaaaagaaaaaatccgtaaaatataaagaaatgtaattttaagtacttttggtaaatttcctaatggtatataaaaagccctgaaattgtattataacatacaaattttacggtcccattgatttatatatatagagtaatttgcgatataaatactaaagtttaactttcggttgcaaataaata

SEQ ID NO: 218660 - DNA, 3580 bp, Cannabis indica
tccaatcccacttataagtcagtaagaagaagatcgtaggcccaatggctcacatgggctacgcccaaaccatacctttcgggtcatactcatatctaagcatccaacccacaataaagtatgatcctaaattataacgttagggttgacacgtagaagaagaatgatgatgagtttctcaattaacctataaaaggagcaatctttcctgaagtaatgaagggggaagaccaacactccaagtgacacactgaggagatatgtccaccctttaactattctagaaatagcgctcatccctaaaaaagtggagaaagaccatttctgtagagatggactacgtttgggaactaaccattctcttcacacgataaataggaccttactcgaaccgagtaaggcacaactttttgaactatcaaattagacactaatattcgatgacgctctttctcttgctttacgacctaatttatactttctctacgatctgacgtactcttttttactccggcctatcacaagtcaattaggagccttgggccaaaaatctaattgggcattatataaatatatttgcatctatagtggtaaaaatctaaaatatagtattttgaaaacataattgggtcttttatcttaataaaattttaaatgtattatcttaaaaaatgaattaggtatttttttttgctaaataatagttaaaatataaaatatggtattttttaaaaaataaatttgtggcctttttattaaaaaggctttttgggtttgagtaggggccttgggcatgggcccatgctaccccatccttgagttggccttgtcggtgagcaaggtttgactgtcgatgatcggacaaccattaattaagaagcatgtatttacattcttattttgttttactttatactataggtttacagtttactgatttgatcgtcggagtactttcggtcgacactacctcgatgtcccaaaattttatagtcatcctttgtcttttatttcgcaaattatgaatgcccacaaacattcattttgatcattgtaaattttaggctctacaacaccttataagttataactaacggaaaataacataattgaaaagccataaattaatgcagaatctcaagagctcgtgtgaaccttattcacaagtgatatttaaatataacataatttggggtgattttacagtataaattccccataaaaaaattgtataattttccaaactaagacactaaaaatataataacaatctaatttttctttcaataaaataaaatttttattctattttataagattttttagtaatttgtaaatagtgtaaacatttataaatatataattgtgtaactattatagataaagaatcagaaaataaaactttaatttaattgagagattaatattttctcgaagaatacatttaagagatttatcttgttttgaagaggacccgttacttaactattggtgttttgatgatttcattaagagcatcaattaattcaatattaattgtatccacacacacacactatttcagtcagtagtgtcaaactccaaatgcattttttaaaatagtgtctatcttaataataactacacaattattgggttagtaataagagtatgatgtgttattagtagagtaataataggaatagagtgtttggtaagttacttcctagtcttaagctaataaccgttgggtagtgtgtgttaagctagtgtttggttctattttgtagcatatattaactttttattaagagctcacacgctgtaaagtatcaattattagttgttaatttgtcttactcttcttcatgctaattatatattcctatcagccttaacttgacacacataaaaaatatatatggagtcgtctttcgtaaacggtgccgtttcaccaccgccacgtcatcacgtcgtcttattccctttcatggccaaaggccacacaatcccacttctccacctgacacgtctcttcctccgccgcaatattcccgtcaccttcatcaccactccggccaaccgttcattcatagccaactctctctccgacacctccgtctccattatcgacctccctttccctgaaagtgtccccggaatcccggccggagtagagagtacggattctcttccctcaatgtctctggtaccgtccttcgccatggctacagctctcatgaaacctgatttcgaccgagctttgaggaatctggatccgcctccgagcttcatcgtctccgatgggttcctatggtggaccttagattcggcgtccgaattgggtctctcacgattcgtttcttacggtatgtccacttacgctcaggtcctgatcagagtttcgatccagtacgggctattccacggtgtccgaaacgacgaaccaatcactgtccctcctttcccatggattaaaatacgaaaggacgaccttcctatgttttcggatcctaatcccgggtcagaattcattggcaaaacaatggaagccacgtcacggagtttcggcatgattgtgaatagtttctacagcattgaatcaacttatgctgactattttagtcggaactttgggccgagatcctggtgtattgggcctctatgtttgggaagcccattaaggaatacaggcccagcaaacaactccatgatcattagatggctagaccagaagcgagatcaagaagggggctctgttctgtacttggcgtttggttctcaggctgagatttcttctgaacaaatcaaagaaatcgcaattgggttggaagaatctgaggtcaattttttgtgggtattgagaaagaaggagaatgatgagagtaataacattgatgggttcgaaaagagagtaagaaaaactaacaggggaatggtggtgagggattgggttgagcaaagagagatattgaatcaccaaagtgtacaagggtttttaagtcactgtggttggaacgctgtgatggagagcatatgcgcccaagtacccattctggcgtggccccttacggcggaccagcctttgaatgcgaaaatggtggtggaagagatcaaggttgggctgagaattgagagctgtgatggttcaacaaaagggtttgtgaagagccaaggattgaagaagaaagtgactgagttaatggaaggagagacagggaaggaggtgaggagtaaggtgaaggaagttggtgccattgctaagaagggtatggaagaaagtggttcatcatggcaagcattggactctctcatcaatgaagcattgtcctctaagagtaagaatgattttcaatgcatgatgatgcctaattgctgattgtaagtaacatgggaaaatatgatctatatatatagatatatatataccatgttctcatgcatgcattatttgtatacagtatatcactatctcagtacttttaaaattatatgaatctaataaacactcacgtcagtgtttctagctttctaattttgattatctaattaaattatgcaatacattatacaacaaatctatttatcaatagaccacaca

SEQ ID NO: 218661 - DNA, 2582 bp, Cannabis indica
  modified_base (2096)..(2096): a, c, t, g, unknown or other
aaaaaaaaattgacctaatccattgcttattggctagaaaaaaccttaattgtaaataatacaataaaagaataattgcccaaattagtgtattgtatgtaattaaaatataagggctaagatcatcaggattcacactaagaaacggaaaataggtgaagcactaaagaatataagtaaactttttaacttttgtggttacaacatgaaatagcttttttttttttgaatgtagcttcaagaagtaaatgcaagacaacttcaagaagaaaaacaagaaagaacagagacaatcctcacagcaacacaaatttaggtagcttttttactttttaaaatggtatacaaaacttcttgatatagaatttaacacattttgttcgtttcaatcattcatggcaatacatgagcatgatatgcacaaccaaaatatgcaccaaaatcttaagtcaatgaatgctgtacttcactgttttttacagaagttgatcacatctaaaataaatatgattggttatagcaaactaacatgtcatggaagatatgaatgaagatacacagtgcagcagtaggagctaaaatgctcaaatacagaatagttaagattctaatattgcaaacttaatgtaatcgttgaatttaatcataaacttatgatatacagtaagaagtaaaacccacgatacttcttcttgggtcgaacttaacatgcacgaaatagtaataataatgaacaccaagtctaattaatttaagtctttgtacataaaggccaaaataccattagaggcataagaacccaagttaaacataatacaatatagatcattaataagaaactcctatgatgaccaaagaaacagttaatgatgttactttataccataaagcaagataatggaagcccttccactgaatccactcatcaaaccccaaaccataaacatcatagatagtcataatagtaaatcagaacagataatagctcatccattcatctaatcatattatacataaacaaataatatttattagaaaaaaaaattgctgaggattcatcgaaatttagagactaaataatcattaatcaaataaatccacatcaaattaaagttgttttagtttcttaagccaaagaaaaaaaaacaaatttggcttcataagataaaaacccataattagaccaaactaagttccgtttacgatcccaaaacctaagattcaataatttaaaagcttaataattgaagtgtaatcaattggtcttgggatcgggcatggggaacaacccagcaccagcgcctctcggtggcgcaaatcctaagaacttctgcaaattggttcgaatactaatagaacaaaggaaatacaaaaacgccatggaacaatcggtgggatcgtccccttgaagacctctatgactcatcttcatcacaagtccaaagggtttaaagggtaatttggcaacgaccttaccttcgaataacgaattgaggaggccaaagacgacaaagaggacgagggcaacgacggcgccggatttgaacttaaaaagcgagagatcgcggctcgattccttgagactggtctcaacccgatcaatcttcttggttttagactttttggtagtgatcttgttggcagtgtcagtcttcatggtttcgagcttcttcgaggctttgtcaatggaggatcggagggacttgtaggagttggttctgtatattaggatccaagagatggcttcgcagactacggctgtgcatattgagatgcccaccactctcagactatctccgtatttgaacgatgagagcattgagggcgtcgccattgacagcgcgagaaggagagtttggctgagaatggaacaaagttggtgttgggtgtggatttgatctgattcctttgatgctttggactttggagtttagagtttagagtttagttcatatgtttgttttgttctaatattatttctctttatgggctgggctcaagtgttaatccggtttctattagtattcgaaccaatttgtatttctttgttctattagaattcgaacaactactttttttttttttaaaaaaaaaanctatattttaaaacaaaaaaaaaaaatttttgtattttttttcattggaacttgaccctgcaattagaccgaccctaatctcgaaccttagaccctagttcccatcccagacctcaaaccctagacccacactaaggaaccctgtgactgtgagagaccccaaccaactttctaacttgtttctcattcctcactcaaataaaataccaaaaaaaaaatgaaaataaaatttacaatacagtttattttgggattatttaaaaaatatacaaaaataatcaaaaaatttacaaaaatacggttttacataattttaaatatttttacaatttttttaaataaattctttaaacgtaaaaatgtaattttttacaaaaaaaatgtctaatataattattctttttttagtttttacaccacatgttgaattttttcacttttttttactgtagggtggaatttttttcaaaaatactgtgtattttt

SEQ ID NO: 218662 - DNA, 5174 bp, Cannabis indica
gctgggaacttgaatagcaatattaccctggcagcaagttggagcttgtcccatgtctctccaaggtggataatgaaaatcctattgttcgtgcgatcgaagacctaatgctccatctgacaatcgcaggtcttatgtcggcttctttttgagagagccgactcgacagagcagtggatctcattgaaagatgtgtggagatgattagtgaaggtactaggagtatgccttcctatagcgagatggatgtctcgctaatcgttgtctaggttcttcaagctgttatacttagttagtataatgtatattatacgctaagtgttctaacagccaacacgtcttgttaacaccttattacccatagcgaggttgatgactcgctatgcattatcgatgtcatccttacaattacatcttctgatgagaaatggtttctgatcatcaatacgtgaattaatagtttgtacctctttgtctcgcttaagactatacaatcagtgagttatagatatgctctattaactccacatttaatgagttattccatttagtatcttttaatgtaattgcctttatattcatttattcgcattctccaaggttgacgcttgtcatcttctaatgtttggggataacaatgctcctccttaaaatgtcctttttagtgaaaagtgctttttaaatgattactgagggtattttggtcataatctattttgaaaaaacgcaagcaactcatctcctctgattttggcagttttgtggttttgacgcacatcatgagcattaattaaccatcttttccacttcttttaattttacccgttggatcgtttattccttaatctaacggagataaactcaatggtatacaatcaaaaaaggaacctccttttcatcatcttggccatttcaaaaattttcttgagcttctctgcaaaaaacataacccatttttttgaagcttcgcatgccatctttttctttgacatacttcttgcaagtttcgttagattttctttttgacctcaagctttcagagagatcaccacaccgtttgttgcaccatcggttacagaacagttcattgtgccaaaacccaacttcaaaaagtaagtgattatctctctggtttcttatatgctttttatttcacatttcttggtttgatgattactttcttagtttgcacttttatcaccttattttgtattggcgatttagtgttgaattgtttcttgtaaattttatcatttaggcagacagtagatttatgggtttctcaaatttacaggcttctagtttaataaatttcatgtaggaattgagatttctttctttttgtaacaatgtcccaatctggttcagaagtttatcgtccagaaattttagaaacagagtgccccaatgaacttgccatctcgtataaacccagaatttcaaaacccacatccaatatagagatcaatgatgcaaaaattagggaccacgtagtaaaaacccaccaagatgatattgccagtcgccatagacgcttcttgcaagaaattatagaaggaaaatgtcatttgttgcgagatgctgcttggcctgaacctcccaatttatcatctattcctttggctaggccgttatttttacccaaagtcacaattacttttgaaatcatgacctcgaagccacgtaaatcaaagactccctaagaccgtaatgtcaccttcaagtatagggtgcgagctatcagagattacgtaggtaacatcttaagaacttgtggaattgaatacaagcaaaactgttgggttacatcagtagccgctggcgagtatagttgttacccaccagcacgacttactcgcgaagcacttgaggggaccagtagcgaggcaagtacaagtgcctcgacagggataggcacttggagccttgaacacatcagagctggagcaattatacccctactcgattactttaaggactttctaaaccatctcgaaatcgccccattccagttggttcctatttcatatagaatccttgcaagtttaaaggttcagtacaagattttaggatggtagtgccccactcccctagaaaaattatatttgtattcggtgctcgccgttcttgggaggaagaatatagcaggaagtttttattatctagggactcacataggagagcataagatcattcttgggttgccaaataaaactccttttcaagaagacttcttttttacaaccagcctctccccaatcaatacaaccacctttcgcataatacgtaagtgactatttttccttgaacttggttttaaattattctatgttttaagctttagccttaccgacttgcattctccttatttcgacaccgttctcgaaaagaccaagtcctactcccgagatggctgagcaatgcaagctcctgctgggtctcccatacgttctccgatttgctgagttcctcttgaatgaggttaacctgaggtccgtggacctcctcactaagaatgagtatactagtgattataaagatcccaagtatacatcatggcaataggtttctgtcccagctgatgaggaaactcaggactatgtggctcgggtacactacctcaagaacacagtccctcaggaagttgaagaaggagcatcgcgaggtaatcaatgtggttcatcacccatagtgcttagggtcgagcataccactttactgtctttttgagatagccgttataatttctacatctgaaatcccctcctcatagattgcattgtacataggtttgatagttggtacctagatttccacgtccacattaattgtactgactcctactatgggatagccgagcaatatggaaccatgctggataggttaggacttatagattcgatctgggatttagaactaattaattcatatgacatattcaggatcacatgatgtagagactttagccaatattatagtcctccttcttcatcttcttatgattacggtaaatcctttagggggaaattatttcccaacttcccctttttcttattttctaacagatgttaacacattattttatctcgcagaaatggatctcaaagaccttcttccttcctcaggcaagaaggggaagaagagattaatcgcctcggagacatcttctgatgtcaacgtggagcctctcaaaaggcccaggaagaaaaatgccaacaagaagcgagcctcccagtccattgaccttgatgaccctgagaaccaggttcagactcatcctctggcccccacgcatactaaagagcccattcctaaggcaaatcaggttgtcgcctcatcgagccaagcaattaagattatgcccatcgagtctgggaaggctggctcaaaatatattgcgcattatgctggggcttgttagagtcatttccgatccttccttcccaacgactgagacttaatcaataatggccacctggacgacgagatgcttgaaaagagtgtctcctttggcctctcggtaagcttccatactcttctcattttacttccctttttaacaacttttaaaaatatttatgcatttttttatttgtttctagcaaactttcatctccttcgtcgcccagagtcagggcttggaaaggatgaagtacctagagagcgagatctagaaggtgatttgtcaaggcgaggttgtgtccaaggaatggaatgacgctaaggaagagatcactcgcttaagcaaggaagccaaagagctaaaaagggttaacaaagatgaacttgaagctgctcagaaggaggcaaaggacaagtccgagctatgctagaaactccaagaggaactcgatgcagctaatgtagcgcctaaggcgaaacaggttgacatcaaggagcgatgcaatgtcgttgccatgcgctccatcaatcgagcctagatggagaatctagaaatggatttgattttcctgggtaaggccatggaggaagtccttgcttattggagcaagctaaaaaaggtagaggtggaagctgagatgtcaagagaagttatcgaagaagaacaatccaagtcttctactatgtaggcttggttattaattatccactccattgctcgtattttcctttgatattgtttaagtagttagtaatctactatctgcgcgagcagttattatttgcttcactttctgtttgcgagctgttatcaattctgcttcgcataaagttataatctgttttaagcaagcttgaatatacttttaatgattcatcactttgtatatttttaattgcttatatgaatagttaggccttctgttcatatattagctttaagtattttttcaaggcatcttcgtgtctcgtttaatagtttcctgcagaatgtgagccgttagtattcagttttgcatgtagcttaatgttgtttttattagttaaatctcatttacaactgctacttttcatttcctttctcgcgagaaatgttgtttaatcaattatctgaagaaactttaaaaaaataaaaaaaaattaagtggagtgggtttgcattatatcatgtatatccagatgaattatggttaattgtacacacatatatatgcccctcaagtaattttaaagaataaaactttgtaattacttgaaaaatgattcaactttattaataattgaatttcaaatattacatcaaaaatagtgattacagcatcagcctactggtagtagggtcgcaaatgttccactttccagtagttctttattagtgagctgttgagccgagctaatttgtaaagcccggttcctactatagcctcgatcatataagcaccctcccagtttgggttaaatactcctgtagatgcgtctctcgtatttgcaaatactcgccttagcagtaagccacgaacattgaaaagcctcttcttcactttcttgttgaagtatcttgtgactcggtgttggtatgctacattagcgatttgtgactcagtacgcttttcatcaagtgatccaaggacaatttaaaaagttttttggatttttcttgattatagaaatctcgtctgtgctggcagcattacctccgagccaaatgccaatgagaatggagtatgccctaatgttatcttctcaattgttctatgaggccaaagtacttg

SEQ ID NO: 218663 - DNA, 5248 bp, Cannabis indica
cacggcccttgtgctgaactcgatctctgacccgaaattgaattcgactccgggcctagacctgacttaaataaaatcaaaaaaatgaaaataaaaattaacttacataacacacttttcttttctgtttttaaaattgaaaagcaaaagtggttacagaacgcatttttgcttttcaaaaacaaaaattttactttcattttgtgattaaaaaattagaaaacaaaattttaacccattttagcaccactactttttctaatttcctactagacaatgactaattaataagaccggcaaatctgaacatcttcccggcatagatatcttcatctattttaaaaatatatatagagaataatttctgactaaaaataataataatagtggaatcattagctctatgattatgatatataacaaataagttaggattgtgtgattatatttatttaaaatgatattttgtgcctagaacgtatacacgtgccaaatgaacatagaagtaaggttatatttcctctgaattatataagccagaagaagtgcttgtatatgataaatagtattaattaattaatactctttattgcgatcggcatttatatgtacataatcagtagcatcatcatgaagaatatcattagtttcttaatccttggactgcggcacttcaaattttataatgaaataaggaatgaattatagatgacagacccatctcagcaatagcaatagagaaataataataatataaaagaaacagatattaagaaaaaggaaggttaaacacatgtgctaagcaatatatatgagtctttggtggggtgattttcaagagcacgctttgggttgtatcaaggagacaggaccactgactgggactcacaagtttaagagaatgtctcgtgcattggttagccaaataaatgaaatttaaaacaataaaaaaccaccataaaagatctccaagaaaggtgagctttaagtacattgatcccgttaaacaaataatacaacagagtctaaagtgacaaatcactttctagccccttgatcataatcataggtgccataattacttactttttttttcctttttaaagaaaaggcagacatccctcgtggatatatatacttataactctttgtacatttagtactatttccactcctctatcttatatatattctacttccacccacatataatttctgatcatcatcgcaaaacaaacaacttaagaatattatatgaaagtggaagtatcaaaagcagtagtgaaaattgattgctgctgacccggccttttgatcggttggtgagactgatcatgatcatgatgatgcatgattatatttgtagaaccctttatactccttaattaattattaaccatatatcagaagatgcaatgatgaaattacataaatatatagagttttctacttttcttttttgggccaattaataatatagaaaatgggttggctttgatgagggtgatctggaatgttaatcattggtaatgaaattaatgatgatgagaatgattaaaagggctactacatatggttaggttatcataactaatgaaaagggtttttcgaaatgatgattaattagtttttctttcttttttcttgatcatctcaactctggtagtggccgtggtggacatgattagggttttggagttgtagtagtgatgatgggacattatgggtttgcatgggaaaagaagggttgaaagagaaagcaatgtttgttggaggacaattcatggagtcaattttctgaccaagattttcaagtgctttgacctgtgacctaagaaacttaagataattggcagcttcatcaagcattgatgcagtgtccatcttgctaccaccgggaaccagcttctgcaaaaccctaatcctttcactaatcctctctctcctttgtctggccgccaccgtctgagggtccgtcgagattctgacattcttcctctttggcttctcaaccaactccaaacccaagttcaccggcctaaaagccgccgcccggtatatcatctctttcatttgggctatggcctctggatccggctcctggtccaccgatgaattcgaaatcgacgaattactcggctgctggaaattgatgttggatgaactcggtggacgtttctctgttctgggtttcttcgcttttggcaaatgatcatggtgatgactttccgagattaaacgaaagccagcttgaccttctttgttggtagtcggagaaattcgatcatctctctggtggagaagattgaaaaaactcatgttgttgttgttattgttgttatcataattctgatgatcatcacggcttctctttgtagaattattagacaacaacttggactgatcatgatgcaggctttggtcaacctcatgatgatgattagtcaacggacaagtactcatattgtggttgtcgttattattagtagcattctcggactctccagaagagactgctgcactagtactcccagctccaatattgttgttccataagcttctactgtcggagaaaagcatggaaatcccatcatcatcatcttcttcagctgaattagtgtctgtgttgctatttgtacccgaaagcaaacaatccaacgactccagatcggagcacgttgttgtcgtagtcgtcgccgctggagcctttccaatattattattactactaacaacttgtgaagactgcaccacttttcctaaatcagtagtattagcagttctagtactactgatgaaacgaggattgtagatgttgtaaggcgaagaacacagctcacgagaagtcaaagtttgacccctccaagctcctgttgttgttgttggtggtggtggtggtgatggtgctcctacagatttgacaaaactacgagtactactgatcatagattgatcttggccattcgagaagctcaaatttgagataacatcagctgatgttgatgatgatgatgagttattaaacatgggaaacgtggacagtttgatctgatgagtagttttattctggagtagttgtggggctcgaatagcattgttgttactgaccgaataattggagttagagataaagaacctttcatcgatctcgcgttgatgatgatgaagatgattattactactccatatggccggagatgtatcccaacccaaatccatgttttgatgatgatcgaggatttttgaaaactgtaataatttcagccacaggaataacgaaaaatgtaagccatacaaaataaaaaatatatatattatatatacttttaattatgtgattgcgatgatgatgacctgtgctataaatatatattaatatctatatcagtctggtacatgcatgtcaaatatatatcataaactgatctaaaaaatcattattgctattgagtaaattcgaggatatatatatatatttataagacgtaccaattattccaggattgatttagctagctgccacttgatcgaagaagacgacaaaagaaaaacaacagggcaagtttgaagattaattgtttcttgatatgatcacttcgatgctagcttattatatatactactgaaaccaacattaaatgtagcctcagcttctggttttattatatgtaactttgtctgtgcattctggtactttaacaagccgccatatttgattggatgacatcaaaactgtgaaagaagcaaccaaataataaccatatatataaagctaacgtcaggctctccttgtaaacagggaaataaaactcaaagaatatgcgtgatccagcaaagattttataaactgaaacttcatcatcgaaaacactcaactcaaagactttacatgtatatgatagaaagaattaattaaaactagataaggatatacatgataattaacaaacttggtttctttgcttataaatatatttgattactgggattgaagagctaattaagctgatcgataatgattaatttgaaaaagctagctttctaatttctacgtaccttgagctagctgctgtaatggaagtatcaaaagtggtatagtattattatgttcgtttcacaagcatgcttatatatatagatatagggaaaacgaaagctgaaataattaatatggaaatattatataaatatatataaaagtattggtattagtaacatgtattgtgatatgaaggggaggaaagaaaaaaggaaagccaaataaaatatatattttcgaacacagttgaaagagtataatgggttttaaaaagataaggctttttggtcagtttggtgggtgtgtaagagtatatttttgcagatggggagcatgagatttcagagtagcaatttgtatcttaactaattaaatggtttaatatatatgtgtgtatatttgttatcgtcttttagtggggggaaagctctgacctcctttggttgtttatgccattccatgcgcacactgtaaaagtgaataataaagtggcagtcagtagtaaaaatattacagtaatgagcatcttttactgtgtaccacgctttattatcccctttttttcttacttaaaattaacaaaaattaattaaatttaaattaaaaacagaattccattaatcatagtttaatcataaccatattagtactgttctacctttctactacagtacttttttcttcatcattatatttgacgccatattatatctaacttgtaaatctcaattattagtcttaattagatacgcagtctcagtttgtgtaaagaagcaaagtcactttttataaagctaaaccagacctcttttgtttcactttctttttttgggggttcaaaaaaggtgttgccagagctaccctcttatgtgaggatttcattttttaaaaaagaggaaagtttattgaagaacaatataaaggtggtggtgtacataaatataaaagagaatgaatatgtagagagtagagtagtactgtggtatagtattgcagaaaaagaaaagggcagcagctagctatagcatataataatatgaatatatagtaaacggtcaaagtacaatttccaacagtaaaaaaaggtaacaaacttaaaatgaacttccaaatatatacttgatttttattttggaatttatccaattttttgaaacataaaaattatagtagtgggagtttagataatgaaagttgatggcaggcaag

SEQ ID NO: 218664 - DNA, 6705 bp, Cannabis indica
gagagagagagagagagagagagagatcagagtgtaggaaaagaagttactgtgttaagttacaacagtttttgttttgtaataaccacaaacagcctgtgtagcaacaagaaattaatattactacttaacataaaatgatgatttggtagttatttatagttgatgttaatcttgatctttgcatttgtgtctgtgtttgtgttgtgtatatatatatttaattgtaattatcatgtaaaagatattgtataaacttgttttaacatttagtctattttaatagctttttagaaatactatgttttggcaggggcaagagtcttgtagtttttgggcttggttggaccttgagatgtgtgaacggtctaaacaagtgatattgagattacttaagaagatacaacaattggagagtgaaatttcttctattacagcaatttatgaagaaccttcccatctagtggacaaaattcataacatgccacaatttgaatcagttatacaaagttatggtaaaagcaatcacattattcaagatatggagaataaaaatattaaaagcaacataaaaccttttctgttttctattgtaatagtgatggtgttgttgtatttgaaatattaagttggagaattgacattagtaaattaatattaatgcatgttgtaatagtaaatattttggaataaaatgaagtactatttcaattataattattcttgaacttggaacaagtttgtatgatatcaccagatttacatcatgatgctaatacatattaactcctaaaagttccaaaaaaaaataacaaggtcatcttttaaattgaactatctatatataatatatcatgtacatgtatataatatataatgtcaacacaactatatatttaaaagaaccttttgtacactgcagttgtaagagttattagaatgtactcatgatatcaccatcataagataaataatttagctcctaatatatattaggtcctagaaagttttacaaaaaacaacttgttgccaaagtatgttatgactatcataatctccttgaaaactttacaaaaaactaccccaaatgatcaaaatactacattattaagggtttgaatatcaaaagggtttgcacaattcataatctattaagaagttgcagttgaggtccctgctccaactgcactttccccagccttttgtctctcttttcttttcttcctcttgattgtttctttagttgggttcttgacaggtgggcgctctccctttttcttctcaacctacacaaatataacttatagttcaatttcattttacattataaaacttatcagaatcacttagaataaagattataaataccgtaggtgcagcttcattcttgcatgttcttctactgtgtccaacttgtccacaattaccacaatgattcagttatcctttttttactaagcttggttgcattagcaggggcggctcattagcactcaagtttcttttcttctttggccttccgggaaggttgttttcacctggaggtagtataggattaattcctttgtttggccagttgtctgggctcgacactggccctactgtaccttcgtaagctgctttgtggtaccacgagtgaatatatccccacacatcatgtttagcaaaaaatattgtggccaaaccatgtccacatggaagccccgtcagttgccatcttctgcatgtgcacgtgtgtgtatccaaatcaacagttaagcgctttccatcattcatggttacttgaaacattgtagcatttgaaagttgaatagagcaataagcagaaatttccatttgcttatccaatatcttcatgatattgttatgcacagggttcttccacttgtccacattctccctgtttttggtaaaattacgaatcaaccaaagccttaacgactccaataaagttacaattggtttatcccttgcatccaagattgcactattgaaactttcacatacattcttaagcaacatgtcacacttcacagattctttgaagtgtgatttactcaactcggatgagttctttgcagcgagccaattataagctctctcattaacatcttttaagtccttcatttttctttcaaagtcagctggggttgtggctcttgctgcagcccacaacatttgtttcagcagaagtccagggaaatctttcttaaaattaccatgcatatgtctcacacaaaaacgaccatcagaaccaaggaaaatcttgtccactgcattttgcaaacctttttgcctatctctcatcatcgtgtatatgcaaggatcggtgggatgcaagtcttcttttaacagctccaaaaaccaagtccaactttctgtagtctctttcccaaccactgcatatgcaatcggaaagattgagtttgctccatcaatcccaacggcagccaatagaattcctttgcaatagccttttaaatgacaaccatctaattcaattagcctcctgcaaccccttatgaaaccatccttacatgcctttaagcatatgtaaaccttctcaaaaacccttttaccatcaaccaatatagtttgaatatttgcagtactcccagggtttgtttccaaaagttggttgcaatagtcttctacgatttcatattgatccttaacagacccctctaatattatccttgcagtgtcacgggccctgtagaattgatggttcgagaccttggagaacttgatattttgtgtcatctggtggaaagctgagaaatccatattgggatgcatcctaaattgatcaaggaaatgctttgccaaccattatgcgtccacatgcttattttttaacactatgccacattggtgtttgggtttcatcttgttgatccgaaatgttttcccatctgttcacaaataaaaatgcaagaatagttatagcaagtttcatgataaaaatacggaaacaaatttagtggcaaatattaaatggtacatctatatttatactctatcactaacaacaaggataacttatacaacagctgatatgtgtgtacactagctgatatatttaacaccatctcatagccatggaattttaggtacttatgtctttagaaaaataaaacgtgaactaaaatcaattaatatcaattaaaatcagttatattttatatgtcaatatatataattgaaaatgcactaaattactctactcatcccattatgtacaaagtaaaagtaaataaattaactccaaaaatcataatttacaatttgagacaaagtacaactaacttgtcataatgaacaggaaaatgcatagaaagataaaggaaactaagttattatacctccgttcacatgtgcgtagagtaggtaaggacaccctggtgctctacaaaccgccctaaatttctccaaatcatttgctagtaatttgtactctttactctcgagtatgaaatgttccttcaaggtattttttagcaattgcactgacccgaattccatgcctaatttgaaattgaatccatccattttcatgtttggattatattccaaagtggttttttaacagttgtcttcatcactattcacacttgcgacatcagaagcagattcaatcccatcatcatcaacatcaggatcaacgtgcaattctataatacttgaccaccaattacaagtttctggctcccttgcattctctcttttaatttctggttcaccgacatattctagctctagcatttcaaagtcttcttgttgtgttggaagttcttcatcacatggtgcttgaggctcttcaaatggtgcttgagagtcaagtccaacttctgtttgtggttcttcaattgatgattcagccactatttcaacttgttgtgtgtcagattgtgtgaaaggtgcatcatcttcaatttcaacttgttgtggtgtcgggttgtgtgaaaggtgcttcaagaatatatcgaactgcatcctcacctgctttccattcaattgaaaaaatagggttaggtaatattagagctcaaacatattataaataattttgttcagtttcaaaatagataagatatccaaacatatctaattaaaaaatcatatgtatcactccaatttaattaaaatcaatgcctataattttctttagaaacagttataagttgcatgttgggcaaaagtacataaacaaaataaaaataaaagatctctataaccacaagcttatattcattttgattttatggtcaacaatctaatctctccacaatccttatcatcacatcacatctttccaaatagagcacaaataaaactttgtcctagtacatccaataaaattgttttaaatatttgagagattgatacaatcacttgcacataactcactcccccaatagtgagttcgtaatataaataattgaattagtaataattaacatgtgcttagctatgagtatatacacacttatttttttagttttgatgcatacatacttgttgtaacatgtcataaacttaaaaggaaaaaaagaaaaaaagaaaaaaagaatgtatttcaaattgaaagttttggtatttggggttagtttttatctgggcaagtcttattttagagtagttttcatctattcaatgttaatatacatgaaaaacccctttaactttttacccctcataagaagacaaaataacgtagacatgtgcatatgtgtaaagggaaaatgacatttatcactcattctcaatatttaaatccacttgaatatttaaatgtttttcaatatcatttcaccaactaaaaccacttacatcaatcaatgacccacactgccccaagaaacccatcacctataaaatccaccattttttctcgttcaaccaacatacagcaaagcaaactccactttttttgttattaaataaaattctaatttcacaagatatagcataccatattctggaggatttttatcttctcttctgatattcaccagtgttcaatttacagctcctttgatgtcgacccacactgcacagctactcgtcacagtagaagctgaagaaatggccacctctcgatattctccttcgcacaactatgtcgtcgacttcaatggaagatgaaatataacaaacctctagcaatcgtccacccctaaaccagaataagaagcaaggactgagatttttatttttgggtttccgttttaatggtgattttggggaaatatctgattttggggttttatttttgggttttgttttgatcatggttgtggttttagaatattgtaataattttagtttttaattgttatgatttaatttttgtatttaattattcaaatatgtttattttttttgtgttttaattatattaaaaaactgaaaaagaaattttattttaacattatgtaattattttgccatgctggcatttatttgtgatctggaggctgacacgtaaggggtaaatgggtgagatgaacggaatagtgaatttgctaacagaacaaaacaaaagggggtttccccaccaaaataaaagaaaaaggggttaagtgttaaacaaatgaaacataagggggtttggccgcaaatatctcaaaaatggacattcttgatcaaacattacataagcatacttttttttagaaagttttacaattatatacccaaaatttaaaataattacaaaactatttttggctaatttatttataataatatcaatatcactctaccataaaatactgaattccaaaacaactactactagaattgtgagaatatgaagagtccataacatcttcgcaaatactccaaggggaaaattggattcatggacatgaatgggattccaaatcccgattaggatagtaagcctccataactctcgagaaaatgaaggcttgcaaatagaggcttggggataaatattatctgcatttttgggtgagtgacacgtggccttttgatgacgcccatcatctaaccagggtcgatcctaaggtacagggtcagccctaagaatatatgggtctaaggcgaactaaattttgggaccctcaaaattatatataaaaaaatatggaaaaaaagtgttatgggatttgaacccatgacattgtataatatatcatacagctcaactaactaagctatgaatatttgttgtttacaatacacttaattttagttaaataaaaatataatgaatttttttttatttttcattttgggccccaaaaagtgtgggccctaggcacgggcctagcctgcctatgtctagggccgaccctgctaaggtatatggtgcctaaggcgaaattaaattttaaggcccctatatgtagtttaactattatcaaaatgataattctagtgatatagtgtaatggaaaagctttaaaaaactcttaagagctctaaagttcaatccttcataactacaccaaacaatttttgttatattattttcttatttaatgttttatctatattaattatttttttcataattttagggtcttgaccgtttggggcccaagacgcacgcctagctcgcctaccctcagggtcagccctgcatctgacccaaataaaaagggagtttttgcattggtcaacgtatctggtcaaactcattgaccaacgcaaaagttaaccttcctttttttt

SEQ ID NO: 218665 - DNA, 8038 bp, Cannabis indica
ttttttttttttgattgtatgctttgtgtctatctcttattctgttttagaattttgatggatttattcattgtagtttgggttttttttttcttttggcttttggcttttgggtgcctctaggatttgatttcataattttgggagtgctgtaaatggttgtagcatatatgtaattgccttcttggttttgacatcttatttttataggtttatctcacattatgttgcactctggtggctgctgctgttgggtcttaccttcatattctttggaacatcggtggcctgcttacaactcttgccagcataggatgtatgttctggctgctctctattcatccttttgaagaggtgtggtttttggtcttttgaagtcttgctactttcatttcttatcaatctttttgctgaatttttttgtttcttttgagcagcaaaagagggttgcaattttgatggcgtcttctgttttccaaggagcttccattggtcctttgattgatttagccatccagattgaccaaaggtatctgtttgttgacatattatcttttaaatcactttggcctgctttatactttatagtatgtttaactatataccttttacggggtttttaaattggctataaattttcagtgttgtttcggttggcttttcttcattgttcatttcttatagaattttggtcatttgattcttatacattagatgcagttgaggtagctagcatttgtgtttttgaaatttgtttctgtataatttgggtgtggagattattagtttactcaactgcattctttatgtatcattgaaattcataaaattcaattgggttgacatataccatatgtggcatgtatattattttccagttctgacatgttagagccttgaacctagatgatgctgatttttcaatttcttttgtttcagcattcttgtcagcgcattcgttggaactgcattggcgtttgcttgtttctcaggagcagctgtgttggcaaaacgtagagagtacctttacctcggtggccttctctcttctggtgtgtccatgcttctctggttgcactttgcatcttccattttcgggggatctgcagccatcttcaagttcgaggtaattggattatttgtaactaatagattctgtgatcacattagccatgcttttgcagttgtttgatatacttctcatggtcctgcagctgtattttgggcttttggtgtttgtgggctacatggtagtggacactcaggacatcatcgagaaggcacacatgggtgatatggactatgtcaagcatgccttgaccctcttcacagacttcgttgctgtctttgttcgaattcttatcatcatggtaagttttcacaagtgtggtggtttaattaatttacttttattcatgtacctttttactatatattagctactaactgtttgaatttctatctgcagttgaagaacacatccgataagaatgagaagaagaagaagagaagagattagattagattcaaaatttactttcgtatttgtgtaagcacagccttaatggatcttatcgtggataaaacatgtgtataaactgcagaaacaagaaaaatagtttaaacacgtggaccttatactatttttgttttgttttgctaatgtttttacttgtgtggatatataaatttgacgtattgacatacttcttggttcaagctttagtttttcagttataatcaaattatgaaattttcaccatgaaaaattatgtagtacaacccgggtgaccacctccatattgaatcatggcaacttagtatcgtaattggtagttttctggctatcgactttgaaatatgaaaattaattattgacgttgtgccatattttttaacaattgtagagaggaaataaaatatcgagctaagattgaatattccactcaatatttgattgtaatcctttattcttttattgaaattagtgagttcaatcaattacaaaattggtcccaatcagtatcatagaatcgtgaacataatgttgaatttgtctcctttggtgggattttttttctcgaattttgacatgtactaaataatatatatttatttttttatatttttgctctcgaattttgagatgtactaaataatatttcttaaactctttaagttgttaaaaatttcttttaaattattgaaattgttaaatttaaaaatttctatttagtttcattcaattatgcatatatgctgtgcattgtagcattaaccttaaaatgcagtcttgaatggtgcttcgttggaacaaaaagaaacggcatttatatgaaatgctgcttccttagagaagctctaataatgcaaaaataaatataaaatttaataataacaatgcaagtcattttaatttaaaagaacttgttaactaaaattaataataaaatattaaaaatgacataatggtaaatataaaaatatatcatttattatgatgtaaattttttatcatgctatgttagtaatctaaatttggatcactttttgttacgtgacatatttgcatcacaatttaacacaccattagagtaaaatttttacaaagtgagctatattttacatttccatcattcatttacatctctattggagatgctcttattgatgttgttgtatatgccatttttgtttgaagataaggtggaggtttttgagttgactcaggcaaaagccaacttgttgtgtatgaaattattgtgcatttgaggcaagacgaacttaaaatttggtgagttttaggaaaataaaaattatttgatcctttatttaaaaatatgtttaagttttgaaaatgactaaaaaatatgtatactttcaaaaaaacaatatttttttttgagttcttgagctgggtgagccttaagcgaacttaatccgccttagcccatgcctgaaactttgaggtagtttgtggttctccgaagtctcttagtagcctgaataaacatgttttgaaggctaggattattattttcaatttgtctaaactttctaaaagagaaaaataatgtaatagagttgataaataatctttcagttgctagtgtgtattgtttagtagttttaaagaataattttaaataatcttaaaataaatattttttcaacccttgacccactaatccgccgacctgtgacccgccaacctgccaatccgtcaacccaccaatccgtgccttatttgggtccgggttcggtttcatttttttaaacccgaaactcgtgtatccgaaatccgcgaactcaaaatttggtaaactcgcccgatcttcagccctagtcagagcttagtctcatgtgctctttttggttaacggttgtctctccttctctttctcattcattcatttccggtgatttttctatttcttagctgcgacactgtcaacattggcacctcttaagctactacttccaaccaaccatggccaagctaacacaaaattattcattcctttttttataaaaatatatatgactgaaaatagactcaagtttctcctttattttcaatatttatttcgtaattcgtattgattaaaaaatatacattgatgttttaatttgcattctctgactcttctttttcttgattcagtaaaagaaagaagaggagttatacgaagggtattttcgtcacaataatattatagggatttttattatttatttatttatttatattagtcgcaagtcgcaacggatcctccgatttcatcatcggttaaatccagagacagtgctttcttcctccgccaaagctaagctatcgtttctgtctcaaattcacacataaaccctaaaatttctctctgctgggttctcctactcttcattcatccctatcaggtagctatcttattaattactctttttcttttcatttttcatctctacatgtgtttggatttcgaactctagaaatgtagttttgagcttagattcttgtaggggaaaatgaattcctaattagcattctctagaaaaatgaatttaattttcggtagagctgatttctcgaagaaatgataatgttctctgtacaggacgaggacgaccctttcatagatttgactttcgtgtgattgtgcaggaaatttaaggtgttagtatgaataagttttggaatttggaagaaaagccttattctatgtgagagttctttctgggtatgaagaacgtagaatcagaactttcagattgcagatggagaaccgtattaaacaggtatatatactatacacgcacatgtatatgtatatatgtatagcttttttctcttgtcaatgtgctgattctgtgaatttttgttatgaatttttgcattttatgcaaatatagtttggattctcaatagcttacttgtattgtgtttgtaattgaagatcaacttagatctcttttgtactgtatatttgttttctatcaattattttagcacaatcatcttacaaagcataaattttgttttgagattagagaatacatgagatactgaaaaaggtgcaaatatgttccacgaggctgatcttaagatagattttccagttactcaactagctactgtgcattccaaattggtgttaaatgaaaggcaagaatataatgtgcataatgtgattttttttttctaattttagatctcaccatttcggacgaagttgtagcaaaagtggttttgttatgaacatactttgatatctcaaaaatgagtaatgtctgtttttctagttacatgttggttggattttctggagaaaaatataattttcatagcttgtttaaagcttcttttctcggccttgccttaatttattctgtgtatttttatttttttatggtgtgcttggtacctcacctcacctttcctttcattcttttcccaggcagaagcaaagaaggcagccataagaaagataccagagcaggttattttatcagaggttcgccgcatggttgaagagatgcaaaatttaaataagaagctagaagaaacagtaagttgtttgtttgacacatggatgctgttttccattttctccttctgttgaaaactgctttgaatgctgtttatattgtaggaaaacaatatactattaatccacctaacaaaataccaaaaataagagcaaaactagtttattgtacatgtatccgacaccatagagagtaacctcattttaaaaaggtgtgtagcatacaacccccaaattaacatcctacgccttggtgtataactctctgagaccagttaatagttatctcttgtgaaataccccttgatcgagactgatcccagtcagaccatgtttctggtaatgggaaatatttgatgaccttgatcacctaaacttgcaggaggctgccattgaagattacttcaagccacttgataaagaagctgagatattaatgaaagcgcaacttgaaggagaagaaaagacaatgaggcagatgatgacagccatgcagcaacaggctttgctcgaaaaaaccgaggcagagcaaaatgcaaaagtccataatgtagacacgaataatacgagcacccaggaatcagaatcctctggccctcctaaccaagctcagatgagatgatctcattctcatgcaatatataatagatttagaattcaattttgtgagattacttgccaatcgtgctcgcgtataatcagttgtgctttgacatgagtttgtttggttcgtaaaataccaagtcagatcaataagattttgtctgtgcaactatgatatcttgttttgtccggagattcatttcgccccactatgataaactaagtgagattatatggaacttttggtgcacttggagaagatgtggatgaaaggggtttggtctagggggaaggtatggtctaagtttccaaagttattttcttttttaagttcaacatgttaccatgaaagtccaatgttcaggtgactttattgttggtcactccatctgcagtttttttattattattaatttattagctgttctatacatgttttacattaatctctgaaatgttattgtagttttcattttttttgtccgtagattttagtcattttgccttttgggggtaaatacagatttggaaaattctataacgctcctttttaaaagaggtacaccgattcattttattttataagtgtatgacaaattattttaacgagttttttgtggttaaactctcttaactattattctacttgcacttaattttttaagctcaaattttagaggtaaaaccctttaaattactgaactgttagtaaatttaaggtaacatctatttttcacagttaactatcaacgtggacggcttatgtggacgcttttgtacacgtgccacatttatattagaacaccaaataatattatttaaaaattataaaataatatttaaaaatttataatattttatttatttaatattctttttttttattttatttaattttaaaatgaattttgaaataataatattaggtatactaatataaatgtgccatatgtacaagagtatacataagcaatctatagtgactgttaatcggatgacactttaaatttgttaacagtttggtagtttggatgattttactgccaaaattttagtttgaggttaagtgcaagtgaaacgatagttttgagggtttagccaccaaaaacttttattttaatactattttctttattgtaaattattaaaaaaaaaaattacaagtcttaaataatttttttttggtactggaaattttaagctttattagacttcaagatctgccaccaagcaagggagcaagacagttggaacagactccaaactgaaatgacaatcatgatataatctaacagctctagcaaacgtgtgagccactacattagttgatcgtttaacaaaagaaataacaacattattcaaacttgcaagcaaattttacaatcttgaatgaccaaaccaaacaaggaaatcatttgataaagctttgaatagcttgcactgcacaaagagagtcggtttcgatgaaggcatttgcccagccgcttctctttacacaactaagaacctctcggatactaattgcttctgcaagagatggctccacatggcccgaaaaaagcttagtctaacccttcaccaaaaaactagcagaattacgagtagtcacacccaaatcaaaactcctaccaccattaaatagagttgcatcaacgttaatcttaattctattagcttgaggtaaactccaatgctcattaacatcactatgatgaaaccacatatttatgagaacttttcaattgatcaaggtaacaaatgtcttcaagcaagaaagcttctcctttccaaatcaagttgtttcgggttccccatacagtctaacatactgctactcctactacaattagttgccactactcttaaaatattagtgttcataaactagtaaagtacattttttcagggccataaattatattttggtttttttttttttttttttggtatttaagtcgcttatatattacaaccatattttacttgggactcgaaccaggacttccaacacacacacccacctatggctacttgaggcttgaactagcctcaagtggttacaaattatatttggttagatttgaaaaatatttcttttaagcttttaagtattgtatcttaactttcattattatatataagggtatatttccttgcaaaaaaacattctcaggccccagcctgtacccaagtgcagtatgaactttgattttttttttttttaatttattttattcaaaaaatacaagttacaaatcaactcttcttcacatactcatcattgcttattttggatagagtgtgtgagagctagaatagaaagtaaaaaaaaaataataaaagttgctccaatccaatgagatatttatcaatactagtttaacataacagtg

SEQ ID NO: 218666 - DNA, 10371 bp, Cannabis indica
tgagtagatataagatcctggtaaaataatttccaacactcgattcgattgaataatcacaacttcttgctgtcaaaacaacagatcttgggtgaaatcaaaggaaatcgattaatgaaatacatcagagaactagctccagatgagttcttgaacgaaggagatgttgcaaccaacaagatcaatcctgcttatcctgaataggaagtgcaagatcaactcgtggtttcgtggttgttgtcatccatgacagaaagcttactggcgagaatggttggctgtaatacatcgcactagatctagaacaccttaaaaaaacacttcaccttgaaggtttcatcaaaaattcttgaatttcacaccaagctgcaaaacttaaagaaggctcattgagcttgaatgattacttgatgaaagttaaacaaacagtcgatctcatagcctcggttggagaagtgttaagagatcgtgataatgtagctgcgatctttaaaggattgcctaatgagtacgacacatttgtcatctcctcaaacactaggatcgagaactacattgttaggaaatagaagctctgctctgggcctctgaatcaaggatcaagaatcaaacaaagaagtagatctcagtgccaattttacaacttctagtcttgatccagctgctgaagctaatctagccttcagaagattcaggcagcaacaatatgcaacaagaggaaatatgcaattctctaatactggacaaggttagttcaacaacagaaactatatgcgtgcaaatgactcagctttgaacactaaccaaaaattttggatgtagaggtaattttaatatgaacagaggtggtagatctggtatgaatcccaataacatgcctcaatgtcaactttgtttacgatttggacatattgttcaagattgtttttatcattttgacaaagctttctcaagaccctctctaggctcaaccagctgcagtactcaaccatttactcaacctcagacacaagctaatcttgcaacatcaaacaacattggtgatgccagctggtacccagattctggagccacaaatcattgtactccacagactcagaatctggcaaactattatgactatgatggccaagattagatgtatgttggtgatggctcttagtatctcaaaatttgctcatgacaataatgtattctttgaattccatgatgacatgtgctttctcaaggacaaattgactcattctatcttgctgatgaggaggcacaagaatggcctttattcttttgagccatctcaattcagcattggctcctcaaaatctcagcaacctgtgtcacactagcaacccaacctagtagtagctgcaatcctacatcaaaaagcacctttgttattactctcagtaactctagagccactgtttctagctatatcaagtgtaattctgatgttaaaaatgatttcactttatgacacaataggttaggacatccatttgagaaaattgtacaaagagtcttgcaatcttgtatcattcatttaagcaataaaatttctcaattttcaatatattctgcctgttgccttgagaaaattcacaagtttcccttcccaaaggcttccaataatgttattttagaaccgttgcagctagtggtttcagatttatggggaccatgtcacacaacctcctttaatggctataaatattacatccattttgttgatgttttctctaggtttacatggttgtatctgctgaaaaacaagtcagatgcattcaaagtttttctaaactttaaatctgaagtagaactcaaaagttgtaagcctctcaaagccttgcaaactgactgagggtgaatttagatcattttctaactatcttactaaaaatggaatacatcacaaacatccttgccccaccacacgccaacaaaatggtctagctgagtgcaaacatagacacattgttgagaatgatcttgctttgttagctcaagcttctctatccttaagttttgggatgaagctttcagaactgttgttacattcacaacaggttgcctacaccgtgttaggcaacaaatctccccttgaaaccctgttcaacattcaaccagattacacatcctttaaaacatttggttgtaaatgttttcctaatataaggccatacaatatacacaaactttagtttagatttgctccatgcacatttctaggctatagcttgaatcattaagactataaatgccttgacaaaaatggaagactttatatctcaagagatgttgtctttgaagagttctcttttccttatgaggagtctggtgctcaatccattcctaattcctctcagcaagcaaagaactcctttgtgtctggcattatccctatttgtcctcactttaaatcaccttacaccatgatagatttgttaacttataatttgtagattgaccaccatgttgtacctgaaaatactgaaccatttgtgcaaccaaccaacaaatacatttgatgttatgactaacagttggcatcaaagtcaaccacaacatgttgatatacatcatgagcaacctgtgcatgacattcaacatctatagagtgagcaatagcctgtgcataatattcaacctgtgtaagaggagcaacaaagtatttcacatgatctctcaccagatttacctcacataccccaaactacctctctgccaactgaccctgcaagaaaccttatctctccctcagtctcacttgaaactaatcatccagtgccaacatctttacctgacattattgcagggtgtcaaaatgcttctgaacaacaaaataaacacaacatgaagattaggtctaagttatcgattcacaagccaaaaacctatttagtatccaaagttcccacaacacttcaagaagcattgcaacaaattcaatggaacaatgcaatggttgatgaagtcttagcactcacaagaaacaaaacatatactttggtcaaacttccaccaggaagaaaggcaattggatgcaagtgggtctacagaattaaagaaaatattgatggcactgtcaacaaacacaaggcaagactggttgccaagggctttcatcagcagcctgggttcgattacactaaaacatttagttttgtggtgaaaccagtcacaattacagtggtcttaacacttgctttatccaagggatggacaataagacaactagatgtcaataatgcttttctcaatggagaattgcaggaagaagtgtacatggtgttgccacctgggtttaaaattcctagaaaaattgatctattttgcaagcttcacaaagccctttatggcctcaaacaagctcctagagcatggtttaacaagctacaaaataatcttttatctctttgttttgtttcatccatttcagatcactctctgtttatacttcatactgatgaagttgtcactttggtacttatgtatgtggagaatattatcatcacaggaagtgaccataatgttgttgctgagctcatctcaactctcaatactctatttgctctcaaagatctgggtcctctacactatatctttggtattgaagtacatcacactaaataagggtcttcatctctatcaagcaaaatatgctcgagacctacttgtaaaggctcaaatggctgatgcaaaaccttctcctcaaccaatgatcagtgcctttcatttgtcagctcaccaaggggaaccactggcagattttgtacattatcgttctgtagtaggagcataacaatatcttataatcacaaggcctaaactttcattcagtgtgaacaaagtttgtcaattcatgtaaaagcctttaaccaaacattgtctgctatcaaatgaattcttaggtacatcagtggcaccatcaactttggtcttcatctaaaaagacctaactcttatgattttatggccatttgtgatgctgattgggcatcagatccagatgacaggtgttccactactggttttgctatttgctttggctccaagttgataacctggaatagtaagaagcagccaacaatatcttgttcaagtagtaaagcaaagtacagaagtgtggctaatagcagtactgagttatcatggttgcattatttgttctctaaacttagaattcagctaccttagccacccacaatttggtgcgacaacttaagcactgtcttgttaactcaaaatcttgatttgtactttgttcgagagaaggtgttgaacaagatggtccaaatcagacatgttcccgcctatgatcagttggttgatggtctaaccaaagaaatctcgagctaaaggttctctttgttcaggaacaaatcaacattgaaaatgcttcaattgtgagtttgaggggaggtgttataactgattagttgattagttagttagagctagttacctaactcatcctagtcagcatttgttagtttgtggagctgctaccacttgatgttgttagttgttttctgtttcaatgtacttgtatatatactctcccctgcttcattgaataacaagattttctttcacaatcttcaacctttccttttctttcttcttcttcttcttttctttctattcattactttaagttcaacaatggccaagatttaacattcggaagaaaaaacaaagaatgaaaagcttgatatatgtcttaaaacattaaatgtccaacttatatctcatttgctaagaggtattaaaacaagttaagtggctgtaaaaaataaaaacaaataatcttaatgagtataaatctgacctaataagatttagctcttcattaactggaaacaaatacagccttaatatttaactactttttatcacactaaaagcttgaaaaatttgaatacttaccaaatatgacgacttattcctttcactaaaacctttaatacatcaagtccaagcaaaaaaatcaaaaatgaaagaaaaggaaacacaagcagaatgtcgtgctacttgggttcaatctttgttgagagtacgtatccaccaccaccactataatcaaagtggtcactatcactaacatcctttttaggcaaagcatcattactataaggatgtctaagagggcctttggcatttccaacaaaatcagtggcggaagaagacgctgatgttgagttggtattaataccatcattctgtaaaatggtttcaatagccttaacaacttcactcattgacggacgataaacagctgtctcttcaacgcattgcatggccaactccaagaatttgccaaagccaataagaattggagtatttctaatggatggatcaatcatctccttcatgccgtaactctccacatcgtttctattcaatgacattcgtacttcgcgaacaatatactttcccttctcgattggttgcttcgaagttataagctcaagcataacaacaccaaaactatacacatcactcttctctgttaattggttagtcatgtagtactccggatcaagataaccctgcaaattgaccaaaaaaaaattagcataatactcactatttggtgttgatcatgccattggattagttctttagaaagaaaaaacctaaattttgaattaattatagagaaaaatataataatgatagttccaaggaaaaaagacttggatcacgcccttttacttgaaaatggagttgaaaagacagttagccactctacaaagcattgctcctctgttcagaagcacaataattttcattttcttctttgtttttatcataatataattaatattaatttcgctcatatttgcctaatgatgcgcagacaacaagttcctcgaccacttaaagagtacagctgatgttctcagcagtgttctagctcattaaaaagtatcataatgaaactttacatttactaaaaaaatgtatcttaatactcaccagagtgcctttgacttgagttgaaacatgtccttttccgctgtctgagaccagcttagacaagccaaaatctgcaacctttgctcctaaagtttcatctagtagaatattggttgttttgacatccctgtgaattattggaggatttgctagctcatgtaggtaagcaagtcctcttgctgagccaagagctatgcgaagtctcctcttccaatcgagatgaataccagatttgcctacaattcacatgatgtggattgtattttggtcagtttaataatatttgtattaaagaaagtgtaggttgttaaacaagttctatgactttttttttggatgagaaatgcaatgaacaagtttataataatgaaatttcttctttcatgtaccataatatgttgttaaataacatgattagttcaaatgactagaatgttgaaaaatatctctctatctattccttttatatggcaagttctaacacaactaaaagactgtacccaggtttaatattattcaaattacttggatttaataacttttcttatgttttaatttgtcaatttaaagttggaagatagaaaatttaccggacaagctttcccttagcgttccatttggcatatactcatataccaacatttgttctccttgatcaaaacaaaaaccaagaaggccaacaagatttttgtgatgaacacgagagagcaactcaatttcagtcttgaattcgagtccaccttgcattgatccttgttgagctcttttgacagccactacttgtccatcaggaagctgtcccctgtaaacctgtcaagagaaacaaaaaagatgaaaacaacaacttgagaaaaatcaaatgtgttgatgaaaggcatgaagcttgaacttttactttgccatagccaccagatccaatctcattacttgaagtaaaattactggtgcacttcttaagttcatcatatgaaaactgtcgtgctcccttgagttgtggtgcacctccactctctcgcccacttggtgcccaggaagctggaacaaagtgaagatttagtaatgtaagctaaccagttcaagccatgtctatgtgcgcataatgaagtttcaaatggtaaagaaaaacaatggctacatatgaatttcatttattaccgaaaggtctacttaatcttatggccttttcagcacgttttttctgacgaacggcatatactgctatggcaacaaggcctacaaccaaaactgcacagctagctgctatcccagtaattgctccagtgcctatagaatttcctttatgtgctcctgaaacaagatcatgtttttgttattgttaattcaattaacataagattaaaaagcttaaattcctactaaagattccccacaattaccttgaaaggaataaggagatgcaatgaaaatatatggtccaaattctggtggcggcttgtaaatttgtttattcaattgaaaactaatcctcagaatctcagatatatcaaaatactctactgtagatggaaagagagccaacccaatctgaagatagtcattagtatcgaaggtggggctttgaagagacactgaaccttgattaaggctaaggtttttccaaaggctctctgaaagattataaaacctatcatctgtaaattgcctgaaggaaggtcctctaaaaattaatgttccctcaaaaggatatttacattcacaactctgaggactgggcttttgatataaagggcatgatgtacgtccacaatcaaagcttgtcgaatatgtatctgtagatggctgctgatgtcggcagtaattgtaatctgcaatactagtagtctcacacactggattccctacaagtctataaacataaaattgatatttaggaagtgatgacctttaagagctggttagtttcatttaaaacaaagatgattggaaataaattatctcacactaatgtttctttgtaaagtccagctcttactgattgaatatcattattttccaagtcaactagctgcaattgggggctgatgttgtcacccatgttcaatgtgttattgaaattattatttttcagtttcctgcaggagttgataagcaaaattgtgagctgactatttcaataaatttcaactgtagtgatcaagtcttttagtcctcatatttctacttacacttgctgcaacagtgaagagttgaatagctcagttggaattcgccctagcagaggcccattttcaacgaacctggagtttaagaaatgttccaatttacaattataggacattttaatgaaggctacaatgacaaatttgtgtaacctccaaataacttacatagttgtgagttcttgcaatgatgaaaaccaagttggaggctctgttgcatcaaatgtgttgttactcaggtccctttagaaaagaagcaaaagatctttagtagaaagaaattacaaataatagattgaaagaacatgaaactatcgacttacaaataatttagcttattcattccggttaagtctggaaacgagccattcaatttgttaaaggccaaatttctgtcaaaaatatacaaaaatcaaatatttgtatctgcttataaacaacacttatatgctctttttgttcagaaaaaaataaaacattaaaataaaaaaataaatacttcatacactctttgataattttgtagtactcacaattcattcatatttataaggttgttgagatttgatgggacttccccggatagatcatttctatcaagccgactgtagacaaattgaaaataatgactattagatctatcaactttgcactgtcaataagttagaaagtagcaaaagtctaaaacgtaaatggtgaacaaaagaacacaagtcaagagggatgttacttacagaacctcaagagtggtaacatgtcctattgttgatgggatagttccagtaaattggtttccatcaaacaatctgtcaatgaacaagtagaggatgttagataagtaaacacaaacatcaaataattaaagatgaccaagatatatatgttaatttacttacatgtgtaacagtttcaccttagagctaaaaagtttttctggaatgggaccggaaagcttgttcttattgaaatgtctatcatttagataaagtttacgcaataagtctcacaaaatcaaaatataaatgtaaaagtatatcatatctttgatgccttggttgcagagtagggaactatattataactcacaagtgcttagccttaagaagttggtccaatcctggggtggtagaggttgaaacagggagagttccagtcaactcattttctcccaagtccagccaataaacgttcaaaagcttacccaaagaagcaggtatattgccagtgaagttatttaaattcagagctctataaagaacaagttatcaatcaaaacttcaagtaaccaaacaaaaaaaaaaataatgaataaattattcagctataatcatcatggtgtttcttacaagaaggtcagctccttaagattgcctatttcatctggaattttaccactaaagctacaaccaagtaggattctgaaatatttaaagaaaacaagcccttaaacaacatacataaatttttagtaggtaggaacttaaatacaaactgcttggttatttattcttacaaactattcaagtttttcaaatcgcctaaccggggagagagaggacctgtaaggtttctgttagaggataagtccctgcaataacattgaagcctaaataagcataaagtttaattaagcttggtctttagtaaaagttaacattgaaacatacaagagtaataatgtctcagtgagaataagaataaactcacaaggatcttaattcagtaaggcccccaatatcaccttcaagtctccctttgagtcctattgatggcaatgtcctgtaaattttgataaatcattataaagaagttgcaaattttagcagatcattgtaaagaagatttataatgaagtgaagagattaatcaatcattgcagcaatcttgttaacttattttattttctaacgggtactaaaagcaaaactcacaattcagtcactcttgagccttcacagctcaccccatcccattttaattttactccacagggatcttgagattctgaccagctactaggtaaattttcccaagccaccttcaatgactggagaaccgcaactaaaatgacaaaatttgaattagttaaaaggttgatcttgactgtctaacaaatgtctaaatttgaatggaactttttttttgatagaatttaaagcttctacttttgttttggggttatttcacaaatgcacaaaaaaaaaaaaaa

SEQ ID NO: 218667 - DNA, 4591 bp, Cannabis indica
taacatttacattattttaaaaaagagatactaactttcagtagagtgagaaataaggttatttagtgccatatctctatgtgtaacttgctaagttcaattcttctattgaatatagtagatatatacacttctgagataaataaaaaaattcaaattgctcgcattcattcgaatttggacgactcatcaaaagtcaagtaagaaaaacgtttaataagccaatttgaaagatggagaaatgcaacaaactgtggaagagaagtgatatatatttatattatattccttgctttcacaagaaaagtatgatttggccatatcatctgagagttgcactgcattgactcttaataatgattatcatttgtgattagattccttaataatgatttggaatttctgaagtggtaaacgcttaccggtttttaaggccaaacccaaacttaatccaaaatgttgagtccacgactacacctcctactaataatacttgtttatagcaaatgcatcgatgcaaattcaccaaatcccacataacttattaaatgataaaaatgaaatctaataagtcttcatatatgtacaaagcagtataaccgcgttaaattatgggatcaatatctaaaaccttaacaaggactacactagaattccttacctatgaagcattttaaggttatacttttcttcaatcattatttcgaaacaaaaaataaatataattgaaagaacaaattgatcccttgcattgatgtgatgactaaactataccccaaagcaaaagcctcatcttcttcttcccttcaaattcatccaaccttcttcttccacgtcccaccattttccccccaatttggtcatttattaatatgcttctcaaaacttcaataagacctctaagcaaacttcatccaaatccaacctcctctctatcttctcttcatttgggtcaattttggttactacatacccctctatttcctcctactttccctccaaccatttttttattttaatttatttttaaaaatatcataattactttacttacagaatttaatttgctattattattattattattataataaaaattaaaaatgttgaaaaaattgaggaggagagtgaagaccctgattaccaacagtttcaaaaaacctcgaaaaaagctttataaaccccttgatcatcctcaaccagaatacccaacatcaccatctccaactactcctgatcctgaatcttcaaacatgtcactccaaagaccaggaaagaacactcctttcctcttccccaaagttcaatccaccgttgtccctgacccttcacccttcttctcacctaatctcctctcaacacctcttcccactaactccttttttcaaaactttgtcctcaaaaatggtgatcagcccgagtacttccatccataccttgtcaaatcctcttcttcttctctttctctttcttacccatctcgcttctccaactcagctttcttgtaccaagttttcgtggctgatctcaccatctcagccgccgcaaacaccaacccaggttcgcagaaaagccatgttatttcttctttcaatgatctcagtgtcactttggatattccttcttccaatctaaggttttttctcgtccgtggtagcccgtttctgacttgctctgtctttaacggtactgcgatttcaatctcgaccatccatgcaattctgtcgttttcatcgaataattcggggacaaagtacactgtcaagcttaacaacaaccagacttggcttatatacacatcatccgcagtcagtttgactcacagcctttctttgataacttctggtgaattttctggtattttaaggattgcccttttgccggattctgatcccgaatatgaggcggtgctggacaggttcagttcttgttaccctgtttcaggagaggctgcattgacaaagccattccatatggaatacaaatgggagaagaaagggtggggagacttgcttatgctagctcaccctcttcatcttaagcttctttctagtgaggattgtaatgtcactgttttggagaatttcaagtacagaagtattgatggtgaccttgttggtattgtgggtgattcatggatgctcaagcctgatcctgtttcagttacttggcattcaatcagaggtgtcaaagaagaatcttatgctgaaattgtttctgctcttcgaaaagatgtggaggcacttaatgcaacggccgccatgacgataacttcttcatatttctatgggaagttggtggcaagagcggccaggttggcattgattgcagaagaggtgtgttttcttgaggtgattccagtgatcaagaagttcttaaaagatacaattgagccatggttggatgggactttcaatggaaatggatttcagtttgaaggaaaatggggtgggattgtgactaaacaaggagcagtggatgctaatgcagattttggttttggggtatataatgatcaccattttcatttaggctattttctatatgggattgcagtgcttgtgaaactcgatccagcttgggggaggaagtacaaggctcaagcttattccattatggcagattttatgacccttggcaaaagaccaaactcagtttatccacgtttgagatgctttgacctgtataaattgcactcatgggctggagggctcactgaatttggtgatgggaggaatcaagaaagtactggtgaggcagtgaatgcttactattcagcagctttaatggggttggcttatggagacactcatcttgtagccactggatcaacgcttacagcattggagatgggggcagctcaaatgtggtggcatgtaaaggagggagataaactgtatgaagaagatttcacaagagagaatagagtggtgggtgttctctggtctaacaaaagggacagtggcctttggtttgcacccgctgaatggagggagtgtaggcttggaattcaagtgctacccttgttgcctgttactgaggccttgttccctgatgttggttttgccaggagcttgtcacgtggacattgccggttctgcaaagagaaggcgtcggagaaggatggaaaggctttgtgtatgccttggaagggctttatgataaggagagtgctttgcagaagattaggtccttgaatggtcatgatgatgggaactcactcactaatcttctatggtggattcacagtagagatggggaagaggaggagtatggaggagggaaatattgtttgtatggccattactgtcactaaatatggctgtactacatttaggatgaagtaaaaaattgaaaaataagaacacttgctgtcaacattcagaaaacctgaatttactttctttcatacaagtttggctgttcatcactttatacccgtttccagttaattatgtccatgtggattattatacttgtatgaatatgaaatgttcgaattgtagtaagatcattgtctaaacaaaaaacatgtattacaatacattattttttactaaactatccctttgtgtgtttgtttcatcagatgtgtacacctgtgttttataaataactcttatgagaagaacaataatacttggtaaggtacagcctctttatctgggcttgaatattatttgatgaagttcaagtactgatatctataatggttcaaacctttgccaataaactccagtctattgtagctcattcttccatggattttgtattccttgattatttttctgtgtaaatataaaaaagagtttacttgattattttaatgtgtttgagatagccatttgaagctctttttatctattaatagtttcagttgcagtaattttatgttattcattgtcaaatcaaattaatgtccattctatttgtaggaattatgagtaaaaaagggggtctgtctctgtctgcttcttctgattacattcacataatttagcctaattacaatgcttcttttgctgctgtatactggtaaatggtaatgaagtggccgagattagaaccatcagagggttatgttgttcaggttagatgttgtgctttacattcttagcagttagcacatgcacaaacataataatgataataactctaaacaaatcaaaattttgtttcaaaatggttgaagtataattttcagataaatttataaaaataaataaaagtagacatattttcagtttgagtttaggggagagctgtttcaaaactagcaaaagcttccaattccaaacatgttttaaatgacatgcattaattcaatgtaagaggaagttttctttacaacatatatatctatactattttttaagaatggattttgacaaggcttttttttatactattttttaagtaattttgttttgtactgttattgctatgtggtactttaatgtgcttaatattatactaatgtggtacaataattagttaataatttttgatttttgattttttattttttatgaatggaactttgtattattttttggtattttggtaagtaattttttatactattattgtt

SEQ ID NO: 218668 - DNA, 2011 bp, Cannabis indica
tatcttattattgtgttctatgttatatagaaattgatcttggggtttatattaatttatataacaaaatatacatcatttaccatgaaatgaaaggcatcacagcaacgaccttacaaaaacacaaacttaaagttttaataaacgaactaaatgcatgacaacacaagatatgagctacttccaaactagtaaactacaagaatatgaaaaattgttaaggagagagagaaatgcaccataagtacattcacattattcacttacaaaagacaagtgcttgaataaagaatcaaaattctgtttttgctagtacccctatccaatataataagaaaatatcaagtctgtgattggtattacattctatcctcgtaccattgatagttcccttgatctggtctcatgccttgtaactttacaaggcttggaaaatgctgaaatttagtaactgtgtcaaatagctctctttttggccgtggaagttcaatcttgttaattctcttggctttgacatcgtaagaaaacgacattctccttctaaagttaaaccacaggacagtagattgaaatatcgctggagaaatttgatctctttcctttgaatagggttctgtgtttagaaatgtcaatggaacaatccttttctgctcactccatctcaagtcaccaccatcgtactttgtcatttttaagaggtgaaggtctagcccgattatctcagcaatagctaaacaatcatcccattcaataaaacaagctttcaataaattgaagtggacatctctaggcaaaccattattaaccagatacatgtcatcccatgcgttaatagataggacagacagagcaataccttcatcaattaataatactctaattgaatgcaattctccgctggttctcacatacattagcttaatgacatccggaaaatgtaaaaagcctgtctgtctcccgatggatctccaattgatatctttaccaacttcaaaagtttctaaagcatgttcttcgacaccttgattgttgacgcgtctacattccaagagcaatttgcactcatgtgttttcctattgaaagcaattaacggaagcaaatgaatagcgggagcatgattatcaacataaggagaacgtaggatagcatgatttggatccggcaaatcaagtatttggcgggtggcagggttgactatagagtagttaacaggattttggttgctcattttcaacaccaatccacagaacgagtcgattatgtaagaattctggtttacgggttggaaatgtagataaggggctcggtccaaatggagtactgaaacaaagtatttattttcaatcaaagacttccaaaacttgttgacggtcttgcatttaagcagagaacgcacaggcaatctactcaatatatcactcatcaatgccttgttttgtgctaacatttctttattcgggttctccatcatttttctttgaactgatcaattgatgaaggatgatatcagtgtacgcagtaagaaaacaagaatactttcagtttatcatatatacaactccctaagaagagtatataccaagaagagaactcggttgaacgattatacacatacataattaaggaatcgcgaacagttaatggtgtaaaataaatatcttgatggatatttcaattaaatcagctgtatgtacttaattttctttcttctttttttcttccgaataaacgtaatgaatagaaaaataaatactactaataaattaagaaagattaaaattacatcaagaagcatattaaacacaagattttgaagtcagacaagaaacaaactcagaagaagaagaaaaaaaagtttgttaccttgaagtcttggctctttgatcagtctgtttatgtttacaccggtatggaataatatgaatgaatgtcttaaataacttgtaaattagaagccaaagcccaatttatttattttttgaaataaagcaattttgtatctttttccgc

SEQ ID NO: 218669 - DNA, 5122 bp, Cannabis indica
gaagactttggtagacttaaatattggaacagagaggaatttggtgggagattcagaagagctgaaacatttagaggtgatagctcttatgatgagaacagaggggataggaattggaaggatacacgtggcaaacacaggacttctgaaagtgatgatgaagatgatgatgcttctgatgctgataataaatggcgatctcggaattctagaggtgctagtcctactcctgttgatagtgacattgacgagtccgatgaaagtgaagagagtttcaaaccacatagaggtgacggaagaaggcaggaaaggattagcaggcccagaaataatgaagggtacaaaagaaatgctcccatgaactttagaaagagtatgcctgaagaggattcagatgaagagaacgtgcttagcgatcttgaaactgcaatgcagcaatcagatgctgatgaaaaacatggctccagcacagcaagagcaacgaattataattataggagtgacagcgatgaagaagagaactcctataaccgaaaggaagagaatggtagaagaatgacttacaggagaagtagtgatgattctgatgaatgtaatagacttgaggcaccaagagtagtaaagggtactcgaagaatgacttacgaaagcagtgctgatgattctgatgaatgtaataggcttgaggcaccgaaagtagcaaagggtagaagaagaatgaattatgagagcagtgatgatgattctgatgaatgcaatagacttgaggcacccaaagtagtaaagggtagacgaataacttatgagagcagtgccgacgagtctgatgaaaatggtagtaggttcaaggtaccaagagcagtgaaaggtaggcaaaacagagctggcagcactggtaataatgaagatccactaacaagtaccgcagcagcatctagtcattcagaaattgcttggctagaagaagacgacacagaagcattagggggcggaaaattaaattactggagcagtggtgatgaagaggagtaccaagtcaaaagtgattacaaggaaaagactgatacaaggaaatcaaaatcagcaaaagagatggatgaaacttgggatagtgattaattaagtaggctatcattatcataagatacttgaggttgaggaagcccttcataggactttgcctttggacgttcatgaacatgtgattattactaatagtaagattcagcacattaacttggatgaaaagttggtggtacattcatggatgtggaagattgaagagagtttataaactgagctggttttcatatttttgagaagcttataaacttcatttctctaatagaatgaacacaaattttgtactttatcgatttttttggtgtattggaaaaatgaatgaagatgaacagatgggataactattgccaattatcaaatttacgagtataatttaataattatatgcttttagttttagcatatgaatggccactgattttgttgtggattagtgtcatactgaactttatatattctgtaatttattcttggaatttaaaaagaccagtaattaatttaaatattttcttaacttattttattttcataattttctaaataaaaattatattatttctgacattcttttttcacaaataaatagtacttttgtcttaaaattatttatataaacatcacgtgttgaattagatttagtggcctttcatgaaaaaagaaaaaagaaatagatttagtgggaggcggttaggagagttaggccactaaaacatcgtgagggcgagtgggactgaaatggcgcgtgggttagaattatataagtgtgattattacacgtggcagtcagaatctatgccgaatggaaacaatagagtccacatcatgatatagaaaggtgtgggccccacagacacaccacaacacaacgcgtatttattcatgaaatttgaaactccttttttattcttattctccttaaaaaccgttgaatgagaaaacggtaaatagaatttagaaaacttatttaatttcccatcaaataaatgatgcacacccaaatatatatgcaccttaccaagataattttttttgaatttatcacaattttacatcataacatatataattatgaaaaataaaatttacatatgtgataaatatgtgtaatttgaatgtgtattattcttaagaaaataagaatgtttgctagatattagtagtattaaattactacaaaataatattttatgaattattaaattaaaatacacatatctaattacatcaataaattaaaataacttgaattaaaacacgactaataatctccagtggtagtgaatcaatttgcctacttactgtacaggcaatttacaacaatttttctatgctttctcctttcaatattattatttaccactataaaaaactgttggtttttatttattgttctattaatagggtaactcataatattgctaaatcttcttattattttttaaaaagttgtttctaagaatgatgttcgcgctgaatttttatttattattgcttaagtcttaatttttaaatattcatagatttaaaaaaaaaaattgtggtgaatttttaaatattaaaataataataataataataataataataaatagaggttgctagaataggcaattagaaagtcagcttttaacgtggagggaaggaagatgtcacaggtcaactcctacttcatccatacacgttgttgcattttaccaatcaattatcaaaaataccactttttttattttcttttattttatttcgtgtgtgagattatcacgccaacaacttaagttcaattaaatttttgttttgttttgttgttactttatagttggaaataaaataaaacaacatctgaattcaatattctttttgagacttttttcttacaatcctaattgattattacttccccaagtgaagttgaacaagtaattaaaagcaaaagagttttataggtttgatttgagttaataatagctttagaatccccacacaatgagttgaacaaccatcatgatgtgttcacctaaaaatgagtttataggtttgagttattggttaattagattcattaatgtgtttaattagtcaaataaaacacaatcctatacatatatacacactacagtactacactacactggttggttgttgaattaatagagttagcttgggttaaggggttttatctgaaattaaatattacttattggctttttcatttattaataatttcaagtcaataagtagattgtgattggagaggatttttcttcttcttcttttttcaacggttataaatattgagtagtgcttgacttagtcaataactataaaatatggaaagaaattagtgtgaaaattatggattgtcaatgtcacttggagcaatacttaatgaaatgtttatttaccatgatgtaattcttaacatgaggatgaggctcatcaaattacacactcatatataattagtcttagttgtaaatatttttaagtgaatcacttcctatataattgtatgattgaaattaagcaaattaattcaaaaaatagtatataactattaaaaaactacacacgtatttctaatcttattagtatacaattaggctaagtattatttttgttaattattttgtaagaataaattttcatgtgtacatatttgaatccaaaaatctcaaacttctaattatagtttgtaattggaaatgttctaagaacattaacaaaatataccaagtcaaattcttgacttcatatcaattatgagagtgagcaataagtggtagactccaatcatagaagacttcaatgactcttagtcatgacaccccccataactttcaacaatacccaattgagtgttcttattttctttgttctacaatgacctagtccatttttttcttctttgatagtctaaaaacaaagtaatgcaagaattttacactcttgcccaaaaaaggttctcagccatttttgtctcaatagttgaattgagaaccctaaattgattgagcatggggctacttacactagacaacaatttcaagaatcatcataaattaacttttaccaagtacagcctaacatggtacttggttgaataatttcatagagagcaataacaccccaaaagacaattcaaaattgatccatggatattgattgagtagaccaatagactatgaactatgaaatttcaaaccagataatgtaccaactaattttgttaaatactattcacataaacaattgtggagaatcttatccctttttttttcaaaacaatggggattaattggtggagggtctgactaaatcctaaagtgcacattgaggcactatctaatttagacaaaaaaaaattacatgatccacatgttattgctttccatgcttgaaagctactcaaaatcaacatacaattcttagaaatggtttatataagaattgcatattgactaagtctacttccactaaaagaatacaaaaaattaagagatctccaattcttatgaaatagtcttagtgcatgaccataatcagtaatgataatgatacaaaatatctaaggtaattataatggtaatttaatttaatttagtacataatcaacaacaaagttgtaaaaagaatattaataataatacttactaacaaataagtctgaaaaacaaaattcccattatagaaaatcttgggaaaggtcattctagtcatgcatattggggatttatgtcacataccaacaagaagtgggtacattagcttgataaagcagtgaaaagctaagctatcttactcactcaaaaaaacaccaccaccctcaaatatgaagattttgattattgccccatccgagctggaagaaagaaatctcaagccaaggaaaaaggagtaatatataataaatcttcctaaaaattccaagaccccatcaagttcttttcctagcttctcactatgcactaaagatgacctaagattctgttggaatgtaaggtatatatttgtacggttatacatcatcatcatcatcatc

SEQ ID NO: 218670 - DNA, 14416 bp, Cannabis indica
attaagaagtggaagagttcaacttttagctactggtttatgtcatatttatagtgataaataacccataaaaccgagctccaaaggtcttaatacagagaaaataattatttccttacaaaaactcattaaacgacaaaattctatctgaataaatatgaaaagtgtgtagacaaaattctaatctgtctagttagcattgtgaatttagactccattaaaaccaagttcatttttacgaaattctccttgaacatcacacaatctagctgtttataatttagaactgaattaaatttcaagtgggatcaccgtactccttaagtttgatgtgacttcgttcatagtgataatgccacaaactaaataaaataaacttaaggaagtagtaccccaacaaaaaattgggttgagtagataaaattaaaacataaattatcctttttaattcatatgataattttagaacaaagaaataaaggtagagaaaaaggtgaaaggatgtagataataacgtcgagtgtgggtacatgcaagcagattagattagacaaagataaacactgaacccaaaaataataataaaataagaatgacaggtaagcttcttcttatcatttgttccattaattaataaactggttttgtttctatgtggccgctactaggctaactcaattttaaatagccaataagattctcacacgtcttcaatttgaaacgtgtgttttgtacaattactattagctatacctatatatatacatacgtagttgagtgtatctcttcttctcattttcgagttttgaattgaagagtcaaaaaatgcagagggtcttctcacgatgttcttcagtaatcagtaaacaaaggcactttgcttctttctccacttctctgctcttcgatgacacccaaatacaggtactatatatgtatatgtttatatgtatgtattagtgttggtttatctatgatttgttaccttgttctgtatttctattcgattacttttttatttatttatttatagattttacgatcgaagggtgtagtgtagatgtagagtactcgttgttgtcctatggctgatatgatcattttggaatttggaaattggagaaaaggagattttgaaaaattggtgatatgttcaaatttctgaattttgtgtgaaaatgaatgtgattacaaaccgtggaagtaatcagagacagacctaatgagccctaggttgggtaattgcctaaccgcaaaattagaattcttttattttaaagaatttatatgtaagcctatatctattcatgtctaggagcctaggtggggtttcatctaacctttggttatttcaatgataccttcattgttcaaataaagtctaggagggtggggtggggcatgtataaaaattactctaggcatccatggaagtaatcgaaataaagaggtgaactttttcttttcttttaagttttacccctcatctaccttcttctatgtattttttatgtattcataacccaaatcttttggaagaaagttgctgatcccagataatttataaaccggcttaagcaatttcttgtgttattttaaagaagagaacagtgattattctggatattattgttttgagaagtggggtttcaggtgaataaagaaaagttacagccttctatgtaatattttttccattgtcctttggttgatgtttattagagaatgattattgaagaattcaattctgttcatgttgagtgaaaatttcaactactttgtgcttggtttttttttttggttttaaatttctttgttttgattgtgtttgttcacaagcatttattgtcttccattgtcaaaaaacttcagtttttttgtttctttatgaaagttcttaccttattattacagttcaaagaaagtgtttctcaattcgcacaagaaaagattgctccacatgcctcaaaaatagaccaaacaaattctttcccaaaggtacatgaatgctattctacatcgtaattataaaattgactgaattctgatccttcttcttcttattattacaggatgtcaacttatggaaactcatgggggagtttaatcttcatggaattactgcaccaggtaaagttttcatgatgatgcagagagttcaccctagtgaaatgtacaattgaattggaattttgtcgttgttcatcttcagaagtttggtttattttgatttagggagagaagttagaaattgtttcccttcagtacttatggcagaagaaagattctagatgatgactttcgtttataatcagacaatttatttagtttgaactctgatcctgtctgtgaaatttccagcacttctaactcaaatctttattttcttgtagaggagtatggaggacttggtcttggctacttgtatcattgtattgctttggaagaactcagtcgtgcttcaggctctgttgccctttcctatggagctcattctaatctttgcattaatcagctggtaaaaaacaaccataattgcatttcacagagagtagtctcactttctgtcataagtatttagccctccatttttgtttgtttgttttggtaggtgaggaatggaaatcctgctcagaaacagaagtatttaccaaaggttctatgttcatctacatctttgatccacatgatgtttcatctatacttaatgcaagaaaagacactctggaactaatgttattagttttaggttttatctttttgcaacgggattagctccatctatttctcaactgtcaacatttaagattgataaatcttggtattctaactaaatcattaaaattgtggatgaattccaatcagaggtgtacctatgttgcaaaagattaattcctaaccattcttgcaaactctccccctctattatgcttagaatatctttgtatacgtccaatactaaaacattttagtcaactttgtttcataagctatgatgttctctatttcttttaattctgacaagcaaagcttaacaatttattttacagcttatcagcggggagcatgtgggagctcttgcaatgagtgaacctaatggtaaatcataagattaattatatttaggaaaataataataacaacaacaatcaacgtatacttggttggtctgtcctactgcagtttctaagcttttatgtacttgcttattaacatgcaagattctgatctattatgtttctgtcagctggttctgatgttgttagcatgaagtgcaaggctgatcgggtagatggtggatatgttctaaatgggaacaagatgtggtgtactaatgggccagttgctcaaacactggtatttatgctagaatttcttgcatttaattatgaaaagcaatcactattgattttgttctttgtgtgttaagtattaaatattcattagttgagaaagctatgatgtttttccaagatcatagggaagtctgtataggatatggcacacttcattttcacaattttatgcatttctccctcaaataatgactatgaactaggtcctgcatagtcttgtacgcagtatttagatgtcttatttatgcaaagttcaaaatttgtgtatgtattactgatatttagagttgaatcaggttgtttatgcaaaaacaaacgtaacagcagggtcaaaaggaataactgcattcattattgagaagggaatgcccgggtaatctatttaatagttgttcttctagtttctcatagaatagaagtttgtaaattatgaaattgtataaagtcaggcttagcaagtactggaggattgatgtttgtgagttgttcaaactgttgaaagaactgaaactgctgatttatttttcaaaaattatcatcgccgtttttgttttgttgcttgcttttaaaaatttctttttgtctagggtaaatgagagaattagtataaaagtgcaatgaaacattgttaaaactacttatttttaataaatgttgtgttgtttctgcagattcagtactgcccagaagttagacaaacttggcatgcgaggaagtgatacgtatgtctgcagtagaattatctaatgttaaacttatcatctcttttgtctttactcttctaaaaactcaactggtgttttgcagatgtgagcttgtctttgagaattgctttgtgccagaagaaaatgttctcgggcaagaaggaaaaggtttgaaatttatataatctcatgtatgttatctgttccatgagatatacgaattaagaatatggtgctttgtttccaattataaaattgaaagctcatataccgtgaacgttgacctaacttaaatatctcagactccctctggcatatgttttctggaaaaaaaaatcattattatcatagatcagacaataatgatcctcttatgaattgtgaacatgagaccacttaaagttttaatgctattaaaaaaggttacttcttttctggttttaattcaaatatgtgcttcattacacgtataatgttcatgaggctgttgttcgtctctattttccaggtgtctatgtcatgatgtcaggtttggatttggagaggcttgttttagcagccggaccccttggcatcatgcaggcatgtcttgatgttgttctaccttatgttcgacaaagagagcaatttggccgcccaattggggaatttcagtttatacaggttcatgattgatatgtttacaacttcatggtgtttacaacatgaattttgccaaactcatactgttgcttgtccttacaggggaaaatggctgacatgtatacttccttacaatcatcaaggtaaaatggttttggaatttgatcttgtactattacttttctgcttctaaaaagtttttaacattacagaatttcgtttgtgcataaatctgtacatgtgcatttgtgtttgttttcaggtcctatgtatattctgttgcaagagattgtgacaacggaaatgttaaccctaaggtgctttttcgagagagggaaccagtccggtccctgaacttttccccattttttcttaaatctttgcctttttgtttttcaaactcaaataataattcttgtgatcaaatttttcaggattgtgctggagtaatattatgtgcagctgaaagagccacacaagttgctctgcaggtgattagacactacactgcaattttttgtcttgttgactttaacagtttctttcaaactcctacattatccaaaaatgtctattaaattcaactaaattaactttggccgactacaaaaacaatgtctattcaagccatccttgtttatcttaaacttctaacgaaaacagaagcgaaatcgtttcataatccataggctctcttaagatattgccattacattgtctaatcagctctcttattgcaggctatacagtgtctcgggggcaacggttacgtaaacgagtacgtaacgggtcggctacttcgtgatgccaaactgtatgaaatcggggcaggtaccagtgaagttagaaggataataattggtcgtgagctcttcaaagagtaatgagaggcaacctgtatctatttaatggttgggtatggctaactataccacagcaagaaataattttatgtaatccttaaaatgaattagcaattggtcagtaaagaaaatgaagttgatattgttgtaagtaagaattttatataagaaaatctgttcaaatagtttcatttttagaactgatgaaattgtcgaataaggtagcggtttagagagaaaataacttcgacccttaatgggagtgagtcttttgaatattgcaaatccaacacttcatactcttgaccagtcataatacagaaataagaccaatctttaaaaggttcacagctgagttttaaccttttatgacatacaatattcaactactgaacttaggacttaaaaatagatagatacataaccaggtttcttgtgcaaacttgatacttaagaagacatagaagaagaaaacacaatagtaaagacacacttaaaccctgataacagttggagaagagtccggctggccgaccgatgaagatttcgaaactggagcttgctccagacagctttgatcatcactagtcaccccaaacgacatcttctccacttcttctcgggtatgtatgtggatcttcgaaacgacattgcagaactcgctgcaaccagaagaaacagtcagtatgattaacagagataaagctcaaacaagaaacaaatttaaaggtagacgattcggggacttactgccatggatcatctccaacaaccatcacatcattctcactgtcggtatacaagatcctccaacctttatcagggtcttttagtaggccttccatgttaaataaccactcgagttcactcagcaattcaccgtagccattgagtttcgagaggtcaatggctctcccaactaaactgccttgcttgtgaaccttcgctcaatatgttcaacatcagttggcaaagcattcagaaaaggcaaattaaatccaactaagccattactatagcttaccttggtgcaacttctcttattggaactctgagagttcggtgtggtagtttctcctgtcaaggaaaaaccgaaaagcttgcagctactaacactcccaccaaaactgtcatctttcgggtttcttagatttgtttctaaagtgggaagaggaagcgcagaattactttcttgtggcttaagctcgttcggtgtatttggtatcccaacttcattccttacaatcccagtctgaatagtgtacggactaatgttgacattctcgcgaggaaaagtggtaacattcgaacgaatgctagggttagacccagctctgcgaatgtcaccgaaaggaaaatatgtggtttgtaaaggttccgatgccatcgagtaaaaattgggcttggctgcttgatatgagttgaaagatgtgcagctgccgagagaggaatttccccaagctccaagattgaagttggattttcctgttagggaccttaattggcaaatttcttgaccttgcaagaccttcggaaatctactagattccgcaaagcctgtgtaagtggtgggttgagttctcatgaactcattcatagttgatttttttgttgtgttcaatgctgctagactctgatgagctgaagaatgcatctcaaaatctagcgggtggtttacagtatcacgaccgtaaaagggtgatacgaaaccgatattttcttgaccttgcaagaccttagaggatctaactgactcctcaaagtccaaaaacccaccccctcctactacaataaaacaaggatgcataaattagatatatgaagaataactgaagcttaatatatacacaaaaatgattcgcaagacttgtaccgattaagggattgctgggcgggtttgactgcagacttgtccgcattttcttcaatctcggggaagactgaatgctcaaaggcgggagagaaacagaaggatcgatctcccatggagaaattcgctcttgatgactattcccaatgtcttcatcccacctaacctgtcacacattaccaataggaaattgctactaaggattgttattctgctcaataatgtaaacatataagatttttgccctgtatggtgccaagcagatagtcgggacttcaatccatatctttatgctcttgatacacgcgtctaaaatatacaccaaaacattacatggtctgttttttttaagacaacagcctcggtttagataaataattcgtctataaaattgacatgtaatgtttaggtgtatattttgagtgcagatatcatttctcgattacgaattatacatgtggactgtggctaaataagaattgaatagttatcatgataaagggttgcacaagaaagagatgtttcggtggatattttgagtccacatatcatttttcgattacaaattatgtatggataaatgagactagaatagtttatcatgggcagaagagagagagatacaaacaaaacaactaaaagaggcaaaagggaagtacagaaaacaattctcattcatataaagaagattatggaaaagactatatataccatcaagcatctccattttgaatttgcccatctatagggatccaagtcacaaattccagtcactacaccgctacatctgcaagaacgaaaaaacccgagttgtattatccgaacatataatctactcaaacaagatcagctcatcttttactaaacaaaacaattcactacactacaacaccttctttctggtgaatcttccatgtcaaatcttgttttgaatctagtcccgatcgccactggatttgtgacgctcttcacaaacttttggtaaggaatgacaaattctgcatgagttgccctgcatttgatcattcgaaaacagattgttactatttcatttcacaggatcatggatttgatcaattttacaaaatataatggaatcagactaaacttgatttatttaataataacaaatcaataactgttttagagattaaagtatgacaaaatgtattattttccctaatagtaattagtgaaaaagagacctttgttttggtaatatcactttagaaaatgatctttttatttaatataattctttacaaagtagctttccaatgtaaatttttttttgtgatttttttaaatacccctaaagttgataaaaatatcattaaagcccccacaaaatataaaaatttaaagcttattatccttaataaagctcctagatagggtgtcaagtgtgttggaaagtacttttacaaagaattattaaaaaaacaaaaggcattttgtaaagtgacatttaaaaaagaatattttgtcaaacaccccaaaatcaactcacttttagtagcaaaaacctatttcttcccaccgaaaatttaatcggtacatttttactttcgaatactttctatgctagtgtaacatttcttagtatttttcctttaccatattgaacatgaacctcacattttctatcaacctaggagacatctctagtttaaaaaactatgtcaaattctatcgagtgcgaattatggtaaaaacaaactcatcttccttttacaaagacgatgactactaatcataccttggactgtagaaaacatgaaacatgctcttggtggagactgcattagccactagtgaaagaacattaggataagaattctggttgcgaacaattgaatcaggaagaccattcctcggccgaacagatctcctaattcccaatcttagctctccattttcacccctacacaaaccataataaatgagaaagaaactcaaaaggctctgatggcgaaaaggatagacaatatcgccatttacaaccaaaaaatatggttgttgcttttttacatgagtcatgacaagaacttttgttgctttcctcttaaatatatacagaagaagaacaaaaacactattattcctacttgactacttgacaagaacatgtgtacaaaaatgctcaagaaattaagattttttttcgaaaattccttctttttcggttgaatcttacaatgtatagaatgggaccaagcctacaattcaaacaacataataatggtactagagtgttactatttacctcagaaagagcactgcatcccctgaaactagattcttttgattcacgaaaatactccatccggtagtcagtagatgtctcctaggctgacctgacaagcaaatgtaaaccgaaatttcagcattccttacaacaatcaaaccattcaacagaatttatatagaacttacctctataaatatgtcgaaatctccactctaccccgtgcagatctttcgcgacaagttcttgggagggccttctctgcttataatcctttgaaaaaagaacacaaaaaagatatagtttatttatgccaatagttaaaactagaaccaccaatgaaactaacataaaaacacaccagtggaggaaaacagtcctctgcagctcttcgaggaaccgagaacccgccatgtgtactggtatcagaagctgttagagtcttgcaaaacatatgaggggttgatttagtaggtgaccctgcaatgccctcatctcctcccaactcttcaacctctttcccttcttgtttcactcctaccaactatataataacaacacattcatactcatcatcattaatcatcttcaataaagtaatattattattattcaaagtccaaaaacagtaagaaccaaatgaagacaaacagaatataatatcagagttttcagtaatcaagaattcagaatcattacctcaggttgaggaagcaaagtgacatgagtatacacctcatcattctccttattagcctgttttttcattaaacaaaacaacaaagttagacctcagataaataagattttctattatgggaaaaaaaagagagaagaaattgaagaaaacccaatactcacaagtagttgaacattgataactttgcagaagatctgtggtttgaggtcaaaagtgggcaaatccaaagatgaaaaaggagcaacctgttctaagtggccttgtgggaaatacacaactacattccctttcttaggtagtgaagtgagaggaccagcacaggcatgccatagctccaaatagattgaagaagttacaggagctgaagatgaattggaagaacatgaagaagttgaagatgacaaacaacaaacacaactgctactacccttttcacaatctccattacataatgtatttttctccacctcagccactacatggttcagatcaatttccatgaacaaatacccttatgaaatacaacaatagcaacaaccaaccaaccaaacaaacaaacaaaccaccccttctcaacaaccaaagaaagaaaaaaagaaaagaaaacaagtggggttttagagtaatcaagtgtggaacaagaatacccaaaaagctaaaaccttggtgagaaaaaccatattttgaggagtacccatgaagctaaatgagaagaaaaagaagaagaagtggtagtagtagttgttgtgagcaaatgagaagatagaaaaacaacaaaaaaaacatgtttggaaaaaagtgagaggtgagatgagatgcctctatggccaagaagaaactaaaaaaatacaaaaaaagatttaaataaagaaaggaactttgattgaaaaaagaagagagggtatcaaataataataactaagaaattcaaagtatgattcctcccccatttgcaggtactgaatagagggagcagaaacaacagacacagacaattgcataggaagcacaggaaaacaaaaaagccaaaataaataaataaaaaaataataattaaaataaagccaatgccttttagactcagacagttagtgagagaaaataaaactaaaaataaaagagagagagagactgtgttaagtgggggggacaggctaagacagtacataacccacacttccccactcattctcttctctctctctttctctctgctttgccaattgccattgctttatcttttttccttttttaaaatttactataaatttattataatattttcaatttactgttctgggtagaggtgagatgagggtgagaccctccaccaagacaaaaagaagagatttttaattttatttttcattcaatgcaataaagaaacaaactttattataattcctatcatcacaaaactcatcttaatttaaaaatctgagcccaatcaaataaaataaaatagttgtattgttattattattatggctttatgtataggtattagagaaaaagatgttatctttttcagttatttgtacggtaaagactaaagatataaatgtatcatatgttatatgaaatgagatgagacagagaagagacagaggggtttttaattttttttttaaatttttattattattattattactatgagaaaaagaaaaagagaaaataaacaaaaatagtaaagtgagaaagagagtgagagatggagttgtcaatgtagatgggtaatgttggggggaccctatagcctgggggagttttggcagcaactatggtgggcgtgttattgttagttgttaggactctgttttgtgactgagattaggattgggattggaattgggattgagatggatggagtctctctttctctattttatgtttatcacctttcccctcgaattttacgcgattcttttttcgggaacttattagaattactcatgaatttatgatgctgatattcgtcagtgtagaacttttctttgatttgattagtatgctttgtcaaatcataggttgctaaattctcaatgcgaactatatgggacaaaactgctcctgaaatttagataataaagctataacgtcttcaaataacaccccaacacattaaaaaaccttccattattaatagttgttgctaagagctaagagcactcacaacaacttctttaaaatagaaaagctttgaaaattttaaagaactgtaataaaaacacgttatagcagatgctctaaactctttctttattttaaagcttttttcaaaatacattattaatgttctacatttatagaatattattcattactctaaatatattttattaattattttggatatgtgtatgtattaatattatatatttgaaatgaacaaaatataatacaatttttaaaaagttggtgatgtattttaaaaaagttgatgtaatgtgtaatataaaagtgtgctgtaaaataaaataataaaaataatattttagtgatgtattttaaagaatagaataaaaaaattgttggaagtgctctaaaaatgaacaaaaaaatattaatctatcaaataagttattttagctaaaagatttagctatagactaattcttaaagcacttaaagtactcgcatcagcttctctactttatcttttaaaatatcttaccaaaactttggtttctctattttattcttatcacctttcgcctcgaatgttatgcaattccttttcgaggacttatttagagcacatgtaatagagtaattaaaatagttaataattaaattatttagctaatagctaaaaatagatataaaaaatgtgactttatcaaatgagttattttagctaaaatatttagctcatgaatagttcttagagcatttacatcaacttctctactctattttttaaaaatcttaccaaaactttggtttttctattttgtagtatattagtatcatttttataattttttttagtatattagtatcatttttttactatattatattttttgtgtttatcactttttccttcaaattttatgcgatccttttttcaaaacttatttagagtactcacaacaacttctctaaaatagagaaactttaaaaaaaaaattaaagaattgtacaaatgcattatagcatatgctctaaactcctttattttttttaagtatattttatccatttttttaagtatactttatccatttacacatatctccatataaaaagtaaaattaaaattataaaacaattaatataatatatttaaaatcatgaatattattctataaatgtaatgtttgaatagtaaattttaaagaaactttaaattaaaggagtttagaacatctgatgtaacgtgcttttagtttaattctttaaattttttaaagattctcgattatagagcatctgatgtgagtactcttagctatttttacatgttgtttgtcttaatgaatagtgctcagtgaattttaaaaaagctttgaaatagagaagaagtttagagcatctgatatagtgtgtttttagtttagttctttaaatattttagagaatctctatgttaaagcatatgacatgaaaatgtaaattatttagctaggagataaaaatgataaaaaatgttgttccgccaaatgaagtaatcaacaacaaacaagctaagaagtagaatgcaactatgaatttagagatggtatcattgaagaaaaacaggacttgaattgtagttcttaagcctggagaacatgtagcaattggttgcaaatagattttttgaattagagaatgcatgacagatgatgaaccaaagatgtacaaagcatgactggtagttcaaggctacacttaagtggaaggtgtagattattcagaaatattctctacagtggtaaaaatgtaaactatcagaatgatgctggctttagctgttcaatatgactggaatatcaatagtgttttcatctggcgaagtatcttgaagctaaagatctagtacatt

SEQ ID NO: 218671 - DNA, 2596 bp, Cannabis indica
acaaaaaagaaaaaggaagaagatcgaaaaaaacagaaggaaaaaaagtaaagataggtgtttcgattagtacacagaatcgggttcttcatcaataaagcacacagagccaaaccaaaaagaagaagaagatgagtactaaaaaaattcacaaattcactataacaccctaataaagtggaaaaagaatgaaaaggaaagaaaaagaaaagaaaaaaaaggttacaaaactcctcgtgaataaatatagcagatacactcctttctcaaaatctaataaaaattagataaaaaagaaggatattaatggaagtagttaatggtcgaatctcttaagcaaatcacattcataagaataggattttcctttttagtgatgattaaaaagaagaaagaaaagataacaaaaaaaaacccaagttgataatattctgactgattatacctagtatttattaagataacttgaatggtctaacaaaataaataaagtgccatcctccattgttatagcttcaatattttccaaaaaaaaaccaagcgctctgaaacttatttatagctgagaaacttaaaatataataaaggccaaaactttcgcaacatacatcgtgaattaatgtcaaaacggccccctttattcatttttcttctggcgattcatatcacatttatagagtaaatagaatttattctctaaattatgactattttagagttttctccctaaatatttttcagttactaaaatttccttaaattataaaagttattgcaaatataccctgtagttgtattttgctcacaatgacataaacaaattgttttaaaagatgagaaaaatatagctggatatttacaagaatttgcattagaaaaaactccttaaggtaaaaatcctatttattccacatttatacatcgtgacgtcatcagtcattccacgatcaatggtatataatcagtggaccataccagtacactacaacagccgttagaccacactaattccacccctccatgccatgggatgacacagtcacactcgcacgtgtaaaccacactcctctcctccccctccgatcaaatattcgccgtactttcactctgggccgtcaactgaaacctgattctttaatcaaacggctgagattcaacgctcgagaattattgccacttgttaccatactttctccgtacgataggatcgtcctctcctgctttactttatcccctgggattggaataaattatttctctggaaattttagaacaaaacgatttattttctccttttttttttctgtcacgaccaactccaactgtaaaaaaggttccgtatttggcgattagttgtttgcgatttattgggtactccgatttattgggtgggagattttgggtaatgatttgattctctcagctgcggcgtggcagtgagagactcacgtttgcgtgactttgttcttcctttacataattctgaacttacgaaattgcccctgaaactattttctttcgtttttttttttttagaaatgtccatcaatattattaatagagcattgttattggttaatagaagtgtaaatagattgggtgggatctatctgatccgacctgatctaaataatgtaagaatctgtcccgccccctaaattagatatgctacttattcgaattggatttgattcggtttgactttttttttttttttttaaatatatatctaaacttataattaggaaatttgatatattatgcttaaaagttagaagtggtgtttaattaaaccaaaaatttaaacatagtaaatatatgccaatttttcaatattctcccaaaattacccctatcctttcactttcccccaattctctctaacagccccctctctctctcctccttcactctcaattcgaacccccaacgcttcccctccgtttgaaccagcaagctcgaaccagacgaccccccaatcaacctagctcctccattcgaaccacacggccctgtcgacccctcgctcccacgaccctctcgaccccaagctccgacgaacgacccgagcgaacaacgagacccactccaatcgaccccatcgacggacgccctctcgacccaatcgacccgagcgaacaacgagacccactcgaatcccaccaacctcaatcgcaggaatccaggttagttttttggaatttttctttgaatttctcctttaaaatgcatacatttgtggttgattctggtattgaattgaaagttgctattttgtatgttatttgggataaattgtgcaataaaactatgcgaagaatatgggtttcgagcaatagcttttttttaggtttttagattattgtgcgattttatgcgatttcatgtgcgattttgtgcgacgtaatacgagtgtgcattggttctgggtttttagataattgtgggattttatgcgattttgtgcgacgtaatgcgagtctgtatagggtattgtgtgagatagttttttatacgattttagagcgacattttggcaatttttggcgatataatgtgagttggttaagtttttttttggagttgggattttgat

SEQ ID NO: 218672 - DNA, 2767 bp, Cannabis indica
cagtagtgttccttagcagctgatgtacttgaacaaaataataaaacttaacttacacaagactaaaattatccttgcttgattttgtacaaaaatgtttacaattaactatgggtcgggggcacgtacagtggagttctcgaattagatacttacaaaattagacaaattcataccttaactaaattatttctcttcaacatgaaagtgaacccacaaatttgaatattcacttgaaagaatttaatcactgaaaatagaaaaaaaaaaaaaacagattgtgttatgttttcactcattacctattttgtggccaataattcaacctcaaattgagttgaccctgcaggaccaagcaccatcatcatgacacttataatggtatgtatgaatgaactaccctcattcattacttacaacactattcaaatattttactgaaagtggtgtagggaatattcaaaacctaattataagtactcttcaatatttattacctaataatatatgaaaagtattaattacaacttcttaaccaattttcacacccgaaatcacatgtcaaaatattttttcagtggtattcgatattattacaatatccctataaatttttgaaaaattccaaatagtttttggtattgaaaatagagttcttgatatttcaatttaccacgtgtgttcgaaaaacttccaacttattttcggcatggtaaactattcgaaatatttcaaaaatttacaagaataaaaggttaacaataacactcctcataatatatatatatatatatatacatatatatatatatatcttccattcaaacaatatagttctcttcagtcaacaataaccacgtactaaccaactagtcagcaagcaaagacccaactcaaaaaatataagaggaaacttttgaaccaaaaactagctaccacagacaaggaagttgaagcaagtgttgactgttagtactgaaaagaaagaaaggtgtttaattgaaaggcaattaagcaaatgggatttggcaaaaagatgataggaaagtatgagatcggtcggactatcggcgaaggtacatttgccaaggttaagctgggtgtagatagcactactggggagtatgttgcactcaaggtcattgataaactcatggtccaaaacactaatctaatgcaccaggcatgaaatttgttttattatagtaatatatccatatattgtcaacaataaacaaatgaatagtattaatgtatatgtatgtatgtaaatgaatttattaggtgcaaagagaaataagaacaatgaaaattctacatcaccccaacattgtacgtatacatgaggtatgtatatgtaataatcaacttaagtgtttgcctattctttactatatttttctatagtttggtttcgttaaacaggttataggcacaaagacaaaaatctatatcgtcatggaatatgtccccggtggacaactctcagacaagatggtgagaagattttagaaagcttttcttttcttaaacatcatttgtttctaatccttctaaatctgcagttatattccaagaggttaaacgaatctgaggcaagaaaactctttcaacagttgattgatgtggtagactactgccacaacaagggagtgtatcacagagatttaaaggtctgtaaaccacaacaagtttgtattttttttaactctatatattcaggaaagccacatagaatgaatgacaacaattaagcatcttattcagccagaaaacttgcttttggatagcaaagggaatataaaagtatcagattttggactaagtgcattaatgcataaggtacatagcatatgcaaacttacaattttgttctgctcatcaccagttttaatcaaatatgtgagtacttggctgaaattcttagcaacttaatagccaggtggcctgttatctacagcatgtggctctccaagctacgtagcacccgaggtaagaaatgattcaattctgtttttcttgggttatcaaaataatcaaagttaatttttaagaacaagaatgaaagtgatacactaatgttccaaaccaaatcttgaaagaattagagaataagtaatttattgatatcaaaggaatagtttggtttctccctagagcaatattttactctaaataattcacattaaacttcataccccataagactccctcttagaaataggctacactaacaaagactcctaactagccaaccaatagcaatctagtatttgacacacttaaacaatcatctcagccactaaaatgttaatcaactatactgatgagactaatattaaggcgtaacagaatgtgataaaaattaggcaaattataatagctaaaagttatacctggttgtcgttcattctcatggatactgttttcatctattaatcaacagctaattgcgaataagagctatgatggtgctgcagcagatatttggtcttgcggagtaatactatttgaattactagctggttgtctcccatttgacgaccgcaacctgttgtacttgtataagaaggtacacaatttaactctaatgataaatccacaatttaaacttttgtataaattaactcttaaactgatatctctgcatgcaaagataaccagggcacaatatgaatgtccacaatggtttacagagaggcaaaagaagctaatctctagactacttgagccaaattccataaaggtaattaacactccagatcat

SEQ ID NO: 218673 - DNA, 4524 bp, Cannabis indica
caaaaaactctctctctagcacgacacacccaactcgacaccacaccatcgaagattcccatctcttctcttttctttctccgtcgttatttttctttttgtgtttttctctttaccattttatttttattgttttacgggtagttctggcagttaactcaaatttgtggtgaattttttttagaaaaaagtgttattttggactgttacgtttagatttataatttcttggttaaaatcagactttctcttattcatcattcttcgtcgaactaccattaaaataaaaatatttataaaaaaaatacctatggaggcagttattagcaaataacctcctccataaggtccatttagaggtgcttatttgttaataattgcgcgcctctaaatgaaccctttagaggtagttctcttttatccttttaacgacccatggaactcaatgggttacgaattttgccaaaacttcctctaaagggttgaaaaaacagtgaaggcccatttgtagtagtagagctgaggaggaggttctcgtaatttcaaaaatcaaaggtgttcttcaaagaactcacctattaagaatgtcaaactcaaaatttgaaattaacaatttcaatggagccaatgattttggcctttgaagaatcaaaatgagagcactgctagggcatcaaggtgtcttggaagatttggatgagagagctttcaaagccattgcagataagaaggagaggtatgagattgaaaccaaagcacatagtgtaattttgtaagagtttagacaatgaggtattaagagatgtcttgaatgaggagaaagctttaggcttgtggaataaactctctgcaatatacatgaagaagtatttagaaaaaaaattataccttaagaagaaactttacactttaagaatggatgacttgaagaagttaaagaaacacttggatgattacaacaagatcatcctggatttgaacaacatatgggttaaaatagatgatgaaaactagaccatatattaagttcattgccaagagcgtatgaatattttgttgacacaattctctatgtgaaggatacactcactgactgaagtaaaggcaccccttcgttctaaatagattctaaagaaagtgatgaaaaaattgaaaacaatggaggaggactattcactagagctagaagcatgaaaagaagtacaagggtaacaagaatcatcatgggaataggggataaaaacaaagatctgattcaagaactccataaggaagcagtattactattgtaagaaagaaggtcatttagagatgattaccttccccttaaagccaatctaaagagggatcaaaataagaaaaacaaatcaaatggagaagcttgcatagtcgctgatggttatgaatcagttgataaactagttgcatcaagcttgatttcgtgtgaggaatggatcttggactcggggtgctcatttcatatgacaccgaataatttttttcatttcactcttagaaaaacaaggtgtaaatattcttggaaatagtaagtcataaaaaaattgagagaattagaattgtcacgaaatgaggatgtatgatatatggtgagatcagaacactacagtaagtgaggtatgtgcttgaaataaaaataaattttctttatattggtgcttttgaaaaaaaaatagatatactgtcaagatagatgatagggcactcaaggttactaaaggttctcttgttattagaaaagaaaaactcattaatgacatttgctatcttgaggggaatctagtcactatatcaattgcactagctattgacaaatctataggaaatagtactaagatttggtacctcaagctaggtcatgtaagtgaaagagggttaacagaacttgaaaaacaaggtatcttcaaaagtgttcttaaagacaagcttaaattatgtgaatcctatgtattggtaaagtgatgcaaagtgaagtttcctaaaggcatacatactacaatagagaagttagggtacattcattctgatctatgggcgccttccaacatttaaacacttggaagagaaaattatttcttaagcataatagatgattacactagaaagttttgggttgttatactcaagaacaagaatcatgcattccagacctttgtaaaatggagagtaattcttgagaagcaaactagatgttgcgtccatatcctaagaacagacaatgggctttaattttgctttgatgagttcaatagatgttgtgtaaaataagatattataagacataacatagttgtgaataatccacatcagaatggcctagcaaaaaagatgaacataactctacatgagagagtgaggtgtatgctaaaaattttggggtgaggcactcaagacaacttgttatcttattaataggatcccctctacagcttcaaactccacaagaaatgtggactagacatgttccaaatgtatgatcttatagtctttgggtgtacaacttatgcacacatcagacaagacaagttgcagcctagagccttgaagtttttatttttaggctatccaaaaggaatcaacggctaaaatttatagtttcttgaaccctgcttcaagaaagggataataagcagggatgtagtgtttagagaggattatatagccatgaagatgattgaggaaccagttgaaactgctgcggtcaaagatgctaacacagacagtttataactcgaggtggagcaaggtatcaattctaaacagattaggaaagtttagattaatgacactgaagataattcaaatgagacacaacgagatctcagcaactttcagttggaaatagaaagagagaggaaagaaatcaaattcccagacagattaggctatgcaaaatttagagctttgtccttaacagttgcatatgagattgacagttagttaccatcaagcttccatgaagatgtgaacaggaaggccattcaagaggaaatgatgtcactcaagaagaacaaaaccaggttgttgttagaaactagctgggaaaaggattgttgtctgcaaaaggatattaagagagaaggaaggtaatattgaggatggaaccaagtggttcaaagaaagattggttgcaaagggtttcacacaacaagaatgagtggatttcaatgaaatcttctcaccagtggtgaaacaagcttccattagaatgatactttcaaaggctactaaattggatcttgaagtggactaaatggatgagaggatagcattcctacatagaaatctagaggaagaaatatgttatacctatattttgagcagtaataataaaaaagctaacacgtgtaagctagaatatgaaccaaccccaaatttatgcattattaaatgcacttagataacttgcctcaaaatacagttaataaaaatattcaaactcgctgctatatagaaaatagcgagacaggaataataactattgactgatgagatagcgagataaataggtccaactcgggttaaacagaatatacaacagaaccatttagacaagtagataatgagtttgcagctcattgatttccatactcgtgattatgagtttgtagctcattaatccacatacttgtatgttcaagtaaaatctcaatatttattctcctcgctcttgacgcgttggaataaccatcttacctatacctcactcaataactaaagaaggctgcgagatgcatcgatcgtaactcaacacttaatactttctctacaaagatatttaagaaagacatcacttagagggtgagaacaagtgagcacaatcagcttaactgcctatagataaatacaaagagtcgttaggcggttatttatgattatctcatgtgcacaaagataaaacatggagaatgttcacgtttcatgagcagttacaaatgatcacatcctagacaataactgtcatcctagacatctgtaaatagagatagaatctaggaaagacaggaggtccaatctttgggaaaaaaatagataatattgctattattcattcctaaaaatagtatcattatattcagtatacaaacttataaatcttgaataagattgactcttgaattatgaagatttaacttcaaaactacataaaaaaatcttcttgttatttattgcttccatattattaattactatacaattaattccatagtttatttagtacaaaaaagtaattatttagttaacaaaaatctaagttgacaaaatatatatgtaatagcctgaagggtttaagagtggggataacttacttaagaaacgacataagctcttgtgttcattttatttatattttatgtttgaatttttttctcgtttgtgtatatcattcgttgatccgtttaacattgtttatggtatttttttaatatatcattttattaatctgtttataattcatatatatatatatgtattaatttatatatatagtgtagagatgatagt

SEQ ID NO: 218674 - DNA, 5592 bp, Cannabis indica
ttatccattcgtggtagacgagattttcactgatgtgtattgtagcagtgttgtcataatatagcatggttggacttgagtgagagatgccaaagtctttgaggagagcaatgatccaagttagctcagaagttgcatttgacatagcacggtattcgtcttcagtagaggaacgagaaacaatttgctactttttggatttccatgagacaagaaagttgccaaggaataaacaatagcaaaaaatggatcgacatgtgtccaaacaacttccccaatctgcatctgaaaaaaaaaaaagaacttgaacattcgagggtgaaagacttgtttttaatgttggagatgtgtttgagggaaaaaacaagccctgtccaagtgtgcttttgagatactacaagattctattggtagcatgtagatgtgggacttggggacaagttaagaattggcttaagtgatttacaacataggatacgccaggtctcgtaatggctaaatagaataatttgccaatgaggctgcaaaaaatagtaggatcagggggaggattccctttgtctttacttagtttcaggtttgtttccatgggattggaagcagctttagctcctatgtaccatgtatcaaccagtagctaaagagtgaaaggcctttgggagatagagatcccttgtttggtgtggccaatcttgaggccaaggaaaaattaaagagagtcaatatctttcagcttaaattttccatctaagtatgttttgaagaaggaaatggcagaatcattattgctggcaataataatgtcatctacatataccaaaatcgttaagagaattttattggtggttttgatgaagagtgagttatcagagagggattgatgaaatccacctgataataatgtttggctgagcttaccataccattatcgtgagatttgtttgaggccatagatacttttgttagcttgcatacaaagtttggtggagctttgtagcctaggggtattttcatgtagacttcgttatggggatccccatgtaggaaggcaatattgatgtccaattgatgaatattccagttctacatggcagctagtgcaagaaaaacctttatggtattaaacttggctactggtgcatatgtttgagaataatcaatgccttgcctttggttatagcctttggctacaaaggcgagctttgaaccgttcgatggctctattttggttgtatttgactttatatacccacttgcaatcaatagctttgtgccctggtggtaattttgtaatgattcaggtttttcttttttttttgtagagcttgagtctcacgatccatagctagaagtcaatgtttgaattaagctgcttcagcataattttgagactgtctcagagtgtgctgctaaaatagcagctctaaattaaggatggagtttaatataggagaaaaatggctcaatggggtgagctattgatgatgtatggcaaatgtaatctttgagatgttgacgtttcgtccaaatgtgaccagttctagtagtaggtaagtcagatgcaactggtttgaacttgtcggttattgaatcaataagtaaagtttcatgtggaaaggtattgtccactggttgttggactagtttgtcttgttttactggtttgacagtgggaaggatagcttgagaaaatagggtatttatctctgaaggagaagttgttgaaaaaaagggaaaaatatttttataaaaaataacatccctagaaatgtaaacttgtttggtttcaatatcaagaagaatgtaagctttcatttcttgaggataactaatgaaaatagatgcttgactctgaggagagaatttgtgtctcttggaatttaatgttgagccataggcgaaacatccaaaacatcttaaatgttcataagtgggaatttactataaataatttcatacgaagtggtccctttgaacatttgagagggtgttttatttagaaggtgggtagcagtttggactaggtgtgaccaataaaccaatggaaggttggattggaagcatagagtccgagctacatttaatatgtgttgatgttttctttcaaaaactgagttttggtgtggtcgttccacacaagagtgatagtttgttatgcctttagaggcaaaaaagattataggttcaattctttagcattttccgatcagattgcttttataaaatttgaaaatggagtacaaatcatgttataaaaggtaggtataacagtttttacttcaaatttgtgcttaagcatatatgttcaagtgaatctagatttgtcatccactatggtgagaaaatatttgtcatcttccacaattatgatgtggaatggtcctcatatatccatatgtactaaatcaaatatgtttaaagtaaaattatgattagagataaatggaaaatatttctattttgctaattggcatatatgacaatgctgattagaaataacagaaaatgaattgtcaatatttttattgaagtaattggaaatgtatgtagatggatgaccaaaataattatgccattggtatacatcgtttttgacaaaatgaagagaagattgactagctgctgtagaaaagtaatcctgacgaagcaagtataatttgccatgccttttagttgtcccaatcaccatattcagagtttgatcctgaataacacatgagttatggctgaaaaacagagttagatgtgttatgaacatattcatagtaggtttatcctaaaactggaaacatataggaaattgtgaagggttagtttaagattaatttgaactgtaccaatattatggacaaatattttatggccatttggtaaaatgacatgtttaggagagtttctattagaaaaagaagtaaagcatgctatattggaacacatgtggtgtgtagcaccacaatcaatgttccaagtaatggatgaggaattagtgtcattactagctagatttgatgcagcaggtgtcatggcagcagagtcagttcgaggaacattttgattgagttgctggctgaggaggaaaattagttgttgacattgagttgagagatcaattgagaccgagattccatctgcatcatctttggaagtacctatggatttgtgatttgccttagctttacctttatcttgtctctttttatccccataactcggaggaaagccataaaggaaaaaaatatttgtcaactaagtggcctggtttgccacagttggaacaagaaggacaagacttctttactcttggaggattgatagatgaaggattaacagaggcaaccagaggaggtgaatttaaagatctaagtgctctttgactttcttcttgaactatcatagcaaaaactcttgacaaatttggaattggttcattgagcaagatttgagctggaaccaaagcattggatttatttataccagtcgagaacagaagaacttgattctggttgtagtaatcgagaaagaatttcatttcaccacaagtgcaagtaatatttggttgaaattctttcaactcatcctaaagggatttcaactttgtgaaataagaagaaacagagggatcaccccgttgtaatggggtgagctgtgtttgtgattggaaaattctagggccattgccttcattaaatctctcagcaagatcatgtcacatatcagtagtaagatcaaagtacattatgctatgagcaatcttaagagaaacaaaattcactaaccaagacataaccatattgttgcagcgaagccaagaatttagaaagaaattaccagcttctggatgaggtaaagatccatcaatgaaattaatcatgttcttggcagtcaaggccatggtggtgtcgcgtttccaagattggtagttagtgccattgaggacagtggacacaagaacgagcccagggtgatcgccagcactgaggaaaaaaagactggaaagatcgttgttaacatgtcgatcaattgtaaattagagatcatgttggcagatgaacggtggtgttgtcatcgtctgcaatggcagattgatcctgagaatgaacgaaatctagagttgtggagtgattctaagattgaggcctgagattggaggtcctgtgaggaacaactgaggaaaaaagatttggaggaaaaagaacttcgagattgatttctgctgcatgatgctcaattgtggatggaggactaccatcttgagagcgtgtggaaagtcttgccatgaaagctgcgggcaagatgtcttctattattactaaatgacttttatatttagtacatgaggccttaatatagctaaggaaggagacgagagttagttagaaaaactaactaattatctaacaacttaacctaacttaattaaaggtgaatgaactaactaacgctaatggagagagcattcaaaaaataataaataaataaataaattagagagaagatggaatgattttatattttcaaaaataatcattttattgcattgtttttcttttctttttctaatgatattagcaataaattaatgcgatgagcaattgtgtcgtcaagttttattattattattattattatgaactatgaagttttattgtgcaatatctggtgtgacagttcagacaaaaatgtatcttaaatttcagaatttcttttgtcaaatttttttaaccaaatcaaaagaaatatataattcaggtgtgctcatcatttctaaatgactggtcagtaagaaagaaaaagagaattaaattctcaagttttattaattatttgcatctacaaaaacattggaatggataaaatgctctctctacaatcctaattttggaccaattagactataatgaggtccaccaaaaaaataagctagacaaaggatgaatattggcaatttttcttttctttctttccaaagatgttagaagaaggaggtttctctttcttgagtcttgagtcttcagtcttgagtcttgagcttggctaagtgggtggaaaaaatctgttgagattaaatggaagagtgtaaaactcttcatttctattgtctcctctgaatgttctgaacttgacccaccatggcattcctctatctttcttggacttctccacttctaatgtgttatcaaggaacactgctaccattagaccaacagttgggggagatgagaatatggtattcaagaatgcattgaactgccaaacaccacaaacaaatcaatatgtaaacgacatgtctggttcgatcacaacataatatgagtttatgaattcttacccatccagcatttgtatgaaccagaccatgatgtgaggcagtccagtattcattgaagaattgtgggatagatatgccgaggaacagtgaaagcccagtgatgatgaggtttctcatagaattcatgtttgtgaattgaagaaatgatatccaactgaagctgaaaagcccggcaagaaaatgtacgaaatgaatgaatacattttaagtttatgatataatattatacttcttttgttcaacttcaccacataccaactagg

SEQ ID NO: 218675 - DNA, 4625 bp, Cannabis indica
cttaaacaactcataatgataggcgagcccccacaaattggcccgcctgattcaagttttttgaaacacctttcttttcttgttctttctatacaaacgaggaagccttattgacactttcaacgtggctttgaaagcccaaacttgcttctgttagtgaaacaggcaagccttgatctgcctcattcccattagacttaagcccaatgttatccaccaacatatcagccacattagaatcaggcccaataagaggattagagcccacacgtctcctcttttgatcaaggacaataactccttcattttgaatttctttcccgctataagattgatcaatatcataacagctgttatgatttgaaaacataactccctctgcttctgagtcaacatttgatcctccatcaatgcctttattcttgcttatcaaatcttccttccccgaaatcgctactccaattactccagaaattgtgccctgattgtttgctgagatgggaaaacgttgacccaactctgtcaccgaaatgtcactactagcagaggtcggagaatgatttgcagaaggattacgcagccattttgatccatcaggaaagttcattcttttcggtgtggctttcatccaaactccatatggcttaacaatctgggcaagaggggtaagaaaaggttttgaacaaaacctatcagtatggcctatgatgccacaaataaagcaaaaatgtggaattctttcatatttgaacttaacgaaagtccaatcactatccttcataaagcaaaaaaaggatagtctttaattctttttgttattagcacgattggttattattgtttttaattctttttgttttaatttagtcttttttttttgttttaatttaaatgctttttttctttaatttatgatatatatgacagctgacgtgccaatatttaagtgagttggcaattttttttaatgaattgttcattgtgatttttttaaaatgatgtggttcagttataaggtgacatgtggcatattatgtggctttaaacagtgaggtacctacgaaaattctaaaatgttaacagaaggtatttttaccgccaaaaaattaacttaggtatttaagtgcaactaaaagttaaacttaagtatttatgctgcaaattactcaacttggtggtggttgaaaatacatattgagaccgaaaaaatagaaggtgagacctggtttttccattggaagggaaagacgtaatgccactaatatgattaaatcatattattttaattatatgattaaatattattataataatatatgaaatttttattgcataccaacagacatatccaacaaaactacaccctactcttatatcaccaactgatgtaaaatcagtggtttaaaatgtttttggtgggatatttatactaactcttatcatagtcttatcatatatatatatatattgaaacagaatatattgtaacaataataagagaaatgagtacaggctacaatatatttaaatttggaacattattattctaagtaacctctctctcaagtcctaaagttgttctagccaaattatgagcaacaacattaaattgtctaagaacatgatgaacagttactataggaaaattagagagaaatgactctatttgacttattaagtctgaaagagcagacttatctttccatctatgctttattttattgattagcactttacaatcactttcaatgacactcaaaggaaacttaacagtcgaacaccggttgagagcccaagccaatgctttcgcttcagccaaaagaggagacaagttcccatccaacggggaagacaaagccactacaacctctcctctatgattccttactgctgccccaacccctattttatttctgctattatccaaggcaacatcaacacttaatttgtaacaatctggtgtgagagcataattgtcaacctgggtcaaatcacctcctactacattggtgcaagaaagggagacctccatgagatgatttgcagcatgatcttgagcatcatcaaagtcttgtagtaaagtcgaaacctaaaaatcaacaaagaaataacagtcctgtgcttattaaatagaatgttattttgtctattccaaatttcccacattatgcctaaaaagattctaagatcatcctttgtcagcttttcaaaccctctaaggataaactctcgaacatcatgacagatgctatttaaataaaaggtcgcaaatctagattcgctccattaaaaaaaaagctctggagcactctattaaagcatgagacacagtttcagtgcaactagagcagaaggagcattgaggagtaggcaagattttccaatgaaaaaggttaagagcagctggaagagcatggtgaaaagccttctgaatgaagtgtttaattttctgaagcattttaagattctagaggactttccaccaacaaaccatggaatgactgttagaagaggcagtaaaaaaaatagctaatttggctaaatggtaggccgaacgaacagttaaggagctaaaggagtgatgctcccaaataagattatcctcaagagaagaatcaacgataggaacaacaagaatagcagagacaagatcatcatcgaaaaatttcaataaatgatccttgttccaacacccattgatatcaataaaatatgagacagtgggatccaagggttgaacattacctttacaagaaatgaatctctagccaagaatccaataagagtgcagagtggagatagacttgccatttcctattttccaaacaagacctctcttgagaagatcctgatcccaaagcaagctttgccaagtaaaggaagcacaatgacctttaaaggctaaaagaaaagaattttggcaaaaatatttagctttaaacaaccgagcaacaagagaatcaggcatagtaagcatatgccaagcctgcttagcaagtaaagcctgattatggtgaatgaaagagcaaaaccccagtccacccgagaactttgattgacaaagattatcccaagctttccaatgaattttccccttgtttcccatagatccccaccaaacatgagccttgagactctcaattttcttataaatagaaactgagattctaaaacacgacataacataagagggaatagcttagacaactgctttaaggagaacctctttcccttctttagaaaatagacgactattccaactactcattctggaactcaccttttgaatgatatagttaaaatgagactttctagatctaccaaaatattgagagacaccaagatatttactaacaaaaggtttatcttcaagacccaagctggtatagaagaactcagaatcagcaggattggtgttgggagaaaagaggactgaagactcggaaaaattgactaggttacctgtggctttgtagtaaagctcaagagcatgtttaatggctaagcatgaatgagcagacgttgttaaaaagagtaaactatcatcaacaaagaggtgatgacaaatagtaggggccaaacgacagatagaaataccttgacaattgtgaatcgactcctgatatctaatggctgcaaacaatcctttagagacaagcaaaaaatataattgtaaaggggatccccttgcctaatacccctactagacataaagaaatcagataaaacaccattgctaagtaatctaaatgaagagtggaaatacaactaagaacaagagaaataaattttgcaggaaaattaaaacgatgcataatagcctcaacaaaacatcgttccacacggtcaaaagccttttccatgtctaacttaattgcatcccaaccaactttgccagattttctatggttgatggcattaacaagctcattgccaataaaaatgttataaaaaatgactctactttggatgaaatcactttgattcggggaaatgatatcatgcaagacaatcttcaatctattggccaaaactttagaaacaaccttatataaagtggagcaaagacttataatactaaaatataaatataataaaggagtttttttatttttactactttaaaacaggttttttttttttttttttttgttcatttttatgaaattttacataaaaactattatagcaattaacagggcaactcaaatcgtaaccaaaattgacattgcaactcacatacatagaaacaaccgaagaaaccaccagagcaacctaaaccgtaatttttttttttaaagttaaaaaatagtatatgagataattttcttataatataatgtgtaataaattaataatcatttccattatgacgtgtgagagtgtaaatttctcataatttaatgtcgagttttattagtgcaacatacccctttatttattttttatttttttgttaatggctatccaatatttgatataaatcagagtaaatattattttgaactttatattttgtaaaatttattgattaaattacacactacaaaagtcagaatttgcaacagtcctaaaaatactctttttggagaactgtcgctaaaaaaattaagtaattgtttaaa

SEQ ID NO: 218676 - DNA, 2304 bp, Cannabis indica
tttttatttttatattttctaaaaaaagcaatagtaaattatgatataaaaaatttacaattttgtagggcagaaatgtaagttcaaatgagtacagcaatttgagaaatattttaagaggcactgagtacatgcaaaacaagaatatttataaaagaaagattaacatggtaatttcagtacagaccttccagtctgatagcagatttccagtcaaatcaagctcctttaaatctgcaaaaacagcaatacagatttattgaatggcattgggcacattaaagagtatagcaaaacaaagcacacataaaaacaccgtgactccataaagccatcatcagattctagaaatctccttccatgcaaacaggtacaaaaggccaaagttcaaattttaaatcgaagagagatgcaagaaatacaaagaaccttattttctgtggcttttgaaaaaaaaaaaagtatctatataagcctactctaaaggatcatcatgaagatacagctcaaacaacataaaacattgtttattagtaagttgcaagaattttgaaaggacaattccacaatcagaacaaaaaatttcggtctgactacaaaaaagaacaaaacacaaaattaggtagaatggaggggaataaggcagtatgtataaagataactattccaaacactttcttgtaagataagctttacaaaatccaaaagaacttctcagccaaaaatcaggactagcaactatattgtatatacttaaaccaatgcttaaacttgtgaacaacaaataaaataccatcacatttcaacttattgctgaattgaatagtcatccataagttcctactcaaggaaatccatcaaaatgtaaatcgaaattctcaataaaaaaagtatttttctttccaacttacttggcaggagactaccagtatcaccagagaatccaggtgagctaacacccaagaaagaaagcgatgctccagtcagctcctcgaatcgacttagtttatcttgaattttttctttaccaagtagctgaatagaaacccgtttattactcgctgaaagaacatacatttcatctgcaatatcaccaacgacaaagcacaaaattgagagaccgtttaactagttttcttaattttactcagattccaacattacttactatcatcaacccaaacgttttctacggtcggctacgtccaaattatcataaggaaactaataactcgaaatcagaactggcattgctaaaaataatataacacattacacacatgtcctcgacaaccaaataagcaatggaaaatgataacacatacatacatacaatacatacatacaatacatacatacataccttcttcttcttcagtcgtttcaccttggtatctgagccggagagcttcaatcaacgaaatgccggaactcagattatgggtccgaaaaaaagagccggatcgttcagacttggcctggaaatatcggaccccattgatggaaccatcgtgcttggcgtcctcactgtcccagtccactccgacccagctgccggaatagccttggacgggtccaaggtaccgcaccgttccgattcgccagggatctccagctgagtgaactcgctggccgagcctgaactcgttctcttgcatcctctgctctgttctgtgcttgcctcagttgtcacttgtcggttgtcagtaccataattttttctactgaatataacttgcctttttttctttccatattctcatgaccattctacggggcactaatgtcttgcacctatgaggtgtacctttataatataatatatatgtatatattttttttttgaaaaaaataaaatataaacttcattaaaattatcattctaaatacaaaatggcagaaggtcagccagaacattatcttcaaaattgctacgatcagagtagaatcgagagcgtctagaatcgagagcgtctagccacaaaatgtgtcactcaatttgctgatcgtttaataaaacgtaaactagtattaggtgaagaagacaataaaattttacaatcattagtaatcaaaccaaagacagaagacatttgttgtttactaaaaattgcttgaacagtgagtaaactgtcagtttccacctcgatcgtgctccaccctttggcttttagccaactaagggcctccttaacccctaaagcctcaacaacctcagccttgtaattcccatggtaatatttggtaatattcccatgctaattagtaattttttccactacactttgatatgtaccaaatcgt

SEQ ID NO: 218677 - DNA, 5753 bp, Cannabis indica
tacgtaatattctatatatggtcagatttcaatattcattacccgatttgattttctaaattaattgtcaaaatattctgacaattaatgtggcgtggatactgatggagtatctcacccataaatatagggtctcggtccccaagctcctcactcattctgttcataacagtgaaattctatctaaagagaattgagagagggaggaatcacgattacccacatcaatcaattttcttcgcagatcaaagcttgtgtgggattgaagctcaaaatcaatggctggaggtatttcgatccttaagttatatagtgtatagattcgtttattccgtatttatatatacacatacatatattttatttcatacatataaatgtttaacaagccaaactagagttctcaaacttggagtttgattggacatggcggttagggattgagaggtcatttgatcttgaaaactttgaagaaggtcaattgcctcactttttgtaaagctaccactccacaattaattgttatggacccacttgtttcttctatgccaaactctcaaacaaataacaacaaaaatcttcacttccttaaaaagaaagggtacttgccaacttaaggacaacctcatataagataataccttttgggaaaccggtaagcatatgaaaagaacaaactcccaacacctttgagttatttgcactaaaacaagacatgagcagtggattcaaacttgacataaaccatcagaatccactcctattttagaaaggtttacattggtcgggatccaatctagagaggcttgcaaagagagaatttaactttgttaggaatattaagtttcaaaaacactttccatcatttagattctccttgagatgtagatgcttgcaaaattgaataagctctaatatctgcccaataaccacttttcatcgagtacctccctgattgatcatgggactacatccttttgtcctattactggaaaattgaagaaggaatggcaagtatgtttctagcttctaattaaagttggaaaggataaatggagtgttccaactattatcctcattctccatcatactaaccttgacatctaaagaaaaatcccttgagaaaatagtcattgtagtttcattgagatttcgtcatttatctttgtaaatattgacattttcattgttatcaaacaactaatgaggcctagtaagagccagctctttatcccataacaaacttctctaaataaataacattttagaaggaactccagcttcaaaaatagtagagtttgggagataaaaacctttttaggaccttagctgctagtaagtttgggtcataatggaatctccaaacttattcagcaagcataactttattgaacacacttaggtctctaaaacccaagccaccattatttttatgtcaacaaattttactctatttttaccttcttgttttctttctcccccaccataatcttaccattctgaggtcctttataagagaagtagaaaatttgaagaggtttattaaataagaagggataacttggatcactaccttaatagagtttctttacctctttgagaaaagaattttgctttctaaactttttgccaaactttatctcttacatgttggaaaagagctttcttagtagtatacacaaaacatggcagccctagatatttctcataacaggacactctcataatttgaatagtagcatttatctcccttttcagctctttaataacgctctgactcgtacagaaggtaaacttatcaaagttaactactcgccttgatgctttagcatatagattacaactttataaaagtacaacaagcgtcttattggtattgataaaaaaaaagagattgtcatttgcaaagaaaagatgagaaatggttcgcccgaatctgtcgcatttaattcccttgatggatcctttgcatcatttctttttgatccaatgagataaaccttcatcacaaatcaagaaaatataagaagagagaggatcaccttgtcttaatcatctagggaaggagacaaatgttgccttaatccaaatatgattttatactagtaactttttatataaaacatttttttgttgcttaaagggtttttaggtcaaacttgtataattttgtaagattctgttataaagtaatattttcacaaagttccaatgagcgctttgtttggtgttggagttggaggcaccactccaggcccacccaacggcatatcgaatagattagagaagaataggaagtgggcgccaatcaatggttttcagcattttccgtaaaagctttagccgaaacgcaccatccatgttttcttctccctctctcacttgaaacaggccatcttcctccgttgtctccgtcaccgtccgccgccgcagccgctcactgtctagttatcaccccacgaatttgacatggcgaatgcagctttctgtattagccaagtctttcacttctccagtttcccaagaaactcactccaaagaaatggtctacggagcttcactcttcttctaccattctcctcttccacttcctcttctaagcttgaccaaaagaaatggaggcagcctattgtttcatcgctggagcttggaggtgtcaagattgccagacagggtaatcttatctctctttctttcttttattttctcgtatcaatttttctattggctaaacgatacatctcaagtaaaaacagttaagtcccgcgcaactcaaatgaacaaaatatttagtctttttttttttttccgaacattttgaattaataaggaattagactaaaactctctaattagtatttttgtagaagttttaaggctgttaaaaatcctctgaactattattgagattgtttgaggggcatgatttggttgatatcagggaagcatcatttggaacttaaccaatcatcgaattagtaaatttgaatgaaattggacaaaaattcttaaatctaacaattttaatagttaaggaagaatttagtttagggagcatgatttggttcatgtctaattttagaaggtaaaaatcttaattagcctaaataatacctaccaactgtttggtgaaatgtgtcttagagaattctccgttgttgatgatgacaattttgcatttattttttgagaatggcattttaatgtcttagtaccatatgctacattggatactaactagttatgttcattaggacaaaagtacatgaaagagagggatagagaaaaaatcataaccctcatcacaaaaaccaagaaaacaatttatctgaaaggaaaatgagagcatatcaacaactaaatttgcttttgtctttctgcattacgccaggttaactttatctatacttgaggttttttgtctttctatataaatatatgtatgtatatatgtatttttcatttatgtgtaattagttgattatctgtatttcgaatcgtagatgttgtgagggatgatcctacaaataatgttccggatacaattttctccaagcttggaatgcaactccacagaagagataaacatcctattgggattctgaagaatgcgatttatgattactttgacactaattactccaacaagttcgataagtttgatgacctatgtccattggttactgtaaaacaggtacactcaagaatgagtgcacagttagttagaggtcaatcctttcatgggtactccaattagctgttttgcctctttctgtagatatgtgtacatatttatattggcaatatgctgatgcaacatatacaatttacagttattctgttcctctgatatttattaatattctagtctttttgtctactttaatttttgccagaagactccatttgacctggctgttgtttgtttgtattcaatctttttcattattattatttgaggatatattgtgctaagtatttcccagcattaaattttttaaacatttaatttatgtatttttattactttattttatatgaaactattcaggttattgtggttggtttgaacatgagagaatgtgtttgaacatgagagaatgtttttaggcatttctagtatggaatgaactttggaaagctcaagtatagatttgtatttgtaattaagtattttattttatacaatctgtgtaacaaaattctacttcttgcagaactttgatgatgtacttgttcctgccgatcatgtgagccgaagttataatgacacatattatgttgactcacaaactgttttgaggtgccatacaagtgctcatcaggcggagttgctaagaaatggacacacacattttcttgtaactggagatgtttatcgtagggactccattgactcaactcattaccccgtttttcatcaggtttttaactaatcaccgatcagggtttggtgctgtctagcttctactttatatgtgggtgtatgtggtttattaaatgaagcatgaggaacaggttatatgcaaagtttggctttagcccttgtgtgacatgattgcggttcttgtgtggtattaaataaaatgtgattgagaaaacaaattgtttaaattactgtccttagtctcataatagacgagtatcatgattatttaatgtcaggaaactaagataatattaaccatttatgagaacttgaaatgcgtgtagttgatgcaacagatgccaggggaaaattttcacctgcaagaacttatagttcactgtataaatacttgttagaaatgtgctatgctagaagattgttggttggttggaaataataaacttttttaatatggggtaagatcagtgtttagggtaggctgaaacctaaggtactttcttgggtttatgttttatagtaagttaaatattttttctttcttccttgatttaagtaattctctctcggtcacttcttttcttttcttggacaatttctggccccctgatttgctgttatgtttgcactccttttgaatatataaatctaaatgtacctatattttcgttttgtttttcatttcttattgaaaaataaataagcaaatacaaaagtgtagagaatgttttattcttggggaaaggaattgatgagcttcatcttcaagtatttttgagatgattttcatgttcaattgattatgcctccattgagaagatagaatcccttatttgtttgccattttcttcatcaaagagtggtataaaattaaatgttaaaaattgcatgaaatatgaaaagttcaccatcaaaattctcattataaggaaaggaactttgcacataagatatcttgtcctgaaaaatgtgtatattttactattaaaaagaaaagacgctatcaatatacttcactacacagtactaagctctttctggctttgtattacattgactgcgatctaccccatcaattttcttattttgtttgatagaattctttattaccagatggaaggtgttcgagtgttttccccaaatgattgggatacatctgggactgatgccacatcttacgctgctaaagacttaaaggagtgtcttgagggtttggcacgtcacttatttggtacatttttctttggaaattacacatataatatctgttatttatagtcttatcaccattgattttctttaattatcataaccatgttgagaatgctcttttgtgaacccccatattgttaaattttcaggtgct

SEQ ID NO: 218678 - DNA, 8835 bp, Cannabis indica
aatctgcatccgagtatcttgtgatagcaagtctatccaaaggtttgatgtagagaccatgataggttgttccctttaagtatccaagcactctttttactgcactccaatgtgttgtgtagggactgcagaattgacttaattgttgacagcaaaggataaatctagtctagtatgtgtcaagacctatgatgcttcgatacttgggggtttgctagaagtttaccatctgattttgatagaggtttacctactgtcataggagaagtgcagggtttgagctgcatcattcctgttttaacaagtagctctttaacatattttccttgattcaaataaagacctatttcatctctgtgcatctcaattaccaggaaacaatggagtgatcctaaatcctttagagcaaacatctcattcaacttatcaatgaattaattgactttggcaacattgttccctattataattatgccatcgacataaattagaaccataataacaatcccaagtactttgtagaagaacaaggaagaatctgcctttgagttagtaaagttccaatttagtaaggttgctcttagcctctcataccaagcccttggagcctgctttaaactgtagagagacttggttagtttgcacactgcttcaggttgattttgattttcaaaaccttgaggttgtagcatgtaaacatcttcttgtaagtgccattcaagaatgcattattgatatctaattgtctaatttcccaattctttgaaacaattgagagaatgattctcatagtggaagcttttataactagactataggtctctccaaaatcgattctaggctttctttgcattttcattcataaaactcgattggaagaatgacctaaacgtttatgccacctatcctttagggaaagaaaattggaactagcaacatgcttgtcccttgacaacgaaacaacaccagtaaaatgtttgacagacttagaatttgaaacagaacttgagtggttgagaagaccttcttgcttatttgtaagatggtataggccatctcaaagaaaagagtcccttggaagagcaccttctttgtttccaaatccttcacaaaacaattcgagcaaaaaattcaacaaacacattactatcatgtgtaagtttagagatactgagtaaattcttagttatttttgggacatgcagaacattactcaaaattagagggttgttaaccaaaagtatcagactattaccaacatcagcaatttcaagtttattgccattaccaacagtcaaggtcttctcaccattgtattcagtcttatgagtcagattgtttgtgtcagttgtgatgtggttactagctccaaaatccacataccaggttttgtcttccaccatctcacgagtggctatgacagcagaagcttcattgccattattgttgttctgagttactttgttgccactgttaggtccatttggatctgttcccatgtatgattcatcataccaattataacagtaggctgcactatgaccataactcccacaaacttgacaattgggtttggagttgctttgatttcttcctcctcgacccctgaatttaccaggtcctctaccacctctagattgaccagggctaccacgatttccatgaccataatggcctggatttggagatttgtttcctaaaaaaccaaaagatctagtagcaacaatattagcagatggtgagcttgagagtggtagtttgaaggatccagatagagttgttaacctgtctaacttactgtcaaagcttaggagtatatctagaagctcttgacaagatgtagatggtcttgtttcaacctgaaacacgattggcaagtcttcgatgtcaagactagaaagaaaataagacaccaattgtttttctaggtaagggtcacctgcaaatagtgtcttcagagcttttcataagctggtagatgagtcacatcccataacctctatggcgatgctctcaatcatagagccatacaaccatccaagaagaggctgatcattcacaatctaggattcaaagtctggattaacaaccactgcatcttcacctgaagatacatcaaagggcaggaactcgattggcttcactctagcaccattaagatacccgtccaatcgatgaccacgaactatacctaacacccttgttttccatagcgtatagttgttcctatccaatttcaaagcaaagggttgaattagggaactacctacatgtggtttcatgacacttgttactagagctaatgtttgagcaacgccactagccatgcttcttgctgtcgagccttattctccatgcacaggagtttgttctgccatttcactcgaaaaaagatacaccactggtgttcataatgctctgataccaagtttgagaaccagaggaaaaacagagagcaaaagaaaagaagagaaaaagaatgaaaactcagctcaacaaaatcattggctgattgcttgtatttataatgacttgtccactgtacaaaataataacctagacctttttacacaattacaaatttatcattaaagcagggaatattttaacaagaatttgttacacattgggaccacactattcggttatgatagctcacagcttctggaactagtgagatatttttattttttcacaataggcactttgggcacaagtaaatgtataagatgcttcagaattatactatttttgtgctgctcttaatttaaatggttgaaggaaaatttcaatttggtagaaaatttgaaaagttgtggctcttttaaaaaaaaataaaaaatcatctcatattgtggttcagacttgtgctttaaatttccttcacgctacagtgttattttgttgttaagtcatactttccatggaacactacatgttctccttcatcacttgtatgtttacaagaaatgccacataatattattttcatgaactgatatgtataatagaataggggcagaagaacactagctgaagtgagaacaagtagttacatatgtttgttttcgaaatagcatttgccggtaaaggacaagcaacttaattttctatggttacttctttctcagccatgcaaggatagctcaagtagttggtgtgcaagggcaaaagggttactgttaggcagcaagagtcaaacaaatggaaataaatcaagtagtgaggagtgtgcaataacttcaaaaagagagtatatattttgtcattcaaatgtaagtggttagggttagtgtaatagtcctagaaatattgagtatatttaaacagtgcaagagtgattgaaagaggtcatctactatatgaatttggagtagagttgttgctcttggaagaggggtggtctttcaaataccaccaggttcctataatgttctctatccttgcatgggaatttatttgggtcctaacagtggtatcagagcattcatcttgggcatggaaaaataagttttggaagctcgcagcaaacagtcaaattaaaaaggtggaatcattttagacatgaagccaacaactgatgaaatctcaatatgaatcgaatccctattatactagatacgattaagtctcttcattctaaagtggagagattattcatccagaaactttcatcaatggtgacaagcaaagcttctcaccgtaatggagatgttgcaatagtgacactcagtgcattaaacacttacaaccaagggaatacaaacccaagaatacactcactttgtgattagggttcacctagagaaaaatatgtgagccaagagaaaatccatatccttgtgcataacatttccaaagaatgtgtctctgacctaacataagtggtggtagtgttaggaaagcactagagcaagattttttaaatggggaaggtgagaatgattcacaatccataatcatctttaaccataaaagagcaattcaaatgctagatggggaagaaaacagtgataactagaatcagtgcaagggacactaccacaggacctaaactgttttctctgtttatgacccaccagagaagtcctaaggaaatgctagcagtctagcaccgtagaaggcagtgattacagtagttcagctgctgcttggttcgtcgcaagggtggtggggattttgtccaacaaagtcaacttcattgtgctagctgacatgaagaggagatgtcatgattcttggcctctagacttgtcatgccattgaaggttgggcgataaaaacaccacctatgaccagaaaatatgtcgagctgcaatttttgaagaactcaaccaaaagaattgggtctgaatttcctttgtccaaaagagtacttggtttagtctatcaactaattttacaaattaagtttccacctactagcacgcacaaatttgttataaatggagatgttagcctcaaattcgtttgtggccatcaggatgagagtgtattcatcttgttcaaaataaggttgtgtctgtcagaagccatattaaagcttcgtctctgacacttgagctcgacatgaagcagctgccagaaaagttgaatgtgacattgtgggtctttctacaaatggcaatttctttctcatcttgagaacaaggtgaaatttgggtggccgatagtgttaggcacccaatagtcaaataaactcactcaacatacagaaagagtatacttgcgtttttgtaaaattttagtaactccaacacacacacgcccaactttattaatccaagaaatatttatttttatttccttattatattgtatccaattaatattattataattaactattatgtttaatttgatttattattcaaatagtaagaaataattatcaataagcaagctttggttaaattattgaggaaacaaactgggtgttatttattgtagttttgataatgcgtaaattagttatttgattatcaaatctagtattatagtactttttttcttttcaataataatcttgaatagttatatgaaatattccaaatgttcctttgcatcataacttttgttcaaaataagtcataattcaattaatcgaaaaccaaagtatctgatctgccacataatccatgagcaaagcaaattcaggttttaataataaaaagctaaaccaacaagctaacaggacattaatcagaaaaatgtaaagcttaccacagatgttgtgccaaaattgtaagcatcaactcttttacttgttaaccagtagtccaggaaaggccctacaaccaacaatgatgcagcttgtgctggagcagtgtgccccaacaagttgaatgaaccaagagaatacttacgttgaagaaaatgtacatactgcaaaagaataaagatcaaaaagaaaataggtaagctcaagtgaagatagcataagaaataatataacaatccagtttccttgataaacatgtctaatttagctgtaatgtgaggtaaaatacccaaataccattttaatatgttggtcaggatcatctcagcttatataatactcagtaaattttttattttgcatatgtaccaacatgagaacaagttaaaattagaccaatctcaaatctcagaaataccatgatccacacattccatagtggtaaaatctttaaaataaaaaaagggtaagacaacatttgttaagaaagtacttacatactgctgcagcgaagtgctccaaactgctactaaagcagcaatgaaaccctttgcattgacactcacatcagtaacagtacaaactgcaacaccaaggagaactaacaaaatactaagttttgtatcccttgagtatcgcacatgatccaagacaacttctagaaaacaagatactggaatcatacttagctttgcgatctgaaataaaatttagaaggaaaattatgtaaattgtaatttattttatttaattttatttttgaagcaatgtatgtaaattgtaatttattgactaacacatacagacaaattcaattccaagttacacaagaactcacctgatagaatcccacagagttccacatcaaacttacattcatcccaacaatagagaaatttgcaaataaaacaaacttcataagttcagaaaacggaagatgagaaggttgtatatatcccagccaccttaggaaagatgtcaacaaggttgttgtggcaaaatgcagaccagttaatgttgtagctgcaattatgacacacaatattaaacttgtcgcaattttttctccttagctaaagactactacaacacaaaacatatttcaaaatcattgttgaatcaaaaaattagataaatacaaaaattccccgcatctagtctaccatctgggaaataactatgcacaataaacttaatgtatcacacctcactttggttactaattcttaaaccattcaaactactagttcctaatattttttcttgccaaatgtatcttccctttgaattaaaattctgttttgttcacccaaagcttcccccttggagtgtagtccaaatattaactatttccctgaagggtaaagatatggggaaaagaaaatcttttaacatgattagacattcgaacgaaaatatcaattgacaagaccgtgtatgatacaaattaaaaaatgatggggtttccccatatatcttaaaacacaataaattctgtgtaaatataatacaagtcattttagaacaaaaaaagttactttttgtctgagctttctattgatttgattttgtactccttttactagacacaatcttcttttaaaacaattcacatctttgattgtacaattttcacctataatcttgcttatattataagaaggagcacaattcctccctccttgcatcagtttcacatgatttctaatgaatataactcaggtaagaaagtaattatgggaaccaagtgaaaaatgtaattgtttagacaggcaagacaatcaggaagccataaggagcataccaaagctgaaaccatatgtagccataagagctttattgactaagattattcctacggatgtcaccacattgaacatccatgatgctgcatcaagggttgccttcctctcagctttgactgtcgaagacattttcacggatggcttctgatgtgcaatgtatcagtgtcaccaaattctttattgctcagtcttcataaacctaatactacgcttcaatacaaatttcacctgtggagttaaaagatgttataattaactcaaaatgaaaataaaattttgtttttagaaagatttaacaaaagttaaggcagatcaaggccgttacaactgacaatatacattcattgtcaagtagttgccaacaaaactttaaaaaattctcagaaattgaggcacccaatggtgagtaacagctgaactagccacgggtacaccagttttcgacaccaatacgcacgcctatataatatatatatgtatatatatatatatatatataaatttgaataaagaaattttacaagtatgtttccataaatgtaacgaagatcgtacaatttactcacactgttccgcaacattccccacatatattccaataaactcaactatatttaaataaattaacaaacaaaaagcaactgaatcaaattctcgatttgaattctccactgatttctcatcagattacaaaaaattctaccaaaaacagaaagacaagaaaaaaagatcacagctcaggaaaaaaaaaacatagaattgaatctgaatttacatattcctaaatagatccatgaaatctaacaacattccaaaggataatgaaatgacaggccaatttcgaaaatcaaccagagatccaattcttcctaatccaaataattaaaaaaaatcacgagattccacatttcaatttcgcgcaaaagagagatgattctcacatcagaaaatcaaatgaatgaaaattgaaagagagaattgctgaagattgagagagaaacctgaaagctcagagaagaaggttgaggtttcgttagcggttatgggactgcaatgccgcgtcgaagcaattaaaagagaaaaaaaatgtgagagagagagagacgtagactgctaatttgatgaaactcaacgtatctttaatttattttggtaaatttaaaaaaataagtttcttttttttatgtttttgacaaaataaatttgttttatttatttattattttttaaaatcaaaaataaatttgttttaggaaattagaagtgtgggtattgcaaataaggattttttttttaatcaaaataaatttgttttatgaaattataagtgtgcctatattgcaaataaggatttttttttaaatcaaaataaatttgttttatgaaattatgtgtgcctatattgcagataaggtattttttttttttttgggtttatttgcattaaggatttttttttccttttgaattcaacaaataaagaatttttttttagctttacagtattggggaaaggatgtttttggtaattttttttttagtattaagcaatgtaatcgtgatcttaaataattcaaaaggcgaagagatgaagatgggaagaaattattttttaaagctaaaagggagttttttgtcgttcttaaccaaagagaaattttttagaggcaaagatcaaaacaattgtggttacaaacgggagatcaaaacaataagttttttcattctaaagcctctactaaaaggcgcaataatcagatttatagcttgaaagaccctgaggggaactcgagatagtgggataatgga

SEQ ID NO: 218679 - DNA, 4176 bp, Cannabis indica
tttttatattgtccccttttatttttatcattcttttttaaagtatatcatttttacctcttttttcaaacattgtaccaattttgcccctgtcacttcaagatactctccgtttgactctcttatgtcagggtattttgggtacaatacatataaaaagatgtatgtttcaaataaatataaaattagaggtaaatttgattaattgattaataaaaggggtatttttcaacttaccccttaaacaatagtccaccatcaataatgtagacccaatagcccacttattctactccttagagtatatagtatttatgggtgcatttttaatgggtattacctaaaaaaatttaagtttttatacttaatttttctatctaatttgaaaaatctcttatttttacatcgtatgggctgagattgttctatcgattgaaaaaaaaattaaaaaaaagttttttagcaaaaaaaaaaaaagataagcaaatgttaagtttaacttaaatattttaacatgaacatatttttgatatagtgtaaaaagagatatttttatatttttttaattaagtagttaaactaagtataaaaattcaaatttctcttttattattcattattagatcaaaatttaatggtttaatatttttaaaattaatatttataattaaatttgcttagtaaccattcatggtaatatctattaaaaaatattcatatatatatatatgatgggtaaaataagaatggggttaatggtaatggtaagattatgctctttattagttcctcttttgcattttatttgtttttgtgtgttttgtttcttggatagatttgatcaaaagaggatgatcaagatgacatgaagaatccatatatattttggaggtatgttcatcattgttcaatgcactaaatagaatgatttgattttgggttgtttgatgagtgttgtaattattagtgtttgaatctattatgttttcataatgctcagtgtttagtaaagttaacaattagtatcatgaactattttatttgattttagggcttgcattcaacaaaaacctatttttctcaaatcaattatttagtgtaatatttttcaaaataatcttctaatggtggataataataccaagaacactaagtttttttcaagttttgtcaatagccaaaatggatctatagtatttttgatttagagttttattggtagaaataaatattggaaatggattgagcatgaaaaatggtgaacccaccccacccaaacgacatcaaaaacgatataccaagggctgaaatctgaccaagtcggtgatcgggttcgaaatgggtcaaatcgggtctgaatgacccatttgaaggttgaagacaacccaaaaacaacatgtcatttttctgtatgctttcaaccaagtttttgttgtttttttgaaaatttatcatttggtgtttagttgataaactacatgtcatttcataaatatactacatgtctttttcaaagaaacagcatgtcgttttaccataaactacatgtcatttttttcaaactacatgtagttttcataattttttccaaataaataaataaataaaaatttaggcgcatggggacacgtgaagagtcctttttagacaaaatttttactattttactccattttatttttttctacttaattgtgtgattatattgtatttttggttaatttaaatgattaaattgacttacaatcacataattaagttaaagtaaattattttctaataattataatctcacaattttattatgtattttttatcaactaaaaacataattattttcatgccagaaaattatttgataaactattgacattcttgataatataattatgttagtgaatagtaattaagtgcttttgtattcacctatttgtgagtctaagaatgtcaattttgttaatcataaaattgtgagaattgtgacaaatttattgttaattaatttagtctcatacaaggtcattttattgtttatcattccataatattgttacgtatctttctatggtgattttgagaatttttgtgaatttcattattgttatattatgaattttttttaggcatatactataaaaaatttgtaataaaatattaatcatgatttgcgcatttattataaaaattattgtcactatttaattgatattttcggtaatagaattttctagaaatttaaaatgcgtaattggccttattagataattatgaaattaaaattattcattgaatatgttatccttacctattgtaaattttcacatgttaattatcgaaaactgtgattcatgttaatacttttctcatgtatcaatcacaattaatactaagattcatacatacaatttagtcatcgtgtcgatgattttattgataggtaggatacttagatggaaaaaaaatatatattaaatgtaatgaaccacacaatcttttttatcctattggattaaatgaatttggttatgatatctgaagtaattgtccttacctgcataagaatcatatgttttatttgaacaactctagcatgatatgaccattttcgttgatagatcattgagaaagctaagaaaacgaacaaattgtataatccttagtggcactgctctaagatattttcctttatctttaagcaattttaaaatctcttctgcttggttatcggatgggactataatatattttatcgtatcgatctctcattagaaatttgactaggcctcgaaattgataattcttgaaatcacatttgaatataaatgatgccaagttactacatgcttagtgggagtattgcaatgggtgttagctagttctaatgaggtatatatttgtctatcgatccttatatgacgacttttatgaggatgaattcgcctaggagctttcctgggtattcgaaatgaaattcttatgtttgttccataatgatgagttcaggagactagtgtgtttattttgtgcattgcaatagttttagttgaactagtgaatcttttattatgatatttttatggttgagattcaaaataaggcatagatcataagtgaacaaattttatataaaaatgaagatgaatgtatgatcaccattgtctattctgatgtgataattttgttaattatgaatgtttgtactcacaataaatttaagataataaattaatgcatatgtactcgatatcatatcatagttgctagtaaatttgaggatagataagctatatttaggcaatactttttcattgattcaagtctagacaaaactttccatatagtcggtttgatgatttagttacaatttgtgatgagaaatggaaagattaaaggatattaaattttgacttattccatgttagtacacatgttcttcactaatgactattataattattgataataattttacgactcaatttcccacaaggaccaatctattatgcatgcaaattttaagagatatcgagtatttatcactcttttattaagatctctcttgtattattatcttgagcacaattttcttaaagctttgactcatcaaagtataaaattctttatgctttagaaagctttaatagtggaaacacctaaagtgattaatctaagcatgcataatgataggagtgagcattcaacccgctgggccgaccaaaccggccaacccaacccgctaatgggccgatgcatggtctctttgtatgggccgaattcctcttgggttgaaaattgtataacccgttacatatgggttgatcacgggtcggagggtttctaacccaaagaaaccaacccgggccgagcaagcccaattagattataatatatatattttttaatatacattcatttttaacaatcatttcaaaccctaaataaccattaccctcctcttccaaaccctagtagggagcagccacactaattttttgaaagaaaaaaaaaaccctatcagatgaaaatcgcccacccaacccaggtctcctagtcccagccgcgccgccccgtgttctttcctctggcttcgattcctcctccaccctcctctagatcgattctctcctccctcctctttcttagaacccaagcgccaggcgacgggcgacaaatact

SEQ ID NO: 218680 - DNA, 6476 bp, Cannabis indica
aattcaatattccaggttcgctctgcctattgcaagaatgattttgagtgggacaacttaaaaagactatctttcaaggtaaggaattcttctcatttatctaattacatacaacttaaatgccgactatttttggttttcccattttcctaactagcgtttgcttgaattgaatgtgtatatagatggtggatgatgccaacactaacatcatgagagactatgtcttggaaacaagtcaggcagacaatgagaagggaaaatgataatgtattttgttactactgcaatatatgtaatgaactcaaaccacttttcaagatataaccaggaaaataccatgacagtcaaattgaaattggggatactttatataccattatatacgagccttctcattccaagtgcaatttcatcaattaagtattacttctgcaaagagcttttcatttgttttagactgatacagcatataaatgaagaattatattgacttggttacctttgcaacatacttatttgtttacagcattttacatgacatcatgcatcttcataggaaacacaaaaaatatttaccatttacgcaaagttacatatataatgatatataaagactttacattaacacacattgcaagaaatgcatgtacagtcacaaatcaccctgctatctttgcagttcatcatcactcacactcaggttctgccttcgtctgcaaattaaaaataggttaactgagacatgagtcttgttctcattctcttctaattatttaaattgaaatatatacctcaccattaaaagttaaaacggcatgttactaatcaaatattattagaatcataatcacatatgcgtacctcaacgtagtgccgaaggttggtagaagcatgtatgtgccctgtgctgaaatatgaatgagcatattcttcgatgttctctaccctgcaaaaccattgtgcggtgtatgttaagtgcactccttctgatgtagaaattttaagtgaaattcatacttaagaaaacaaatcggccagattaaaataattagtctaggcccagtccgatttgagtgcctatgcagcgtatagttagcaagagacaagggagcagacatactcaattagagaagtcactgtagaatgttggaagtacccagtttgaaaaagtgttggttctgataagaaaaattacaaaaattacctgtaaacatagttcaccatgattcccccactttgacgtaggcctttttctgatcgatcagccatccaattaatcctttcaatcatctgcgcatacagagctcaattagaattgaccaaacttcactcttttttaagcgccaaaattgaacaacaactactttcttgcttttaactaagaatacttccatttgagcaaggcaaaaatttaaagccaaattcttttaaaatccaagcaatttgaatgaaatgacatactgctccattctgcaagtgaaagtttgctacagaatcaagagcttttcctctctttttctcttgcaaaaggtacctgtggtcatatcatttgtatctgttagcagagtatataaacacagtaacataaatgtaacgttcagccttgtaaaaacaacttcttaagattagttccaattaatagatagccactcttagcagctttgcaccggaaaagacccatttagtagggtatacattgaaacgattataggaaaatccaatttagtcacgaaagcatttctaataaattcacttcaaaaaagaatgccaggtggggaacctgcaaactagtattataagtttataaacaccttgcacaaagccgcattagagggttttccaatgccgaaagcaatttagctgatttagtccactcatagtttgttgaagtcagcaatttatacatcacttctattccattgtttcccccaaggaactcactgacagtaaaagtgtaattaggcatgtcaacattcagtgctgatgaaaacgtttcaattccaggacatctagaagcatcctcaccagagaaattttccaagataatgaaacaataattaaatatttaagcataccttgaagcttctatgacctgactttcttcttctggttcaagtatattctcccaaaatgttgaactggaatctgctgatgaatatgatgtttcctctccttcaacaagctttagttgagatgccaacttagataagagccacggcatgtatcccgggatcgggctgagggttgcaaatgtctattcaaaaacatcaatatttcagctagtacagcagcaaatgtctagttagctggcattgaaatgtagttttggtaaaggggaaacttgtcttgaggcttttcactaattagcaagaacaaaatatctgtctcttcaatttttgtggattaaaatggtgaaataatacttacagaaatatgtggcatgtctcgttttacaagtgtaataacacgcttgatgagaaacttccctaggttaatgcctgataagcctggctgcaaaaatagcataagtaggtagattaaggccctttcaaacagaaaattaaaattagaaacaaaataatgaataatttaaagataacaaatgtagttacataaaatttggttcgattttaatatttgacaaaacatgcacacatgcgggtggacacatgatatggcaatcagaaaatgaagatcttttgtatcctatgcacttaacaatcttaaaagaataatctttacagaaaaaaaggcaaatatatatgtgatccttatagtaatgatatggcaattaataaatgaaaatcttctgtatattatgtgcttaataatctgaagcaaataacctttaaaaacaaaccaaatatataagtgatccctatagtattggtctgttaagactaaatggaataaatgggcgaacctgagttgatgatatggagtaaaataatgcgcaagtagcctcacattcgagtatgggaggattatcccacagaacttcctgttagacacataacaattataatattatgagagagagagagagaaattacaataatacaggaataaaaaacttacctgtattgtttcagcaatatttttcataagtgcaacttcaatgaaaataaggggttcacctaaagagaaacaaatgaaaaaaaaaaggaattttaaagatacataaattaataaattatatgaatttttgtatgaccaacaatcaacgaacatcaccccgaaaagtatgtactgtccaactcaaataatcagaaaattcatgacaatctgatatagcatttactacacaatgctaataaatccaaaccctcaatttaacatccacatatgaagttgcatactagtaatagatttcttaagcattcagcttatcaggcagataaaacaatatcaacttatctggttgataattgaagcaactttttacaaataaacttagacttattaaacattcaatactacaatcctccacttttcattagcaagacatattctctgatcaatttacagcacaaattaatgaaactaccgccaagtcaatgggaaaaatagcaggagatacatataatatttggatctaatacaacagttagactagtactatctgagatcagtatgtaaatatccaaacaacggcgaccaactcccagccttctcttaagatctataaggttgctgattgggtgcacagcctattcaaaatgagtaattaaaatgatatacatcccacgtagcaacacttatatctagacagtggtaaaggaagaaaaatatatttcacctcaaaagccacaatcttttcaagcaatgaggcagaatcatcccatgtgatctgatggagctctaaagctgcagggctcaaccatgtactaagcttctcttttaaataggaatccagggctcgcaaagatgcaaagttttcctctctattatgcaaacattgatttagatctaatagttcaagaaggggagaaacaaaaaccaactcctgaaaaaactgttaagctcttgacacttttattactgtattcaatatttgtttatcacttactaatgttatccccaccgttaggcattaacatactgatcataggagactaaatgggtaaccttacgcgataatggatagaatatctgatcgaagaatggacaagaacttcaaaccccccggatgagtgttgagacgctcaaatagaacttcatacattggcttgagagcatgtctcaaattcctttcaatacgataaaaagacgtaagcataccatcctcttctatgccacctgattgtgcattttcacctgcaaatagaaatttcttaaccaattgaaatatcaaaaatcctacatttttccttaagttttattcaaatgttttcttacttagtttatggttacttagtatgacctataagctacatatatgatgaaaacagaacctacttgttggaagctgaagtccaagatattgcttgatcaattcacgaacttgtgtcctattgagatcatactccttggcaagcacaagaagtaatttccggcgattttcatgagaaagactaaaatagccctacattaccaaaaatatgatatgtaatttaaaaaaaacaaacaaacaaagaaaaagaagaagaaacttacgtcagcgaaatcattgagtacagagtctaaaacttcagttttgttcattgatattgcagaatgcatcgattcccgaacatgttccaaattcctatcagaagaaacaaatacaaaataagcactttcaactgtagagcaaaaccaaaatcaaaattcgaatgaaataagattaagaacctctgattattgagagaagcatcgggattatagtttccctgttcatcacgtccatttgatcgattttcttccgaattggagagattctgattcaccaagctctgttcatggaatcagtattttgaattaatagaaaaaagcataaaaataattagagtaaagattaaaaaggtaaggcctacattgataggagggttagagtgagagaggtttgttgagttgttaggcgtaggcctcatcctggttcgcatcaaaatggccaaccctttcttgttcatacttttttctaccttcaattttacttttgatgaagaaaacactttacttagttgttaatacatcgttctccaccctttcttaacggtttgttatgttagagagatatgtggctaaaaattattttttgggtttagtaattaaataatattaattatttaaactaacagaaatctatgattttttttaatttaaaaaaaaattgtttaattttttggtttaattattgggtttatttgttaacggagatcaaacctattaacatcgttaaatttaacagaatattcttttatttttaaggtatattctgttaaaccaaaaaatgccgttagatagacccttttaatatataaagatatatataaatacaatcatgtcgatcacaacaactatagctgccttcatctcaattttcaattcaagtacttaatcattttaagttttgtactatatatatatctttcaaaatgacgcggtggtatctttcatatatagtacacttgactttccttgccctagctagctaatatataacaaccaaaattacacacatatctatatatatagacccatatatataattatattgagctggcatacacatataattaattctattcgttctatggccaggtgtacaattctccattttcttgtaaatatgaaaatttgcttacgttacttataacagtatcaataataatattgctgtcataacgtgtttttaatcaattttgcatggtcaatattcatgtagtttttggctcttttaacaagaatatatttcatttttttctttaacttattatcactgtgtaatacgcgttgatattccaattataaattgactttacagcatacaaatactatatatatatagcatcctaggatatttatataaataaatataacagattttatatatttatagttaatttaaatgatatatattaaatccactacgacgataataatatatgtgttacgctctctaattagtatattggcacttgactgttctttttctaaaacccaaaatatatattcaggttttcaaaaactggatcagatacgtactgattagtttcacgaatcgagaagaaggaaagataacttcatgttttttttaaaaaaaaaaaaatgaaagaaagataacatcataaaatatcataaaactcacaagatacatgggattatatcttaaacaatttatttccacagcactaactttaatattgttactttgggataaggtgaatgaggttctatctcaaaactaattagcaatgggagaaacagtcaattcatattggaaactagttgctgcataaaataaaaggaacgaagttaccgaaatagaatct

SEQ ID NO: 218681 - DNA, 2892 bp, Cannabis indica
ctctctctctctctctcttttaggctgtacggttcctagttgctacccgagaagacctaactaaggaaaactcaaatgcaaaagctgacagaagtaccgaggactcagaaatacagaaattagatcctattcaagtgagttaaagtgtttgtttaaatataaatgatacctttaaatgaaatcacaaaatataggaaataactatgagttgtgtatgaaatgtgtcatgcctcattggttgctctagctgtgtctaagttgttgaatttttgggcaaatgatacacattggcatcttgttaaatatacttctttttaagtaagctgttaattatttatgctgcctttaacagaagtgctataccaatagtattaaagttttttcttttctttcttttttgtatttctttacactctcattgattttggtttccgtaccatcattacggaatttatataaattgtatcctgaaatgagttaagagatgagttacctatgtatatattcatgttttccccacattttgaattgcacaatatctgtatgaggtgaactatttacatttatggaaatccttggtgttttgtccttctctttttaattggatgtgatggtgagtattcattcaggttgatttacttctggggaaagcctattcagattggggtcatattagtgatgctgtatctgtctatgatcggattatctctagccaccctgaagactttcgcggttacttggcaaaggttctgtaatgctacttaattagttatgatttttacctttatttttggttgctcttagatgcaattttttgtggattagctaactatccatctcactcccactgcaacaaaaagatagtcttgttatagttataagtatttaagtggacctagacagagaaaattgctattagttgctaagggaaatataaacccaacaaacaacagtcacatgatgtgggacagaatatacacacacgtctttcttttttgataaatttaattacactaaacacaggatttatgtgtcagttatgttaataaaggtatacattaataataataataataataataataataataataataataataatactaataataataataataataataataataataagcaaaaagtttatcaactgttgtctgctaacttgtaaaaggtgaatactcatatgccctagacctctagtatagtactaaatatttggtgaatacctgcataacattctcttttaatatgcgacttcatgtctgtagttaaaagacctttcaaattaaatatctagtatgaagagaattttcattacattatttctgtgattctttttccagggaattattttgaaggaaaatgggaacaatggagatgcagagaggatgttcatacaagtaagtaaagattataggttaacacttctgtttctttcctaccgtaaccctaatggtaatctaatgtctaatatatttttttttaagaaaaaaaattacaactatgctaaaaaattgcaactatatttttttttaagaaaaaaaattgcaactatgctaaaaatacttttaaataaggtttaactattgtttagatattataataaaatctctctttctccctctctctttttattttaataaataataaaatctcttaaattaaaataattataacattttcttccaacgatgttgaagtaaaaaatgttgaatttaaaggttgagaaactaagtgcaaaaggatgaatagtttggaaattttagttggatggaaaagtaaaaaggactaatagatgcagtatttttaagaagttggggatttaaatggtaaagttttgagattagggatccaattccaaggttaaaagacataataaattggagatttttgctgcaaataagcccctgttctatgaggtcaacaagttgaaggatatagctttatcacttaactgtttacttgtattataatgctctattgctttgttcttgatataagtttaaacaccttcctttctatgttgagacttttttttttaaaatcattatgtgtatacaacagagaaataaagtgtatcataattgctgcaggaaaaaaaagtgttatagtttcaagtataaagtttgttgctgttatctacaggcacggttcttcgcgccggagaatgccaaggtacttgtggatcgctattccagaagatgaggcaccattgtccattgctgcttctgtctgtctgcgtaaacataatggtatggcactgagtctcactattacatatcttcgaagaagtatgtttcatacttgtgcagttttgaccatgaaatttcagatgaaagttcttcaagagaccattaacaatattagaaaaaattctattaatgacaaggttgaaagtggttttttgttattgtctcttgaagtataagctgtcaatgaagagtaacattaaattttaattagtacataagggaatgtataaattgttttattagaatcagcttgtatagtttcataactaagtttaaattctttgtttggatgtagttagagtatacatttcattgtcatgcttggcaagtcgcacagtaattagacagtaaataaatactgtgataattaatatttaaaattaataactgttgaataaattgctagcaaaaataaaagaggaacgattttaccgaatgaaaaattctaggttgagtcgcggattcggtcgctctttttaagacgtttgcggcactgcctaggagtgtgcaagcagtcgaaatttgccaagataaaacagtccagtcgtactgtatcggaatcccactgtactgtagagtaccgtcgaatacacccaaagatttttgatatcgcagatggaattttaatttt

SEQ ID NO: 218682 - DNA, 4398 bp, Cannabis indica
atgatactttgggtgggtacctgattttataaagccaaggagttaaaaggtttatcctatttagacttaatttttgggagattttatgtattataatagtttatttttcttcccttgatttttttttttccaaatagatgttttttctgtgtttgtttttgtattatagtttgttcacgactttgttggagtttgtaaccacaaccatcctcctccataagcgagaactctcaacatctttgagaggagatcacttatgcatgtgacctttgtcactttctcaaaaaaagaaaaatatttgggagcataaaactctggcaaaattgcaagttacatctctatgagaaaccgaaacccctactttatggaagcaaaacaaaggttgaaaattaggtttagttctctctttttttatgtatcgttttctatctacctatcatgtattggttctacatcacaaagcaattgttgttttaatgtatgatggcccgagtcgcatgaccttcatgcagttagaaaaaaaaaatgcttttcccatcacaattactaggcacgagtaagttagatttccacaaagaaaatcactaaccctaactattattacttgatggtgttaatttaaaaaaaaacaaaagtgaagctttgcccacacaattattaggcgcacacacacaaaaaaaaacacccaacaaactctaattattactacttgaagataagttaaaattacttaaatggaagcaagtccaagatataaacctctagaagtaccaaaagagtgtaaagtccaactagattaccaaaacttaaggacttacgtagtgatacctagtgtgtaattcatcatcttgagaacttgaaaaaaaaaaataacaaaacaaatgtgatatgcaataatgtttgaaaagggaaaacctgaatttctacaactgcttccccggttcgtgttggctgacttccagcttcaggtaccagattttttgctttgtggcactacaaataagccatttgacccttagcatgaaagataaaagaatatattgaaatcttatattaactttttcattatttggtgcttaaaatcatttgtgtagaaggtaaaaccgatgaatatggtactacctcatcaaatataatgagaccgtcaaaatcaggtccacaccactgaacaagctgctgcaaacgagaacgacctttctcagaggatgcaatgagactgctgtatgtcaaaaatataactccctccatgactttatttgcctttgaatctaacttagaatatggctgtttgttcaatgcatgaactgcagaaaaataaaaaaatatatgaccattattttcatttaagaaaaggtatacactaatattccaattttctttttctgtttcagccaacatgcaaacaagcaaaacaaaaactatcttttctagtattgttgttaaaaaatatcctgtcctccaaagagaaaaacttctcatccaacagggtgaagaaaaactaatataacttccagaaaaattactctcccacaccaataatgccccaacaatcattgaagtcactttccaaagcatgcccaaaaataatctgttatgttcttcaaatgtttttgcgtactttgtttctcaacaatatttcaaagcaaaaaagaaagagtttgtaccaagaaggtgaaactcctcgttagcactcaggtgactgaagaatcgaatcttagaccatatgaaataaaaccggcctaagcactcaacaagtccagccccttacagcactttcttattgccttcaagtataatattatctctaattagctaaggatgaaaaaaagcaacccttaatagatgaagtctaatcaattacattccttaaaattaaactgactacacttagtaatacaggacttcaagtataatattatctctaattagctaaggatgaaaaaaaaaacccttaatagacttcagcaatacaggactcggctaagtattagactgattacacttattgcatagtgtcatccttaccaatactcttctaaatagctgtatagattgctcagggaggacctgggttttaacggcaattccaagaccatatcaggactcttttcagagtatagtacgaaaggaaaacagaaaaattgaatgtggcagatttggggttggtttggttcattatgcttggagaggaacaaatcaattgttgagggttacgggcactgatgagttaagccttacaggataagaataagcatgatgtgtatatgagctcctctgatattaaggatatgaatatttttctaactgtcttaaccagatatttgtctccctttgtgtcaaatcaatctgctaactcaattttattctctcctttgatgtggacttcttctcaacagcatgtacatttttttaaagaaaacttcagtttcttttaaaaattaattaataaataaaccatcctgtcacagcaaaatttagaacaaaaaagtttcagcaaaatcatctctgtatattcatagtccaattcttacccgttatgtctttagcgccaacatctgctaagtctctttctgcatcatatctcaggtctgaaccaacagaaatccacctacacgaggttatgaagcagagaaaaaaattaacacaacatgagcaagaacacgtgataaaacaagcatcaaagtctgcatgattatgcacttcgaatgaaaagaatattgcttaatgcattctaaaaatttaaaagaaacaaaatatgtttgaggaaaataggtgtgcaacaaagagagattattcatgaaacttacaacgctttcttcctatgatgatgccaattttcccatatcaaccctgcaactgttcggcctttacccacacctgctccatctccaacaaagaatccggccctcgcgccactaggaagatgatgaaggtgcctctgtcataaactaactgtgtcattctgtaataataataataataataataataataataataaagctcaataatcttgaacccggtgtaagcagcaacctgacatgcatagaccaatgtctcaatctgcaaacatgacaaagccttggattcttccaagtcatccctgatttcaaggtcataagtaggctcaggtggttgtacagcagacaaggaagatgtctccacaataggatctggatgaggaggtccaattgataattttggagggcgctgaggtcacaaatgcattaatttcccattatttcagttaacaactgaaggcataaaagaaaaaaatccggcataaaacttcagtcaagatctacaaacacttaagatactcacatagtccgtaaatgtttcaccagctgttcccccttcgtcttcttccctttccacttcaatggcctcctggcataagcacaaaatccagcaaaagaagtaaacttatcttaaaaaattaaacaggacaaatatgtgtatcaaatatcgtatgacagactctaaagttaaaagagttcagcacagacatgaaagtttaataacttttaatcaactggaagatgtcttcaatcatgcaattttccatactccatagaaaattatccaagcttttgccactactctcgacgagaacataaaaattaaaaagaaaatcttaatagatttccttcaccacaacattccattgttggtattgttaaagtagttataaaaattaaggacctacaacgtagtgcataaatccaagatggtatatgtattcaaaggaaaagccaagatcagtaaacatcaaatgctaagatacttgcaacttagcttctctattttaaagaaacaggggtttaacatcacctattgggagtgctaaaagtagaaattgaagaatcattaaactagtattaaggatcttctattagtcccataaaaaaaaaaggatcttctattaggaatacctaccccaaatccataaatagatttcttctataaaaatagcataatttaattcataacataagtcagtttcacaagtttgtttacaacactatttttctattcctaagagacacctctaattaacaaagatacgaggaaagtgtgaaaattttcaagtaacttggccacccaaacagcttcaaaactgaaagattcgaaaaagaaaagaaaaatctaaagcaaaaccactcattctctcaacaggttagaaattggaaatcaattaaactctttcactctttagcctgatggctgatagcaacccaaaactttaacatgtctcatatattatctagcaaggtcttcttaactcgaaagatcctatcatttatttccaacaaaattttccacataatatgcaatgctgtacaattgccaattttcttcttctatgaattagacatccttacaaaatctagaagc

SEQ ID NO: 218683 - DNA, 2660 bp, Cannabis indica
tatgtattgatataaggggcgtaagaaaaagtaaaaaaaaaaaaggacaacgtgaaaggtaatgtgaaggagcaaagtcgagttaaggtgctaatggcatatcccatggaagatgcttaaacctgcaaacttcaacactcactttttcccccataactttctttttcatagtttcctttaatgaaaaagtgaccacaaactctacttaagtcatctcagccttttattgcccttaagaccaaaacccaaaaacataatcctataacaaccaatctctatcttcattaccaaaccctcttctcagtattcaaacaacccaaaaaaaaaagccctcttatttgctatctttctctcgacggccacccctgccaacatggctcctaatggtctgaaccataaatggttggtgggggtggtcactggtcaccttccttcagatgggtttttcagattggtgttggattatctatatttgctttgaaatattttgttgtcgtttctttcacttccttggtcgtacgacatgatctctctctctctctagctagctactacaatatccttgatctaagttacttggagaaaaggtaggtaataaggtttgagtagtagtaagtcgtactaaagggcaacttgaatcctttggcatttttctctcatatatatttgattggcttgactaattaagaaaagaaaactacatctttgttatgggtcgagttcaagcttcattgttctacttattattattattattatgtttgtccttttttttgttttaactatgtttttgtaataattagacgatcagcactatatatgtttgtgtgtatgtgtaggcctttggccttattatgttatatgtaagatgtattactttgtgttgtgtagacctatcatattataatatggaactgggtttgttatgatttgtgtagcaagtgatcttcatgaccaatttctcttttttataaaatatatgtatagtttgaggagaatatacttataatattaatgctaatgtgagtatatatgcatgagaatatatataatattaatgctagtgtgagtatattatatgcatgatctccaccattacatcctaaattaattgcaccagtttaatcaaatatattttgttcaatgtattacatattgaattaacaaaaggaaaaaaaaagaacactaaaagtttatcaaaaaattatgttattgaactgtacgtacttaaactactactctcggtatattctttacatttatatgtggtaagcaacatttgccactattaattaagacagtgtatatatatatatacatatatttatattatatttttgtcgatgccacttaaaaaattgaattcaacattaatagaataccttttattttaacatgtaaatctaacaaattaattactggagtttttttaaagagaaataatagaagttatatatacaaggtatataatatattgtccaaaaaatattaaaataaatgacgaaaattatctcaggcctgtcgataaaaaattataataataaaaaacatatatttgcaagatcatcataccttcactcttctttcatgaattttccgtgacatcatgtgaatttaatctgacactaaattgtttcacgagagtgctatgtaatgctagctagtaatcactgtcgtcaaaatagatgaaagtgtacgaacactacaagaaatgttgttttgccagcgtatttttgcgcctacaaatgcgctagcatatttttacccgcacgtaattatgttggtaaaagatttcagctattattggtcggtaaaagacgttttgtcggcgtaattcacaattgtaccgttaaaactagcttttaccgacgaaaataagcgccgacaaaatgtatatgctggaataaagaaagcccctaatctgtcaatagtcagtataacaaaacctatgcacggtaaaagttttgcgcctttttaattgattggcgtgtgttatagtgagaatttttcacctagaaactcgagaccaggctcccataaaaatgacatgtggactcactctcctcgaggagggttgagatgtcagcaggagacttcttgagtgtaaacctcgctgaactagactcagcgagtgatgtgaccttgacagagtctagtcgcattcttatagctcgcatgaagcaggaccgaagatcgggtttaagacttgcatatatcaggatatatgcgggaactataaaggtcttcctgcgaagtagtaaagatcgattctctactcagtgagctggtccggatgatccaacgtcctcgataacccgataaggactcgcatgtcctaagttatcgacctgttacacgatgtctgtatatgcgacttgaataggacgtagacatcctaaacttgattagtcttgtgtgaatcttgagcctgcgagcttatacgagaatatgaacagacaactcgtaccatgaaggtcgcatacgttgttgtaattagtaaattgggctgaaactattcttcatttattgtatttacgttgtaattgatttgaatatttataatattcaatgtacaaactgattgataattaaatcaatttctgtgtaatcaaaggacacttgctttgtatataaatgagtgatccaacatgaaatggata

SEQ ID NO: 218684 - DNA, 2516 bp, Cannabis indica
gggcacaaaacccaacacttaggatgataaaagtaatgataattttagaaatggtccttcagacttgtttcaggattttattgacaaattctaggttgaggtccttgacttccaacgacctcgtttaacttggaataataatcatgttggcttgcacaatgttcaggaaagattagattgggccttggctaataatcattggtctactctctatcctaatgcttcatttacccatcttaacttctttggctctgaccatagaatcatcctgcttaaagctaaaatcctaccttctaaaggcagtcaacctttaaaaaacaagcattttctttttgaaaaatatttggctcactgagctaaattgggaagaggttattttcaaagcttgggatcacccaaaaataactgattcctccatccaacatcttgcctctattcagagttcttgtgctgttcatttgtcccaatagaagcataaatctttctttggattcccaagaaaattgcccaagcccaaaagaatcttgaaaatgctagaaactctctagaccattctaaggcttcctttcaaaaaattgagaaactccaatcccatttgaatatccttcttgccaaggaagaaacttactggaagcaacattctagagataaaaacactcgtttcttccatagagttacttctaataggaaaagtaccaatccaattaaccacatgtttcttggcaatggtacaaaaatggacaatgcgggtgacatcatttttgaaattgaaaggtattttactgatctcttcacatctcaaagcccaaacgacagtgccatggatcatgccatcactggaattaatagtcatctttatcctaaacaatgtcaatttcttaatcaaacattctcccctaatgaggttagggaggccctgttccacatggcccctgacaaagcccatagaattgatggatttaataattagtttcatcaaaagaactgagatattatgggcagtaccgtgagtgatgcaaaattgagtatcattaatcgtggagctgatttctcaagttttaacacaactcttatcacccttatcccaaaggttagaacaccctcaactctacgtaattttaggcctattagcctttccaccacaatttacaaaattgtttttaagattctggctaatagactgaaacatgtcctcaaccccttgatctccccaaatcaaagtgccttccttaaagaaaggcttatttatgacaatattcttatggcccaaaaacttttccatgctattaagggaaggaatataggaaaaactggttggatggcagtcaaacttgatatggctaaagcatttgatagagtggagtggccttccttaataaaattatgtttacacttggattccctgccaagtttacttccttagtcatgaactgtctcaccactgtcacctacaaattcaacatcaatggccaagcccttggcaatgttgttcccactggggcataagacaaggagacccaatgtccccttatctctttctcctttcctctaaaggcctgtccacgctcccaaggcaagctgaattgattgaaaaagtagtagaaattaaaaattctaaatctgccccaagaatctcccaccttctcgttactgatgataacatcctttttttgcaagtccaatattcaagcttgaaatgctataaaagaatccttagagacctatgaattagtcttgggtaacttgtgaatttcaacaaatcctctattttcttctctctcaacacttccctcacttaccaaacactcatttaagattacttaaaaattcaagccaccaatagtttggataagtaccttggtctaccacaattctttggaagaagtaagaaacactttttcaacccgataaaggctagaatttcgacctatcttgacaagtggaagggtaaacttttctcgaagcttttaaaagttgtcattcagtctataccttcctatgccatgtctgtgttcaagcttcccacttttttttgcaaattttttagaagagagatggccaacttttggtggggaaataaagagggagaaaggaaaattcattggaaaaattgaaaatctttgtgtaattcaaaattaaatggggatcttggtttctgatctattacctcattcaaccaagctatgcttgctaagaaagcatggtgtgtccaactaaaccctacatccttgattggtaccctactcaaatctaaatactttcctcattcaaccttccttgaagccaatttgggtcactcaccatcgtacgtttggagtagtcaccagtggggaaaagccttgctcaaaaaagggctacgctgaagaattagaaatggggaatgattaaactcaaacttgtcttcacaaagcgatcgttgtagtgtagtatgagcggtcgtgtccacaaagagatatcttaattaaaaagtgattagtgaaattttaagcagtataagtaaataagtcaatgggttt

SEQ ID NO: 218685 - DNA, 5719 bp, Cannabis indica
gaatactgctataaaaaatattctgatatatattttcgaacacaaaaatttactaaaaaattataataagaaatttaagtaactagtcctctttatttaatcaaagtaaaatacattttgtagactggactatagtgtttgatttttggacatggttttcttaagggtcacgggtcaatgtcattttccacatagttatcaagattgagacttaatttttgaagagcaagaccatagtatataagtttgacttaacattcaatttcctgcatttcttgttatattttaatataatatttatttgattgattaaataaatattataataatgtgttataaattttaatttaataggaaaatgtcatatatttgttatttaataagtatatagtaaagatcaaaatgtgacatattatatattagtatgagattaatatataatgtgtattggaggttgtattatatcatatatagtataataatacacataaaaattataatatacgaggagttataaattaaaaataatttataatttaaggatcacaattaataatatgtaattaagtgagttattacatatagaaattatgaaattaatgaaataagcttttagcggttagaaattgttacaatacttattcatatcatttatttgagttttgggatattggagaaaaatttgattaggagaggagttacaaaaacttaatattgtgttttttgaaaactgttgttttattactgataatgtgtcgttttatggttgttttttgaatacttggaaccaattttcaaaacgtccataaacatacataaattaattgagcatgtttctaactatcttgtccaacgtttttattccactaaacactatttaaagcgttggtaacaaccatgaggtgaagggaatttgattttctaaagtgatcctcaaacactataaatagaggtctaaagtgctcattttgtgacacttagttttctatcaacaaacacttgctagaaaacacaagtcttgatatttctcaaaactattttctacagagttcccttagtggttagagctaaggggaaataccttattcaagtcatagtgatcctcactaatttacactcaagattgtaagtgtttctatatatattcttcttctacctttcttattgtatatactgtagtatatgttgttgtaatatttatttaatctctttattggtccttgtattatattgcaatacagttgtaatgtcttcttctattgtaataaaatctccaacatttctctaagcaactccaatatttccacatgaacagagcgtcatggttttcccatccaactcataacctcaaaccccaactcaaaaaaggtaaaggtaagggaaagaaggtaagacaatacatcgattggaacaacatcgaacatcaaagctctcacatgagttgacttgtctgctccagatgagcttgtggaagacgatgaagctttaatttctgatcttaattgaaagtaaataagattataatgaaattaattttatttaggctaaatttcagtttgcttgttgagactagttgttgttgtggatgtggctgttgtggcctagcattttgctgaaagcaccctaggtaattttgccaaccttgattgaagaagttaggaaactattgttttgacgatagaaatttctaatcgtttgggcttgttcaatgagcattgctcataaacatgagacctccacataactcacacatggtgtgcactgcttctcttgggtggtccatgtgttggcttgcaattgcttgattaaggtttttacctaagcagtcaactttgtaatgacatcaatctcatgcaaactaactactttctttgaactgctcctctcattgggccactgttggttgatgataaccttctcttccaacaattcgtatgcctcattgatattttttctcataaatgccccaccaattgctgcatcgatgagtgtgcgagtaggaccacacaacctattgtaaaaattatggactagcatctatttatcaattccatggtaaggatattttttgatcaagtctttaaacctctccaaaatctcatagagagattcattgtccaactgatataagttgttaacttcccctctcaatttagctgcttttgttggaagaaaaatttagagaggaatttcatcggcaagtcaccacatgtgttgatagagtaaggtggtaggggtaccaaccaactctttgctcgttccctcaaggaaaatgggaataacccgagtctgatggcattatcactaaccccgttgatcttgaacgtctgataaagtttaacaaaaattagataaatgcatgtttgggtcttcagaaggtagtcttccaaattggacattagattgaaccatttgaataatggctggcttaatttcaaagatgctgacattgacagcgggtggtcttatacaagactgaacccctgtcataataggtagcatataatcccccagacttctggcaggtagattcttgccattagcttggtcttctactataccccattgctaccacaaggcgactaattatttagctcatgctgtttattcttcttcagatcgtcaatttaatggaaaatttgtcctggctgatcttcatgctattttgctagtgaattcacacttttgattaataatacaatgaactttcagtaaaaaaaaaagaagtttgtttcaaattgtaatagtaattaaattattatgagctttactattattttttgtttgtgttgacaaccagttacctttgtatatatatacttttaaaaataaataaatcacaaaaaatactaaatgtcagattatcattacagttaaagatactgtaattgactgaaaaagagcttgtttcaaattgtaatggtaatggagtaaggcaatggagaaggtggatcttctacttcaacaactccttcaagcatttgaacaaccttcctcatgttaggcctaagacatggattctcttgaatacaccacattgacaccttcacataactctccaacttcttcctatcatttaaagcatcaacttcataatcaacaagcatatctaatgacccttctgtgaagcaatcataagcccaatctgtcaagatctctttcccttcctcaccaatctccatgtcaacattttttctacaacaaacaatctcaagtagcacaactccaaagctatacacatcaactttcgaagtaatgggcatactcctaaaccattcaggtgcaacatacccttttgttcctctaatggctgtatttgtttggctttgattcatcatcaaaagcttagccaaaccgaaatctgatatcttggcattgttgtactcatcaagaagtatgttctgaggctttatatcgcaatggatgatctgtgtattgcactcctcatgtaaatacaatagtccttttgctatgtctaaagcgattccaactctgtgcttccaattcggttttaagtctccaaatgcaaattttgccaatgtcccattttgcaggtactcatacaccagcaaacgattctgtccatcattgcagtaaccaagtaaccgaacaagattcttgtgatgtgtttgagctattacatttacttcattcttgaactctttctcagtctcagctaccaaaaaatttagcttcttaactgctattacaatgacacttgaatccatatccaatatccctttataaacagttccgaaagctcctcttcccaactcatctctaaactcatttgtggctttctcaagctcttcataagtgaagctacgcaaattgaagtcaggtatgttttttggggatgaaatctttttatttctactactcttctttttgcgtatgaagaagaatcctacacaaactgtggctgccaacaccaaaaccgaagtacccaaaagagctgcaccaactctgatcaacttgtcttgtttttcctcttctcttcttctacataaggaattccatctaaggtgatattgtctttaagaattttgataaacgccctcgagttaagacttgcgtcgaacatgccattcgagagagggagcttcttcttccaacatgatccttctctaaagatagaaacagcacacaaacaatctttcaagcaagaatctttgcaatcctctccattaataggcctcaatgccacataagctgataagggccaatctacattgggaagctcctcaacatcatagagatcttctatgttgggattaagcttgtgagtaagctcgtcttcagcgcagccttgaatgaaatcgggtttgcagcttccatattcatcattgggatcaacaaaagagtacttttttgggcattgacatgttggtcttgaatcttcattgagagtacaaatactattgtgtccacaaacaccatcaccggacgggagaatagagtcgtggcatatgttttcgggtatggaccaaagaacagtccatttcccatccctattggatctcttgggaagataatatttagtgaaaacaccatcaaactcaagagtaactcttatatagttgtctgttgctgagactgagaccaagttctcactacctacatttaatcttcgattatttactctcaagagatatagattgcctgatcatgaaacatgtgtaaacaatatgttagtatttgtaatttttattgagtacttttgctttatcatttgatcatgttataatttaaatctcaattttatgaatgtacaactaaaaaactaacacactaaaattcaagatcttatggattgtgagtcgatatggcaaagcagacaatatgtgggactcaaacagaggagtaggaatgtctccaaagggtacatttcaaagtgggaaaaaggggatcactacaaaaaatattatttttagtgacaactttttagtcacatcaaaatgttacttgtgactaaaacatagtatttaattataagttgtcactaatttagttttagtcataacaaattgtaatttttgtgacgaatacttttagccacggatcttttaggcacaacataggaatcatgatttataaatagtcaccctaaaagtaagattttttgtagtggatactattcggcttcgggaagatatatggattgggaattctcctttgagtagtgtcttttcgaatctagttagaattccaacaaactcttttggaatttcaagtttagaaggaacaagttcctagtcttatagaattgttacaacggctggaacatgtaagaatgattagtgtggttgacgattgcagaatctggagacaagatcctataggtgttttttcttgtaaatcagccttgggatggtttacatcaaatctaagctatagagggctggagtggcataagatattgtggaaaagcaatgttccttcaaaagttaaaataattggatgtgttgtgtgatacgaaaacaatcaatgacttacgattcagtatacttgaccaacaaacacgcaacacaatcaaaaaataatataccagagatctcaagaatcaagtaatgaattaaggtagtaaaatagaaaagaataaaaccaagtttaacaagttcgaactatgtgcaatgctctacatctcggtcgggacagtagcagccatatctttattgatataaatgttatcaaaattataagaatcctcacaaactct

SEQ ID NO: 218686 - DNA, 3089 bp, Cannabis indica
ataaatcacttcaaatttcttatattgattactaatcagattgtaaagaattttatttagggcataaaacccaacatatagaacctcttatcttgcaacaagctttagcacatcccaaatggagggcagttatggatactgaatgagtagctctcgttagaaacaaaacttggactatggtttcttatgttgatggcatgactatggttcaaaacaagtgggtttacaaataaaaactcaatactgatggtactattaatagattcaagacacaattagtggtaaaagggtttcaacaaaccctagtattgactacttcgacaccttcagtccagtagtaaaagcttccaccattcagcttatgtttacttttgttgtgatctttggctgggaaattcagcaaatagattttgataatgcattcttgaatagtaaattgaaataaacagtttacatgtttcattcaaaaggctttgaagaccccatatatcccaatcatgtgtgtaaattgaggaaagcattgtatgaggttaaacaagctgcaagagcctggtatgacaagttgaagcaagcattattatcctaggatttttaaaatctctatctcagagaactccctcttcttcaaacataataaggggtcatctcatactagttctcgtgtatgtaaatgacatccttgtgactggtgctcaaccacaggatgtgcaccaagttatttctcatatccatagcaagtttccttgagaactgttggctaggttagttactttcttggttttgaagcccaccaaaatgattctaatattcacctctgtcaatccaaatatgatatggatattctacaaagaacaaatatgttgaaatccaattcttgtacaacccctatcagccttggtcacaaattgtacacttccaatagtgaaccatttgctaatcctactctttatagaagcaccattggttctctgcattatctcactctcacaaggccagacctatcctttgcagcaaataaactaagtcagttcatgcaatcaccaactgttgctcattggtacgccttaaaaagagtgttgagatacattaagggcacccttaatagaggtcttatcttcaaacctgcatcttttcttatccttgagggggttctcagatgttaattgggtgtgtgatattcaagataaaaaatctgtaactagttttttatgtcaagtttggcggcaatctaattttatggagttctcaaaaacaaagcgctgtatctcgctctagtattgaaagcgagtatatggccatttctacgactgctacagaagttgtgtggattacttctgtactacatgaactagaaatcaatttgttcaacaaacctgtaatctgttgtgataatcaaagtgctcaaatgctagcctctaattttgtctttcactcctaaacaaaacacattgaggttgatgttcactttgttagagaattagttttgcagagcaagattgatgtgtcctatattccaattgaggaacgaccagctgacatatttaccaaggctttaacttttctaaagtttaattttttgtacaacaagctttcattggaatacttcccgtacaacttgaaggggcatattgagaaaatgaatgatagctgtgactaaaacgattattagttagaggttgttacatgttagttgttagtctaagctgagttgaacttttggttgctagaatcttgtaagtattaaggtctatatatacacctttctcttgtatatgaaatatacaataataatacaaaagacctctattctcttcacgttattctctatttctctctgtaagaaattatttagtttttgctgtttgggatggaaacttgatttccatccctttgcttatatctaaaaaaataatacaaaattaaattaaattaaatattttcaactacaataattctataattaaaactataattatgtatataagattcaattaaagacatgtacaaatttaagccttatcccctaacttgtgtaatcttattcgtcatgggatgtcgatcttttgcaagcgtttgttgtgtattttcatgaatgagtcctcctttcatgcatggtagagtcgtagctctcttgattctattcagatggaggttacttttaaaattattgataaagtccctacaagtattaaatagattgttagagggttgcaacgaaatgaggtagagtttttgtgattttggcttcgccggtgttgtttagacgtaataagttagtccatgaggattatgatatgcccaatgttatggcggttgagtggtgagataattattggaacaattaccaacttgttaatgcttctcttggtccgtcttggaagcatgttcgtcacgatatcaatggcatctttcgctaactgatacaatgaagctaaatagcaatgcaacaatactgaagcttgagtttaaatttggattgggtgcaatgttcaaggactgaaatggagcgactttggtgtcggtgattcgttgtttggaagcttatctcgaacccgtgctggccaaggtgatctaatttggtttgtctatgactttggccatctgtttgggtttccaacaactaattacagagtcgaattgcctcacatccattactttgctaaagtgagtctaatttttcttttggttatttattaattataaatattgccatattatcacttatctttgtttatcttttatttctgcaaaaccaatagcatagctcatgcgcctattaatttggctcatataaaaaatgatgatactacaattttaaaaggttaattatgaggttttctcctaccaactttgacacgtatcaatttttgtcctatgttaaattttattaatgtgacgattattcatgtactaaagtgtgtcatttaaattttaacatgtactaaattgtattatttgaactttaatccacattagacatttattagtagacttgaaatgaaatttatacaataattcgaaattttttttgaactcagtgaaaaatttaaagaaataatttggtacgtgaaaattttagaaaaaaaaag

SEQ ID NO: 218687 - DNA, 5062 bp, Cannabis indica
atcggtgtatttcttttaaatgggtgcattatagaattttcatctaatttattaagtaaattaaagtgtacataattttcacagtgcatatttttttttaatatattcccacaccaaactaaaataatacacaatgttgattccaacgacaatccaaattctcatcaccattttatcaaaaacaaatctcattaccattgtctttcattaaatttactaactaaattaaagtagaaataattttcacaatacatattttatttaattatattaccataccaaactaaacataatatacaatcttcattccaacaacaatccaaatatttaatccattctcattaccattttatcagaaaaaaaatgtcattaccattattattccattatcccatataccaaatgccagcaaaacaacttaagagtgtataatccattagtctatcatttatagtggatttacaaaaaaaaaaaaaaagaaaaaatctttttacagtggtctcaagttggtgtattatattccattaaatcaaatgaattttaggagaaaaacaaaaagatgacattgtttaagaacactactagaactgaaaaatgaaatgagtcagtcacccatttgagttggtgaagaagtgtgtgtattatcttcaacagatatttcagtgatatcatccacagccaacactctctcaatcttctgacaagagtagtcattactaatcaacatctccttctccaaatgagcacaatatatctcaaaaaccccagagctaaccacaactccaaagtccagcaaaaacagcaactctacttccaatttgttcaattcagcattactaactccaccaaccctggcataaaatgcattgttgtagtgcctgcataaatgtatatatacatatattcaaaactcttcttaattataaaaaagaaaatatgaaagaagtatagataagtaagggaagaataagaagaagagttttaattagtaagtattacacatcatcaagcatcttagaggcaaccataatggtgtgacaagtaatctatgaacatttattgataccacaagtgagtcagggtacttgtgcagtagtctatctatataaacgtatcccactacaaagcatgatgggctgcaactcgagtacttgtataatctctccaagtacttggctatgcttatgcttggagctctcactccatggaaagctttcaagctttttccgttcaacccctccataacaagccggtcgtttcgagccactagcctttctagaacagaggacagaatggttagcacccttggtgtgatttcgtttggctccggccggctctggaaaccggtgcattctgcggcttctaacatttaggccattgtgatggtttttctggaattgggtgatttaagagtttttggttgggttggtttggtttggtttgggtggttaataaagtgagtttgcatatttgttgacctggtaatgttatctatccagtttaaagggtggtctgaactgggatttcgacacgtgtcctgctgagcacgtcaaatctatgtgaactttttaaaaggttgagattgggctattttactgaggatatatggggcattgtagagtgatcaggagccgtcggatttctaaaagatcaagatggattgtttcatacttaaaagacaatcagtaatgatatagtattacattgcagaagctagatacctcgtatatggtcttggacaacacatgatcattatgttttgtgttttaaaagtgaaagaagtactgtttctctgggtaatgaacttgaactttagacattggaaagagtcaaaagggtgaaacagttctttttcttccccaaagcctgtgaacaatgattaatacatgacaaaaaggaaaaaggaagaagaaaagcaatggagatgagcccgccatattttaaataggagatttgaataaagaggaaagctatgtttcattcatcatcaaagtttacagtcagtcatggccaattgggaaaacgactgcacgttgaggctattgttgtgttcacaaaatgaagcaatataatgtgttgtattattaggtaaataatgtaatcatggataaacctattctatttataaacaaaggaatgttttcaattgcttgtataaaaagccaattgggaaagaaaggaatcggtgaaactgttttggtcaaaaaatttaacatgaacttttgatatcattgttactaccaaaaagataatttgcccaacagcctatacattgtgattattagaggccagcagtttgtcttcctcagatggtaattcactcaaggagagctgggcatttgatttggagttcatcttgttccactcattctctacacggaagaaaacccactggaatcggcggaatatctccaaggctgtgatggtgaacaatgtaagatagttgtgccggagatgggcagacagcttgtatgtccatgtgcaacgcagtatcagattgcttgataacacccaaaagtaaacctgcaagtccataccaaaatataatcattcaacaaggtgaagtggcgctcttatagctcacagcttgaaagattctacattggacatggaatttatccttacccattttcgtccaaataacaagtttgacaagagactaggtctgctgaacttgaaaatccgagtgaagccactgtaaacaaaaagaaaagagatatttagacccacatacgatacaacatgttctatgtgtaaggatccaataataatcatattaataaataatttccctgtaaaagtgagaacaatgattctcacttaacaagcataaaagaaaataatcatggggatctaacaattgtataaaacgaagatgaagtaataggtttagtactaatttctttggtcaaaccataatgttttacttacctcaagtcccaatctcgggtcacatcccagtagaatgagtacagagagtttagaacacttgaaagaagccacagaggccgatagaaacttatccacttttcatgtaaaacatgatattttagggctgaaagaaagataactggtactgcagtcgagtattttaatgctgaaaatgcaagcaaagaaagtaattataaatttaaccctactccctgaataaaagagcaataataatcaaattgcaaaaaaagaaagaggcaaaacagaaacatttgatttcatcggagtgcttgcagagaagctattcacggaaacaaacccttctaattattcaaccaaaattttgcaggaattctttaatctataaaatatcataactaaagaagctttagttttagatatgaaaaaaattccatgttcatcatttgtttccctagtcacttgacaaggaaatgtgaaatggttgaacctgtaaggttcagaagttatttcaagtacccttgatcttacttggcatctaatacataatacctactatacctcatgtcatgagacaccatcaaaataatccattcaatacaatgtaatttataaggcacacatcaacagccagattttttaatgtttcagaatatatgaaaattatattagaaatggcaacattagaagtcatcgatcaatagagattaccattaagaagggttgttttctctccagtatccttgtattgtcgtaaacattggaagagacgaaaaaggtaaggcaaaacaagaactattggaattgcaacagagtggctgccgcaaacagagtcagcttcaaaccatgcaatggtagcaacctgcaaatcaaacatacatcttaaacaatacgaaaaggaagatcaaatctacatcttaaacaatacaaaaagaatgattaaatctgaaagcaacaaacatgtttaaatgatatacggataaacccaatatatcttaagcatgctttgaaactctagttaataggtcttatgcagcaagtcatgattcctccgaaaaaggatctctcctattacagaatcatcctatcatcgtcttgcaatttcctttctctaaaatacctaatataggtaagagggtgaagaataaacatattagcaggccgtatcctagctgaatttgatctcacacaccattgaattcttggatggcatggcacaatcttcaaacatcactacgtagcacacaaacctttccttttagagaaagaggaactaccagaaaacttctgattatttattatctaaattggattcctagtcaatctgtcaatgtttttacacatgctttccatttaatattgccattccactcagttaaatttataaacaatttcgtaagacagtcaatcagtttatctcaaacaataaatatacaagtttgtattcttttgtcaagcaaacagcatgacaatgtaaaaccctaaagaaaaagtcaagctgatttggatcagaaaccagaaagagtatatgatactgtaaacttaagaagaaacagatcaataaatattaaactaaagttcaactgttgaaattactaacctgtcgatggaccatacgacaagctgatctctccaaatccgacaatacctgcataaaaaataaattaaaataatataggcacataaaatttcatcttatccctttaaaatagagaaaaaaaaaggatgtacttagctacttcgaaagtttaacaacacatgtcctatgcttgcttaaaacacatataacaggttccaaaaacatctagatctttgttttcctctgcaatactaaaattaaattgttcaaggaaggaaaccactcaaaaatggtaagtagatattaagaacctaccttagacatggaagtcaaaatatcagccacaaaaaaatcagaaaaagtgattgcctgcatacacaaaatagatagaaactttatggcaacatatcaaacacaaaacttaaggaaattataaagctgaatggttcaactaaaaaacttagcctgtagaggaagaactatacggtaaagagtcctcaacaaatagaagcgagttgacaaataaaaaataatacaaggaaacgaccaacacgcaacgcaatagcagcatat

SEQ ID NO: 218688 - DNA, 2325 bp, Cannabis indica
taagagccattcattccgtgggtgtaaggacccaatggaggcttgaagtggggacatttcactataattggggaagcaattaaaaaaatatcttagaatatatatatcttcacttagcgtgtacttctggtcggcaaatgccggcactgcttgacctacatgtctattcggcatgccatgagctttggggcctattcggataatagttgctaaaggatcaggctttaatcaattcgacttagaatcgatctggatgatacaataaagatatgctccgcctaggtccaaatatgtgtgacatgtgttattttgctaagtgccacgccacctgtgctaaatttaggataagaatatgtacagccattaacacagaattaataagaacacatcgacctacataagataagttatttgtgctccatattcacattctagccaccattttttcaattatgctatcacattctacttttgatatctttttggagcataaggtaatgccaagatatttaaaaggcatggaacttaaagcaaaaccagaacaataagaatagcttggactttagaattagacacacttgcacaataaataatagtcttgctttgattggcctctaaaccttaagtattagaaaagagcttgaaggttcagagcaggagcttaacagaaaaaagatcacctctactgaataagaacacatcaccgacaaagcaaagaagtattaatttcaattctttgcactgaggatgaaatttgaaagtaggtcttgtagcaacttaattccttcaataatctagataaatattccattctgagaactaaagggaggggagacattgggtttccttgtctcaacttattttggaattgaagaaatcattcgcaactccatttatcataatggagaattttggtgttgtcacacatttcataatcaacttaatgaacttttccagaaaagcataggcatgcaacaactcatttataaaatcccattctagaatattgtaagccttctttaattccatcttaattttgcaagatggaatggtattcttgcgaccatagttcttgaccatgtcttgatagcccataatattatgggcgaagtatctaccatgcacaaatcccccatgattttgagcaataatagttggaaggatattcttcaatctcccataaatcacatttgttactgttttatacacaacattgctacgcgcaatcaactgtagtcactaacttgacttggacacttgctcttaggaatgagagtgagtgtggttgcattaattttcttaagaagcttgcctgaattaagcaccaaaatgatagctttggtgaaatcctccccaataatgtcctaaggatgcacaaagaaataatttttgaaaccattagggtatggggctttggattcaggaatagaaaataatgcctctttaacctcctctttagtatatgctgaattgaacactctggtttgttcttcagtaatacaaggatcatttttgactatttccctcaacacatgccttctattttccgttttggatcccaagaggttgttgtaaaaataaataaaagcatcctttacctcaactggattatccacccaaattccttatgcattagtaataataatggcactacattttggtttcttctagttcttaagctaatgtggaatatcttagaattagaatcaccatcctttatccaatcattcttagtttttttgtctaaagaatgatagataagtcttgtgcaccctctaataatttcttcttgtctgactttcaacatcaattaagtctaagtttgcggggttcttgttagcagcccctcactacaagaaatgtcacttttaacaacaaaagtccccaacgccactggtaaaagtaacttttaccagcgtcatttcgcaaactgcactggcaaagagatcaaagttttactaacatacatttgcagtggctaaaatctaacttttaccagcacatttacgcgctgggaaaagtcttttttgccagcgcttttcattttatgctggaaaaagttctaataccaacattgatttgccaaccccctttcgaaaaacatcatgggtaaattctattttaccagcgcaataccaacttttgccaacacaaaaatgtgctagcaaaagtgacatttcttatagccttgagcttcatataaagcaattaaagcctttttctcttgtactccaacatcctcgaaactttccttattaagaatccttaaagcaaatgtaactctgcaaagtttagaatagattttatacattctagtaccttgaa

SEQ ID NO: 218689 - DNA, 3783 bp, Cannabis indica
tctgtccctttcatccaatctctcgagccgtaatttgtgttgaaattttctgtacgagaccatgaatgtggggttgtttttctggctctttctcttgagtggcttcaccgtgagtcttgccaatgtagtcctgcttgggaagaatgtcacactttctttcggggacattgaagccaatttcgctcctgcaataaagggttctggggaatgtggaattatgtatttggctgagcctctaaatgcctgctcacccttgagtaatcaacttcaatccattaacaatagctcttctccatttgtgctgatcattagaggaggctgcagttttgagaataaagttcgaacagctcaaaaagcaggattcaaagctgcaatcatctatgacaatgaagatggtggagtcttagttgctatggctggaaattcagctggtataaaagtccatgctgtctttatttcgaaagcttctggtgagaaactagagagatatgctggtaatacagatatagagttgtgtctaatcccaagttttgagaattcagcatggtcagttatggcaatatccttcatttctttgctagcaatgtctgctgtcctggctacatgtttctttgttcgcaagcatcgaatacgaagagaacgacctcgagcttctcgtgtcagagaatttcatgggatgagtagtcgtttggtgaaagcaatgccaagtttgatatttactgttgtttcagaagataattgtacttcagcaacatgtgccatttgtcttgaagactacagtgttggagagaagctgaggattctgccatgtcgtcacaaatttcatgcgttttgtgtggattcctggcttacaacatggaggactttttgcccagtttgcaaacgtgatgcaagaactagcacaagcaatccaccagcttcggaatctacgccgctgctttcatccagccatgtttctttagcttcctcatctgtactgtcgtcaatgagatcatcttttgcatcctcctctgccatacaaattggctcgtcgtcgatatcgcgttccccttctctttctcgtcctcactctctcgcaagcacttcctattcttctcagcaccctcttaggccctaccaccaatccccctccttaagcagaggctcaatggatctccagaatgcatcttcccaaagatctcatgcttatttgatttcaagccactccttgggttttccatcgttatcatcccttaactcaagatacctgtcttcacacattccaagccccagcaatgcctcgccagcgtcaccgccttttgtgagatcttctacttatcaacagaatttgttgcactgcagcgattctgctgcaagtttctcctcattcacttctgcacaatccctacctgattgttgaattaaaccttcttcttgataagtaatgcaggtcaagttcataaaaataagtgtgcaaacgtttgcaaatttccggggaaaggtacttgacaaaaaggtgagaaggcagctaccaagtcacttgtgctccatagtccataccacattatcagcccctatttgcatatggttgagttacatctaattcactggctggttaacggtgcgtatgttaaaactctagtgtcacattcggtaattaattctggtttaaaagacagttctggttcttatatcagaaacataacaaagaaaatctctgaatgtaacgcaatccattggttttgttaatatttatgtttcgatcgtgtattttcttttctttctttttaaatggcacatagcacattaatcacagtgtagtaagtaattcaatacaacgtaataagaagaatatattaagctaaatcaccatagcgaatttacaataattatataacttgattattggtgcagtgcattatgctatatggaaacattgtgcaacttgacagagtgctacatcactaataatctaacaattacatcaaaaacaaaatataaaagctctaccaaagatttacaattgaacccgtgaaacaccactcacttgttctgcttcgctgaaacagcagtcctttgaacagtagacacaccgtccacaaattttgtccgaaagagaacattagcattattgaacatgccttctttcaatgaaactacgatgaactgcaatttttgtttttgaaaaaagaaaattagtaaaacgtgcaagtcattctattattattaggcatggcatcttacacttcagttctgtttagcctaagagtttttaatgcaacagattgaataatatgaatgatgtttaggcttagacttgcaaattcaaataagaattttaacagattgaggtcaatttaatcttgtgactgaatcacacaactaaattgaacattaaattgatactgagtaactaaggaaactcagggcaaatgacaacagcgcaaaaccaggtgagagactctgcaaacctgagagtgtgggaaatgagctttgatcattctccctatgttctgtgtgtggcttagatcaagagcagcatcaacctgtcaaaaacagaaaactagtataatacgtacccaaaacaattttttgagataaacctgtgtagaaactagagtagtgttcttatggacattctctactctgctaataactttttttttgaaactaggctccccgcctaatcctataatatttggggaccaaaaaactatagtaattgccatgtaggtacccaaaagggactcagacctcagactttgtgggagcaaaccacatgcctgaccatttgagctacccctcttaggttacactgctagtaactttgtcacaacagataataacttttaaagaaaaagctaaccatacctcatcgagaatataaagtggagctggtttgaaaagaagcaatgccaatattagagagagcgcaagtagagatcgttgacctccactcagttctgataaggactgtttccagactccaccaaatgcaacacgtacctcaaggccatcaagaaatgtgccaccctcaggaggctctagctttgccatggtgccaggcaaaagggtagagaaaattgatccaaagtcactgaattgaatgttaaatggagtgagtgataaacaacgcaaatagaaagtgcaaaacaactattatatagtttcagatcaaattattattgaaaatactcacgtgttaactttgacccaggtaactttcagtgtttccttctttttctcatctagttcttcaatcaccttctttattttagatttgtcattctaggcaagaaagcttagataagtaacgtgaaatcagtataaaagctactgaaaactcgaaagataaaaccaccaacctcaataatgtttttctttgacattaagtcattgtactcatcttctgctttctcaaacattgccattacttttttgttgatccttttctcaagcctacacaagaaagaaagtcacctcttgccgtcattaaagacattattaacagtatccatgtaaagttgagtatgagatctcaatctaaacatcaggttcacaggagggaaagaacgaaaaagagagacaaaccctgattgctcagcctgaagtttctcaagttcttcccttgctttataaggatcacgagatgcaaaatcataatcagtcccattttttccaaataactgcttctcagaagcaatccatgcatgcttctcaatcaatctgtccacctttgtagagcaatctttttgttccatctccattcgctttacctaagacaagtttcaaaataaatttaat

SEQ ID NO: 218690 - DNA, 2689 bp, Cannabis indica
aacaaatcgttcaaataattatactattttaattattaattaaaataaaaaactaaaatattaaataaaactaacactacgtgacttggcacgtaacaatcacctagtatatataaatgtgtgtgagaagtgtgagaatcattaacttattacctaatttctactatatatatcacttgtatattatggtgacctaagagcatctcaaatggtgttttttatttttatccaaattaactttagctaaacagttaaaaagttaaaatagagagttacttttattattcttgctccaaactatgcttgttactttagttagcatttaattattttaataatattttataacttaaattttatgaattaatttattacaataataaaaaaaatgtaatagtatttttattttagtaatattaaaaaaaatagcaaaaaagtagaaagttttttatccattctttattatagagaaccattatttatgttttttttttcaagtgtttatatatacatacattgcacaatttgagactccaacccaaattccccctcacacaccctctcatgccccccctcaaataatttttaaattttaggagtacaacatgaagacttcctaggatgtcactcatcttatagtactactttcccttaagtatgtttaactgccgagttctaatcaggaccgaccctaaggatatgctaactaggcgtgcgtctcgggccctaaaattgtgaaaaaaaaattattcatatataaataaaatattaaataagaaaaaagtataataatattatttggtgtatactttaagccaaaaagctaaaaatcaatttctgatccctactttttttaaaaaatatttatgtatatatataaatatatttaatgagattcagtacattagtactgatatattgcactcaactaatttttatggttggaacttaatttttaagacttattctctatttcaattaaagagtgttgaaaaaacgtgattaaagatagagagcagtattaaattccatttcaattaaagagtgttgtgattgaagatagagagcagtattaaattattggttgtaaatgcatgtgggctagagtagactttgtgacgcaggagcttattatgaggcacgtaaacatacaccatatcatgaaaaagagaaatgctaaagggcaccagtattgtcaatattactattgattcaattaagtatcgagtctcatataatttaatataatagtttttaaaaagtatcgctagccaatcgcaacgtaacatgtcgagaaggtgctagacaccactaataactaatagcaatggtgcatgcaaaatatatgatgtgaattattgactattcttattaattacacattattatctgatgccaataaatactattctcctatttgatgtcttcgccaataattaaattaaaatatataaaaaccatttttaattgtaaaatatttcacacaacaccaattttgaccaacaaactcataacaacaagttcaaaagcaagcatcacgtgtaatttaagcgcaaatgcttctaatttggcaaaactctatataatttttagttatatataaagtaagataataacaaaactatgagataacttctgtcaaggaaaaaaaattggagatgattaatttattttagaagtatttgaagtataaatatttaatattttatctttatacattaatcgtattatttattttgtttcaacagtctaaatagtacttatgacattatttctaatgtcaccactttgttatagtaacacttgtcaccttgttattggaccacatcatacctttattaataaaaataactcattttaaaaataagaaaagtaacttaccatatcaacatgacaccaatttagataaaaaaaaataataataatatgtcactacataatttacctagtaatttttaatgtttttttaatttaaaatgtgtaagagtctatattaaaaaatgtactaataataatacacttatttttttaatcgtgctgtcagtataagtgtcattatttttaataagacaatacttataattagtaaaagcacacacattattttaaaatatattttttttttattttccttcttatttacgtatttaataatttttcatacaaaaattaatctaatgattaataatttcaaaaattacttactaaagtctcacatgctactttttaaataacattttaatgggctggtttgataaagtaatttttttttttaaaaaaaaggtaagtatatgccacttgaccgtaccaaatatagacaataatattaataaaatgactttaaaaatattaaccacattgtccatgacaaaaatcactttatgggcaaatctatcatttttttttttttttgaaaaggacaaatctatcatcttaaaatataatattttatttttctttcatttacattattttttgttaccttattattaaaaaaaaaatacttcaatgctaaataactcttaaaaaattaaaagtgtcctacagcttttaatatatatttattttaaattcttactttttttattttaattttaattttaattttttaaaaaattaagtaaaaaaaatagagagatgtaccgtaataataaatgcgactaaaatctctgtaatgcaatatagctat

SEQ ID NO: 218691 - DNA, 1811 bp, Cannabis indica
tttttttaataaaaaaaattgtacaaatagacctaaataattataacacatatacatcattattatgaatgaaaaaaagataaactattgaaacatattataagggcaactattttaagggcaccctattaatgtatacgtggaaaagataattataaaaatgcaagaaggatataaattgatataaaacgtataaattttatcataatattggacagtgatatgggaatcaacggtgtttgaaatgggcacgcacaagatttttcaaaagtgataataatatattcctcaatttggttttggcttttctggaccacccaaaagtcactgacaaagatttgagctaagataagcttatacattttggctctaataagcaccacttactcagtactcactcaatatatttaagaattatctttaaattgggcacaatgcaaatacacattgctttcactatccttatttcttacaaatattttcacaccctatgattaatgatgaatattccttgggctggaagtatgtatttattttcttattctatgtacatgaatccccgatttttaattttgtgtggctaatatgaaagttgtaatttataataaatgtgtaacataaatatggaggagtggcgtaattaaaagggtttgtctaagtggggtaataattatagtcacaagggtattaaagatcatcatcatcatcatcatcatcatcattatatatatacatgtatatattacataattttataagagcgatattttagtccaaatggtaaggccgtttacgtagagaaatatcaacctaactcatgcttcttgaatcatttcgtacgttgggatttaaaacctatataaattgtatattaaatgaagtaatgaaacttacttcaaagtgatctctagatctctctcgatcttatatatatatattaacaaacacatgcacatacatataaatttaacccaacccacaagccatgcacttactaaaaccagaggattttgagagagacaaatgcagaagatgttgcttaacgcatttgctatagtctctatagggacccctcgtaactggtggtcatcgaatgaacccaccaccaccaccctctgcacgtgactccttgcccaaccttgagtatggttcaagccaattttatttgcttattaactctgcatatagtacaatatttgctatcatatcactaatcgtttttatatatatgcatattaatatttaactcaaaaataaattaacaaaaaaactcatcacattatatcgatgtttgtattttgtgaatatttttggacactagtgtgtacaaatgctgtgacagcagcagtactatctatgatatataattatgtaagaaaaagtggtaacgaaatttaattcaaagaagtggactggtcgggctataatcaattcgtatagggctaagctcagatttctatatcgaacattttattaaatatacgatcgaggactctttttatccatcggaaataagtgaattgtttaaataaactgatgtgtataaacttgtaataatctcagctttttccatatgtgaggcagcaaaaccctgtccaaatttcacgctgaaatatttatttatgtttatatgtatatctgtattcgaattatgttattttggctcgaacaataatccaaaaatgttaggctacctattgatgttacgactcatgatcatttatataagatcccacttttcatcgcacgtgactggatattccattcgatcgataagggtttgaccaacccgaagaccgtatgatacaaat

SEQ ID NO: 218692 - DNA, 3434 bp, Cannabis indica
aacaacagtagaacactagtaaaacactagtaaaacaccagtgaaaacttaacacagtatactgcagtatgaaacttataaaaaaacacagtaaaaaagtaaaaaatttcgcctggcagtatttttgtaaaaaaatgacaaaagttagtaaccatgtaaatttcccatttttaaaagaccaactttaagcctaatgagagcccaacagtcaaggcccaaccggcccttttcctcttctccaccggacagtcacaaaacgtggcaggcccccatccgggatcactttttcaaattatgggtttttaccatgataaatttaccttgttataataattttagttcttttctttatattttcgtaagaaactgtttgagtatatatggttacttattatataggtatctttcggtctaacagaatattatagatgatagggaagttatatttacaccccttaccccttaaaattataagggagattatatttgtaccctcaaaaattataactacactttattattaaattgaccctaattaagtattattttttataaccctaccccactctatttatcaaaagggtattattttatacatcccaaaacttctcatttaagtttttattttattttattttatttggaaaaaaccgtcaaagaataccattaaattttctacgttcaccaaattgtccctcagcattcaccaaatccatgatttttcattgtacgattaatataaaagcacatttgtatataaattggtgtatcaaataaagacatgcatatccattccacatcacaaaataatgtcaaaaacaaaaataaatcccataaagcactgtttacaagagtatatataataaatttctttttcttttcattcctccattgataaaatcttaaatttttgaaaggataacaaatagttttttttagaagttgcggggtgcacttattaaaaaataaaataataagtcaaaaaaaaattaaagatatctattttggtcattttataataggtcaaatatgtaattaaatttttacggtatagttatgttttaagagtgtagttatgatcagacgacgctacagtaagatgactaacaatagcatttggtcaagcgagtgaccggtctacccgtcttatgtctcggagtagaagcatccgatgagcgtggagagaatttgcagtcttcatttattgtagtaggaagcttctcgctatcgttctccaaaattgaacgtaggacttactttttggagtttatggacagttttatttgggcctccgaacttggaactagatcagaattcttccctggttttggttcaaaaaatataccatcaagtgtcttcctttttttgggctcaaagtcatgttccaaagatctgaaatcttcaatacccaataaaggattaaaaagagaaggcacacgcataaacttattaacggtacccaggcccgagagtgttttaaagcccatagtccaaagatcatttgagagccatgggatgatttgggcctggctgccaactaggggagaataagacccatggcccacttttgaaagagaccggcccacctcctttgactcgtagggaggggagccatctttctcagaaaggttatgcacagtcttcttggtagactcatcagtagtggtcttcatgcaaagagaaggtgtaggtacgtttttatgtaccatcgagttattttgtgtacattcagtattcgacaacatgcttggagaggtatccatttcactcttgtctactagtgcctctaaagggggtatgaattcaggagctttaggaaccaccaggtttgcagtatcctcaaatggacaaacatcaccaacaccgggtagggtaaccatcagaaattgacaaaccctttcttgctcagtagccgctagctatgtaattatcccaaaatttaataattacattttaataataactttatttttataagaattatattttcatagtaattgtatatatttaaaaaataataatctatcatcattaattttatatatgctagaatataactttacgactaatataacgctaaatttatatattttagaaaaacttttaataacgtatttgtatctaatttataataataatgttactattataattgacatatcacattaattaaatttgacgtgacctcaagtttaatgccttaattttttttttctttttttttagggtaaatataattttgaaccctacatttgataaaagttactaaatggactatctgttttgttaaatgacaaaatggatcttgtcttttctaaaattgtatagatccctgaagtgattttttgtcaaaataaaacttaataataatctgatctagagatgatatgagaaagttggttacattttctgtatctgttcttattagaaattgtcttaaagtttgttatattaaaaaataaaattgttaaaatttgagctcacggtcctatttttaccattttagaaaatatagggtctattttgtcatttaacaaaacagaaggtccagttgctaacttttacaaaacacacggtccaaaatggtatttatactatttttttaaaaaaaaatcttgtgttattaaaagaaatttttcggttactaataatgttgataagcaactaattagttacttttacataattttcttttatttttttatcataaaagttgagatacattttggttacttccaaaatttatttgtatgcatcttagtaagtaattatttatttttaaattatattatggtagcttataatttaaaatacatttgggtaaccttaaaaattattttttaaactaataagttgtcgtgtaatataacaagctactatttttcatatatcaattattttatatacatttttaatactttgaaagctaattagttatcgtataataaaatataattcaattaacaaaattctaaaataaatgttaactaatcttaaaaaattataaaacaatcactgtactagtaattaaataattttttttcccgaaaaaaaaaattcactactaaaaaattgggctttaaaggtaatttttaaggggttttagcatcagttttggcgaaatttgctaccgacgctgttctaggtgacgatgtagggctcataacaactgacgccaaagggtccctatggcgtcacttatatagggtcttggtattttcgagctttacaatttcatgttttagcataatttatacatatgtattattttattattaatataattaaattaattataaattatatataataagcataagtaaaaattaaattgaaaggttaaataaatgcacatttatattaatctaagtgattgtatattagttatctttttattaatattttatattttacattatgtgtttgtatttttg

SEQ ID NO: 218693 - DNA, 8628 bp, Cannabis indica
ctactttccacttttgcaaattgatcagatggtcgacacaaccttggggtatgaaatcttaagcttcatggatgcatacttcagttacaatcaaatcaaaatgcatgcggttgaccaaaggcatacaagctttcaaattgacaaaggaatctgttgctacaaggtcatgccctttggataaaagaatgttagaactacctaccagtgaatggttaacaaaatgttcaagaatgtactgaagaagaacatggaagtttatgtcgatgacatgctggtgaaatcttcaacttccatgagccatcacaaagatttagaatagtctatttcaattatctagaagaatggaatgaaactaagcctaaagaaatgctctttcagagtttctttagggaacttcttaggtttcatacttagttctcgaggcattgaggcaaacccagagaagatcaaagaccttctagacatgccttcacctagaaaacacaaagaatgtttaacagttagctagaaggattaaagcacttagaacatttgtttccaaatctacaaataagtgcatacctttcttcaatgtactttgaggaaataacaaatttgaatggacaactgagtgcaaagaggccttctagcaactcaaagcacacctaacaaaggttcgaatattgtccaagccaattgatcagggagagtcattgtgcctgtacctagaagtttcagatcatgctataagtgtcaccttagtagagaagaagaaaaggtacaacttccagtttattacatgagcaaaagattgttgggcgcggagtccagatatcctatgattgaaaagcttttctttcgcttactaattgctttatagaagttaagaccatactttcaagctcatgctatcaggatattgaccaaccaccctctctgtcaagtattgcaaaagccagagtcgtcaggaagacttttaaagtgggcaatggagccaagaaaatttgacatatacagtatcaaccaagaatttcaattaaaggtcaagtcgtagcgaattttattatggaatgcacatggataaatgacgaacttgacacaccaatttaggagctagaagtctagaaaatatatgtagatgaagcatgaaatggaaaaggttttggagccaaaattattgtaatttatccacaaaaacttcaactccaaagtgcacttcaatttgaattcaaagcttccaacaatgaagctgaacatgaagttatgattgatggcttacagttggctaaaaaggttggtgccaagaaaattgagctgtacagtgattctctgctggttgtcaatcaactgtctagagagtaccagacgaaaagagagaagatggctagttacgtagcaaaaactagagagctattttaaaattttaagcactattctgtgaaacaaatccccaaggataaaaattcctttgtagacatgctagctgaatttgaaacagaaccagaagtggagagatacggactagttcccattgcatacctacttactacaagaacggagacactgggggtgttagcaattgatcactcaacttcttgggtggccccaatacttaagtatctagaatcaggaacactctcggaagacagaaccgcttcacaaaagatccattctcaagcccccgaatatgtaatcatggatggaaagctatatagaagaggattattgattccatacttaaggtgcattgctggaattgagataagcactattttgcataaaatacatgaaggattttataaagatcacacatctggaccaagtctttccaagaaaatcattcgccaaggatatttttggccaaccatgaagaaggattacactgaatatgtttgtaaatgtgaacaattctagtgttattccaaaattctaagagctcagccaacaaagataatcctcatgaacagtccttggccctttgctgtttaggtaatagatttagtgggatcatttctaattgggaaaggagtcaaattcgccattgtagttattgaatacttcattaaatgggaggaagccgaacccgtgaatatattaacttctgaaaagggcttggactttgtaatcaagagcattatgtgcagatatggacttccacacaaaatagtgttcgataagggaaagcagtttgatagtgatcaattcaccaacttttgtgtcaagcacggaatcatcaaaagtttttcacttgtggccagaccttaagaaaatggacaagtagaagctgtaaatatgattttgaagacaaccttgaaaaagaagcttcaagcttgcaaagcacaatggccagaagaacttacaagagttctttgggcctacagaacaaccaaaagaacttcaacaggctacactccatactctatgacatatagatacgaagcagtaatcctagttgattccatagtgcattcacataggagagaaacttacgaccctactcgaaaccatgctttacttcaagaatctttggatctaattgaagaactttgagagcagtctcaagtccaactccagatgtacaaaaacaagatcgccaaaaattttaattccaaagtcaaaagtagaagattttaaattggtgatctagttttgagaagggtatttccagcctctcaggagccaggagtgggggtcttaggaccaaactgggaaggtccatatgtagttcaaggtcaaattggttatggcacctatcacttgagaaggctagatggaacataaattccaagagcatggaatgttgaccacctacactgatactatcaatagactgggggtggccagcttccttttacatttttttttatgttcaatttccatgtacgcctcaaggcaggaaccatttgaataaagaaggaatttttcatttcattttctgcttttcaaagttttatcttaaaacaagtgatcaaaagcctaaactcttaatcacttaggggtagtatacattatatcattatagcgttatacctcttccataaaacataactaaatttgctataagtataaaagtaggaagtatcacctaaaactggagctccaagaaaccggaggtaagccgttgccttattatacttaaacattaatttagcataattcatattaaatcaggttaacttgacttggaattttaggcttcgtaattaacttgtgtttatataacttagaagttcaggcttcgtaattaactcaggttaatttaacttagaagtttaggcttcataattaactcaagttaatttaacttagtcgttcaggtttcctaaataattaattaattcgggttaactaagtatttaagtttaaaaagtcctggaattaactaacacttactaaaaatatttgattcttgagtaattaattaactcatattaattaaatatttaagtttcaaaattctaaagtaaagaatacttattgttgacctcaaaaagtgatcaaccgatagcgggatcatatgcatctgatgcttacaacttgttaaacaaatagaacaaaaaaatagtaaacacacagatttgttatagaggttcggccacctgtgatagtgtgtaaggacctacttctcttttagttgtattaatactgagggtttatacaatccatatcactataaataggatctactatagcaccttgaatgatacaatgtatgaatcaagaatgacaaatctcaagtgatagtgcttgtatgggcgtgtgagagaagaagtgaataagagataagttatcaaacttagacttagagtttggaggcaagtattaggcttaacttagcttaggttttctaggttagagttaaggcctttatataagaagcctaaacactagattacaacttgaaaccctagatatttgaatattatattagttaattacaaaatacccaaatacccttgaacttggatattatttagctatctcattgggcttttagggctcaatttgtagtctaaaggttgttatccacgtgtagaagtacacatgaaaccctccaaaacacctcttgcccagcatgcccttgtggacgataagttggccagccatggtgcaatcccaagactggctggccatagggccggccagtacttgtgagggagctagtctgtcacttgatgcttgtttgagtgttggtgtctccatttgcttaggtgctgacttggccttgttattggtgagttgtactgtcatatggcactaattttgtccatgtaagcatgccacgtcaggaggtcaaaaattaggataatatttgcccctaagtccctgtgtggatgtatgtactgatagggactttactagctatgtaagtgcggtcaggactattttagcctttgctgaataaaagttgatgcctttttagccttttgaaatactttgtcttgactgtttgatctcattgctgtagaaaaataactgctttagttgtcttcttaatgtgtacgtgaagtaagtgaagaaatggtcacacatgtactacataagagctttttggagggaaaacctttttcacttctcactttttacttttcactttctctcactataaatttgcattagaaaaagcttctccttatctctagagtgccaaacccacaagcgtcatcttcctaggatttttgcatcgttttgacggtccgagcttcccaccttcttccccattgacatcttatagtgggtaagctttctattctcactatttcacatgatttggttgatttttccatggatgcatgaacattattcctttcttggaacatgctttaattcttacattagattgttatccttttggtattttgatctacatgatagccttaggatacataatttgtgattcctagatgaaaaagatctaaatctgaccttctttgtgattcttagctctttgagtcacggagaacacgaagaacaagtttgagttcttgaaaaaatatgagttctaatccacgcagatattggtcaaccaaggaggccttatttgaggcctggctggccaagggaggctatcaaggggtctggtcagccaagggattgtaccccctaggctggctggcctatgcctagaattagggttcctggccagccactagactagatcttagggtctggctggccactaaggcttggaaccctggctagccaaggccaaggctccaagtgggcagctagttttctccctcttttgacctcggttaggatctcacgacggccttggaggaatatacaactgtggccttatgcgtggtttctcttggaaactctatataaggctaggtagtgagtccattatagtcaattatacaacttaaaacttactacatgtcttagtaagtgcacttaagacagtacttagtcgatgatagaccttgtacattgtgctttacctagaagatatcattgattattgttgattagaatatgtttgaagctttgtcaggtttctcatctacccttattccttccatgcaggtcacactgggtattgaataggagaggtggtggttgtgctagttttatgtgattatggccagcacaaagcagactggtcatagagtgcctatgtgtgacccttaggttgctcaagcagccacaagaggtcgagtcaagatcgttgaggaaacttctcaaccctgagttaatgttggtccagaggtagattagggggctgagagtcccaatgcagagtccaaccttgaggaggttgtactagtgaggagggggaggtacataacttgttttttcctcccaaaatgtccattgggtcattatgacaccaatggtaagccgctaaataggcttggtgagccttcagagctttgattggaccatgtcttagaatagtcttttgaatcgaagatactagatacgagatcatagggagacagttgggtctctcttgcttctactcttttcgatgaggcctttagcaagattcttggtcgtgtcttagtgaggggtctccattatgagataaaccatagaagttattgggcgcatgcctccctttagatttgtcggcgtggtcagggcaccaccttaagaatggggcagtgctatcgcttcaccaatatttcctggacattactgcatactttgggatgtgtttgacacaactcatgccaaaaagcattaagtatctctcggcgatgtttgccttataaagggagctaggctggtctcagcgtactccctatgagatcggatactactttgatttgaagttagccccaaagcagaatagaactaggtatttttacttcagttagatcagtcaccaatggttgggtgacactaattgcgcacccatgtcaaaggtcagtggatacgccaagaagtactttatcgcctatggtctccatgggatcgggagtatgaattctggtcggtgccattctttcgatgctctatccctactttgcaatttacggataaagccaaccacatcctatctctctcgcaaagcagagaaatttaatccagttgaccagtgtggccaatttttggaagtatggtttatatcctcatgctctcgaagttgcaggagtctcggttattggaaagggtgacttagatgatgagttgcctttatctcgcatagggcaaaatctagagaggaaggagagggctctagcaggggttcagttggtgacacttctctctggatcaggcctacaggccaagcttctgcgggacctactcgccccatgcctacatctagaggcaagggcaaggcggttgtcgaggactctgatagtccctctttgatgatgatggtatttgataagtgataacaccatatttttgtcttgcattgaatgtttatgctttctttttgactttgctacttttttttgcaatatgtcttccaagatgagaggtcttatcggggacctttagatgagcctgcaggacgagtgagggccaaggtggcctgtacttcttgcagtagggacactactcggttgtcactgcctcctcctcctcctccagggctcgcacctgctaagtagcatgtgatatgggccacaggccacggtgtacaaaggctcaatagaggagcagggttggctgcaggggaaagggctattgaggcatcccatagacagattgagagagctcttccctttatggatggggagctaaaggagcttggtgatggtgatacatacaggctctagctctactctactggcctttaggacatttccctggtaagttgtacttttagcttcgttcattttctggcaatgtataagctggcggccatggggattattgcatgtgcttggttggcattagatgttcgtatgaggggctagccagccatagcagtcccaaagaagagatggctgaccattgctatagttttgacactgatcttatcttcttttgttttcagggctttatgaagctgagtttagtatgtgatagctcctgggggtccttggatgccctttgagagcaggtgaagaacctagaggcctcccttactgagagacagaatatgatttctggtcaagagaccatgctcggtgccaggaacaaggagaataccacccaagctgccattatctctagattgtagtctgaccttgctgagaataagaagaaactgaaagtgactatagagggccagtaggccatcaaggaggagtatgttaagttcaagctgcataatctcaaggccaaactatcatacatgggaaataagtcttttgtggagcttacattggcacgaggaagagtgctctttgagagtcagtcggaagcggataagctttcttcctatcaagacgggtctttatcaggagatcatgacgaggagctggctagcacacctactgagggggtggtcgggcaggatattggtcactaggccggccagcatgctgatgctgagaccggtccagactttggcaatcccgatctcgcaacttcagactcggctccacctgtccctgcataatttttaaatatatctctatcatatccacatattaaagcatacttagccatagcattcttagacatcatatttttatcattttcatcatatgcatcatatttctttatagtttccacaccatctacaacatgcataggaatgtaaggaccataacatacaatatgccataaatcaaagtcaacggattgaaataagtttctattctaattttccaataaggaaagtctaccccatcaaagaatggtgctctactagtgcttaaatcttctagcatcttattgtgtgaattgcttggaaacgacatactcttagattgtgaaatctacccacaaacaagagccattgctctgataccaattgttagcccaagatatgtttccaagagggcggtgaattggaaatatatactaattttagaaatttaaaaactccaaagacaattcattcaaatattcaagtttaatgcaataacaaagataatcacaagtataaacaaataataaacatgaaatgtaaatactttatggatagaaattgcaaactcttgatttttacaagatttggtagaactaagccacctacgtccttggtcgtcaaagctatggacctagctttgagtt

SEQ ID NO: 218694 - DNA, 11258 bp, Cannabis indica
aaaatttataagaaattattttttctttaaattaatatattgttttattaaatatttttttctttgttaatgtcttccttttatatttggactgtatttaaagtaatatctttttatatatataaatacaaatagttgtttaattatgtatttattttctatttttaatctctttatctatatataaggattttatttaaatgtcatttaattttcatcctaaattagagtcaattactttcttacatttttttgaaatgccacatgaggatcagtatcaagtaataacatattctagaaatatatccacttgtattgccacgtggcataaacctattccctcttccaaattaccgggcccattctttgtggctatatatcaacaatgacagagagtgagagaaaaagagagaaacttcaagttgagtatggcaggaatcggcacttgttgtacaactctttcttccacaaggtaaactgttttcaaatgtttattttctgtttaattccagccttgtatatagtctgcctcttttaaagaagaaaattaatttaagtatctggaaacactgttgttattgatggggtttggttttgagtctaactagctaagttcttatttcaattagctaacttttttcagtagaataaagggttgttgagctttgacaaagaacattcatttacaattatgtgttagctgcccgaaactggaaaaatgtcatgtttccttgtcttttaaagttctcaaactgaagctttaggacaatatttggtagctctcatttggaactataaacttgccattcaaatgtgttcaatagagattgatattgggttaacattaatgaatgtgacagtttcaggacatctccattggaatttgagtctcttactattcgaggaggaatcttcttagggaaaccgattcgccgaagagctttgaggattagagcagaagtgagttatgtcaatgctgatgaagctaagaaactcattgcagttgagggatatacagtccttgatgtccgagacaagtctcaatttgatagagctcatatcaaatcatgttatcatgtgcctctatttattgaaaacaaagacaatgacttgggtatattttccacttggtatcctttatgtatcttaaaataatattaaaagattacttgttattacaatctgcttcttcttttttttttttttgcaggtacaattgtgaaaaggactttgcacaacaacttttcaggtctcttctttgggttaccatttactaaacccaattctgagtttgtgcaatctgtcaaaagcaaatttcaacctggaaataaactcttgttggtgtgtcaagaaggattgaggtaagaaaatgttgattctcttcctttttcttgtaattctgaaatataatatttagcccataataagttcttatgcttgatgtatagaaataatgaaaaaagataccaatgagtgttttgtgagatacaaaattgttgcctgatgagcaggaaagagagtataggacaaaaaaaactactgtacaatgttagataatttgattcatgaataagcagaacaaaataagtggtagcaattttgacaaaaaaaaatgaattcattcctgatgtagttaagtaggcatgaaaattttcatgtattgtgtctttcattttgaaaacaattgaattactttttatttcttctaaatgactagtagtctttatgcctaatttggaaccaaatttgacacaggatactgtttgtttttgatgtcaaggtctactgctgctgctaataagctagagcaagccgggttcgaaaatgtggcctgcataatatccggccttcaaactgtcaaaccaggtaagaattagatcgaccgattttgtttaatctggttgatgttagtaaaaatcattagaaatgatataagttcttgccttgtaggaacatttgatactgttggtaccactgagttgcaagatgctggtaaagctggtttaatcactattcaaggcaaaatctcagctgtacttggaactgtacttgtttgtaagtccttttaaaccagagcggtatagaattatatgttttaagttttgtaaacaactggtcgtttgtttttctcactcttactttttcctttaatcaaatttcaggtgcatatctttttataacattcttcccagatcaagcagagaaactctttcccccatcaagctgaggtgttttacttttagtataggatatcttctcactctgacaaatgacatgaagttggattttttgaacatcgaccaaagaatatctgagaatgttcttgtttataaaaaagttaaattccccccttaaattgttcttgttaatgtgcatttatcctcgattgttttctcataaatgaagactgaagagtagaatgtcgtggcttggctcattcattagaaaatttaaattacagtgtagctcttattggtatttggtgacaggaagatccctagttgcgtttccataacaaagtacacgtctttacttcgtaaaaaataatgataatcatatgtggggaagaaatctttactgattaatggataatcattttgaacatataaatgaatcctaaatcaattgttgcattgaaatagctatgcgaagtgtgattttaaaaaatacatttaataatgtacaaacaaaattcatttcagcatacaaaatgcaggtgggcttaaagttatgatttttgctcctaatcctaatcaggttactcttcctcaaaaagaccaaacaaacctttcatgacatcttaaagtaatgtactcatggatattaacttgaataaaacctcgcaaatgtggaggagagtcaagagttgaaaaccaacattctagaccccaaaaaagaaagaaaaaaaaattaatttcacaaggctgtgaatcaatattaattaacaacatattactactgtatattaccttcttccaaaaattattacaacgagattaggaaatgtacttctaattccactctgtgcaagttgcaatactgcaaatgctttaaaagatggcaccattctgaaatgtgttgttggttttcatctaaatgcgctacggcgaaagatcgactttaagaagagactaaaaagatgaaaccagaaaacttctgtaccatcctagctgtgtcaccgccattgaatcctattagtctccttgtaagcagtaaagctggcgaatatttccagatgctgaaatatcaagaaaattagttaaatttcctcagcttggtctgaaaatatcaacaatatatataaatatacatatatatatatatataataagttaattgatttgtctaaagtatggagattagccacaaaccacaagctctaaatcctaatcagaagataacatctactacaaaataaaaatacgtagtcaagagtgaacagaccagtgtttacttctatcttccacttataagatctcctatctaaatgaaataataacaatacaaggacgatcatggtaattagtcattaccgtataaccagtctttaaaatacacatggagtgcacatgacaattcacgtttccggttttcttcaagaggtgcttctctcagttgttgctttatctctgctaaattctttagctgcaagtgcatgaagaatttacacttaaaatacaattttcaagaaataggttaaactgtgaggagagttgttgccacaatgttaatatgcaacctaattccaacaaattataatccaacaaggttcagtatgttgagctggcatacatttctactctgagatgacaaataaggatctggtaaaggaaatgggttgtctttcgtggaacccggggattcaccaccaaaccagcgcggaatctgcttatcaaagaacaagggtatattatgatataggatttcaatttaaataaccaaaaatctcagcagccagaactattccctcaccacaacccaaaagaaaatatagtttattagtttagaagatattttactctttcaacctttaccaaaaacaaacacgttacacactgctgaaaactaatagtataccaaaaaatttgtgaactgatcagggtctatgcgtgttgctgactcagcctgagcatcagaaacacctgctggatgagataatgaatcatgtggatcaaccactccaagggccaaaggctcatcccatcgattaatagtagcctcaataccaacttgagacatgtgctcctccaattgagagtaaaatgtattgtatggggctacctgataaaaatcaagagttaaaacgaatgatgatacccaatttgatcacaacaaaacaaatatactgctaaataagatgccaacacttcatgatagcttttgaagaataaaatcatatttccatttcaacttcataaggagttgaatttaacacagatttcataattcaatgaacctatcattgagaatgaaaacctaatttaatgatatactgcaaaataagatgccaacatttaatgatagctttcaaagaataaaattctatttgagttgaatttaggacacattacatgatacaatgtaaccaaacattgagaatgaaaacctaatttgtttaactcaaccaaaaacaaaagttcactggtgcaaggaaagaaacaagagagccaaggcttattgaatggcacacccaaacttttaaaagttaattacaaataattttgtggttcaggggctctgcagtaatacattcgaaaattaaaaaaaaatagtaattttgatatattagaaacttcagacattaactagttatataaccaatagccaagaacagtaacactgacctgtaacttatggttatcaccaaccataagtggtcgctggttcaccccaagaaagaatacacactcacgacagttagcaatgcagacccgtttagaagctgttatcacatgaactctctcacagtgctcaactcttacagcctgtagaacaccaagggaaccatccaatcaaaatatattttggtaacttcaaattcatctaagtaagataaattaaagagtggtcagttgagagaatcatgaacagcatatcagtgacacttcccaaattgaaaagggctcacgagaatgcactggtttctcaatctacccatgcacgactttaataatcattcatgaaagactaaagaaaatatatattttaccttcccaacagctccaataactatagtagcatcagagcaaccatagatggtggcatatctcaaaggtgctaagacataaatgacagaatcatgacaatttaatacctgcaagggtatgtaacatatattagacaaagctaaaagagaatgattttacatttatatacatagggcacaacatgttgaccagtgtcaatagaagatgcacttacacttgttacatatcatttgaaaaactaattaaataagctcacatggaagcataaccttgatttgtgtgttctatcagctacactgttaagagaaattacatttttcaatcatgcgagggcaaaagcacaaattcaacggcttagaaagggtttctatgtcgttttactttgttttgcatttaagtccctaaaaaaatttggcactcaagtccttgagttttagaaacagtagcaattaaggcatttcaattagttattgaacattgtttgatcagttgaggcgtacgccttgaggtgcgcctcaaggcgaggcagtgaaaaaacggattttgcagtttttcagctgctggacttgagacatatgctttgccctgatgaggcggtcttgatgtgtacgcctctgaggcgattcgtgttgatgctaacaattagttagtgtgcttttagggtttgttttgggctgacttgtttaatagcttctattgatttgtaattaactttatgggcgttagtttgggccttttctaacataattttaatagagtagatagatctaaaaaataaaccctaagcagctctcttcttctccgactcctctttcccccaatctcacgcagccctctctctccttcctcctctctctcattcagaagaagataatgatgatcatgaaaacaatgatgatcattatgacttctttgacatttgagttggaatgagcaatatgtttcgatatatgtttagaacttttactattttcataagcaatcaaacctttttatgaataaaaattatcattcgaagacctaattagtacttttcataaattttatgactttactatggattatgtgttgtttgttatgaattttatgaaggttttcttctaatttttgaggtgtaaacctattttatgaagtttttcttcttattgttgaggcatacacctcgatttacgcttcacggggctaaaggaaaacaataaaaattatcatttgaagacctaattagtacttttcataaattctatgactgtgttatggattgtgttgtttgttatgaattttatgaaagcttccttctaatttttgaggagtaaacctattttatgacatttttcttcttattgttgaggcatacacctcgatttacgcttcgcaggactaaaggaaaacacctcgattccattttttaaaaccttgttattgaatgaatacttttagattattcaatacaatataaaatgtaaaagtatttggaggtgtatgatatttctttaaaaaaaaaaaaaagattaaacttatccctaactttttaagaattgctactgtttttcaaaagttaaggacttcattgccagaatagacttctcagggactgaattgccaaaatagagttcaaaatagagtttagggggcattcaagctaaaatcccacttagaaacccttggtcttatctctcattgtcaacatgcctcttggatcatccaaataacaaattacatacgaaatagaaatagaatcctatgtgactcttccccggtcttaagctaatttatcaaatgttgtatattgagttactaacataatgcagagcatcaaacagtgacggtgtataaattggattgtcatgaaaatcatgttatcatcatacccataaataagacaatgacatgacaacatatatatatatatttatatatatatatctacaaatagaagcacatctatatatttttaacagacaacagattatgctgtaatcaaatgagaaaacagtgagacaaacaaacctttacagatgaaccttttaaatcagatgcttgcttgacaagagatgttttagagattccttcaataaaactaggacctctggtatttgctgaggccttgactgaacttgcgcaagcatcagtcatggcaacatctggatctgaggcgttgctgggtccattatctttcatattattcctctcagaaatatgttccaaggtagaagctatattctgcaaaatccagtcatggacttgagcagcaggaacaggaacagcaggcatatcgggatctgaatttgcaaagaatggagcagattggctcaagttgctttcctcagatcccttatcaccaaattgaatcaaaaatccaagatgctcaaacctatccatggtcagaacctacagcagcagcattatatcaaaaaactaaaaattacaagggaattattattatcatctttttttctttttgaaaaagagaaattattattatcatcatccattactcctataacagaaaacaataaatcttctattcacttggtacaaaaagaaaggaaacgtaaaaaagcttggaacatcattatacaaagagcaggtatagaataactagaaattcacaaaccagggattcttctccttccccctccacaggttccgctaacagagagagaatatttgccaaatgcttctgcaaataggataactgatgtgcctcttcatcagcctgtgatggcacaaaccgacggctgttgctacgcacaagctgccatgtttgaaaaaccagacctattacacttcgaaatttacttcatagaaaataaaaatgaacgaagcacaagtaataaattgttcaactaaagtttagaatccccaagacatgatattttacataaatcaattcaacaaaccaagttcttagcaatacgaccctagagagatccataattccaagttacaatagcaatatacatagcacattgtcaaaccagccaattactatttcaaaaaattatttatttatttgttaatttattggaagagaaccatttcaaaatttagaaacagagcgtcaatttttcataaaaacacatatatcctatcttcgtaattaaccaaattggaaaattcttcaaaattaccaaccgaccaagcaaaattcaaaactaataataatagcactgaattaaaaaaaacaaatttcaaactaatgcaaacccatcaacgagtaaaacgaaaagcctaaacaaaatgaaattacctgcaatggcgagagagccgataagtacccatcgaaagctgaggtggaaggccaaacatcagccacagcagctgagtccttgtgcgtcctgggaagcaatctcttgtaggattgtatgtagaggaacaaaaccagatcatggatatcagccccgacggcgtcaatctcgtccggattggcctttacgagcgggtcggagtcggagtggagaatcgacccgagtgtgtcaaggacgagccgggcgtggtcaatggagatctgaaaagcctcggatatggcggacgagccaacacggtggccgggcgaggattgttcgatgagcttttgtttgagtgggattagggtttgggtcgggtcagtgaagatcagcttggggattgggagaaggccatgctcgaatggctcccgccgcgggtgaatcagagaggtcgggtccttcggaatcgacgtcgtagtagaggcctcaacgaggtcgctcatggcttctagagagagactctatggagttttggcttagagagagaaatgatttgtgtgagttacagatcttccagaaagaataatgagaaaaagaggagaagggaggaagaggaagttggggaggaatccggtgtaattgaacccatcgaagttgactacgtggccgaattgtattcgatgctttggctcttctgaatttcttatgtagaggcttcacctgaaatccgtgaaaaatagctcctgtttctttattttttattgttttgaaaaagggtaattttctttcaagtaaggtttttttttatttttttaccctttcggatcattaattgctatttatgatattaagaaatattggataagtggcaattatttaataagcgttaaaaagaaaggaaaaaaattaaaagaaataatatagaatagagaaagaaatgaaaaatgagaaaagacaaaagataaagaaaataagagggtgaatgagaatttttaccgtgtattccaatggattaatttggtgattgtggtatagtttttctaaatgaaaatgtctctaatatcattcttggaaaattgttcacttgcggaagccaattttagaaagctttcttgtccttccggaaagggtcttcaggaaagctagttgttcttcttggaagggagtttcgaagagctaattgttcttcttggaaggctcccttgtccttccgggaaagggcttcaagaataactagcctctatttgggatggagtttcagttggctagttattcctcttggaaaggaagttttgaatattcgattccaacaagctctatcctatttggaagcttctttagcgagtgcctttggtctgtgatcctggaagcgcatatacattcctggatgcactaagacttatgttgacgtggagatctcgcttaaaggagagttggttaagtgagttattttctgactaactaaacaacttcgtttattgtagccaccggctttaggatcttaatcctaagcctataaataccacctacacttaagcattttcaagaggtcgaagttcatatggtccagattgagattgagagttagagagagaaaagattgagaggtattgagaaaagtcagagattgggtttggatttgtatcttctatagatgaagaagattcttgggtaagagtgtgagagttgaaacacttcgagagaactcaaaagagaatcagtctcgactgtaatgtacatgttcttgctcaatcaataaagaggatttcggtggtgctccagaactagagtagagtcatagatcacatcaatctatcgaacttgaaccaatatatatcttggtattgatttctttattttttgtagttattgttttggatttttcatactctgttcatccctatttttctccgaataatgtttgtatttgttaaatcttgtcatcgctaattgtttaattatttaaagtttagttgatttgattctgcactgttagtcataaatttcccacaatgatattttagacatacattaataatattttataacactcctccttagatgtccacaataactgtcttattaaaatcttgctagaaaaactagtaggacaaaaactaagtcaaggaaaaaagagtgccgtgtgaataattctccctcatttaggcattcgcggagatctaatcgacaaattcctatgatatatatcgtcttctcaaatgttgatgctataataactttgtgaataagtatgcatgattgacacttgatttaatatgttggacactaatatagtcattttcttaaagatcgtgtagtgagaaaaacttggtgaaaatatctttggttctatctcctttattatagctttagttgagcaatgcatttcgagttatcttcataaagaattgttaatgttgatatcgctttattaagtgtaatctatatgttttttgaacatgttatgtcaatgatttcactcccacacattctttattcataaagtgcaggtatgttaacatgatttaaagttgcctcgttaaaaatattatcaaaaaacccagtgggacaaaacttgaggtaaggaaaaaaatattgcaatgtatatatttcatattcataaatatttgcaagttacttcgttaaaaactttgtcagaaaaacccagtggaacaaaacttgagctaagagaaaaagagtacaatatatatatttcatattcatagatatttgcaaggtgtctcgttaaaaacattgtctgaaaaactcagtgagacaaaacctgagctaatagaaaaagaatgcaacatgaatatgtctcccc

SEQ ID NO: 218695 - DNA, 3332 bp, Cannabis indica
gacctgttcttctgggattcatttgggaatgcatcagcatcaatacataaaaatgtttaaacaatcttattttcttgcataagagttttgaatcccctaccatttctagataatataactttcttttatttaaaatgaggagcaaaagctacaatatttatttatgtaacaccatcaccaaccgaaaatgtaaaaattgtactatatttgaccaaaaaaaaaataattgtgatatatttgtattgatttgagaatcactaaaatgtactattggtgtctaacaccctcctcggtatcataccgctattgatttaattaagtattgggtcccatataacttaagaaaataagtttcagagaatatcgttaaccaatcatgcggcgccacctatagaaggtgctagacaccacttgtacccaatagcaatgtttattaatgtttagcattgtgctccaatatacaattgtaaaacttgatgcaaaatttaatatttattattaaaaataaaaaaaatataaatagttcataattactataactaagtatactattaaaataataaaaaatgcataaaagtaaatataaaaccagtggtttatggtgatgtaaattttgtgttatagcaaatattgtactaaatttgttcactttttgttatgggccaaatttacgtcaccttttggcgcaccattaaaaatatatttttcgtgagttatattttagcattgtatcacttatttgatggagacgctctaagaatgtataacaatattgtctcatagtggcactcacctattagttcttgatgtgtcatcccttaggctcagtgcatccagtgaattggacaagtactgcacagaatttgctttataagagcttggttctactggcaatctcattggaaccaccaaattcctgtagaaatttcaaacaacaatagctcacttattgaaaatgagtctcaacatacaaaaagatcaaagctagtgtttgaaaaaattcatacccttcattagatatgtgcttgcagcgagttagcttgtccaccgtgtagtctttatagaaagtgtcaagcttctttgatagcttcggtaagtcaagtaatggcaaaacatcccaaaccttcaaaacctgaatgtcatgagacctttccctgataaagtctacagcccagattaagaaacaatttttgttaaccatgtaatgctcaacaaatagggaggaactttcaccatgcacaacatggtttttctctccttgtggttggcgccaaccactcgaaagcttctccagcaggcttagtactttctcaaacaactcgtcgtttctagctcttctcattgatgtccagaaggaattagtgaagcaaacctacattgaagtggatgtaagacttgatattcgagttgtaaagagggcatatatattaaatagggaccggtaataccttccatttggcgtttctaaacagaagtgaatcagcattagctaaaacatcgtgttggttaagctcaagcaaggtagctataatagcatttgttaaatttttgtcctcttcggcattgtgaaaacaattgcgctccttagcatcaattactagtttcttccaaacagagccactctttaccaaagttgttccactccccactatccaaaggcaatacctacaccataacatatagctataatatttgtatatacctgtttcaataccaacatccaatgaaggagaaacataataggatgattttctgccattagtgtttagtcttcattattctgttaagtgcatttacttttgaaaggtagttgattattttaaaaattaaagctagaaatgtcatggggaataagttgcaaactcaaatggtaaagaatgattaactgcattatgagcttatgagagtgtatgcaaaagtgttaccttgctcgagttagagccacatttgatctctgacgattggaaagaaaaccaactgatccattaacattacacctaactgtagagattattattatgtcttcttctccaccttggaatccatcaacagaacgaatgcttaaagaaaaatcactttgagcatctgaactatattttttcccaatcttttcactcattacatgtacttgtgccttgtatggtgatataactccaactctaaccttcttctttgtgcgactagattctttttaaaacaaaaataagacaaccattattctcttgatatatccaaagttcaaaattgttgtgaaacaacacctcagcaagaacattcaaagacaagaattactcaatgaaaccaattagagatgtgtaaggaatgacagcaagcaataacaatagcaaaacagattcaaacaatcataatgaacacatgattttaacgaggttcgaacaaggtaatggtgattcaacttgcctacatccccggccagaaacagccataacgctgagagattcttttatttgctgatggacaagaagagattacaagtgttcaataacacagctcgagaagcttagcttctggtacaaacagttacactagtggtgatgatgattcaagatacatcataccatcacaacctcaagaacacactactctctctccctctcttttctctctaaacagcaccttctaatcctctctcctttgatctgattctcttgatgtgttaacccttagctagttttgaatgtgagtcttacataggcaggacgcgagcaccaactgtcataacagacagttggttaagttagttgagctaggggtagaatagggagagcatgatattaggccaacaaacacaacaaaaataataattcaaaaaaaaaagtgcagaaaacatcttcagctaatctaatcctacagagaaattggccttgttttcctgtaggatcttaataacattagaaattataaggatataagataagtgaaacaaactatgattttcctgccagagatagattgtttatttacctttataaatacttccaattatatcagagaccacagcaacctcaaccatgttcattctactgtgcttgtaatcaaattcttcttttccatgtggcacattaatgaaggagtaagttccatacatttctcctggaagaaaacgcctactgtaagctccatgtttaacattgtgaccatccaaaatctgattattgtagaactccctattcggaaataagcttattgagggatgcatcctatgctggacattgagaaggtatttcttatggtcaagaatagttagcctctcaaacaaacttcttccaaaattggcttcttcagaaatctaacagcaaccgtgaaattcc

SEQ ID NO: 218696 - DNA, 1916 bp, Cannabis indica
taccatttttgtaaagcccagattcccaggcccaacagaattcttcctcttccttttaattctgatatagtcatatcctcatcaaaatcctcaccatcattgaccatattaacatcaaatttccctcgttatttcctcaaattcaggagccagttgttgcaccaaagtcggctcatgaaacccacaattctctcctttcccacgatcactgtccttcctcccagaatctcactcattactgccattaacgttgacagctgaagtcgctcctccgtccaagttcaccccagcatccccacctccattaatgccgaccaccttaccccgactaccttcctcatgatcaaacctaccccctctgcctgaccgaagccattgagacctgataagtttgttgcttcgttgaaccgtggccctcatgaaactgccatatggtttaacgatttctccctctggcgtgtcgaagatctttgggaaagttctatccgtatggcctacgacaccacaaataaaacagaaggttggggcatgttcatacttgaaattcacccataaccaatccgaacggtctaatcttcggatcttcatacgatgcttcagtggttgatcaagattgatcgtaactcggatcttaaaatactcccgccaaacaccggaaaaattattctcatcgaatttgatatatttgccaatatagttcccaatcctttgtaaagtacgctcggtacgaaagccatgttgcagatcatggatctgtatccacatatccaaccgattcaagattatcgatctcgggttatctcctgctttcaacctctcaaagatgagttgttttcgttcgaacgtccatgggctaccattgatcactcttttgatgtttatttcatggtaaaactaaaatagaaagcgattttgttccaactctttaacgtacaaacctttccctggctttcaaagaaaatccatcatatgcttcatagcttgaacgtcaataacaccagcattaaggaacctccctacaaggcaccaccgaacatcatactcttcttcatcctcctccacattcaaagaaagtccaccaaactcttcaaactccggaataacatctgtttcttggtcacttggatactttgtagaactagaagaagccataaaacacaaaacaaaaagaaccagccaccaaacacacgggaacaacaattcaaatacccagaaacaaaatcaataaccaaaaactcacaccaaaggacaaaacttcaccatgtcaaaagacaagactgtagaagctaagttattaagaaagacccttgaagaagatagggttgaagtccaaagagaattattgtttcaaaggttaagtgcatgagaccccaagacaacattttaggaaataatgatgtttataaaatgcctaatttaatccaatccgcacaattcaatccaatctaatacgcaaagtgtagattggattggattgaaaaatctaaaatttatgtttgtgtaaattagatattgattgacatgtaaaagtgttaggctatttttagcctaagtttcgggtcacattttatagttgtttttcttctttattattaattttggaatagaattacgcttgttttctttggtttcacgtttctacacttggaatgtataaattggataaatttcagaaaatagtgttctataaaatagagaaaattttgaaagagaataaagctgaaactttaagcctaaatttgactatgttttgatcatatttttgaaaaactcaaaacataaaagttttagatctcttttttaactttccaacgaatattgaatcagctcatttggaatttatatgagaaagttatgcctattttactaaagtgatcgaagtagaaaattccatctcgccgcggcgagatttccat

SEQ ID NO: 218697 - DNA, 11025 bp, Cannabis indica
ctcaatctaggaacctatttttttctttaaaaaaatacttaggcaaaatgattggcatcaacaatactttagacattattacaccaaaactgtatctaacagtactttgaatgtacttcctgtacgtacagattataaataaagaagatgcaacaaaatggttccgaaagagtacacatctgtctagtcaaatggagcagcaggtaaatgttacagattacatgtaaggcaaaaatctcacctgtgtaaagctgatattggagtccacataaacatctgccccatctctagcaaatataggatctttggcaacctacaggacccaaagcaaggaagtctcctgatcaagcttgaataatagattcaacatagcccaaaaatactatgcatttcaagggatggggttggggaattgtggatgaaaaataatgataagcattccaaataattataaggaaaagattgtagactttaaaaagaatattttaaacgtgacataaagggtcattttgtcaaatagttttatattttaaatgtggcagaattcttttgaacaagaacaataggctcatttaccctctggagggaaaataataaaaagcagtttgcaaagaattaagagtgcatcttccagtgcattggacccacttatgcatcaaaatttagatatttactcgttgatccctcaaaccatataaagttgagagagggatagccaagtcaaaatagcaaggatggatctaattgcttgacctataatatgatctgctaataaaaaggtgaaaccgcactaaacgtaagagagaggcacgagcatctctgtattggctttttcattttctccccctttatttttgtaattgcatgttaaaattctctaatgatgattccattaatagaagcattggagcgcttgacagcaaatctgccaacaattctcctctattacatgattaaataatctcttaaaatcagggatttaaataaaaacctgaaatcaaatcagcaacgagacttcagatcttagagatcctttttccttttattgtatgaataaaggtaaaaaaaatataaagaaatctcctagtgataaattcggcagtcaacaatagcagatgaaactgcagcaaacagcttaaagtatttgtaattgtaagaaaatgaaagaaataaaaccaaaccttcagtttaatgtataaggtaccaggttcacttccttgaccaccagtgtttccagcccctggtacacgtatagtatctccagaatctatacctgatccaaaagaaaacataattgttggaggcagtggttataaacaacaatgaagataaaaaatcaaaaggaaatttaattgttggaggtagtggttataaacagcaatgaagaattgaagataaacaaatcaatgaacaaaatctataaatacaaaggagtacaacaaacaatatcaacacaaagacttgcataagttcagaaactttgtccagaacttttaaaaaagagttgcctgaggtttctacaattttagaataaggagtttgatacaacaaacataagaaattctagagaaaaataagaatctttgacagcaagagtttttttcttttttaagagttttgacagcaagagaatttaaagggagaattagtgatcaagtcccaaaaactctttaaaaaatcccttcattaggtccaaccagtagagaactgtttaaaacagattttggagccaaaaacgtacattgtacggaacagacaagcaaagtttcgcttcctctgtggtgacacatcgtctgctgaaaatcgtatatttcctaaacgcaagtgacgcgtcacccccagaaggcatcgtatcatcccaaagcctatccaacttgtccaaaaaccttaaacacctccaaatgatcctaaactttttaggcatgcttcagtaccacactgtcacttagaccaaaaaatataaaaaaaaataattcttaaatgcctaaaaaaaaaacaacaaatttcacgccactatcatgtcaaatcatgaagtgttttgcgtaaaacacagccttatactaatccaatcataatagatgcttcgaattaactatgtccaccaaaagatacgatagaattaatgaagtcattctgcattttttttttttttagattttgtgctgaaattaaaaatcaatttaatactcccattattacttggtcaagcgacaacgtcaaaaatatacactagctttatttcactaaatattgtttagagtggcatgcttcatgaagcatcctgtgttgatattgcatccgaaaatggtatagcataatgtaaaaacagacattttaaaactgaagagctctcatttcaaatgcatgtttctaaaacttttttggtcgacgtcgtttttacaacatgctcctcattaattgcatgtcattctttgttcttaatggtgagatcccttacaaaatccttttttcccaataaatcatagtttcctgttgaacctaggatatttggtattacttattttgtacgggatatttatccacatgtaactaaattaaatctcaaatctttgaagtgtttttcttcgttattctcatctacaaaaaggttatagattttattgttcttaacaaatatctacaaaaaggttgtagattttattgttcttaacaaatatctacaaaaaggttgtagattttattgttcttaacaaatatcttgtctcagttaccttcacaaaggactcactgtacttttcgtttgctactattcctactccccagggagatgatttgttgatatattttaccacaacttctaaacttgtcataaaaacaacttttgacaagcctcctattactcaagtctactccaggcatccacctcgtaattcatgtcttgcacctgctctttcatcatcaaaatcaagtatcgaaccatgatcctcctattgtgttgcacaaagataaacaccattgtacttatcttatttcatcttttgtttcctataacaacttgtcattttcttcttgttcttttattgtttccattgacgctatctctattcctaaaacaattcaagaaaccataatgatggttggcataatgcaatggttagaaagagatgaatgttttatacaacattgtcaccaagaatttggtcgatttacctttaggaaaacgttctataggatgcaaattgatgttcgcaattaaggtcaatccacataggtgacttgcttgactaaaagtttgtctggttgctaagagctatgttcaaacctattaagtaaattattctgaaaacttcttctcctattaaaaattgacatgtttggttgacatttttgctgtaggaacaaacatttcttgatagcctatcccatagatttgagtgaatccttttgccaaaatctagctttgtatcttttaatacttcaattagctttgctttttattgtaagcacccacttacaaccaacaatttttatcccttacggtagcttaacaatctcccaagttccatttttctccaaaacattcatttcctcagatactacttggttccaacttgattcccccaatgcttcttgtatgtttctaggtacaacgagttctgaaatagtagtagtaaatgctttatatatttcagatagacgattgtatgagatgtgtttggcaataggatatctagtacaagtacgagttccttttctaagagcaataggaagatcatctgagtcaaatgcaactaggattgatttagcaatgggtttagtgtgaacgacaatagcatttaaattagattgagaagaaggcttaatactgctaataggagatgaatcaaaagtaggaatagaaagagaattactcagagtacttgttgaaccatcattcaaggcctgcgattggtcttgtgcagggatttggtgatctttattttctcaaagatatttttccttgaataaatcacatactcaaggttattacgatttttaatcaatcataacatttctttttttgacaaactaagctcagattcagaatcagcaggctagggctaagtttttgtatcaaaacatcaagaataagtgtttgctaaagactcactaatttttcaaaaatttggttctactatattttccccttgaattaaatttttggagaaatttcgggtattctctaaaaaagaaacatccatagtagtgtaaacatgttaagtggcaggattaaaacatttataaccttttttattaggaggataacccaaaaagaatacatttcttagacctaggatctaacttggacctagatctttttggtaggtgaccataagtagtacaaccaaatactttaacaggtaactcgacaatttgattcaagaaaaaactttcttaaacatgttaagggagtaagatattataacactttagcaggcatcctataattaaataagatgaagtaagaacagcatcctcacataaatattttggaatattcatataaaacatcataacacgagcaacttcaagcaagtgtttattttttcgttcagctaccccattttgttcaggagtctctggacaggaagattgatgcacaattcatttttcttttaaaaaatttcccaaagtgtaattaaaatactcggttccattattagttctcaaaatacttatttttgtttgaaattgattttctatcattttacaaaatgtctattaaattttgtaaaacatcagatttttctttcattaaataaatccaacaaagacgtgtggttgtctataaaactaacaacccacatttttccaaaattagtagtaacctgtgaaggcccccaaacatcactatgaaaaaaggtaaaaaaagttttgagggctgataagaaattttaatataagattttctttggctcatggcaaataagtacctctcacattggaaagataagggattcaatcgtttaaataatgctagaaatagatgttttagataagaaaaactcaaatgacctttgatcatgaacagaagagaactgatactatgaagcccttgagcaattttattaccagataattcacctttaaaataatagagaccattaatcatcctagcactgccaatcgtcttccccgaaatttagtcttgaaaaaagacaatggaattcatagaaaaccacacaacaattataatctctagataatttgctgacaggtaagtttaggaacatggagaacagatttaagatctatcccctcggaaagtttaatagatgagaaataaccatcaactattctaacttttttatctcctgaacctgaataaggtatataagagtcaaaaaggttagaagaactagtcatatggtctgaagctctggaatctattatctacggagtagattatatccaaaaacaatttaaagcatttatttcattacttgtatgtcaaatagagacattaggaataccaaatgagttcaagttagttttcagcaatgcatgatcgatctgctcaccttgtcttatctcaccacgtttgagattcatctcgaatatttggaattggctctctaaattagagtacatatgagttactttttcccaaagttcctttgctgtaaaatagcacatatagttggagtcgatttcttcttccatggaattcacaagccatgttataaccatggaatgctcagcatcccaaacctcacaagcagtgtctccttttgctagctccttctctcccgtcaagtatcttattttttcacagcccttcatgtacatttggacagattgcgaccatctaagaaaattattaccattcaatcgaatggtagtgattttgatggaaggaggataaaaaataagtggagttggctggatcaagttgcggaacaatggtggaattggttggaataatattggtttcataaataatgcaagagaatgagggttgaacaaaaagaaacagggattagggcataggaatacgactggctctgataccaagtaaactagggtaaaagtattttttctacaaaacagtgtatatatagctttacgtgagtcggcacataggcaaacaaatacccataactttcttagaatagtgatatggcaactatactagaatattccctaataaatggaagattttcctacaattttatatcttcgaccgttcattcatacttagtttcacacaaagaacttaggcgtggtaaagtatttcttagatgttgaatttatatagagggatctttctatctcaaagaaaatgtccttgacttattatttgagacagaaaaactgggagcaaagccttgtagtgccccaatgaccccaaatgtgcatcttataattgaaaagatatcgaaggttggttggaaagttaaattaccttactctgactcgtccaaatattgcatactcagccagtcttgttagccagtttgtatcatccccagtaattgggcaatgttagagcaaattttgtgttacatgaaaggagcagttagatgtggtattttctatacaaatcatgggcacactcatatagaatgtttttcagaacacattgggcaaattccaataaagaaagaatatctacttcaagttattgtatctttgttggagagaattaggtttcatggaaaagtaaaaaaacattatgttatgtcacaatctagggaagagttagaatataaggctatggcacagtctttgtgagataatgtggattaatcagcattagactaaagtaggacttaaaacttcaatatcagtaaaattgtggtgtgataaccaaactacttttcatattgcatctaatcctatgtttcatgagcaaactaagcacattgaaattgattgtcattttattttttcacgaaattcaacaagatttgatttttacaagaaatgtgaagactggagatcagcaacttcaagaaaacttgattggggttcagaattcggattgaaaatcaagtttggatgattaatatctatgctacaatttgagggagagtgatgttagatgtatattagttatatttagctatttagtcaccttaattctaatttcctagatgtatagtttcctaagatagattctaagctttgaatataaatatataagtgcataaattttcaatgaaatataagttgaatatcattcttttcatttcacataacaacatgaaaataaaaaagggaaggtggggatcatatttttgcaatgccattgatatttctcctccttcacaccctctaaaactcttgcaaatgcataagaaatcacttctcaatttctaaatgattttatttaaatgtcaaactcaaattgtagctactttttgtgtactataaacttcaaaaaagtaaacataagagagagaaatatcactaatttaattatggagctagagaaaacatcattgaagtgtgcatagtcaaaaaaagattcacaaaatttcgtgagcaagttgaaagacttctcattagaattatctacaccaagcagagattgtaacggtatgtataggatttgcgaagtagttagaaagttgttagaggaaggaatagggagtgcgatataaggaaatgtcaaggcatatatggcgtcattgggaaatttttatgagcttttctatttgggagagaaaggtctcccaatacccagcaatgatttggtttctctttaagttctatgatgcatttccattttttctcatttagtacatcacaactcactaatgaaattgcaaactctgccacaagtgaaaagatttcatgcaacttcatttcataaacaaataaacctttttataccaaacagttttcaagaaagcataatgacaaccaacctgcaggtattgtgactttaacctctctaacaccttcaactactcctgatccttggcaagacacacaatactcctgcaaagacaaatagtagactgccattatattttacttggtagcagtaaagctacacataaaattttactggaattaacattcaacctttattactcggcctgatcctttgcaagtattacaagtagatgtgaacggaggaatggttacctaaagaagagataaaaagcaattggcacaagtttctgaattattaatttttcaaactttggaaactacgagaaaagaaagaagatatcatccttaggaagtggcaaatttaagtaggattatccgctgtatatccttcaagcacttactctcccaatacctctgcacgtagggcaaacttttttcttggcatcaacagcataaccttgcccatctgcgtcatcatagacagagaagaaaagaaacataacataaccttctgaagcaagaaaacaacattggtaaaaaaaattgtctacaacgcaagagcaatataaggcgacacttgtacaagaatatttaggggctctttacaatgcccaaatctggacatcaaataaaacggttgtttatttttcgaactttataccaaaatgatcaatacatcagtagttatacaaagtataaaattagatatatcccgtttgaaaaatacttatattcagcatacaactaaagaatctacataaatatgggcacactatgaataaagcgagtattgtaaaaaaaaaaaggacgtgggctaaaatggagtgtagaaaaggaacacccgtcctaatttcaggagttccatgatagtgtatattgttgatgaggaagtttgggagactgcacatttgatgtgatctcacttaagtgtgctatcttttttacctcacaaagtaacaccaaaacaaggtatattaggcagttaatctgcatgtttcagctttgcttcacagtgaataaatcatcattgaaagctgatactttatacataataggacaaaagatctagatcaacttacagcaaaaatcacaaggaacataagcatcaacggagagatgtcttatgcatcctttagcagcttcaagaaaagagagtgataactccacctatgaagatgcatatgaaacatatcacagtcaatcaagctatggaattaatttgacagctagaaactagaggcaaattttgctaacctgaatatcagatgcaaaacgatcaaaatcgtgttcaaaaatctgcaatgtcaagcaaaaggtataattatttcaaatatctaaattttaacaagacctaataagataataatgaggtgaggagtttatggaaatatctaaattttaataagaaagaaagtatacctcagagaatactttatggaatgaactggagaaattattctgattactgtaacgaaaaccccgagtatcaccagcaccttccatattttctgagccccttgtgtgcatcttcattaaaaacaagcatatgcagagtccaattaactaattggtgcatgttataggcgaaacaatctttcaattgcaacaaaaaaaattgtaatgacagtctcagcatcctgaaattattctattatgcacggctccagcaaatcggcttaacatcaacagtcatcacaaaatcttagatatagaagatgataaaaaaaacccgaaatggggaaggggacaagttaaatacatatgcatatcactaaggaacataagcaatataactctgattgggagaagaaggaaaaaaagtttcacctcgtcatatttttccctcttctctgaatcttgcagagcctggaattcaccaaagagtaaatgaaacagtcattcacattatttaggaaaatgattgcacatatacacatatttacattcaaagaagcaaacatcccaatattgaatgattttcaataacaaaagataacattaaaataagctattattgattttccagtgtaagtatcattacattacacataacaatgtgtgggtatacatactatgcatatatataaatatacatgtacataaatatgtatatccaacaagaaaaactgcgctcgactccttgtttaacatttctaccttctatttggaaattgtctaaacaaataaaaccttctgttgcatcacttgaattactttttcaatatgcacaagaatgaacaaaggagagcaataaataggaagaatgaaaagcacaatgtcggacctcataagcgtctcttatgtcttgaaattttttctttgcagaaggattgttttcattggtatctggatggtatttctttgcaagctacacaaaatgttaacacaacgaaccttagaaatataaatgaataattgcagtaaacaatatttgtgtatatactatacataaatgagataattgtcctcgagtccctgatatggaaacagaacaaatcactaatttaaacgagcaaaaggtttactgtagagcattaaaataaaaccctttcctgcaactatacgagtctcactttgttaaacttactgcatgaaaagccttttttatctcatcccgacttgcatttcgaggaacacccagaatttcgtagtagtctcgttccggggagcaatagaaccctagcaatagaaaaaaaaaaaaaaaaccttagtgcaaatgaaaccaaataaaaaggagcgccaacaaatacagacgaaaacctgaagcataaaaataacgcttccgaaatgaagagcccaaatccacagttcccccgtgtgcagaaccagaacagtgcagagctgaaatgaaatccagaaaagcatattatcaaaaactgtgtatcaaaagtaattcaataactaataattaaaaagttcagtactcaatacctcgactacaaaacgaattgtggggcaacgagacgagttttcctagtttattacgcggctccgcagccatagacgtgagcaaatgccgccgacactgcatccaaaccaaaacattactgaaagctctttattgaacattttgaaataaaacagattatcgttagaggtttgattctcaccaggctgagccacctcagtttgctcattgtgaagatacaagtatctgctaagtaatatatatatatatat

SEQ ID NO: 218698 - DNA, 4983 bp, Cannabis indica
gaatttttaatggccaaaaaattcagggggcgtgatttagtacatgtcaaagtttgagaggaaaaattgttaattacccattagaataatagtttaggtcatttgtaaaaaatgaaaattcttatgtaaattagtaatatgtgtaaatattttttttttatgtataagtgtaaatgttagttaaaattatatgttagaaagttccacatgggatacggagctatctttttaaaaagctataagaagtgatggcagaatcttataaatattatgctcttgattagtagtcattgttaaacgagatatgaaatgtaattatatcattgaaagttcagtgctaaatagtttatattaaatttcatggaattaataaaattggctagatttgtcgagatttttaccaccacaatcagtgaatagattgcaataactcatcttaaaacaactttgttttcttcctagacttgtatgttcatcgaaatatacaaatgtatttttctttttaaaggaaaaaaattgcttacatataaggtaaatgtgatgacttttctatattttaaattttgtcattatttccttacatatagaggagctccaggcgtatgcacctagaagctcgcaagacccacgaagctttgctataataacgagtggctagtttgtttgatatttaggggatacccgtctacttcgcttcaccaagtggaccccatgtactttaattgtttgtttgctactacaaacccgacccataggcccatacctttctcgattgaagccataagtagtagtcggtgataggtgcataatttgattaaagaatattctcactatttgtgtgctcaacccaattcacccgattgagagaggaagagacgattagatagtaaattggcatatgttcagaaacatgacaatgtcatttatctctctagttataatctttatcgcagtctataattttatcaaatttacaaaggcacgtctgaatttaaatttaattagataccataagtcgttatctccttcccataatacatgtacgatgcatttgtaatagtactatgaaaatttaattttttagcacaaaaacaacgatatttaacgatgtatttacaatagtgtgaaaacctaacttttgacgcaaaacaatgcatttggggtggtttgcgataggttgcaataaaatatgggttggtaatacataaattttcactagaatgttcgttgatgctattgttttaaattgtttaagtctcaaacattgttatgcttgttcgtacacattttaaacgtacagatctctaaaaaaaacgaataaacaaacaaatatttgagtgaaaagttatatccccaattgcattattttgcatcaaaaatcaagtttttagatcactatcgcaattttaagtattgttttgtgtcaaataaataccaaaatcagaaaatataagtaaatgttttaatttttatagcatcatcctaaatgcgtttaaaattccggaagagaaaaactcccaaaaaaatcttgtacagaagtgttcaaaattcataaattagtattttaagtaaatattactatcgttttaaatttcgaatcattaaaacaaaaaaatattagaaaagaaagaaaaaaaaccttgatgggtgtttggtgatgtatgtgttatttcagatgagaagaactttaataaaaaatggtctagacatttttgtttaagtgagagaaaatggtagagattatgcaggggggaaatgggaaaacttggttagaatgcatattgttgtaacaattaagtattaaagttgttattgggaataaatatagcatatttcatcaagttttccaatacaaatgatcagctaacatctaattagtgacaattactcccacttcatagctttaatctctcaaaaaataattattaatattagttgataatgataaaggatccaagagtatagataagagaaactctaggtcatagaaaataatgcatatttggtaccgtaccgggatacatcttacatatcatatcataaaatgtcgactttccccgtaaaaagggaacgacgtgtcttttttcctcatattagagaggggcgaaactacataaaatactaattttaatgaggtgtcctctttcatttagtagtaaagcatctacaactgttacgagacaaggtaccatccaccaaaacaagccaaaacccatgtacctgttttgtacagagtagcaaattcatggtcacacgatcaaattctacttggtttcagtgacggggaggtagacgccttccgctgccaaccaaacattgtctggacgcttttctgtgacagaacaaacctgtacagattcatttaagttgttagaaggaaactttatatgatattactcgagcaccaaagtttgtctttaacttattaaaagaaaatgacaagcatagacaaaagtaaataagtgtagagaggctatacacaatagcataatatttcccaactagtgaatcgtatgcattggttcttaacgagtgaacctgctactttcttgtttaataaccaatcaagggaggtactttgtgacaattaaaatgaatccattgtctacttctaaacactaatttcattgtttactcacacgcagaatcaattgagatagctaatgctattgtatgtttttttgttcttacctcctgctgtcctccagctatgcgtgtatactttttgtcatgactatgtagaaaggcacctgtgtcaatgtgctgaaggcgaatcctttggttttgcttccacgtcttcccacttccttcgactagaagcctgtaacatattacccacatttgccatcaataacaacagagagatgactaaaccaaacctcccatatataattaagttttggtctcacctccaatgatcaccagtgtcagactcattctccccaccaaagcagcttacctgtaccaagcatggtgtacatttcacttagtcaccaattcacagaagaagaatatagaagccagaaactatacatgacatccactagtaattgtggatgtcatgtataaacaataaaaggtgtgaaactgaaacatacctcttggttgcctgtaattggggatgcgtgcaaatggctgtgtagccatttcctagtccgcatgtgttgcaacctaatgactgtgccactttcgatggaatcaccttgtttagcagaagtttcaggtattggcctaacaatctgcaatacatatttactgtaatgagtatattgttttacatgttctttcaaagctccacctcttacagaatacatcattaaaaaccatcgagatataacaatcagtccaaaaaaacaatcatggataaaagcggatgaaagtagacttctcacaagacaaaatcaatcaaattagaagtagacggcatgcagcatgctcattaagaaacttaattcataaaacaggcatagataaagagcaggaattaagtcaaagataaattaacacgaataatgctttctccaaatctcaatataaaatcagcattatctcaaagtaatctagtatttaatatcaaacttctgaataattattatttattttattttaattttttctcttaggctatatttggaagttggattttgatgaacaaagaaagagataagaaaaatgtaggggaaacaaagtgtggagaacaaaaaaataaattactttttcaagtttgatatgaaattttttgttgaattgagtgtttttttatacaatttttcattccataacaaatatgggaatttatcattttatatttttcacattctccctacctttgtctttcctcaccaaaatcaaaacttccaacctaaatgttgtgtaaaatcataagatcaggtcatcaactagaccttcctgatagcagatatataataacctataacaacactaaaacaaacgagggaaatttataacataagtttagcacaaccagagaaagaaaggaagtacccaatagctattggcatcatcaacgttgggaaaaccagtaaccgattgttgcccactgccagaaccatatggcacgtcatgcgaatgcaagcgaaacttggtcttctcatgcatcagcttaagcaccgatccataagtgatctgatcaaaccaaatcacaaacgcgtaaatctatgttttaccaatttaacaccagcactaatgagcttcagcattttttctatgttgcctctatttgattctgattaacaaattctatctccgtataaacacaaatttgaagttttgtccaaaattaaaaataaataaaaacaaacctcgacaccctcagaagtggccgcagtagccgaggaaacgtagttgttttcgagatcgaggttaaggaaaaggaaaagagcgagagcaaagaaaccaatagccatgacgaatagcaacccaatgaaccagttctgttgccaaaaaggaagatcagactgagaagtcgatctggattctctaagaacgacccgagtggacccagctgaaggtggagaagaagatgaaggggaagaagaagtctttcttcgagtcaaccccgacgatcctgaggaggaagccacggtgagcgaaacaagggaaaagatcgaattttggtatggagcactgtgaatttggggatcagagctctaattagggattttgatttttgatgtgtgggtttcgatctggtgtggttgaccaaatggggtttgtgaaaggaacaggaacgggtttgaaggtgtagagtaaatgagttgacacgtaggatgacatggcagtaaccaatgaaaccattccacgtggaatttgaatgacgtggagttattttagtggactgaagtaagtgtgctttacaaactcttttttatagggggtgttcatcaaaccgctcaaaccgctcaaactgtccgcaccgcaaaaaaaatagcggtttgaaattctttacggtgcggtcgcggt

SEQ ID NO: 218699 - DNA, 5788 bp, Cannabis indica
taaatataccaataaaaaaaaatgagacgtggatatattgacttaacatttaacggttaagtacctacatagtttcaaaaatataacttaagtattattaccaccaaaaattaaatttaagtatttatttgcaacagaccgttaaacttaggtatttatgccgcagattactttttttaatttttttattggaatgtataattatttatttggctggcccacaattttttttgtaatattataacacaattctaaaaaaatatttatttattgattctgaatgccaaaatcaactgcatgcttagagaaacatattcttcttattacaagtatatttattcctattttgtttattataagatttgggacaagaaatttgattttatagaagagattatcattccatacaacctccaactcaaataaattgacatgttcaccttgactcaaatcatcaactcaagtaccacacatcatcaaagtattgactaaattgttcgttcctacttacgattcaaatacatgtaatttagttccaacttgccattgattggaaaagtgtaaaaccatggccagcacaaacgaattgtcttcccagatctgaaagaaaggaaaccacactaagtcctttcttcacaaaagcctgcagagaaggcaattttagcaatatactgcagcaaactttgcagttgggtcaatctgtgaaaacccatataatcagaatggctgcaatgaaacttaaacaaattacaaaagtatgtgtcactcagttaaaatccaactcttaaaacactatacagaccccttctcctgtcttgtccatctcaaaacctgtctcacaaccaatttacctcggcccacaaatgaaagaatactggaagtggaacaattcctcttcggataagaatccaaatgacctaaaccttcactaaaatcacaactgatcatagctttctatggtcagacaggccagaagatgatgcttgcagtttaaataatctttcatctgcatcagaattaaataaaacattactccagtttgttgacctttgtacaaatctagtaggaacccgatcactgtcttccccgcccgatgcttcataaccatcacttgtggatcttgacaaagggaatccattctgggctgctataccagtagcagacagtcctgtgagctgccttgcctcttctggccctgatgaggatactcgaaaagggtggatgtcaggggaatctaaactactctcaggagaagaagcaacaagtcctactgaacttgtcatagcatggcttgtctggaaagcacttcgtgcttcaagctgaagaggagccaaactagatgatgtgtcagcgtagcctttggtaacaggtatagctgaaatcttagtaagcggttccataggcagctctgctggaagtcgcacccgcttattagtgcgccttctgttattgtcaggccttggaaccattcgacgaccactgctgccaaagctactgccagcttctaggccataagaagcatcacttctcatcacaggttgcaagattttggactttttccttgcttctgctgcagcctttgaaatctcttctgcatttaatcttgcaagagtccatggactgatcttcaccgctgcaggatttttctttttaattgtttcctctcctgcagccttttttcctaacgaactaacagagccagtctctggtggcacaacatcaaactgatggaaggaaaacaaataacagatagtaaacaaacaaagcaatgtggttaagctctttctattataggctgaaaggaacaaattcaacaaaagtaggtaattttgaacttaaaaaataccaactctatcagaaaaagcaatgaatcacaaaaagctaccttaacatatatcagaaatttggaaaatcattattttgtcaagattacctgatcttcaagaaacagacgtggcggggtgcaccaggcaccccggtgaaatgtagtgaaagagcttgcactgcttaatccagtaagtgagctagcaggagacatttggggactatgctgccctccgactccattttgctcttgctcctgctccctcaaagctatgatgtaatcatacgtgcttattccctacatcaaataccagaacataaaaaaaattgaatataattgaacctctacagcaagaaaatcagaatatgatcagggatacgaaataactgtggagctcaccttcttaatcaaaaggatgtggaaaaagaaaagttgtgcaagcggtagggttgcaatcattgccaagagggtgcagagtgcctgtacattcaattaaatgtattaaaattatgatggaagctatgtgaaaaaacattacatgaaatagtctagagtcccactgctgctgagtcaacaaggttgatctgaactaaactaaatactaacagctaaattagaataattcatgccaatagtactcaccacaacaataacaaatggcgccatagagaaactgcttcccaacttggttgcgatttccacagagaattgtttcctctcaagaaagcagcagataagcacaaggagtccagttgtccattgtagaataagctgcaatctcaagcccaaggtgcacaaaccatgtacagacctgtcaataatcaattaaaatgaaaatgaaaatgaaaataaaatgcttactctgaggtgatctccagatactggctgagagcctgaaggacttacggcagcaaaaagggaaaatggcaaaccataatagataagggacaagtctatacttaggtgttccgtgaaaggcattgactaagaagtcaaggaagccaaaatcttaaaggaaaaagatttgatttcctcagagaatcttgtgagaaaatataggtacaatttcagaatctttcacaaagccaaataggtatagtgcagttcatctaaggattatttcttaagatgatgggagaaggacgccccgttatcagagagaaaatggatggagaacttttaaaaaaagttggagcaccacaaaatttgtccgcaattcagaatatttgtcacaaacttgttataacaattaaattgtgtatggccatcatttagcgaagtactcattaaaagtcacttttcacttttctccctaggctgaaaattgggctgggtcaatggaaaggtcaaatccatgttactaaaacaaactagttgtgacaaacactgagttgagcactgtacgtgaaataagcagtgtagggagtgcaactgcaagtcaaacttttcctattcgcaagggtagtgatgttaagctctacgaacaagttacctaagggtaattaagcactgctatcaaattgcgaatgacaagacaaataactgaatactgtataggcagtgagcagtggatttagtgcctatcatttagtttccataagactgagatctatgggattggtagacggtcaagggtttgagtgacaatgtgaagtttagcaagacaagaacaaaggctcatgcttaccaatagaagagcggaaaccatgagagtgaaaaattgcctgtagtttttcttccctatgcagttgttaagccactacaagaagcacggatgcatttatgtcaggagaattagcacagaaaaaacaatttgaagaaactgaaagcaaagaaatggaattataccctgcagtgatgatcaaagcggtcaacacatttgtcacaaactctgcagtgtttactgtacttgtacacctacaatgaagtgaaaatatgagctaatgaaattggactcaatctctgcaggttactgtcatttcttacttataaagaaacagattgtttccttggaaacccaaacatagcatttcaaggtttatcgacataacaaaccttagcgaggtatccaattgacaatcaaataaaaacaataatgttcatttattaatctatgtccaacagacctcaacttcacacaagctgcaatagaacatgccttcttcactcatttgtagactagaagactcctcactggaacccgagcaaccgcatatataagcacatggagagcaaaccaacaagagacaagatgaacgttgtggtgatgtattattcttctcggtatcaattgttgagactttggaagttgcatctttgcccatagtatcttcatctagaggtttgtccccaacttttgtagcatcggcatcatgtagtgatggagttgaatcaccacccagtttagagtccttttgtccagattgcttagcagtgtctggaatcttgagatacttttttgacttaaatactcctgagtcagcaggatcagctgccgcgcaccaaatatacaggctgaagacacatataatctgaaaacaggagtttgctaaatattaaatacgaaattggccatatctagttcagattgcaattaaacacattaaaaaaaaaaaaaaaaaaaaaaaaaaataagagaactacatgctaatccaaatgataaaagattgaagtaattgtgactccattaagtgcactttagtaattgaaaggcctactttaagagctgtcatggatcttaatgggcaaaaaacataaccacattcaacttctacgaagatttctttagtatcagatagcatatcctctaattgtcttaagccacgcaaccaatttgttgagcaataagcactctgaagttaataaaagtagtttatttgttcaaaacttgaacccaattgcaacattccattaaattccaatgaaactcaagcattaatccctacattactgttatctgaaactaggattcgagaaagaaagaaaaacagacaagtaatttatacgctcttataagctagagttaaagggtcataacacgcttgaatggatctacagaaaaaatcagcggaaaataagaaaacacaatacccatgaaaaagacagagaaatctacttagcagacacaaacaatcaccaagaaaaaaaaccgaaaaaaacagagaactatcagatctcagctcctcaacccaacaaaaagaaaatatacataaacaagagaaatgacttacaagaggagtgtaaagccccatcacaacatactgaaacatcttcttcccaacaaagggagcaaagaagacatagaaagcgaaacccaatgctaggaacactgcaacagcaaccaccttcatagacaaaaaataaaataaaataactacggaactgaaattaagacaacaaaggctgcttaagccactatactacttgaggaagaagaagaataagaagaaatgtactaaaccatacctggagagggtggtatgggagctgccatccgttcttcctcatcttcttgttcaatgctgaagattagctagagcagatgacaaaggcgttataaccaattgaatgggtcaaaaaagagaagtgacgactttagtgaatgtgtgtgcgtgttttcaactatttgtaaatttattttgtttcactttccctcattttccgggaaacatgaaaatggttgattcactgtggaaccaacccaaatgaaaagttgcaggggcattttggaaggagaggtctaatcaaggtaagaaatgaaatgggttggagaggaaagaggttaaagaagatagcttttctctggtatgaatagatgatgatgatgatgatgatgatgatagtggtggtggtgatgatggtggtggtgttgatgatggtggtgtgaggaagctttgtctggttcactcaatgataacacccaggtcaaggaaggtgggaaagaaaacagggtttgttgcaaag

SEQ ID NO: 218700 - DNA, 1751 bp, Cannabis indica
ggaaaataacaagatcacatgaacatggtcaagtgaatttcttactatctctaaaagttataaacaatttggtagtataatagctttcttgagaatgccaaaatcggtctctgaatagtgaatttgatctactatttatagtgaataagatgtagaatatttacatttaattaaagaataaagaattaaacattgattgagtcaaatccacgatatcctcaactccccctgatttctagcaatcccacttttttaagcatattgattgacctattctgtagcgattaggcagttgggatcatgaatatgaacatttcttttgcgatcgaggttgttggtcggatatttgtctaagaagtgccttcttaattgttcagaatgctggccagcatgccccctccagcatatgttgatgctagatggctccgttcggcatatactctgcccaacatcttctgggcacggttgtcttacatctgtccagtacctttgatacttgacacgtgtcacattacgttaccagggtgatttttgagataacacatcgaatctgcaaagtatagatatctgtacttctgcgaataagattggaaaatctaaaatctacacttgcgtcgatcgaatgttaattgacatgtaaaagtaactgatctacacatgtttatatattttaaaaatatattaataatgttataacgtgaaaaaattgtactttaaaaagctaatacatatgatacaaatatgtttcaagggtattcatggtttggtttggtcctgatttttattttttcgaaccaaactaataatattttaaaattcaaaaccgaacccgatcaattaaatgctcaaaccaaactaaaccaacccacttaagaatggattgctttggttcgaaatcgtagtttgtaattcgtaaatgttttaatattttttattgaattattttacttataatacgtaaataacaataaaaataacacaatattaatgtgattattagtattatgcctaagattgttcttaaatatcaatattcaataagaaaatcatattaaatatttatcaagaattaggtggttcgatttggttcatacaacgagtaagaattttaaaactatgaccaaactagagaattataaacggtcttgattgaccaaactattgacactgaattcatttggcttggtgtcacatggtttggtctggattggttggggttcagaaccacgaattacaaattatatgaacaagcttaattttaaagcttaataaattaaatgtatacatcatttttatttataaagaacacataatctaaaagaaagtcaaatatttttttatacatatatatatttttaattcttcatttgaatttgttattttttgtttatttattttaatttattgttagagacataaaacaacaataatttatttattttattattagttatgtgattttttttaataaatattaaataattcaatattaaaaataataaaccaaaaataatagattaaatttgtatttttgcggattgaatttaaactattatgaaaattgaatagaatttaaaatatgaaatctacacgtaatgaaaatcaaaattatgagtaaaataatagaaatttaattagatgaacacccttaaaattactaataacaacatcacatattaaattgtgctagacatgtgctttttaacatttctttatgaaaatatagatatgtgaatcaatttttttgaaac

SEQ ID NO: 218701 - DNA, 4686 bp, Cannabis indica
ggtaaaatattttccaacacatggcacccttgctgaccctctctaagcttaggaaccctacctggctaaggcctagtttccaagtgggcatccaagtttttgttctcttttgaccttggaaagggttttgtcaaggtcgtgtaggcatatacaactataatctcataggtggttcccttggaaactttataaggcataatgatgagtgtattatagttaaatgtacaatttaagactcgccatttgtctaagctggtatacttgagatggtactttgctaatacctagccttgtacgatgtagcgtatccgggaagtacccttgggtacaattggctagaattttgcatgtaccttgtagctttctctggttgctcacctccccttgtctcttttatgtaggtgattttgagtattggtcttgggaggtgacaaccgtgttgtcataagttcagtcagtctagcctttgtgagctagcatcaagtctgttctctagcaactatctgagtgatctcaaggttgatattgattcattatggccagaactaagtagtcttaccgtagagtgccaccttttgaccttcacatttcttggttgataataataggtacggtcaaaatagtggaggagggcacgccacctctagatggtggagatccagaggttggccaggcagaggtgcttgtagccaaccatggcattgagagcccaaacaacaagtccaaggttgaggaggctgtacctgctaggaagaggtagtataggacctgttctattttctctaacagccctctaggctcgtatgattatgatagacagtccttgaataggcttggttagccttcagtgatcagtgtagaccatgttctgatataggctactgagcctcaagtcctaaattttgcggtgcagggagactgttgggtctctcctccatctgttattaatgtcaagactattgatacaataagaaagagttgactggtgagaggcgtccagtgtgaggtgtcgttgagggacaaacgagtgcaccggttggccctcaactagatggtgtggtcagagcaccatatttagcaggggccagtactgcctttgaacccctactttagagacatcatagcatacttcagaatgtgcccaatgcaaatcaccctgaaaggtatcaatatcattcagtcatgtttgttctttatgtagagctacgctggccttagcgtactccttatgagattggatactattttgacttgaagtctgctctgaactagaatgaaacggttacttctacatccagattggctatcattagttgggtgacactaacattatgcctttgttaaaggtggggggatatccccagaactatttcattgccttggatatccaacaggtttgaaaccaccattttcagagagtacccacatacaaacactctattcctatccttcagaggagggatagtgaaaaccacattctgtccctcccaatagaggaggaatatactaaggttcgccaatgtggccaacttttggagatacagcctgtatcctcctgagtttggagttacacgggctgagggtccattaggtggtttagagggagccctaactgctgaggaggctagcccaggaggtgggcttactcttgatatggatgatgatgttcttttatcctaaagagccatgaattttgagaagatagaaagggccctccaccagcgcttagctcgcaggggcactattggagacaccactctactgatcaagcctagaggctagagttttgtcaggcccactcacccttgcctacatctagagacaagagcaaggaagctgatcatgatgcagataaatcctcttctaaggatgatggtagttgatagctgattgtaccatcttttctatttttagtcttgtattcaatatttgtaacttatgctcttactttgttacttcctttttacagatatgccttctagactcagaggtctagttggagggccttcacacaagactttaggtcaccctagggcctaggtggcccatactacccgttctggtgatgctacatgtacttctcttcttcctcctccttttgggcctggaccagctggacagcccatgatcattgacgcaccattgaggagggcttggcgttcaagaaagggcacctagaggcccagccaagggttgaattcagccatggggcagagagccatggtggcagctcgccatcgtatggatagagccttacccaccgtggatgatgagcttttggagctcggtgatggcgacctagagaggctatcttctaatagtatctaggagttggcctcggtaagttgcacatctaactttgctcacttttcagtattattaaaagttggcctgccataaggggctattgtacaaggctggctggctagtgtagtgtcttgagaggctagccagcattagtagcaccatagaggggctagcgtgctagtgttttttttggcactaattttgaccatgttttattttcaagcctttatgaagcttagatttttgcacggtaactctaaggggtcctcaagagctctccgagagtagctaaaagcctaggaggctgagcttctagcgagaggtgaggcccttaccaacttagtggctcttgtcaaatagaagtaggatatgatttctcgtttagagtgcatgatcaacaccaggaaccaagagcatactttacttgcagctgatgtctctaggctagagagagaactcagaaggagtaatgatgaactgaagcttgccttcgatggccagcaggccttaaggaacgagtatgacaacttgtcttcagaggttatctatgagattaagctgcacaaccctagatttcatctttcctacgatcggggagtccgtttccttgagcgcacactggcctaggggaaagtagttgaatgagagcaggatggagacagaccaaaccaccgtctagctagaaggatcatcattgggggactttgatgaggccatggaccaacaaacccattgaggaggtggctggctaaggtattgaccaggttgccagctagcctatagaggccttggttggcttaccctttagtgatctagacattacagcttccgattcagctccacctgcacctagacacgagtagcttcactttcttagtattttaggcttatgattttatttgcatttaacattttgatttcatgttctgtatggcatattagcttcttactcttgaacactacttaatttcagccttatggctttcatattcgtacttttggcctataggcactctgtttttgaacacttactagattttagcctagagatttttaccatggatatgtgaccaatcaggcgatctttaactatggctatcttctcattgccttgacatttaagtatctagatttacttttctttatgccaagctgaagtatgcatgcaggtgatttaaaggcaggtttagtagcttatactgagcgttaaaatttatctgcataagttctctgtgctagtttgatgcattgtacggtgtgggtgccccccaagggaacacgcaaattcacagtctcttggtgagttgcaattcaccaaggttcatagcccttacttgggaactttcttggggttctacctattgtacgcatgtggaagtaaagaagaataacttgaagaggttaatcttgttagcaagatgtttagacacaacatatttaaactgaaacattgttatgaattcattaattggtctttattgctgtgcaacttacataaattgaatctacaagcttacataataaaagtctgcttctagaaatcaaatggctacccctgcctaacatgccaagtagaggccatcaatgaagaacaatgggcagtcatgcgaaaaggctgtgggcactagctcttttattctacctcttattaacgagttggtaggtcgacaagtagaaaaccttgcataattgtggcgaataggggtgtttcacccatggtcaatgcgagcctgattataccttgattggcgatactgttgcaagtgaattcgcatagatttaccatgcaaggccttaatttagccttttcgagccccatcttcttcagagtttccttgtaaaggatgttgactgaactctcgttatctatcaacacccttttcatcctttttttggcgagctggatagtaatcaccaacggatcgacgtgagagtacctcacattcttctcatcctcctccgaaaatatgattggaggttcttcagtttttaccttcttggaaggttctagagcaaataatgactgctcattttttattttcttcacatacctcttttgggcattgttactctctcccgcaatatgcggccctctcgagataaccaagatgtcctctccctcaataggaggaggttgtaatccctggtttcttgggttgttgggcagattgggctggttatgtccattgccacgtctcttgacatactgcttgaagtggcctcgcgcgataagactttctatctcatttttcaactgagggcactcgcctgttgtgtgcctaatgcctttatgatacttgcagtacctggtcggatctcttatatgcctcgcgtgtctcatgcgcttgggtttactgaaggcaaccttgtgctcatgtg

SEQ ID NO: 218702 - DNA, 5873 bp, Cannabis indica
atactaaaagaaattcttatgaatgtcaaatcaatttcatcgaattgaaaataactagtgtaattcaaattaattagtaataaataaagataaatattattttaaattttatattttttaaaagtattaaattctctatttttattaaataacattcagattttatatcttttaaaaataataaaaaaaaattaataataacttgatttaaaaattacatattttgtttctactaaaaattatttttatgttagttatattaaaataaaaaaaaaaaaaataacaaaaattgaatttaggatttattttgtactattaaaaaataagaaattaattttttttattgaagtatttatacatacatttcattgtaaagcataagattcgattttaagacttcccacacacataccttctcatattctcttatagtcacttgagctagcctcaaatgattaggtctaaattattctttaacaaaatcgataatctaatcgtaatttttacaaaatagagaagtcaaaataataatattatttacatttattatttattactaaatactttgaatcacactaattatttccaatttgatcaaattgatttcacattcataagaattcctttagaaaagaaaagaaaagttcaataatgaaaggttatctaacaaattattatgttatgtgagataaggacattgatgtcgattctcttctctctagtatgacattgttgaatatttttttgttggtaaagagagagaaatattagatgatataagaaagaagaagaagaagaaaaggataggatagggaaggggtattttggtaatttggaggaaggcaaaaagtagagttttgtctgtattatggacttggtcgtagggaatcaatttggcagacgccgactttatcttttgtggtccccacaaaccacgtaactcgacacgtcacacgtttagaactcgttaagtccacacacatacgacacgtgtcctattcttactgctaagtcggataagccggtgcagaggtgaagagcgagcactttcaatttctcttttctcgtgagtgtttcttttttctcgcgatattattattcaattaataatgctactattgcatgtgatttttataagtgtgaagtacaacaaaattgtgatagttataaagatatttacatcatttcaaaatgtatatgatatttttttttatttaccttatgtaaaaattataacttttaaatatttttatatgatagtgtatattataattgtaataataaatagtggctaactaataatgtgaaattctaaattagtataataggtttattaatgatttgattcgtgatattgtttatcagatgtattttttctttggtgcatctttatgtcatgtttctcggtattctaatgttgtggctcatgctttactcttcgggtggatatttattatgtttggatggccagtatatcttatcttataatgttgttaataacgaactcatttattaatctacaataatttttctcttaaaaaatgatatatagtttaactctttcttataaaattatcaattatttacggtgttgattcaaagtaactcttaaatctctttcttaataatttatttttagttacaataaattttttaaaaaaaattatattaattttaaaattaattaattattttttcaaaagaaaaattgaattaattataattactatatatttaaaataaattattattttaattaaaatatttaatgaaaaacttattagacttgtaattaaaattaatttttaaataacattaattttaattgatattttaaaagaaaacaaaatatattaataaataaaattaaataaggttagtcatctaattataagtaatttattaattattttttagttaatttctaaattattcttaaccattcattaataatctaatgacaaactaatgtaaccatcatgaataaatatttgatatagctattcaaactccttttataaatatacatatatgtattgtgtttattagaatagtcgatttatataagtattattatattaaagaaaaagtattattatatattgtctaataatttcaacaaaccaagcacaatagtaataagaaaaaatcttgacaaccaatttttattaataatttcagttcgattttaggtttgatactgaaatatttgctcaactcatttcaactatgagccagagcatttgtatttataagatgtagaaattgttacagaggaaagaaaagagcaacggctctgtacaggtggcaatcccaaatcccaaagaagattacatagaaaggaatattcaacagaattataaaagggaaatcattaatcattatcccacaatcttggaccacaacatgagatgacacctgtctttagagaagctgtaatcagcagaggtgaaatgcacagatcagtaccagggtctgcataattctatttctcaacacctccctcaaacgaagggtgaagtctcactccaagtttgtccacaagaaaggagaatctggaatttggcagacctttggtgaatagatcagcaatctgatcttgagatggaacatatctcacttccaattgtttttgtaagaccttgtcccgaacataatgggcatctatttctatatgctttgtcctagcatgaaacacaggattagatgccaaagcacttgcactgatgttgtcgcaccaagtaattgaaggtaacacgagaggaaatttcagttctttcaacagagattcgatccaagatatctcagcagcaacatgtgccaaagccctgtactctgactctgtgcttgatctagacacgactgcttgctttttagaagaccaggagatcagcgtttcacctaaatacacgcagtagccagcaaccgagcgtctgtcatcagggcatgaggcccaatctgcatcagagaagccagttatactcaattgattgctgcagctaatatgcagtcccaaggtcttcgttccctgcaaatatctcagcactcttttcacagggttccaatggacattcgttggtttttgaaggaactgacttagcttgttaatggtgtaagctatgtcaggtctcgtatggcagaggtattgcagggatccgattatacttctgtaaattgaggggttctgcattggttctccatcatttatagatagagttttgccaccagtgattggtgtaggacatgatttgagattattcatgttgactttcctcagtatgtcttcaatgtattttgtttgtgttaagtacagcccagtgatgtctctatagacttcaattccaagaaagaagtgtaaggatccaagatccttcaaggcaaacaatttattcagtttgcaaatgaagtcagacactaatttagagtcacttccagttaccactatgtcatctacataaatgagtacaagaatgacaactttctcacttttgtagaagaacaatgaagtatcagctttggaattctggaatttccattcaatgagagtgtttttgagcttgtcaaaccaagctctaggtgcttgcttcaagccatagagagatttattaagtttgcacccaatctttccctttttcttcaaaaccttgcggttggaccataaaaacttcctcttccaatgtgccatttaggaaagcattattgatatccagttgtctaatgtcccagcctcttgaaacagcaattgtaagaatgattctcacggttgaggctttgattactgggctgaaagtctctccatagtcaattcccggtctttgatgaaagccctttgcaacgagccttgctttcaatctttcaatggtgccatcagctctcagtttgattttgaatatccacttgttgccaattaagttctgacaagcagcagggggtactagaatccaggtgcgatttttctttagagcaattacttcagtatccatagcccctttccaacctgggtgttttagtgcttgttcgacagattctggttcagtaatactggtagtctcagcttttgttgttgtgagataagtttttggcttaaagatgccagctctcccacgggtcaccatagaatgtgtaggttgaagtgctgttgccagagtaggttgaggctccagtgcaggttctggatcagttgtggtataatcaggtgctggtgcagattcagtaccaggtgttggctcaataacaaagtcattggtaggaccaaaatcagcatgatgatcatcaaaaccatcaaagtcatagtattcctcccctgcatgacctgaaactggactgttttcattaaaatgatagtcaggtgaaggagaatgcacctgtggtgaagtaggtgatgcatcagaggaggcagcagtagatgaattgacagaaccagaattaggcacattgacattctcgaaactcgggacaggcaaactagaccaagaagaactgtgaacaacaactggttgaggtgtttgatagttattgagaaaacctttcatgaaaggaaactcgagttcattgaacacgacattcctagagatgtaaatgcgaccggtgggtgtgagacatttgtaacctctatgggagttactgtaccccaaatttacacatttcagtgaatgaaactgaaatttgtgtgtttgatatgggcgtatgcacgggaaacaggcagtaccaaatgtcttgagaaaggtatagtcaggtttgtggctatagagaacttcatatggagatttatggtcaaggataggagtgggaagacgattgatcaagtacacagcagtgtcaaatgcatcactccaatatttgagtggcatttgtgcttgagcaagcaaagtaaggcccatttcaacaatgtgcctatgtttgcgctcagcacggccattttgagctgaatcatgaggacatggatgttgaaactcaatgccatgttgatgcactaaagcagtaaagggttggtattcacctccccagtcggttcttagacttttaattttcttatcaaacttattttccaccagatttttgaactgtataaatgcatttaaggcttcagatttagctttaagtggataccaccaagcaaatctgctatggtcatcaaggaagtgtatgtaatatctatgatttatgtttgatgcaatgggagcaggcccccacaagtcagtatgcacgagatctaagacagagttagcacggttagaagataacttatgtggcagtgcatgtgactttccatattggcaagcatcaccgaaagttggcatttcattccttaattttcttacattacttgactctagaacaagatttaaaatcctggttgatggatggcctaatcgtctgtgccaaacatctattctagacacatgatacttatcagctttcggctggtttacactagattcagcagtaaaacaggtggaaaaacaagatgactcagactggtttttatttgtgaaccgtggatgagttgaacctgtggtaagatggtgatgagagggggtttccagtctgtacaatccatctctaagcactcctcgaagcaccaccttctgagttgttttgtccttcaccaaacaaacattagagtgaaactcaatcagtacattattatcattagtgagctttgagacactaattaaattttttgctatttgaggaacaagcaacatctcttttaacagaaggtgtttcccatcatttgtgtccaagacaccactgccaatatgagatatgttcagtttagatccattaccaaccataacagtttccttaccaccatagggctgcttctggtttagagatgcaccatctgaagtgatgtggttgctggctcc

SEQ ID NO: 218703 - DNA, 4706 bp, Cannabis indica
acaatataaattttttatgactaaatgtgacttttagtcacaacaaattgttacttgtgaataaaacatagcatttagttacaatttgtcactaatttagttttagtcagactaaaaccacatttagccacaacaaattataatttttgtaactaatacctttaaccacggaccttttaatcacataagaatgatgttttattataattagtcaccatttttttacttttagtcacaaattttattgtgactaaaagtaaaaaattttgtatagtgtatattatcaataattgtaagaaaaattattataactataatgcacaacattatataaaacaaattaaattatgataattatggtatataccaacaacaaaaataattaattaatgatggtcttaagtagtaataactaatttaagtacatatatataatataaacaacaaaaaatcacttacttttttcaagatagagaaacacatgtgctctgtcatacagattcttagtgttggaggaagaatatacataagatgctcaatatttatatcttttccttcttgcaatttaaacttgacataattcttaatcttcaactttaaatcattagggattccatttttttgatatccacagctctaccttttgctccattgtactactctcatgctttttcatatccgataatttagttacccaagctgcaaatgtctattaaaatgaatgaaaataagtttcaatactttataaatattgcaataattatatttttcgtttttttttatttttaattactaaattttgttgttactaaaagtaataagacttttataaaaaattatttacgaacctcatgactcttgtgttggccttgatcagcatgctcctcgagtatagaaaagagatatttgacatcaatatcttcgccttgtctaatttttcgacttaggtatttgttgatgagtttcttttttcgagatggaatgccatggtttgtgagataagaatctatttctggttgtatgatgcttatctttttcctatcctcttctgattttgtagtttccaactgcatatatgtctatataatatatgtatatatatatcataggtaatataattagttaccaataaaaagtttatttgcaaaatatgatgcatttaaatattttgagggttttctagggtgcccaattaaattaatgttttacatttttttctttctaatttgttaaaaataaaatatgtaaatatatttttttattaatattttgaaacaatagctagtgtttgagtttaatttgtagctatatttattatgttttttttaaaaaaaattgattaacaaagactaagagtaagtatacatacctgcaaatttccaataagatataaaaataatagtaaacccaagattgaaatgagaattgcgaacaagttttctacaatattgccacttgtgtcaaggttggaaccaaaagaactacaagaaaaataaaagaaaattaaaagatatgtatgaaaattaattagaaatatcacatcttaataaacataggatatatttacaaacctcaaatttttcaagccccagaaaaaactacgagtgaatttcgtgggaaaatcagtattgttgactatgcgagactcaatagctcccgaaaacattccaaaattgaagatttttggatctggtggattaattgggcaatactgatttaactttgtcaaattctttatgggatgactttcaattccaagactacaatcaaaaggaccaggtgtacattgttttggcatgtgatatttacaagcttcgtgccagcaagctgtctcgcgaaaaattgaatagaagtaccaaaacgctccgaaaacctaatataaaaattaaaaaatattgtagttaatttcccattgaaactcacaatccgagctatgaaaatggttaggttagccctacaaagaatattgttagctcgacaatctttgtagggttccaactaatcacgtggagccacatagttcgggtttgagtcatttcaattggaaccaaacccttgttacatatagtattctatcattctaactttagcaactattataaaacaaaaaggaagataaaaatgatgatatataatacttacatgaccaaaattaaggtagacgaaaaagaagaaggcacatctgacccatacacgttgactgatgagtgagtcgaaaccctttcctatctctttagctgttaagtacacacgaagaagacgaggcacatattggagaagaagtattaagttgatgaactttcttccactcaaagatcttgatcctgtaatttgggaaaagtatagtaaaactaccacctacatacacacaaatatttctaattagaggagtattaattacaatcgctatgcatttcaatcatcaacacatcaagacattccccaaaaatttctcaatcccaaccttattcatgtatttattttaaaaaaataaataaataatttacattactgaaaacatatatcgttcttgatattctagtttacttatgcacatgcgcttgaaaaaaattaataaccttgttttaaacattgtaaactattaaaagaagtaagaacttgcaagaaaaatattgtaactacaacaaatacaataattatgaagtatgctcacaaacaaaatcttaaacaaaagaaaagttaataattaataataataatatacctgaggaagaggaagaatggacaaaatatcgatcagaagatgaaaccacggaaaatttgtgaaaatggatacatgaagttctttggacattttcaaggcattatgaagccgaaaacagacatggaaaacgtaaacaaatcagtaacagatcgcaaaacaagagctatgatctccatattatagtctcttttggaggcattttcgattatcgtctacaattggtacgtagaggaacaatggatcaattgagactccaattagacatgaagctaagaatataaaattccatagtcgagagtctgctgcccatggattcagtattttatccactttattatcatcttcttctcttccatctcgactgaaattaaatgtaccaaatcaatgtataattaattacactcttttaagtaacaatttcacccactattaattatgattcaatacaaatgttgtccaaattaaccaaatatttacatatatgtcactactacaaaaggtagaattcgcgactaatactaatagtagtaacggagtcagccacatattttagtgggatcaaaaaaaattagagtactaatgataaatataattttaatcgagaaaaatataaattttagtgggacactaaaaataaaaatattggagaataaaatgagaaatataaattttataaagataaaattgaaaaacataaatttcatgtggacaaaaataaaaatatataaaagtataaataaaaaaaattagatgtgaaatattaaaaaatatgtatataaaaatgtaattaataaaaagttgaggaggtaaatgaccccacatgcccctttggttgtgccccacaaatagtatgattgttttagaggaattttatagtatatatagtacaaaaaattttatttttagtcatgcaaaatttattataattaaaattaaaatagtgatagtatctaaatactatattttaattacaattaattttttattgtgactaaaaattaaatttagttaaaaaaaaaaaattaatattgtaactaaaatattgttgctaattataatatttttgtagtgtttataattataagttgtaattaataattaatatacttaccgcaatgagaacaaacctctctcttgaagattatgtttcatcataacgtgtactcgatcagtgtatagaaactgccacatatatatatatatatttatgttaaaatcataattataatttccatatatatatatacaaagtaataatcaaaattatatatatacacataaactcaccaggagagactatggttgaagagagcaatattttgagagagagagagaaagaaacatttattaaatagacaactttggttgaatacaactaatatgcagagcaagaggctatttatatagctatgatttttttttttattattattattattaacttaattattggagaaagaagatagaaaattaatagacgacttaaactcaaagaccatatatatgtagcacgtgagcaaattcataattcaattgtgaaataaaatattgaaaaaaccactatacaaaaccatttataatcatgagaagacgaaagcaacatagttttgttatctatatatataaaatatctatgtattactacacgtatattgaattgtgtcaactatgagatatttatatatatataaatattctatgtattagatagaagaaatcaaacttgacagaatactctcttttgttcttttgtgaataaagtaatgtatatactatatatacatatgcacttgtaataattaaagaatgtgaaagttagtgatcactatagaaaaagctttggtttttgactcaatatagtacttcttctcaactggctgctatatatatatatatatatattgttattttatttttatatatagaaagtacttcaatgaaaactaataattaagagaaaattcaattgatggcgggtccc

SEQ ID NO: 218704 - DNA, 8241 bp, Cannabis indica
acttggagtttcaggtaactgcaatatataatgtccatgtattatctgtcaaagtttcgattttccagctctaatttctcttgttttttctgcattacctaacagaaatttcttgtgagatgctttagtctaaatttatgtaaatgtcaatgtgttgttgtgtaggatgtattgctgtacaacttttttggatcctcccctttgagaaagcaatggaggcttatgtataaatacatgaatgagcaagatctgattgaatcaacatcattgcaatttcctcttttcaacgagtgcaaacatgggattttgttggctgagttgaaggcattatacgttgccactggatgtacaaagaagaggttgtggatttgtgataacactgaattctccaaacctatgtttgactattggatgaagaagtgtcttgtgcaaattcaacaactcgatgattcacttgctcagtcaatgcaagtctcaagcagtccgcaagagtggaaatcgaggggtgtcgaggtttgtttgtttgtttcattcttatttctttatttctttcctgcattcttattgtcatacatcacgaatagtgttggtgagttttctttgatgtgcaagtatacacaatcacatacaagtaataaaataataagtattttaatcatgtcctcaagcattgtctaagtaaatattgcaataatctatatcaaacaacttggtatgaaaatcataatgatagaattaataatcggacaaaagagtacttcaatgaactaagtaaacaaagcctataaatactgagagttagtcttgtgagaagggaggaatttcgtgtgaaatatttggagtaaaatattactcagggagtttaccaagtttctcgaataacttgggattttgtttttactcttgctcttatcaataaactacttttctttcaagaataattgtgcacaagtgtgtatcacaatgggaaaatgatggtgaagattctaaaatgaacaatgaagctaaataatgtttctgatgagatgcttctctttgattgttattcttatcatatcatcaccatcatcatctatcattcaaattgaaaaactgaatttgattttgaacagctctatcatgtgcacaactatgaaatggccacaatttgctttgaaaaagctcatgacacactttggcaaaggaaatctaaagttgctggcattcaagctatggctaaccaaatggatacttccaatcctgaagtaaccaattcttaccatagagaagctgccaagatattcaaaactatggggaagtttgaatctgcagcaagttgttttataaactctggagactacgaacaagcaggtatgaaattgtgatctcctttccatgcttattctacatgaaaatgtaagagtatagcttttccactatatcaaaacattgttcaacatgtttcatctccaacaatttatctaaatcacctatcattggtgcaggtatgatttatttggaaaaatttggtgagtcaaggttgaagagagctggggaatgcttctccctgggatgtcattacaagcaagctgctgatgcctatgccagagggaatttgttctcagagtgtctgaatgtatgtgccaaagggctcttatttgacaagggtttggcatacatacaatcctggaaacagcaagttaaacaagactctgatttgactagtagaagcaaagaaatagaaaaatttggccaggaattcttggagagttgtgctctacattattataagcttgaaaacaaaaaatctatgatgagatttgttgaagcttttaattccatgagtttgattcgtaagtttttgtgccaatggggttgttttgacgagcttatgtcgttggaagaaaaatcaggaaattttgtggaagcttcagaaattgcaaagctaagaggagatatactaattgtaatagatcttcttgaaaaggctgggaaatttaaagaagctgcaacacttattctttcctatgttctttccaactcactctggtcttctggtaaaaaaggctggcctttactgttgtttaaacaaaaggattgtcttttatcgaaagccaaatcatttgccaagaatgagactcaagacttctatgattttgtttgcacagaagctgatattatgacaaatatgaagagtgacttgacaatgagaaaaaatcaaatgattgcttctcagagacataagagtgttaggggcgaaatcctatctgctcggagagttcttgatgctcatcttgattcaaaggtcacaaactatttttgggaaggacatttaatgcatgatcatctgatgcattcagaagacatgatttctgagactcaggtttcagttgagtcactagtttatttctggaatttttggaaggatagaattcttagaatttttgaatatcttggacgtctgcagacacgggacgtcgatgaattcacgagttatggagaattctgtttggactatttaggtgttttgaggctgtctaacaatttggtcacaaactatgtattgctccactctgatgctgaatgggctaaaaatgtggagcaaatatatgtaaagagtaatggaaagttagtactttctgttgatgttggccagtttgtatctgctgctgagatttattggtctacagaagtactctctgttggttttaaggttctgaacaaactcgaagccatttgtacctttgtgactgataaacccgattctctttcgaggaaatgcaggactcttacccttatctatgatgttgcacagtttcttttggagtccaaaaatctaaagagtaagagaacatgtgaaaattcagatgatctgaacaaattgataagactatcaactgatttttcgggaaacattttccctttagattggaagatatcattggtagaggaccttgtttcattcagaggaacagacatttgtgagaattttctgaaaatagtgattgctgagcattgcaactcgaggaataatctgtcttacaagcaaattggagctgtagctgtatttatactcgggtctagtaagcttagtgatgaactatttgagaagattatcaaaaggatggagcagaacctcccatggaaggcattctttgagcttctgcataggtctagaggatcatacttttcaaactcatctcttatcggtcggtttcataaagttttggtagatgcatactcaaatatcagaaaagaatgtgaccccatatctcctggttttttcttgtatcttgttgagcgccttgtgatttggtcatcttcgtataggggctacttctatacaacaaagtcagcatttgttgagtggctcagctatgaagagattcatcccaaggccaccaagtcaagttctgataactcagttggttttcaactctctcttctagaactacttcgatttgtgatcgatgttattaaggaatgcctttacaacgagcggtacatgattgattggatcaacagatcttcctcaagagataagaaggcctattcattacttgtgtctaggatggttttgataatttgtttgcttcatgcgaatttcgggatgtgttcagatttactctttgatttgctggcaaggcctggaatcacttctcacttaccatcaaatttttgtgatactctccagtcacattttcttagtttaaatcccaatgtgctcgctaaagcatttaagcagattgacaattctttggtcattgtcagttttggtaccattgtctcaaagcctttgttttcggatgctgtacttgtggatctcagagataatccttgcaagaatgacataataagagcattgtttccgaaaagcttagaagcttcaaaaggttggagtcaagcttctgcgacggaagcttgtaattctaagacagaaatagtttcaacaagcggttccacagcagggacgagttctgagcttaacatggtgagagagcagaagttgcagaacaacagcatccagaacaaagatgagctgagcccaccaaagaatttacgcttttgggaaatatttgaagccattaactctgaaggaaatggaggagagcaagggaagcttacatcaaaagctcaaacaattaaggtaaaaccttcattagttttcacatgaacatgtagaaaaattaaatgatcatgccaatatttctttcttattttcttccatcattttcaggtggatttggacaaatacattcccctattaactgcagcagctaatggaagtcttaagagacctcttggccgggacgaaaagatcttatctagcgaaatggttgacatgttgtatgaactgaagcaactttctgctgcattggacgcaaggttagttttggttcatacatttgtggttgtgatcactaattagttaagctttcattttctgtaatgtattatttcctttgtcgggttatttctacttcaggttggaatttctagtgaaagaattttctaagaggatacaatcaagaaaaccaagaatggaaggcgtcttgaatcagatttttcacaaacataccacagattctggcaatacaacctttcagggtgctgtcaaaaccgggaaccagtgcgatgatgaagaacatggtaaagccttgtctgcaaaaattagctactctgacgaggttgagtcgccgatttctaaagcttgtacaacttcattggtttctgaacctattaaggcaccggataacaaagcaaaagtggcagaaacaaaaccaaaagaaaaggaaggttgttacattctctgatgtatgatacatgttgagtatctatatatatttatatgaccttctgtaatatctctacttggttaaacaaaatgggaaataaattgtgtggatggggttctcttttgaagagagtttgagggtcttgctgatctttttttgaatctcagctgaagctaacttagaactcagaatccaagtagtggaacatatttaatgaaaagatattagtagtttttgtctttttttttttgatatggttgtggagattgtataaatgatctaatctctcagctatgactatgaactgaaattaagaaattaaatgtatgaaccttcaaattattatgtagtcctcaagtgtgcttcaaatctcttatcatgtgacaattccaatctttaagatcatcaactgtgatttcctcaaaataattttgaaggttgagcatttgttctctagttaaatgaaggtaaaatatatgtacaagtacatcgcctcctttggctatacaaagaacaaaaaaaaaaaaaaacaatttttctttctttaacaatctcaattgtacaacattcaagaatggaatgtgtcttgaattgtctattttggcaaatgtcttaaaatgtgattgttgaatctagagaccaaaccaatgttaggaatggtaatgatcatcatcatcattcttagcaccacaacatcgaaaattaacgattctaggaataggtaagtcaaaagtttctgaacctaatgaagcacctaaggaatcgttttgctgctacattccctgatacaagtcaagagtagtttatatgaactataatttataaaataagtaccgaactaataacattcgatattatgcaagatgatacacgaaagatcctttttttttgttgttgctctttttagccctctatttcttatctttaagaggtcttcctccactagttggttttctcataaaacttcataagtaggcctatatttctaaaaataattaaattgttaatggcagaataaaaccaaaaaacaacccctcacttgcaaaattatcgaattgagtacgattatatgagcaatagcattagcatctactttaccagaaatatcaatgaacccgattatcgaaattgcacatgatagccttttttagttgtttctaaacctatttcttagttcaaactggaatcatttcccttccaatatttttctattggagctttcctgattccttttatcaatcataattagaaactggagagtactaaacttttggtgaatgagcttcagtaaattgctttctattcaagtccaaagccaaaaaacataaaaataacataatgtgtctatgagtaaggaaaattacagagacaagaatatcagcagtctgcaactcttacacatagaattattgacataaacttagacaaaaattctaatcttattgaacaaaatttctgtgattcctctgtatttctagtaatctaattaccaatatgataaaaacaatagctgcctttttttttcttttttttttgagttcaattcatttagaactataaaaaaataggagctttaggcaaaaagaaccttattctgctgaaaattttcaaactcttaattctcatctgttccaaatagcttcatccttgacaatggagacctcaagtagccttccacttcgaatttctttggagaaagctcgcggtacttggcgaattgctctttcgcctctgaattcctatcgagcaagctgtaaatcatgcctctgcaaaaatatggcctaaaatcattagggtcctcgttagtcaattcctggtaaagctccaaagcttcatccaatttcttctgcaagaattgtatttgcgccattatcaatttcacatcccgcgcttccttgggtttgttctcctcctcagcaatcctcaaagcttcccccaatcgcctaatcaccgcatcaccttcaccatttttgtccatcaacagagcattctcaaacaatgcctcaaaagacaaaggattcgtagcaagaatttcctcgaacacttggcgggcactatcaattttacccatttctccaagcaacctcgccatcaaaaacttccactcattctccccaggctgagccgaaaccaaccgttccaaaatcctcaaagcctcatcatcctcacctgcctcgagtttctcctgtagaagagacttgagagcatcaatggcttccaaattagagtcgagaaactcagaaagcggagaagacgattccggaacagtatccgactcatctgtttgttcggtgactgtggccggagtttctgctctggcgtgaaaatgcgtagacttgcatccgaacatggaagctgttgctccgatgagtatggcagctttggcgaagcttttgagggttttggcaatggggttttggggtgaggattgaacagaagaagaagcagtgagctttagggtgggaaaatggagatggggagaagaggaaaggggttttgaggaggtgaaaggtatggaattggtacggaatagggaagaagaagagaatgtagctaaggcggaagaagccattgttgaagaaagaggcggaggttgtaaggagaaagaaagaagagaaaagaggggttttagtgtttaggtagaaaaaatgggtttgggtgtaaatttattatggggaaagaccacaagagtagtagtggcaaaagaaattaattatttaagtttaaagtgtggttggtaaggggaaagaaaatcttttcaattttcttaaaataatagcaacaaaacatgttcttttccaaagaaaaaacatctcatcttcttctctaattttttgaaaatttaccaaatattttaaagaactgtattgtacaaaattactaaaaaatatattattagtgtgtaccactatgttcgatattatattggtataattaagtattgggtcttatataattttaaaaaaaaaattaaaaaatatagctaacaaggtactcagcattatcggtgctcactcatttttgtgggatacaccataaaagccccaaaatatattgcatttgggtataagaaattagactctatgcccttttaatattgtcctcttttattttactatcttttttaaagtctattatttttatcttttttaaaacactttactaattttgtcattgtcacttcaatatactccttatgtgactatcttatgttagggtatcgaataatagctttttacgttctatgatttttttttcttcaaatttagaaatattattagtgtgaaagtaaaattactctacaagaagataatcttaaatccaaacatttatttgagtcatcataaaatatatttaatatttattctatataaaatgtgctagataaagaatttttagtttatgagaaattattgggtggtttttttttaaataaaaaataaataacaaatgattagatgttgtc

SEQ ID NO: 218705 - DNA, 3050 bp, Cannabis indica
ttcccacacaaccatctaaaagagttgaggagaaaatctctatcagaggattcccccattcggcccgagaagctgttttggactttagatgagttgttgctgttatgttgtctgagctaatatagaaaggtttagtttccatttttgaaccaactacagtcccagtttaatagccaagacttctgccaataaaattgaaacctgtcctgtctgaaacccagcttccgccgcaagcaaacaacccctgtgatccctgatcacagcagcaatgtcgcacccgtgtgtgtctgtacaaaccgaagcatcacagttcagcatataggatccttccggaggaccattctatcttctcttctccttgatttggatgatttggttgtgaactttatctttctgcagcaagttagagatgtagtcaagagcccaaagaatccagttacccatatcaacagtcttgttttggaaaattcgttggtttctttgactccaaacaagccaacttagccccaggaatacttcaaagtcctctgtagaacaatttgacttcatatacattagaaaggcaatcatattagtcattgaatcgagttctttggggaaaagatgccagaaccccgctgaacgccaaacaatcttcaaccgaggacatttccacaacgcatggcctatggtttcctcatgattccaacaacctgtgcaacagcggtcaagttgaattcctctatgcaccagaatactctttgaaggaatccaattgtgacacaccctccaaataaaattcttcatcttcggagttaatttcgagtgccataacatcttccaccaccccctcactgttgatttatttgaagtttcagccccctgcttctctatttgaattgtcttgtaactactagctatcgtatactccccattgattgtatcatgccatattagttcatcctccccacatctttgtgtgtttgtatgcctaaaatccaagtaatgtcgtcttcgtgcattgtttccttgagagtctctatgttccaatcgcccacctcatccattagagaactcacatatgagttggggggaaccatagccggagttcggagaaggaaaggggcccctcgaggaatccaatattcttcattgattcttattttattaccatttgtcacacgccaccttgaaccctttactataagctcacggccccatataattcctctccaaatatttgagcaataactcccaaggccagcggttaagaagtcagaatttgggtagtagagggctttcagcacttgagcgaccaaactatctgggtaggtaacaagtttccacccttgcttggcaagtaaggcttggttaagatcctccaaatctttgaatcccatacccccagcccacttatctttgcaaagcttatcccaactgccccaatgaatttggtgtttatcttttgttgatccccaccagaaatgagcgataagactttgaatctcacggatcagcccctttgttaatctaaaacaactcattagatagaccggaatagcttgtattattgatttgattaacacctcgcgacccgcttgagaaaagagacccatcttccaaccttgaagtttctcccacaccttattctgaatctgaccaaacacttctcttttatttcttccaacaaacgcaggtaagcccaggtatttagtatggttttctataaatgtgacccccagtgaagtagccagcctttgaccatctgtatgtctaattttactgcccacacataagcttgatttattgaaattgatgcattggccagacatagatgaatagatacgaagaacctcacctagagctgctccttcctctaaattagcatccaagaataccagctgtcgtcggcaaatagaagatgtgttaatcttttctccaagaggccaaatcgaagcccatgtaacctatcggctcggctagcttcgttaagtaaacatgataatccttcggcacaaatgagaaacaagaagggagagagggggtctccttgtctcaagcctctctttgggataatatgacctcggggctctccatttagcaagattgagaaggtgaccgttcggacacatcccataatctttacgatccactcatcctcataccccagacatctcatcatttcctctataaactcccatttgacccggtcataggctttagacatatccaacttgagcgccattttccttccgttgccaaaaggacccttcttcaaacaatgtaagctttcaaacccaaggatggcattatcttgaatctgtcttcctttgatgaaagcactttggttctccaaaatactttgtctaggcttactttcattctattagcaaggcatttggatatcactttgtacacaacattgcacaaacttaaaggtctatagtcacctaccattgttggtttcttcactttggggattaggcataagagagtgtcattcaaactgctacaatctttgttcttgtttagaacttccaggcaagtagtaatcacttcatggcccacctcaatccaatgattatgataaaacaaccccgggagaccgtcttttcccggagcttgaagaggatgaatttgcccaatagcctctttaacctcctccactgtaaagtcttccaaaagtattgcattatcatgaaaggacagtcggttgggaacacaccgagctagagtttatgccatgtgaggataagggtgcgaagaggagaatagatccgagtagaagcgaactaagatttcctcaatctccttgtctttcgtacaccaccttctttgatcgtcaaatatgccacttattgtgtttttctttttcctttgggaagccttatgatggaaatatttagtattgcgatctccgtgagtgagccatagagcccgactcctttgtttccaaaggatctcctccttggcctcggccgcattcagctctctctctattgtcctccgggttttccaatcctcctcacctgaaagagtagaaaggtgtttctgttggaaatttattttac

SEQ ID NO: 218706 - DNA, 6128 bp, Cannabis indica
tgtgactaaaaggtccgtagctacatgtataagtcacacaaatcacaatttgttgtgactaaaactaaatttgtgacaatttatatttaaatattatgtttagtcacaagtaacttttatgttgtgattaaaaagtttgtcactaaaaagtagttattttttgtagtgtattagtgctcaaacgtaaatttaatggatttaatttacccctgataaccttcttttgttagattaatttataaatagatgttgtaagggaaattttgaatagggatatgtaggagattttagtaatttattgggtactataattgttaatctcaaaccgttaaatgttgtaggtatgtcgagtcagctcttaaattagctatgcgaaaatcaatagccaaaactgctatgcgaattaagaaaaaagaactcaaagaaatcaatactgaaaaattgaatgtcgaactatacagatgttgtacgaacgcctacaaaagttgtgattatgcttaagaaatttgctttcataaatcttactctaatatcatgagaattatttgtgaagagaaaaataacaaatgaagaataaaaaagatgcatataaatagagtttcattcaattacaaagttaaaaaagtgaaagaatacaactaataactaagaaagccttatataggcaactaacacaaaagattttttattttgaaaaaaaatacaaaagattaaaataataactatttaacaacaatgccataaatagaatccaattacatgatacaaggttggtcctaggattgggtggatcttaggagaaagaaaaattattggtcctttatttaaaaaaggacccaataattggagaaagaaaaataccgttttggacttgtgttttgcaaaagttattaattggaccatccattttgttaaatgacaaaatagaccatgtattttctaaaatagtacaaataggaccctaaattgatttttagtccgatttaaaagagctatgacaaaactgtttatattttttgtatttgttcttattaggaattgtcttcaagttggatatatttgaaaaaaagtgtcaaaaattaagctcaggttcttatttttgccattttaaaaaatgcatgatccattttgtcatttagcaaaatatatgatccaatcggtaacttttacaaaacacagagtctaaaataatatttactcttaaaaagtatgtggtattttcaaaaattactaaattatatatataattttaaatgaaaaatatttttttggctcctagcctaggtgggcactaagcacgggcttaacccgctttaacccaaacctggccctaacatggtattagaggtaggataagatatgacactaatttttttctcaagaaatatattaggaaatttacatggtatactaacttttgctattttttcataaaattactgccaaccactattttttatttttttactatatttttttataagtttcatactgcagtatactgtgttaagttttcactagtgttctactgatgttttttatttgttctactgttgttttgagttgttctgttttgcgttctactggcattttataaaaatacaatatttttgaaaactttttcgtgtgacaatatttttgtaaaacttaacctaaattccaatatttttgtaaattgatgcgcatgcccatagtctagctaggtcaaggctctcaacttaagcacattattaattatctcaatactgtcaaatacttaataaggacacaagtaattaaacttcaaaaaccaatgtacgtatatgctaataaaacacatattataaatagcacagatcatggtaactaacaaaatattctcattttttggaaagaaagacacaaacagaagattcaaaactaagctacgtacttagttggcttcaattcccagtcggtttgggagaaactttatagtctgtgatacaaggtagaactcaacttccacaattagagtatcatttacaacataaccatttgaagacttgtgaagattttctagtaatataaaattaggaaatccccaaccacctttgccacatatgaaacagtcacgaagtactgcataaaacatgaaaattataaaatcaatgatcaagcttttaatcaccattgttttgttattgactctacttaatgatgatcataataaaataatgctaaaggtacaccacttgatgttttgcatggcgatattagagtatgtcacataaaactgtaagttttcaaataacaatacccttagaaagctcacttacaacagtataggtgttatgaacaccttataacatatgaaaacaatatccttaaaaaaatatcctaataaataaacgctttttgtgtttagaactaactttgtgatcaattactcgtaaactgttgagttattcagaaagctgtcatcatctactatcattaaagacactcctaatgattttccatcagtacttctatcaccgttcgggtagatccttaaatacctagaacaaaaacagcaaacagaaaaactaataagattttaaccaaaaatgtaaagcaaaactaacacagtactctttgaatgaccatatgtatcaacataccacttagctcctccagaactaaattcttatctttgtccattatcttagaaaactccttaatctcccaacgaaaaataggattacttatgtctcgacgagtaaatacagaaagagtttcaaagcttggagtaggattgatgataaaaacttcagctccaaatacacaacagtcattatgcaaatatccattggatacatttttgaaagtttcaactgacactattttatcaaaaccccattcttttttcattttatgaaaacgcctcgtagctacaacaaacaaaaaaaacacaatgcacccacataaatatatagaaataacaaataactatatatttttatatataactattatacagacttaattaccttgcaaggtcaagtaattgtcgtgtaagtgattatagataaacaatgagaagttaacattaacttcccaaccatttggaagagtttctgtctcacatattgtcaagtagagtgatatgtagttgttatcagtgattaatctcttgtctccatttggataaaatgacaatctcctatatatatatacacaaatagtaattaacccaaaagacagttttaaaaatacaaaagaaataattgcagtaataattttcacaatatattgttaccatttgtatcctccaacttcaaaaaaagaactagcatgtttttcctttgactttgaaagcaaactaaacgatttaactttcatcgaatagtgagatggtggaacatttctcatacatcttgaaatttctacaaaatcaataacacaagacaaatattacaaaaagaaataacttaactaacacaatatgatttaaatgtgaagaaaatatgtatatatgtaccagtatccatgagtgtaactgatcgataagaggaaaaagtattatttgagaggattttgtataaatagaagaagaagagattgtactatatatatgtatgggtgattatttaatggttacatttttattgtaacgttacatttttgtataaatagaagaagagattgtgctatatatatatagtccgatttttattacttagagatggatcgctttccctttcagaagttgaagtgtcatgtttcaagaaccaatagaaaatttatatctcgtgctataatattaatttcttagaagtatacgttacctttaacctaaaaaaaaaaaaaaaaactataataattatggagcaataataatatcatcagcttatattttcaagataacaataactgagttgtctctcctagttgagtattttcgttataaggggtgacacatagatttaaaatttgaatattttttaaggaaagtatatttttgagttttttttacaaggctgtcaatgaaaaacacaaacttttaacgtaataaattctatattgtaataaattctatatttttgaatattttcgttaaccaagagtctatatataatgtaataaattctagaatatatattaatgaataataataataataataaatataaatgacaaaaaaaaatttaatgtggttttatagttaattcttcatactttacaagtgcatcttatttataaaattttacaaagtgtatatagaatacaagatataatttgtgaattatcttctttctttttgaaattggccatccttttttcctaggtgatgtccctatttataggagttttagggtgacagatattcccttgggatcttatctttgtagccgcacatgaaacatgaacagttcccacgtttcatatttacatcacttgggataataataaataactgttataactcctcttgtatctttatctataaacggttatgctgactacacttctttgtctcgcaatacaaacaatcctcttaggatgctttattctgaagataacttcttgcgtctaagtatactatgggaagtacttctcacgtcctacaaatgtttgattaaaaaagcgaaagcgagacactatcatagtgtgacaactccgagatgaattatattggatgtagttctcttagtctttcaacataatcacgagtatgtgagccaataagttgcaagctcttagagaattcattatcaaccatttctaacatattccgaaatagaccttctacgttgattgttcatattgctggtcatacaaaacggtagttattactcatggctcgtccttatctctaaaaaaatgagttcaaatatttctatcaattgtattttccaaggcaagttaatcaaacataattattttttttataacacaagctggtttattttctaacttctttacacgtgtctcaactatattgcttgctcgaagtatgtgtataacaaattattataataatatttatgaattaaatttgttaagcataaattaatttaataaaataataaaaaagtaataatacttttgattaaaaaactattaaaaatatttagcaaaatagtagagagctttttatatttaaagagctccttatctatttctatttattgtatagttggagctcatattattttgaataaaaagtatgtttagaaagcaaggttggagatgctctaactttacgacgtattatatattcttcttaacattttaatatattttctaacaattggctaatatgattaaagtaaatgttgatggggctatatttgaagcaaattattcttttagattcagtttcgtcgctagggatagtgcaggacaaatcattgaagctatctcaaagtctctactagggcaagctcacctgaagttgttgaggcaagtggaataaaagaggctctcagctggataaagggcaaaaattggtaatttatttctcttgaaaccgactgtccagtgactgtacaaggcatcgaaaataatatgcagatgccatctacatttgggttgttggtttgggattgtaaacaactcctagttgagttgagaaatgttaagttaaattttgtcaaacgttcttctaacaaggcagtgcattttcttgcgtgtagtgcttgttactcgacagttcatatttttcatcatcataattcccctatagaattgttagacattgtaatgactgattctttgctttaataaaatgtcatatttctattaaaaataaataaaaaataatgataatgagctttttaatttttcaaattgtgtttaaaaaatatttatatttttttgagaaattatttcatatactattttaatttttttaaaaaaatttgcggtttggattgttcagatagtttctatatgtgggttaatatgtgaattttgattgtgatttaatttgctctgttaattgttatgggatttttaagtgaatttttgttaaaataaaataaataaataaaaaaactattttaaagtctatttttttcttaatttataatacaattatacaattattgaaattgctttcgaatatattaacaagtgctacaaaacaaatatataaaattgttataaaataatataaagtagat

SEQ ID NO: 218707 - DNA, 1999 bp, Cannabis indica
atctcttctctattttctttctctaaattataatattacataatactaatatttcataataatttagatactataattattttctcaactattagaggaggattatttattaaatatatgaaaaaaattaatataaaatttatttacatatgtagaaaaatatcaatatctaaaagtaagaacttaatattgctaataaaataaaaattttggattaatttaccaaaaattaaaatataaaaataaacttgacaaaacatctatagtttaaggaccatctaaccaaaaactacataacaaccatgaaatactaaatcctagtgttaatctttgtagtagtgaacaacctcattaaccatacatggcggcacaggtggaacaaccttcaaagctgagaaattctgaaacaatatttcaacatctttcaaataaatagacacagaaatgtgtagatattgaagttgagtgcagttgttgagtattttgagtacatcttcatttttaataaagaacatatatagatgatattttaagatgctttaggtttgacataataaaggctatagctaaagccacttcaaaatgaacaactttaactgtaattataactaataccgtttgatatttaatctttcaagattcttgcagtaatgaccaatagcccaaatggcttcaactccaattgaagagcaattacttatgttcaagtaagttaagttggtcagtttcttagctatactttcaaatattgttggattattgaataaatcataatatggcatcttcagtgtccgaaggcatttaccagtattatacataacataatatttatgattattcgataacattgtctcacatgagttaaaacgattactaatataactaaaaaaagaaaataaaaaacaggggaggattagagtttcacttacacttaaccctacaatctcaaattttagtggtaaaattttttaaactactgatccgattaattgccaccatggtatacaggacatgtggtacgcggcgattagtttttaaataataatattagatatattgctatcaatcaggtgatgaggcaataactttgtaccatggcttgcaaaccattggaatgtaatagacacaagtttgtcatgtaatggtaactttataaagattaatacaagtatatctgctatcaaattcccccaattattatccattattattcctcatcatcatcacaataaaattgttagtaaaaaaaaaaaaataatgtataaaattacttataattaacaatataaatatgtgtatatatagaaacaacattattgtttctctgtcaaagttaatatatatttatagtgttacgataaactatgctataatcaaattaaacatataaaattacattaatcccaccaaaattctcttctacatgtcaataataaattaaaaaagcttatattcaagataaaaggaaaatagaaaagcttttacagtataaatacatttttattttttttttctaataaagttaaatataaatgaccattcaatttacaaagacataaacatgttcgttaatattttttttctaattaatatcaaaaataccaatgtatatcatataaagatgaagttagagacgatattcataagatctatctagtattatctatagaatattgatctagattaataattagaagatgagaaaaagaaagtaatacctcaggcctttgtggtttgagtttactgaaagaagagaaagttacaaaaatgagtaatgtgagggctaagaaattgtgatataaataattattattttatatttaatgctggtaattttttgttttttttagtttcacactctttagtaattaattcattcaaataattaccttaccgaaaaatatatatatatatttatatactagcaaaaactacgtgcgagacacgtatactaaattttatgctagttttttttctatgttatttgaaagtgatacaa

SEQ ID NO: 218708 - DNA, 5225 bp, Cannabis indica
agaacgtgaacagaccataaaaagtgccatgagacaagttgaggaaatggcaaaggacctaagtaatgccttgcatgctgctgcagctgctgagactagagcgaccttagcagaggttttctttttatcaatttgtccttatatatgtggcagagacatgccaaatgttatatgcatgtaggattgtatatggccatgttttacccacccctgtaactttcgaggcatggcaagctgacctgctccttgggtttatgggttgggttggctagaccctttttacttttgtgattttttttaataaaaatgttctagtcagattgtgatgttttaaaactaagattctctagtttaatacaagtaatcttaagattttcataagcaaaaaaaattttctagtcacattttcctcacatgttgccccaaataatttgggtgcaagcttgattcagcagagtggttccctgcagatctctgctcactagtttgcatgtgcatatatgtgtgtatataggatatgcactcataagctgacttgtatagctgtattcgaaagaatctactcttaatttaacttatgatttgttcattcaggtgaaattgtctgatctggaagaaaaaaattaaatcttcagatgttaaggtatgtttctaatgaatttttgagaatggtgtgtttattatgggtactgagaatgggaatgggaatagaggtatcattatccttgtttacttgcctaaactcagccctttttgtttttgtccaagtagatgtaataccattagctcttgtaattgatgtataagaaattgtgtttcatattataataactgtcgtcctctaccgctctgttatggtaggatcttgatattgatggtgcaaatggatcatcctccatttttgggagtgaggtatgtgcttgtttatgtttatttattttttttctatatgattgaatcttagtccaatgagcatactactatcatctgctgccattattttcttcaaagagagagaactatttactaagaaaacttgtgagagataataaatatttcgacagttggccttttattttgttctatttaagcatgaatctaggtgcatagagaggaaagtatactgaaaaatagttgttagcctcttatatgcatctatctctggttctcttctgaacagctgtactttatttttgaagatatgggaagataactccttagcttatcccagtaaaaattaaaaagcaaaatagaaactctaagttcataaatgtgcctttgctgtgttgaattaatatggtctgccattcgtttgattgtataaactatgaatttgttgtgttaaaattagaaggtttgctattcatttggttaaacttgccacagaccattacggatttgcgggcagcaaaggaggagattgaaaaattgaaagaggaagcacatgttaccaaggatcatatgctgcaggttcctattcgctactctttgaaattctcattcattaaaggcaacttaaccaataatattatttcattttaattggcagtataagagtatagctcaagtaaatgaagatgcacttaaacagatggaatgtgcccatgaaaactttaaagttgaggtagctatgtggttgcttctctttctctcgcttaattagattgtttttgtttttgtgggatgattataaaattttgccatgattaatctgtcattggaaatattttgacaggctgaaaaactaaagagatcactggaagctgaactactttctcttagagagaaagtttccgaacttgaaaatgaatgtagcttgaagtctgaagaagtggcttctgcagctgcagggaaggaggaagatctttcttctgcttcagcagaaatcagaagtctaaaagaggaaaattcagctaaagcgtaagttttttcatgatgcttatgttctaaaattgaaaatcttattcggtcggtgtgtcatatgttgtcttcatttccaggtcacaaattatgactatggagatccaaatttctgctttgaaagaagatttggataaagaacaccagcgatggcgtgcatgtcaggataattatcaaagacaggtcagctttattctagtccatcttgttggataggttgatttgctgagagacaccatgtttgtgtacttgctccccaaccttgaataaaaatgatttttctttatgttaaatattttcaggttatcctccagtcagaaactatacaagaattgaataaaacttcacaggctttgggtttgctgcaagaggaagcatctgagatgcgtagattggttgatgcacagaaaagtgaaaatgtaatttgtgctcacatgaaactctttccttctaatttattttatttattattattatttttttttgtgaacagtggggattagaatcccttcctcttcccacaatcactcacacaaccaaccacttgtgctagcctattttatttaaaaaatttcctcaaatttttcaggtttcaattattttagatagcaggtgattgctgaattcaaattctagatttgtgttggttcaacataagagagatcttgatattgttaagcagcttcgttttattttttcttttcaagttataaagtgactttgttggtttggagtttataactgagaaatgcttgatatgtgatttggcttagaattagaattgatagtttcctattttgtttaacttccagagatcttgtttcctgtttctattgaatccttgagctttttagttttgttcagttatttttgcctttttctatattgggtggtttttgtgttggtatgaagatagttgataattagatcttcttagtggtcttatagacattataggatatggtggagccgccaaaggtgtggtaaggagattaaatccttaagcttcttggttttgttcagttatttttgcctttcctatattagatggttcttgtgttgatacgggggtagctgaatgttaggttttcttagtggccttatggacagtatgtgataggtggagccaccaaaggtgggttaaggtgatgccgaaggggtgtgaataccttagacaagggaaacactttaaggtgggaagactacagaacgagaacattgagagtgaatattgggtacttgggacgagagatgaggaggagattatgggattactgcttgtaatattcttgttgttgtattggatctatttttcattactactatatgtagtatgtatgtgtattgtggattagttgcatggactgacattattttgacaaaatgagtgcaaaagttctattgtcagtttatatcttagtattaaaatccaaatatttttaattccaaagaagatcagaaaaggaaacatcttcaaaatcttagtatcaaacatccattagagccacacaacacttggctctatctaatgagtattctatctctattccatttctttaaaacctctattaatcctttgcagccacagtaaccaccatattgtgtacattctacaccttccaccatgaattttgtgtttatttattttttattttctacagtttgtctcctgcttcagcagactgaatgaacaccattcacaagaaattattttttgaatcttgtgtgtgctttgttgttgattttccacctggtttttgttcttcttagaatgacctaaagtcaaagtgggaagctgagaaggcagcagctctggagttgaagaatgattttgaaaagaagtacaatgaactcaatgaacaggtatttgttatatgctttaacatgtggtatgttagagtggtgtttataagtttgtggtatggctttaccaattaatatcattataagcagtagtcagtaatagaaatacatatcacagaaacaaacagggttgtctcagacgatggacaatcacttagtgtataaaacatctttttatttaatttttatagttttgggatgtgggggtaaatattatagttgttccgaacattttgtgatattgcttacatttatcactcttatggtagttcaagtttgatttgatttggtaaatctctgccttttatagcttatcataatgtgttttcatacaatgttttcacatgctctctgaaatactttttttttttgaaaataaaacttaccaagagatttgtggtttctcgttaggttcctttcacgtcagaacttttttgaatttacttattcttgcatgtgttttttatttaatgaacttcagcttttttattagcctatttttaatgtttgttcaaacatttttagaacaaaatactgcatagtagacttgaggctttacacattcaatcagccgagaaagatcgttcttcgtctggattgtctagtggaactgctggtccagatgctctcagtgatgctgatttacaaaaagtcgtacattatctgcgaagaaccaaagaaattgtatgttctatatctaaacttcgtaggttttcgatgcagatgaatattttaaatccacacctgatttcctttttgctgtcaacaggcagagactgagatttctttgttaaagcaagaaaaattgcgacttcaatcacaagtgagtttaaagtttacatgtttgtttatcattcttcttcttctttttttttttaagaaaattgtttgttatgagatctctgccaatcttcaacaattattttacctaattcaactttcttttgatctgtccaaatacatatatatatttatatatagggtgttctacaaaagggtgtgtcaatatacccctttatgttttttgcatccgaatagttctaactctagttttttaatgtggcaatgcatatggtagttattttagttttaaacatccaacaaattttcgaaaacttctgaataatttatcgtacagattatagggtttaaactatttatttcacacgcatataaaataaaataggcacaagtcacaacatgtgtgacaaactgtttgaacctaattttcggtactataaattattttgaatttcttaaaaaattgtcagatgttctaaatatctatgatataaattataactacatcgatacatgataacatccatttttggggtgcattcaagaattttcctatacataaatatatttgatattttctttatcttcactacttggtggacaattccttttttgggaaacttttttttttatttttataa

SEQ ID NO: 218709 - DNA, 2562 bp, Cannabis indica
aaaaagctatgctcgtattattgttgtaaaagaagatcctcaatacgttcattgttatgtcaattggctggtaagagtaatgttatgagtgtcactttggtttatgggttcaatacagccgaagaaaggaagagtttatgggctaatttatcgggggtaaatctgcctgttaagccgtggctcataataggagattttaaagcgttattcgagttagatgataggaaaggaggcaaattggttactttgggagacttagaagatgccacaaactggttagctctgtgtcatattgatcctcttattaaaaccggttctaggttcacttggaccaacaatcaagatggggataagaggatttattcgaagattgatcattcttttgttaatgaagattgggtggacaactttccaatgacaaaagctcactatggttgggaagtagtttcggatcattgtgcatgtgttatctcgatgagggtgaatgagaatataggcattaaaccgtttaggtattttaatttctgggctgatcacccagagtttaaaaaaaactgtgattgatgattggtttaagcctataaaagctgaagggatgaaaggcctttttctgaagcttaggcagctgaaacacaagctgaagaaattcaataaggaggtcataggggatatagggaaaacttatcaggaagcaaaaaatagttatatggaggctagaatagaaacccaagtgaatccatatgatcagatattgcaaaggaaggagaaagaggcggctgccaactttagtgagcaggaaaaaatgtatcatagttttttgagacaaagaagcaaggtgaattggctctgtaagagggatgagagcaataatttctttcatgcgttcttgaaaaaaaggaagatggagaatattattgttgcttatactaatgatcatggggaagtcattgaaaagtttcctgaagtggtcagtcactttgtggatcacttccgcagttacatggggacaagtataagaccaactatggctctcagatcacattgtatggagcatgggaaatgtctcaatatagagcagcaaataaacatgataaagccttttactagtaaggagatcaaaagggctttcttcagcatacctgactcaaaatcgctaggaccagacgggtttggagcaggtttcttcaagaaaatgtggcctgaattgggagaagagtttactaaggctgtggaaagcttctttcgcacatgtagcatgccgagggatcttcatgccacaatgataacacttattccgaaagttgatttccctacaaaagctgtggattattggccgattgcttgttgctcaacggtctacaaatgcatatcaaagcgtctttattcaaggcttgctcaagtgcttctaaccatagtgaatgaaaatcaaggagtgtttattcaagggcgatcaattgctcacaacattatgattcttcaagatcttttgaagaattataatagaaaaaatatctctcaaaggtgccattattaaagttgacattagtaaagcttatgacacgatgaattgggattttttagaggctttgctcaatgccttcaagatgccgaccagatttataaattgggttatgacatgtttgagagcaacttcatactctattttgatgaatggtagagtgcaagataacttccaaggaaaaaagggtctaaggaaaggggatcccctctctcccttcctttttgtcttgataatggagtatctaaaaaggagattatccatggcagccaatcaaaccagttttaggtatcaccccttatggaaaattctcaaaatagtcaatctctgctttgctgatgatctaattttatttagtaaaggcaatattcaatcgattcaagtgctcaaggatgtcatggatgagttcaatgctacattgggtctggctatcaacactaataaatcccaaatttatttgggaggggttgaaagcaaggctaaacattctatcttgagagaaatatttaggagtccccttgagaccaaccaaatggagagtggaagactgtgatatgatcataaagaaaattaagcatagactctataattgggctagcagacatctttcttttgcaggaagatcccaacttatccattcagtgttacttggtctccgtaactactggatgagcatcttcattcttcctcaaagtattacgaaagagattgaaaaactttgtcgaggcttcctttggggttggaatggaaataggagtaagctacatgtgggaaaaagtttgtcttccaaagaactatggtggtttgggttcaaagatggggtcaaatggaatcaagccattcctgcaaaatatcgttgggctatttcaaacaaaagtgatactctttgggtgaaatgaatcaacaacatatatttgaagaacaattcaatatcgacctatgttttaaagcatgactcgagttggtattagaggaagttttgtcatgtgagagataaatttgacagcttggatatacaaagtccaggggcctcaggtaagttt

SEQ ID NO: 218710 - DNA, 3749 bp, Cannabis indica
gatatttaaaaaaataataatcaattttttagaacatattaattaataacagaacaaactaatgaattttctctaatgtcttaaaatgttaagaaaatatttcaaattcaagatgaatctaagattaatatataaatttgggaaatacaatagtgacgactacaagtgaactacggtaatgacaagggatgtgatacagtgatgacaacgggtgagatacggtgataaaaataagtgagatacaatgagatgacaagtgagatataatagtaataacagttttaaatgatcgagatatgaaaataatatattatgggaaacaccgtaatttttttcaacaccatcttatttatttatttttacaaaaataatttcttttaacaaaacaatttaaactacacatataataaactttaaacttcttaataaataattctaaataataattaataaaattgtgcttttagtttttaataaataaattattaataataatatgaaataagataatatatttataattttactatatattagaattatatttttaagtaactatttattataatactaaaaaaaattagcgcgactatattgcctaattattaataacttaaaaattaaactcaaatatttacactgtaatattttttttgcaatagaaaaaaaaagttttaaataatgaaaagtataaataaataaataaatcctcattgatggaatcctaaagcaatctaattttgtttacaataaattttttctttcaaaaaattatagtttcctttatggcacaaagaaaaagaaaaatccccaggattgttagcaattaaagtccagagtagactctataagatgtgacccagaaaatgacaaataaataaataaatgagtctatctgtattatattatcccttcttctctccacgtggttttcttgggacattgtttccttgtttctcaataattataacgtggttttgtctggcgtacgtatggtgaaattggtaatgcgactaatgccatttaataatgattcagaaacgtcgtcgttgtgctggcccaatagcacaccacaccacaccctccttttctctcttactatctcctataacaatactacctacctaccaaccaatcaatcaccattctcaaatgagtgttgcattcagacccaacagctgaccgcaactgagaaatctaagccacccatctcgacatcagccccgcctgagctgctgcctgccgttgatgatgacgcctcgtttgatgtccctggttgtggctgtcgtttgaggttctactgttgttgtttaatgagtacctactaaggcccgtgatttcagacacgcttcgtgaatttattactcttctgccattactacaacaactactgctgctattactattactattactacttaacaacctgttacaatcaatgccaatcttctctccacctctctccacctcttgtccttttccgtctttacagtccaagtgcaatgccacctggctattctgatgcaacagatgctgacgtgtcactgacgggcgtgatcccgatgcggatgagaatctacggctgtcgctaattatcatctctgaccgtagatacagtagctccgacggctgtacatcgctccatctctggtggagcccaccgccacatccgggagatacaatgatccggtgttcgaacctactcgtgcgttgctgttgctgctcctgctccgagcttattatcttcttgccttgcgtggtcaacaaaagcccgtcttttcttggccggtcaaaccatccgactgtgctgacagatggatcccttttctttctcaaccaccaccaatcatcgagcgacctcctgaacgacgtcgtttcattacaacatgtgttctcttccggcttttgaaccactatttgaatcatccaattactccctctttccccagctgacgagtggcgacccgatactcgccggatatccggacccgattcttcagcgttgtagggatctgaaactcgcgtttcagtcaccgaaacggcgtcgttctgggacaggatcttcgtatcatctaggaccaaaagtatgtcttccgggtctacccgataacgacagagggggcaagtggagtgtgcgtccagccacgtgtcaacacattcgacatggaaggcatgcttgcactttgggaggagtctaaggacctccgagcattcgaatcggttgaggcaaatggcgcactcgagcccgtctttttggcccaatagagatccaaatcggaaaacaggtagagactccacaatggccctgtcaataccggagttttttcggtccaccacggagaggtattcggtattacgggtggcggggtgatggtgttggctgccataaccaccgacgccgccgacgacgacaaggtttccactcttgcaatgcttagcgtagagaaggaggaggaaggtgatggagaacatggttgtgagaacgccgacgatgacaactatgcttggcttgaaagaggaaaatgtgggattttcgttcggcggcggtggagacaatgacgacggagaaggaggacccgccatgaaatggccgttagtaccattattgtctgcggtgttaacagtgaagagtgtttgtgatggagcttgagctgcattattagttgcagaagagttttggaggaatagagagaaagcgaaaaaaagaagaaagaaggactggttgagaatagttaggcttacccgtatggccatggctgacttagttttagccgttgaaatgggaaagaaagtaaaaacaaaagaaggtgcgggttttgtttaccatggaacaggtagaagccaccactttttgtgaatttaattaattaataatttaaaattttgggaacaaatgaagtagagagagattcttgtgatatttggatttagaaataatgatacaaaaacgacgtgacaaaccattaaagaaagaactagttttatttgaatggggtttttttttttttttttttactacatttggatatatatcaataaattttattatttttctaaaaaaaaaaaaatttaattattttttccaaattaattaattatgtactcttgaaagaaaggacaaaataaaaagtggaaaaagttttctgagagagaatgagtaagaccgagcagcttcagggcaagaaaagtggaaaggaaagagcaaatttgacaggcatattattaggcccttacgtggtgtgtatttattgaaaaaattgagttttttcttttcacttaaacaatctctactatagtttcacttacttttcaaacacaaattttaaaggtaattaaaatcttttaatttagtttgtaattaacaaatttaaattacctttcggtcaattctcactataaattatttgtttaagcatacacttttatacacatattattatacctaatattattttttaaaaattcatttaaaaataaattatattataaaaataaaaataaaatatttaaaaaataaaaaatattataaattttgaaataatttttataattttaaaataataatattaggtatattaaatgtattacatttacaagagtgtatacataagtaatctatattgacagttaacaataaaaaataaatgacacttttaaatttgttaacagctcagtaatttagagagttttgccactaaaatttaattttagaaaattaaatgcaaaaaaataataattgaaagagttta

SEQ ID NO: 218711 - DNA, 2362 bp, Cannabis indica
tttttttaatatatgcataaaaatatacagagaaaacccaaatcatcttgttagttgtatcctctcctatcgggcatttcaaaacatctttttagttgtatcctctcctatccacaatccaaatatattccaagtacatcatccacttgatagttgacacaatattagtatccatttaaataataattgcttatactatcgaaagaagaagaataaaaattataaataaaaaaaaaataataaaaaaaaaacgtcttactgtttcgcaagagacaggactataattggtcactttgcctgtgatgcaaggaaattcatcccacattaaaaaccacgcaaaatattataacttaaaggctattatttgcaattgtttcaaaaatttacacgttccaaagtacctttggaaatcatatatcaacgtactattatttatgataacttgtatagtcatacctacgttgaatttcaaccacaaaaagtaagacaaataaaaattctgtactccataaaagttgagaaatgcgaaaaaaaaaactaatcagtattgagtttggcgctgtttgcctccataagtccattacgtatctgctcaccaatgtccctaacatgaccaggaccatggggtataaacacagtagtgttatttgacgaactgccaaggtctttaatggtgtcaaagtactgagtgaccatgataagatccataacctccttagctgaagtgccttcaactttgtgagagaagttcactatgttctctctcaagccatctgtgatcgcctgcctctgccttgcaacaccgactcctcccaagtacttcgattcagcttcagcttccgcccgcttaacttggagaatcttctctgcttctcccttgtatacacttgcaagttggagcctttcagctgtaaagcataacaagattgattacttgcatacaaattcgagaagaaaacctttaaaactctttccccggttgccagttagtgacagattaatatttgataatcgatcaccattgagaactgatcaactacaccattgcgagcaatgtctatggtttagtggggattactatccttccactatttcagattgttcacaaatataactacaccacaaggtttttatttgtcctcaaattctgtttaactaagaatcttaaactttttgattctccaaacatcaatgttagtctctgtctggataaaagtacaggaagaaggaaataaaaataatgacctttattaatctcgttcattgctgtgcgcacatgagaatcgggtacaatgtcaaccatgagcatgtgctctatgttatatccatatgtcaccataacctaatccaaggttaaaaaaaagtataatatgagaatcaaatgccatgccaaatcaagtgtgtaaaatatacaacatcacaaatagaagggtacattagaatacttcaaatcaaaaacagagttgatgaagctgacacagcaaccatactgaatttaaattatttgacatgaaagcaatgtgggcaaaaacttttcctagccaagcagtttcagtacatttcttttcagaaaaataacagtctattacatattctggacagcgacctgagtgaactgatatttcagaaagagtcattgtcctactatacttctaacaaaccatgttcagaagctgttctaaccttataatcatgaaattgacattttcaatcatagcagcatgctaacatatatgtatgcatattcacacagcacaccctataaacttcaatgtttttgttttcaagaaaaacattaaagaattttctattctttaataaaataaatctaaatcaagaaaggtagagttaagtaatcacacatttaatgcattgcaagtttttacaataataccataccttctcaagttcttccagcacagattgggcaacctcacccttttgttcaaatagctcatccaaggtcatcctagggacaatagctcgaaccactggaaccagaaatcaaaaccaagaacattaatgtaccaatttttatttttttttattaaaaaaaaaaaagaacaattctcatttgttataaaagaatataccatcgaatacaaaagcccgaatctgttctttggggttctgcaactcgtaataagcatcatcagcattttctttaacgacccggtattgaattgagcattgtaattgaacaaaaacgttatcctgaaaaataaagatgatcaattattcattccctttgttaattcataaatctttatcttaaaaggcaaacaaaccttggttttggtttcgatgcggacatcaagggagcagatccttgtagatataacggcggcgaggcattctccgg

SEQ ID NO: 218712 - DNA, 6578 bp, Cannabis indica
ttttaaaatgcataagtttagggaattaattttacccattagtatgcatttatagtcaaattttatatttcaattaaattaataaaaataatataaatttaaattaaaatttaataattattataattacccaaacttggacattataacaacataaaatagacatttttcattctcataaacctgataaaataccacatattataatcccaaattcaaaaaaaaaaacaaaatacaattacaaattcaaacaaaaaaaatacaattcaaattacaaacaaaaataatacaagctagagattatcataaaaaaataaacgcaatatctagattaaaaaaataataaaataagcactcaggtccatgtctttgtcttctccgattgatatccccctagcccccgcctgaagcttgaggtttgtcattgtcgagcactggagatgggccttgggtgggagatgcgtttcacctaaagtgtctcggagtctatatctaggccatgacttctgctccgacgaagagagagaagaagataaggggatgtgggtttgggttttttgtggtctgagaaggccaaatctgagcccaacaaccaaaaacaatcacgagaaacagtgggtttcaatagagatgagaattgttcagcattgtgttgcaatgaaggactttgggtatgtagatttaggacttagtattagaatatagaagcagagaaaaacagagctttattcattgtaaagtgattgaattaatacaacagtggaaaggaaatagtccagtatttatacaccaaatgaattagacaaaatgaccatttaccctcctaactaactaacagatataacaaccataacggtctaagaggccccctcaagatggagtatatacattgttgatactcatcttggaaactaaagtatgaaaatgagtgggaagcaggggtttagtgaagatgtctgcgatgtttgttttggaggagacatggtttgttttgatcttgccactgttgatcttctctctgatgagatgacaatcgatctcaacatgtttcgtacgctcgtgaaacactggattttctgatatgtgaagtgctgcactgttgtcgcaaaaaagagtggagggaagcttgatgctgatagtgagttcatgtaggatggaatgaagccaagtgagctcacaagtggcattggccatggctctatattcggcttcagctgatgagcgagagacagtgtgctgcttctttgatttccaggaaataagggaattgccaaggaatatacaataacctgaaatggagcgtcgagtgtcgagacaggcgccccagtccgcatctgcaaaagcctgaaggtgaagtggtgttggtgcagaagcatggaagaacaaaccttggccgggggtacctttgaggtactgtaaaattctgttggcagcatgaagatgtggttctcggggtgtttgaagaaattgactaagtttattgactgcgaaagaaatatctggccttgtaattgttaaataaatcaacttgccaatgagacttcggtaaggagtaggatttgggagttctttacctgtctcgttgttaagtttgatgtttgtttccataggagtggaaacaggttttgcaccaaggttaccagtgtctgtcaatagttgaaccgtaaaaggtctttgagagacagaaattccttttggggaatgtacaatttcaagcccgagaaaaaatcgtagtgagcctaaatcttttagtttgaattgctgatcgagagaagctataaaatctgataaggctgtggtattgttggttgccactattatgtcgtcgacataaaccagcaatgccataaagaaccctgctttgtgtttgataaacagtgaattatcatttttggactgtttgaaaccatggttaatgagggtggtgctgagtttagcataccattggcgggatgcttgtttcaacccgtataggcttttcttcaatttgcatacagcattaggaggaatgatgcctttaggagtgtatccttgaggcaaggtcatatatatatcttcattaagatccccatgtaaaaaggcattattgatgtccatatgatgcaaagccattgtttgattgcagcaagggcaaaaagtaatttgagagtgttaaacttggcaacaggagcataggtgtcaaaataatcaacaccttgttgctgtgaataaccttttgcaacgaaacgggctttgcattgttcaactgatccatccgaattatacttaattttataaacccatttattaccaattgtgtgttggccggggggcaatgggacaacaatccatgtttcatttgcttctagagcatctatttcattatccatggcattgttccatatcttatatttgcatgcttgtgcaaaggttttaggttcaatgagttgtgtagtagcaaggattgctgctcgaaaagaggcagacaatcgatgataggaaaggtatttcgagattggataatgagaattggtggaattagttgtcatgttgcaagtataatcttgcaaatatgcaggcttttgaagtggtctgccagattttgtggtggcaggggcagaaccattactggtatggggttgtgatggtgtttgaataataatggtaggggggtcctgacaatctgtaggaattggatttgtagattggtcagggggtgaagaagatatgggaacattgttttgggtgtgctgttgctcaggaaaaaatcgattgatgtcagtgttgattttttgattgagaaatggatatatgttctcataaaagatgacatctctggattggaagatatgtttagtttctaaatcaagaagggtgtaagccttcatgtggtcagggtatcctatgaatacacatgctctagctcgaggagcaaatttattttgatggtgtatgtgagaggcataagctaggcatccataatttcgaaggtgctgatattgtggaggtttattatgcagtagttcataggaagttttgtcgtgtaataacacggaaggagtacggtttagaaggtacacagccgtatgaaccatgtgactccagtattgtaaagggagattggattgaaatgcaagggctcttgctatgttcaatatgtgttggtgctttcgttccactacagcattttgctgaggcctaccaacacaggaattgtcggtttagtgtgccttgattggcataaaaagtggtaagttttaattcttttgcattgtcagtcctaacagccttgatattggctttgaagtgaacattgacataagtgaagaagttctgaatgatgagaggagcctcagatttggcttttaataaatgtaaccatgtgtgcctagaatggtcatccagaatggttagaaagtatcgatatccttcaattgaaggaatggggtaaggtccccaaatgtctaaatgaatgaggtcaaaggctgcctcagagaaattattattggaaaaaatggtaatttcttttgtttagaaagatgacaagttggacaattgtgagaaatagtgtgatcaataggaaaattcagttgtttatttaatttgtttgtaatggttacagagggatgaccaaggcgtgtatgccattggtttttgattacatttgcattacaagcaactgaagtaagagattcctgtttgatgtagtatagttgtccaattcgcctagctgtcccaatcttcaagatctgaagggggtcctgaatggaacacatgttagaagagaatgatactacagaattggaattatctaaatatgcactaacagataataggttgtattgaaattgaggcacaaatagaacattatgcagtaaaattgtagcagtaagttgaacagtgccgattttagcaatgtggacattagttccatttgggagagttacagatttgtttttgggagttgctgtaaaagaagaaaaacaagaaatatgacagcaaacgtggtgtgtagcaccactatcaatgatccaaacattgggagatagagggttgaaattacctgtgaagttgttgattgcaggaacatccgatgttgaagcatcaggagtaggatgcaattgttgagtgagtaaagatattaattgttgacattgtgctggggtaaattgtgactgttgagattcaatttgagagcaagatgattgcatagtgtgaggaggcagtcgagattgagaagcactgtcaggtttgcgattttgtgtgttggttgtgtcactggttcttggtttgccataaccaggtgggaagccatgcaaaaaatagcatctatctttgtaatgtcctggtttttgacagtgtgtacagtggggtcgaggccttttattttttgtggtttgattagccataggatcagtaggtggtggattagaggaagtagcagcagctgcaatggtgggaatatgtctatgacctaaagttctctgtctttcttggtgaataaccatagaaaagactttattgagtgaagggcaaggatcaaggagaagtatctggtcacggatagcatgaaaagattcattaagacccttcaagaattggagaacttggtcatgattaaggtgggcatgattctgtgtggcagcttcacaagtacaaggaatcttgggacgaagttggtggatttcatcccaaatggctgtaagtttggtgaaataggcagtgaccgaatcatcaccttgggtaagataggtgagattttcattcaattcaaagattctagggccattcccttgattgaatctgttgtttagaactgtccacatctcagaggcagtttcaaggtacattatactgcttttaatttcaggtgacacagagtggagaatccatgacattaccatttggttacatctcatccaagaactgtaaagattatcagtgggagaaggttgaggaagagtaccttcaaggaatggggttttgtttctggcgccaatggagagcttgaagtctctttgccatggctgaaaatttcgatctgtgagcacaggggtcgcgagggccagtcctggatgatcggcgttgctgagataatatggagatctgatatcttcatatgccggtcgatcaggtggtgcacgaggaacctggagagattcagatctaggaggtggatcggcagaagcctgagaaggatcgatttgaggatttgtatgcgcgaaagtgtgggatggtggctgagctatggcggcatcgaccacgggagcagtggtggtagctgacgtagtggctcttgttctcaccattgttgagttcttggaagtgttcaaagaaaatcttgaagctttatttcatctgataccatattagaatatagaagcagagaaaaatagagctttattcattgtaaagtgattgaattaatacaatagtggaaaggaaatagtccagtatttatacaccaaatgaattagacaaaatgaccatttaccctcctaactaactaacagatataacaaccataacggtctaagacttagagaacctcgtcgtgtaattagtttctatcagaactgggcctagaactgatcgcgaggaagaggacgagaatacgagagagagaagggagagattagggagaggaaagtcgaggtttagtgtttgaagggaatctggatcgactgagaactgatcgttattggtagctggaagtcctcatggcgtcgcacggtagagagcaacgagacaattaaatcagatgagagagaagagaggggaaagaaataagggttaggtttattttttcatcatattctatttatactacctttattaataatttgtttaaattaaaaaaataaatatatgatacaaatttaataagcctaccgtgatttatatgtgtgattttatttttttttttaaatgagaccacgtctagttatgctggactaaaaaattcctccaaaacatttttttagtccaacaaatttggacttaaaaaaataatcttgttttttttggaaaaaaatatatatgtcacgtccagtactagtatttctagtccaacaatattgggaatgataaaaaaatttctagtccaacaatgatggactagaaaaatcctaaaaacctttccatgtccaacaataattttattggacatgaaaaagggacattaaaaaggtttttttgtagtagtgaaagttacgcgttgaaaaaaaagaagagacgttcaaggtatttgtcacaattgaaattccttcttgttgtccattggaagttgtaaaagatagtcgagaagtaactaccaacaagaagaaagggaagtctaaagaactctttcggactttttgacgacgtatgaaaagacgtactattgtgtgggaattgtgtaggtgactctcaatccagcgatagctttaaaaattgcaacgttggaggacagttttcttcgtttgatacaagggccctcatggatgcaagaggtggattctacccaccaccaccaccaccaccatactgatgtggcgctcaggtaagttccgttccctttatttttaatgtcacattggggacaatgtgtcactttagtt

SEQ ID NO: 218713 - DNA, 1393 bp, Cannabis indica
ctttttttgtttcttttttaacaaagtttatatgctgtttattttgacaacttgtgcttatgtttttttttttctgacaagttatatatttatgttttttatttcgtcaaatctctggctatgtattttgtttggagagtttcattatatctataaatgttggagcattggcactaatttaaatggaaatactaaaaggcttgcttaatacctcttagtgtcaatagtccaatttagcatggaatctcatataatttattacaataacttttaaaaattatgactagctattcataaaataacccatcaaaaattagtgtaataaaaatactctaatttaaaatactcaacgatatgatgtgttgttaataattagcgtctgaattaaattacactgataactctttatcacattttatgatatataacaaggttcccttagcgcagttaattagcattaatgattaaatttagatttaaacttgacttgatatatatgaactttcaaacaacaatatactagaaaaacaaggataggaaaatatacaaaccttatatagtatatacacaaataggctatatactctcaactatttaatacttatgtaacactatcaattaattaacataatttgaattatgtgtcatcactgatcggaaggttgtaaaccgaagatagtaatatgaaggctccataaatatacatacataaatatatatatgatgtatgaatgggaattggccgtggggaaagagtggagctagcttaggttggtagggtaataagagtagtctaaatttagactattacggaagcatatatatatatattgatttggtacacctatatcaaacaaagcaaaaggctgtgaatagttatattatatatatgtggatataaagatatacatatttatatatatatttattatatatagtaagatgatgttggtgaactacgtatctaaaccatagccaagttcgtttttttaatccttgtcatcttgcagcataatttttttttctcctgaaaaataaaatgaattgtgatgacgtagaggatatcgtgcaacattcaacatattgaaacgcattaatttaggttaagtttggtgttttgtattacttatttgttttaagtagttctcaatagatattaaagttaattttgagggacagactaggcctcaatttgatgaaagatttagggtgaagttattaactaagcctttccttttatgaaaattaaaaataaatattaattaagtttcgataccatattaattttattcttctatttatatataataaataatattttacacgtaactcactccatgaaattatagagcatcttcaatggtaaaattttagagcatgcttagtgaagtgg

SEQ ID NO: 218714 - DNA, 1662 bp, Cannabis indica
caagaagtagcaagtcccaaaggcaaggagcagtcgtgattgttgacaccataattcatgttcaatttaaatcatgaaattcatcttaccaccccacttatccgagtcgagaatccacgcacaatactcttcatttggctttccaagaaatgcttccgaatactttgctggatcacttgccacagttgcagctataaccttcaaaaagacgaatcaaacaacaagtataagaaatataaaaggccataaataggtcatttcaagtgaggggctttctagaattttaaattattaagcattaatttttatttatacaaaaattatgtttatttatagaaggaacaaaagacaatagtataaaaaatatctagaaataaatgtgtctgtctcggttggtgtatttatagccaacaacctgtctcagttctggagcttttagtttgtcatggtccatgacatacctgaaaatgaaaatgatgatagattaatattcaattgttttgtgttttcagccattcacaacgataaaatagtggatggccagaatctgtaatatggttctaaagcttacccaactgcattgaaaagacaactattgtctgatggaatcacccttctaacgacaataccttccatttttatgcacctgagaggtttaacaactcaacagtcagatgccttatattgatttatattttataacaggctgacaaactcaatcaaagaatagtaaaaagtgatgaaataaaggaataaaactcatgaagtaacaatccattcaaatggttaaagaagaatgtatcactttatgactagaaagaacagacagttattttgaaaaaccaactagaataaggcaaagtttatgatagtttaatatatatgcgtacaaagtttatgtaactgagaatgccaactattggtgtgtacatgatatgattaaacatggaaactttgagtttctatgctcatttgtggcactataattagaaaaaatctctcacattatttacctatgctttattgatttccaaaattacctatttttttcactttcccaatatcacgtattctcttgttctctctctctctcaacctcaacctaaaaaaaaaaaaaacccagcatccaaatctctcaatatcaaaacccataaaaagatcattcaaaatattacattcaatcacaaatactgcaaaaaattgtttgtgctgacattaaaaagcagaaacacctacaaatcttaagaaaaaattgaaccttaacttttgaaatagagaaagaagatggaatcttgggattgatagagatggctccggtctcgtggatattggcggcgaccgggggtggttggactccgtatgcggcgaaggaggctatcggactcggtaggcgacgacaaggatcggtcttatgggtgcggcttggggtgcagctcgtgggtatgactcaattggatccgaccgtcacttatgatggaggaatatcgccggagctacaacgttggtggtaagagagggtatggaggctagttaagagagagaacataaaaattcgtgcgattggaagaggaaaagaaaatggtatgggtgattttagaaatctgaaaaataactttgacaaatgtatcaaaccacaatcacaacttctccaagttaagccaa

SEQ ID NO: 218715 - DNA, 11039 bp, Cannabis indica
ctgaagctgctgtctttctaatggttgaagccacaaatatataaacatgtcagaaatttgtaaaaatgttagcatcttcaaaactccaaaactctctgcgtccatggaaaatgttatagtatcttatgataatctaagagagtttcaggattgcaataatacaaagaatatgaaagaacaaaacaagtttgatgtcatgaacttggatttgtttagtaaatgtgtttttagatacctctttacaacaggatttggtttaaattttatcaactgagcatgccttagtactaatcgcaggatggaaggagagttcgtgtaattgaaagagatttgaccgagccagatagaattgtgggtgagcttcttcagccaggggggtatctgaagctggtagaattgggtcttgaaggtatgtttcagtactttttgaaccaatggtttatgtgtataatgtttaggctatgatgtgattattacatgtattttaaatttggtttcagattgtgtggaggaaattgacgctcaaagaatactaggatatgctcttttcaaggatgggaagaacaccagtctttcatatcctttggagaagtttcatgcagatgtagctgggaggagtttccacaatgggcgttttatacaaagaatgagagaaaaagctgctactcttcccaagtatgctctggctcttttattcattcacgtgtttattagcttgttacatgctgctaatgagtaatgagtaatgagatcttgtatgttttccgtttctgtaacagtgttcagttagagcaaggtactgtgacatccttgattgaagaagatgggacaattaaaggggttcaatacaaaacaaaggatggtgaagaacacaaagcttatgctcctctaacaattgtttgtgatggctgcttctcgaatttgcggcgcaatctgtgtgagcctaaggtggtgttgtcttcttatattgaagtttcacttgcttttcactcttgaattccaacatgtactgatagattttgtatcaattttgtgtacaggtgcaagtgccttcttgttttgtaggtttagttttggagaactgtcaactcccttatgcaaatcatgggcatgttattttagctgatccttctccgattttgttttatccaataagtagcactgaggttcgctgtttggttgatgtgcctggtcaaaaggtgccttctgttgctaatggtgagatggccaagtacttgaagactgtggtggcaccacaggtaaactcccttcaataacatttcaatctttcttacaatttcccttctcaaatttctgataatttagaaattccttgcataaattcattaaaattcatgatacacattgcagagatggacaaaattagagacctaataacaggctacgtgaatagaaatattacatatttagggctcatatttctttccttgttagaatatttcttgaagactgtagctctatctgatattacatatttcttgttagaatctgtgttcaaaactttgtctacataaaaggcaaaaactgctcgtttgaagggctcatatttctttccttatttctttgagtctgcttgtaattttgctggattgaaaaatgatgtctatttcagataccaccccaaattcaagaagccttcatatcagctgttgataaaggaaacattagaaccatgccaaacagaagtatgcctgccaatccacatcctactcctggagctcttctactgggtgatgctttcaacatgcgtcatcctttgactggcggaggaatgactgtagctctatctgatattgttgttctacaggaacttctcagtccattgcgagacttaaacaatgcggattcattgtgcaaatatctcgagtccttctacactttgcgcaaggtaaacatctgctttagacagcttgcttcagtgtagtcaaataagcaaatttaatcattttatgcttgctaatatgtctttagtgactgcttttgaatatacagatcttgtactgatgatatttgttgtatattggttttgcagcctgtggcatctacaataaacacattagcagatgccttgtacaaggtattctctgcctctcctgatcaggcaaggaaggagatgcgccaagcatgttttgactatctaagccttgggggtacttgttcaacaggaccagtggccttactttctggtctaaatcctcgccctttaagtttagttctccattttttcgctgtggctatatatggtgttggacgccttctatttccatttccatcacccaaacgaatgtggattggagctagattgatttcggtaagcacagtcccatcttttccttttataacagtagtagctttattcaccttggctttcaaattattagcattttactagtacagcaacttgaaaactctgcacatgaacatttgggactaagcaagtatattttgttttatagagtgcatcaggtattatatttcccataatcaaggcagaaggactgcggcagatgtttttcccagcaactataccagcatattacagagctcctcccgtcaagggtgataccgagagcaaatgaaccaaagagagttcataagttccacttccacgtccattcttccattaagtggtacaattttcgcaacattagaaacatttattatttgtaatgaacaaaactattattttagaacctccaaccaccccaaccccaacaaaaataaataaataaagaaaaagtagtgactattattgtagaaaaggaaagcctatgaatgtatgtattttagttcacaaaactgaacataatttagaagtaaatttcattcatgtgtatttcattataaaatgtggaggggttattggtcattttgggcaaagcttgggagttaatttacttttatgtaagtattttttctttttaaaatattaatattacttattgtatgattaaattattcggatttttcatctcccaccagctttcttggccttgttcgggatagttaaatttggcgtatttatctccacaatatagggcaattatattcttttttggttaaggaaactggtaaattagagaatggttatgtgtcattgtgctattattataagtcaatgttgtattttacatataagtaatatgaaaaatcgaatcactcgaaacattatctcatatggtgtgtgggcactttaagagattctctaatgatgtgttgttgttgtttagcattttcgtagataaaaattgtggttggccaacttggcacactaatcattttttttatttattttttatttacaatagacttatttaagatttttacttattaaattttaacatgtattaaatcgtgtctttgtattttttaggctcttaaatttttttccaaattattgagattgttggatgggtaaatatcattttgaatcccgtattttgtaaaattattaattggattttctgttttgttaaatgataaaataaacactgtattttttaaaattatacaaataggaccttgaactgatttttcgtcaaaataaaacttaataataatctgatctagagatgatgggacacaaatggtagcattttctgtatctattagtggtaaaaattatcttaaagttggttatattaaaaattgagctcagggttctatttttattattttgaaaaatataaagtccattttgtcatttaacaaaacagagagtccaaatggtaaattgtgtctcttgaactttgatatgtaccaaattatgtttctgaactttgataaatgccaaattatatttcttgaactttcatacacatcgaacgttaaattgaacgaaattttttaaatttaacaatcttaataattgaagagaattttttacacttataaagtttaaggtataatttaaaacatgtgaaaaagtttgaaggacaaaaattctaattaaccttttctataatgttgaatagatatcaacgagtcaattcgcaatttttaattatgatattgttatttttaaaaaaaattaatttattaattattaattttttctatcaaactttaggttgaaagattattgtgtgtgcacaaaattgttctaatttaacattcctatttttcctcgtttgccaaaattaacatatattttttaggatcaatggacggtattaaggtgcctaatgctgagtaatttaatatgtattttttttaataatcaatttccattattttttttttaaaaaccctttatttttttttttcaatttgtaattattaaaaaaaaaacactgactataaatcttagcgtataacgtgtagagcaagcgactactaccttcagccgtagctgtagcaattagcatcaaccatcaacccgacaatggctgctagagaagccaatcaagaaccagagtcgacaatggtggctcgacccatgtgtgtctctgtccccgtccgtaagaaaaagaagaagcgaaaccatggtcgtcgggaagtttcattgttggattcaatgcttaccgacgattcgttgatggaaatatttctccggctgcatgattctcgagctatattccaatgtggccccgtttgcaagcgctggttatctatcattacttccattgaattccgccaacaacaactagtacgacttcgctccttatcccaatctttttcctttacgttactaattagggtggagaatttaacaatgacagcacccttctgcgagttattgtgtgatgaaagaggtcaaatgtcttcctccgaaggctatcttgattttctgccatggacagatattcaaatttatgcagcctatggagatttgttactgcttgggcgtcacgagaagactcgatttttcatcatctgtaatccattcaccaagcagtggattaagcttcccaagcctcccatctcctacaaatgttactctacacatggtggattggtattgagcgatgattatgatcccaacaacataacacaactcgatcaaatcaggtacaaggtcttgataatatggcatgttgatttcggtcgtacgattccttacaaatcaatgacattttgttctgaggctggagaatggtctaaattaacccaattttctctcgaaattgggggtcatataaattctcaaattactccccttgttagcaatggaatcctacattgggcagagcaggattccgaatggggatatctatacagaattgttgcctttgatccctttaaagatatatatcatcctaaacactgtcgtttcattgattttccctcagatttcttggtaggcctagatttctcttgtgatacaatggtgcgtcttggactggtccgagggaggctgcacctttcacagcttattaaaactgaaggtgatggttttgttatgaaaatatgggaattaaggtataggaatgatagcaatgatggagagaacgatgttatgtggtatctggttcaccatgttatagagaggaaatggtcgagtaaaaaatggtgtgtgattggcttacatcctgatgatgaaaatgtggtatttttgttgcgtggcaggcgcagagtttatcgatacaatatcgatgaacagactaaggaaaaagtttgcaagcttaagaaagatggcagttagatattttccatcgtgcttatgcatctccactcttgtgcatcctctgtggcctacaccaatttcttctctgaagttttaacatatcttgcttacttttgattatgtctaagttccttttatgtttaaactcacagttagagctttacctttttcatttatatatgaattgaatatttaatattttgttgaaaaccttttgatgcaaagatttcaacttctcccccagattggtttggaatcatagctagcttaagcaggtaagctataacttctctttgaaattgttgtcattcatggctgtcttttcccaaacaacaatagaactatgtcattcattagcacatgatcaagcacttttatgagttatatttagttattactacatgttaatacttgtgcaacattgaactcaatctatgctttttatggccaatcatgaagtatttatgcatgaatgttcatatatacatgaacatatagcattaatatagttaagtcagtcaattgtgttaactctttagatagttacattttttaatatgagaaattccaatggattccccttcttcattaatattttgaagtggtcatcatcaatattcaaaaagtcagactgtaagcccttacaccatttcttgctcttgggaaactttttacttagataaacttttcaactgctcgagtgatcactcttggactctgtgtccactattgatgagttatgtgaagaaaaaattttaatagcataaagtcagagcttgttcctcaagtgtttaaagattcaatatttgtttgtgccatgtatgaggttgtcatatgtttgtgttatacatccatatactcttactgagaatatatgatagtgtaaatgttatattatcttatatagtataatatttagattaaacaattgtttgtcaaattgtaacatacaaatatgaagttacatatgtgtaaattatggtataaaaggatttataaatcctttatattcatgatcataaaatttgtaattcatctctataaaattgagttactaatggtgtttcaatatgattaaatggcaactataaaaatatagttgttgggggcttatttctattatttatagggtgtataaatgatataaagccaatgtgtgaagttttgaaccatttggagttgttttgttaaatgctgaaaaaattggtaattagttacttgttaccagattttgaaatgtttttcaacatgtattttttaacgttttatgaacgttgtgctcagttttaatagctcctataacttcaaaatcacttatttaagtctataaacgcccaatataatattagtaacatccgaaggttttatggtgatcattcatgtttaaataagagtgaaaactctacaaataaaagtcatattgttcacttgtgatacatagttgaaatcacttgttgtggttataaccttgtgaagatatgttcatctttagacactacactaagcatatgagatttgataaatctttaagagcatttttagagtttccctaagtatccatgtgtgagaaaaaatgacttttaaaacaaaggttcttgattttgttcaagcctttaaggggttttcttcttcctatgtaatcttgttgtatatgtattttgtgtatttggttataatcctcctattccctcaaagtttaatgataaaatttctaacagtaaatatttatgtgacttcaagatagtccaatagaacattcccaagacctttatgtgagttctattatttgaaattccattgactaggcagtggattgagcttccgaagcctcctttgtatatactctgctctagtgctctatacatggtggtggattggtgtgtttggtaacatatattcttgccaataaaatgccccacagttcaactaacttcatcacaacaactcaatgctccaaatctaaactaatcatcaaacatagtagtatactgcctcacttcaacacacatcctccaaatcaaactcatcatcttcaaacttcgatgagcatagatgcgttacccaaatcagtagaacactccaagaagagctagcttaaggatgataattaagttcttctcccctaaaatcctcatgagtcatgactagtgatccttagttccacacccacaagtagccaatggccttttaacgttattggagaacaggtttatgaaatgagaaatgccaaagagcaccttagggtgcccaacactctacgactggtgtaaatgaacatcatcattcatattatgcacaaacattacacccagtgatgcacatactattactctaataatatagaacaacatcggtagtaaaatttgtatagaaaaaaaaattggcagtagaaacataacctaaaacatttaccatataatttagcgcagcacactaaagaaactgccagcctccaagaacaattgttagtttgttactacatcatattatgtatcatatactatcatcttgtttaaatctttcagctgtggatggagacatcaattgttcctgtacatgtaatattaaacttctgttagctttgttctttatattagattagttagctttgactccttgtcattgctttccacccgaaaaatgactcattttatttattgatataacattactcatgagattatggtaaaggttgggcaagtttcaaaatgtgacagtaacactctttgctttctttgataaacttttaataacatactttatttattcattttcattcaaaacaacacaaatatttgtttcattctctgttttatgagtttctttatttttattttttggtttattgtagttattacaataatcagcttaattaatgatgagcctcattgcgattatcagtctcatcgtatatctcttcctgcaagcaaagaaaatagaatagtcattagacactaaatttcctcactttgtagatatattattttataaatatattttacctgtaacaactcttcaataacatcttctaaggtgataattcctatggcttctccttcttcattaatatttggaagtggttcttcatcaatatgtagaaagtcagactggaaatcctttgaccatttcttgctcttgggaaaccctttacttagtttcgtctctttagaaaagctattcaacttcttgagtgatctatcactcttcaaacttctttcatggggttggccttcaccatgaatgtccaaccgtatatcttttactgtgttcacttttattaagtatcattttcatcacaaaaatggacgagttattagaagaaaagggtaatgtgttaatagtttaaggtcagtgcttactctcttttgggtttgtggcaaatggcttctctgtatcgtttttctgtcttatgacaacagccatatggctatgacctttctgaaactcatttagtatctcgtatagtggcattgtttctgggactctgcaagttcaaagattcaaatatatgaagttctcataagttagtttttataattttaggtactcttcttggtcaaattaagtactgaaaaattaccttggaatcttacgaataacaatcttttttacaggaacttcatcatctggatggatggttaataagttctttgcctatatcaagttgactaggtattagtcttacaaaccatccttgtatgtataatgtttcaatgcattagagacttactaatcacaaacatggtaacttgaatgattgtttagcattctcatgagtttagtgaatcaacaaaaaattaccaatatgagtccaattatatttcttggttgttcatggtaaattggcaccctgctatgccctttctccaaaattactttcatcaagttcctgcataataaggatgaatagtaagctaatgtgatattaaattgtttgtttcattttcacaacatccattcacctcacctgtccaacttggcattcacatcaattgcaaaagtttctgaaattagagtcattgcatcactagctgccttgtcagagagttcaagtgctcctgcgattattgtcgtctcatctcgagtcagttcgccaccttttccagcctaagcataacagtaaacaagaacatgacactaactaattgtaaagatggaaattatgtatgtgtagtcaagtacgttaaattctaaaagcttggacctcatttccatgaaaatgaactagtgtcttcagttcagcccggcgaaaaagggcatcatgtccttgccccaacaagaagtctaaaagctgttaagactgctttgcataagttaagaaagaaaacatggttttgcagtgtgaaatagaaaaggaaaattatgaaaataatgaatatatcaatatttattaccttgcttattggatatgcaagaggaaaacatacgcaaactaaaagccgtacaaatggagcaactgctgcaccaactgccaaaccatatcttgaacaaacagcctgtggtataatctgcatataaaaggtaaaaaagaatcaagtattgagacttaagaaaatattgataattaatcaaatcattattaataattacctctccaactaaaagtatcaaagtcactgagataaggatagcaccccatgcggttaccatgctatcaagaaaaatgggaagtgcctgaaatgtaattttcattactatttagtatttaccccaaagaaaaataataatagtaaaaggtgtttaaaacattattttggttaatgaaattatacctccatagcacaagcattacaaattaatagggtacaaagcaatagatgctgtcttttcaccactggtaatatctttgctgtcatcattatcgactttgaattagtggaaaacaaaagaaaattcatgttttggcctaaaagaattgtagagcaagcaaagcaactatttgttgttggagaatagataaaaggtccaataatgattctcttggatggaatactttttttttttttttattggaacaaaagttctccatggatagaatactagaataatatatattgacagcaattctaaagatatggattcatttagtaaattgatgctgactctcatggataagttgtatttgtcacgggaaaagaagtgtagattttgattaaaataagggatttatgctgatgttaacagaaatgtttttaaaattaaactcaacccatttgaaatgtgattaaataagcactgaaacaaaattaaaacaacccgcacagcatgaaatgagttgacccgagtcaacactactaaatttataaggttaattaggtttttttttgccccttaaaccaattcataaacttttaaggtcattaaaaatgtcttctgaactattgagattgtt

SEQ ID NO: 218716 - DNA, 6107 bp, Cannabis indica
ataaaagatgcagctccacgactagcccactattatctctgaacatgatgaccgcttcttccagtctttttcacagtgttttgctttgcatatactcatggaagttctctgctcattctctatcggattcatttgtgtctgagcttccatttgctttaggcagaaatcccatgatcccaaccccttgacgcttcctgctagggtgtttcacagtggccctattaccttcaaaattgccttgttctatttccttgcaatctctgctgcgatggtcatgtttgggagcattcttcattgagttctttactacatttgcccaggtttgtttatttgttgcattcctcaccactttttccttcacaaactgccttggaatcacatgttggctctcagactttcttcccatgactccattgagacaccgcataaagtcactccatcctctagctgattcctcctctgggatgattaccgcctttatcttgttatttctcagcaccgacagtttgagaaactccccctttctgtttgaaaaacattccaaaaaatagctagctgtgctgttcctgaatgatcttttaaggtcagacatcagcaagcttttcttcccttgtatttcctgcagtgtgtctatgatccatgccacaccatcaatggtcacagaaacttcgaaaccgaaatgcctagtacgttcacacactcttacagctccaccgtcccccgtcaaagtgatcataaaaactttatgtttagtttgaaaactccagtatttatggaatcctagattgtctatatgtttagacaaattttgccagccaaaaccagtggggtgttgacctttttccttcccgaaaccagtggggtttcggtgccagccatgaccagaagggccatgggaaccccccctatgcatggagacttctttcaaaaagaggagaattaatgtatgaagacttgttaatatgtaatatacaaagatggcataagttgtttgttcaatctaatttgattggaaacacatcatcactagaattgttctatgatgaaggtcacatactgtaggggcacttaggaatgaatctgttgaggacaattaacacacataatatagaacttaaaaggttgtaatatgtacaatacaagggccaactaaactcacagttgctaatcactctataattataaaaaagcttaataaaaaaaaagcaatgactaatgtctcactattttttttaagtttatatatttactaatatctaaataaattcaaattatttgagaggttgaattagatttttttcattctatcaaattttttaattattagttgtctcaaattttttaattatattagttcatagtgtaggttatagtggccttataggcctctaggaaagggaagtcagaattttgtgtagattttgggagagatccaaacctctcgaagtaatttcagaattaattcaagatttgcaattgatagagaaaatatcgtatcaaatttggtaccagagacaggtctagcaatggccaaattagcatcatctttcagcaacaatacgcaattacagcagctttttaagactcaagagaagatcagcaagaatctagaggaatccttcaaggagacttacagcagtttggcaattccatctactattccaaaaccagttgcaaaaattcttcaaatcgcaagtcaagtcgaccaacaattttccaaaatcatcgaaggatgctgaaaagtcaatcaagaaccagcaatcatcttcaatgcccagtaactatcaatattttttctcaaaacagaactgattttcgagtaaagaaatcggatttgtcaaattctgatggggaaggaaaatcaacaaagaaagtcctcgtcttcaaaaataagcaactgttcattacaagaaactccaaaattatgaccacagcaacatcaagtctttttccaaaggtgtcgctgctcgacagagaacaaccacctgaagagagaagaagccaactacataaaacccatgtgatgaaaaattattgtgcttcactaacaaatcagcctaagcgaccatcataaatttcatggctcaaaaggcaacctaatgggcccaagaaaacagcagacccaacctaatgtttgggaccagactttcaaacccaatcatcacctattttaacatcggtaagagcaagccctatattccaaagagtagcattttctcttgataagttagggattcatgatccagatgaggatgacatgttggacagattgggtttggttactccacatgggcatttttctaaaggagatggcttgtttacaatgatgggtcttcgacagagggagaaaaaatggagttggaagacacaaccaaatactccccaagaagaccggagatatcaaatttgggtttgcattttttcaaactaaatttggttgcgaggagaattccacagtaacttttggtcgtacgaccatgagaaggatactcaaaatgacagtgcgaataggtggagtactgaagggagtgcttctgaaatccgttccgtaccttggtgtgcaactactcccaaacagattctcttctatgacagagctggaacccacattactttaaagagaggaaatcggactaacaatcagcatgttcaagagctcagctatccacatagacatcttcttgttctgtctaataaaagctaggagaacaacattgaaggaatggtttttcaaaagagtttgatgtgattaggtggtggcattcaaaacatagcaagaaaacactatgctctttgaaaagtcctataggtttgagactctaaccaaattgattacgtcttcaccttgaaggccattcttttagccttgaggtgtaaaactcaacttttataactgaaaaaatatttatagagcacctaaagaagaagcagcttcagttcagctatgatttttttttaatttcgtttctttctcccagaaagtgaagtactgattgagggagaaggaaggagaggggaacggctggcactgtggctaaccctacatgatatattatgagtgtttttattgggcatttttttgatgagtttgagttttgttaggcatttttaagttagcaagctaaaatcacatcgttttgggcttaaaaagcacacattgtttttttcctcaggcgtgcgcctcacctttttcaacgcctcaagccctcagtgccattagaagtgcctcaccagtgtgaagcatacgcctcagtcatccttgttaaggcacacgccttagtgcaaattttttctacctcggtgtcaggtgcgcctcacaaacgcaatttcacattgttgaggataaggtgaaacttcgaacgggcaataatgataatgataagccccatgtcaaattcacgtgtcataggaggaggagaatatagacttattactagtcatttaattaactgtacaattgtcatttaagctaaagtggcatacactaatttgtacattaggatatgcaaggattaggtatttttgagagggaaagaaaaatagcaattagattcatttttgtggacaactgcaatcttctcgaataatgggtacaagagagaacaagcctctgaaagcttgtgaccgtaatattctatttcaatatgaatagagatatcttagagggatttaagccatttgtgtgtaggttcaaaagataagagtttccttcaaagaaaaagacttattaaggtagacatccacaatagagtaaaatagaaaattgttacaaagatgtagtgttggggcatattggtctatgttgggtaaaaaaagtcgggtatcccaatggaagcaccctcgtgacaaatactgcaagtggctcgggaaggtcctatagaaggtgctttctcgggatacatagcattggttctcagaaaattagtagtgaggagttctgataatattgttcttttaggttaatggttatattttgttagtcatagagggtatgggcttagtatatatattagatgagcctctctaaggaaaggggaagtcagaattttgtgtagattatgggagagcagtagctctagttgagagaactttatttgtaatttcagattttccaataagagaagtaatttcagatttaattcatgatttgcgattgaagaaatttctatcaatgatatcattatatagttatatccttcattataaatagtaatgaaacactttcaagaaaatatagagaccattttcaatattactatattatatatataataagcagaggcataaaaatgcaaatcaaaataaatgatacaaaaaaaatcatctatgcaaagtatactttctgttaattttgatataaagtggtgttgaatcattagccaattattatagttaaggataaagatattgatagaaatacgtaatatattacatggcacagaaaagggaagagatattacctcattaaaagcttgttttcgctctccaagtgatttcagagcaccataccttttgtcattaattattactctcatggcctaatacaataagtgttttgtcaggaacttaactacatacagacttattaaaaggaaaaagaaaaaagttagaactatggcgcttacccgatcccatgtccagtcagatccaacattaaaagattccaacagcgacataaatacatttttcgcctcctaggaagaagaaaatagtaaaaaaattgcacaacaccaagaaagtaaaaacagactacaagactcgaaattctaatttgtaccagcttagttgcgtaaaccaatggttctggttcaactgttttatcttctgcggcaatttctttactcatctctactgttacatcttttaatgcttcctgcaatgcttaaatgtgtcaagttgctaagaatttatatcaagcatttgttaccatacaaaataaactaaggaatacctctttatgtgcagatactccagctgaagcagtaaaatcctgagctgaattatcactattattcctacaaaatatgcattcataaatttttatacttatagaagccaattgtagcaacgcagctatttataagaaaaaaaataataaaaaaaaaacatagaacaatacattggttctgtgactgcagtggtgacagcaccaatgccttcagtcgaagtgttagatgtagaaggaacactaatagaactatgatctccatcaacacttgcttttgtagtgggagctgcaacaggggaggaagatgatcttgaaaccaccacagcctgctgttcaccagcagatgaaataggttccactgaaacaggacttgatgctattccttgggctttggaggatgtatcgacatagggtgcagattcaacctttggagaagaaacagtatcagaggcaggccaactttctttctctcgtggatccttgagtgatacatttgctttatcttgtgattccttgagagacacattcgctagttgctcacgcgccaacttgatttgcagagaagggtagtaaagaaaatataagaaaaaaagaaatgggagcaaaaaggattttgtaattgaacatcacagggtttaaacattcacgcacacaccaaaaaaaaaaatcccctaccttcagctcctcgggcatcacccattttgactctttggtgactttgttgtagtaatacctgaaacacagataaaataaatattcaaatgtcaccattggccacaaaaattgcaaaccatataagagattggcttataagagaccaagagtggaccaacttttttccatcagggctagtaaattccttccagttagttgatgcatctgccctctgtcaaagccacaaatttggtatcaaaattccattagttaaggaatttgcagacaaaaatactagagggaggagaaatcattataggtcagaaaggatactggtcagatatatatttaggctgatcaaagagtaataaatagtgtagaaaattctctaacaaaaaacattcataccctcaaccagaaatattattttaatatagacccaaaaacaaaaacaaaaaaataaattaaattaagtaaaatataacaaatagtaatatacttcacc

SEQ ID NO: 218717 - DNA, 4298 bp, Cannabis indica
taaagcaataggtggaactactaagtacattataggtaaaaagggtgtgggggtgaggggcatgaagcataccgcaagtgatctttctttggcggtgaggtggagcttgtatacaatgccatattgaaacatgaaaaacctcaaactcaaaatggtttccaatatacggcctctcagtgtttgaatatgtgcctgcagcaagtacaaatgaaattactcaaatgaatgagataacattgaatcattcacatcattcccgaactagagataacgtggtatttaataaaaaaaaatgttctatcaacaaaatgaccattcagatccttagctgcgaagatcattaatcttttaataattcaaaacaaataatcctggaaatggcacaaagtaactaaactcctggattctttgaaggaatcgctattaaaaaaattatatatctttataatgttttgttcccttcaatccctaatgtagcacaatagatatagtaaatataaatattttttaatttttcaaaggaaaaattattgggtctcagtatggctggaactggaaaaacagaagtaaataaaaaaagcaaattgtaatatgacaaagtttggtaccagctcttcctcccaccaagattcccagctatcatctcctttcactcctacaccacccttatagagaagccaactggtccaatcatcaaaatcctccaccgttctgttaattgagggttttgccatgcataaaaaagtttaataacacagctagaacatcataaaaaagataacacatatgcaaacaaatatagtaaattacttacttttgccactcaaaaccagaaggattgaagatatacggtgcaaagagccaggaaatgaccagaaaccaactactaatagttaacagaacaaatgaaacagcccaccagcagtatacccgtatgcaatgtagactatgagaagcagagccacttcaagcctgtgaagattagtttgtaagaaattacatatcatttatatatatcataggagagagatattctataagcatagtaatgaacactcacgccttgacaaaatgacttcttgaatagagcctgtaattgtctgcaaacttgatgtggcggacaacaaaacctctaccagttgcccggtactgttgataataaaaatgtgtcattttgtttccatgtacaaaagatattcattaaccagaaaatcagtctcaaataaatacatacctttgcacctccatggagaatcgtgcgtccaaaatagtgagttctagtcctaatgagaaagtgaagaacacagaacataattgaagctgcattgtaataaagctgaaaactgcctgcaaatatttcagaaaaagcacaaagaattagaatagaaagcaactcaacgagttaaaaaaacaattataatatagaataaggtcttgatgcagatgcagttgcagatgtagcatgattaatgaccaaattcacctcaaatgtgttgataaccaaatattataatccaggcaaatttacagcaaaactaagaaatcaatttgtagaattttatttttttaacataaacaaactatttatggtttaaaatacaatagaattggcaaaaaccatccacgcaagaaaagcagcctcactataatcatacaaactggttgaaaactaattaacaacatgatctggatatgacttggactaaccttcagtagtcccagttcaagtataaaacccataatcatcggaactgctgtaaaaattccaatctggaccaagaactgtgcatttagagcagcatccagtgctgtgctgcccagttttttcgcttgctttgcaatttgctcatcaagtccagagaaagcctaaatatattggccaaaaaatcctccataagttaacttaagaaaaattcgtcaaagtaaatcatccacaaaattttgatgagaaattatccaggacactgttaagtttgtcttaacatagcatattattaaacaaatcaactcaatgtatatcaattcaatgaaaatttcttccttattaaaaaagtaggccatcatttaagcaaataacaaactttaaaatcatagtgtcccccaagtaattgaggaacctcccatactaatactatcggagaacttcaatgatattgttttcatcaacaccacattattaaacgattgttaaatctttagtaagccaaaggtacagaataattttagataacatggacatcaaagcagaaggggatatttaagttaccaggtaaacccttccatacaagaatatgtacactgtgagcactgtcatctgcatcaagtagaaatcaccataagaagattacagcagctagaaagtagaggcaactgacgaatagagaccagtagagaaagctcaccatagtacaaacatagaaaccgacagtcgtgaagaagtaagaacacattctaaagaaatcaaaaagttgtccaagtctgtaaacatctctactaagaacttgctccccatttccaccagcaacttttccttcaaacagggcaatctgattcagaccaacatcccttccttttccaacctgagcatagcaatgtatcaataaactggaatcggaatctatcggtgggaaacaggcagacaaaaatagtatattaaacctgaatgtactcatgatgtgtaatgttgccttgccttaatgttgagttgaaccctgcagtgtttcattttcatcaaagacaaattagatatttgcaggaaaattaaatcaattatgtcaatataggctcagacatagaaagcaatcacacccaccagcaaagatatcttcactaatgttgattacacgagatgccttgctaatgccacctcgagttatgtggaatacacggtcaaatacatccggatgtccatagtgcatgcgaactctgcaagaatttcaataataataacaataaatataatttacaaaaacacccacattgtacttattttttgtagtattaatactcaggagtcattttctaatggaaaggttcaacaaaataaataaatccaatcatcaaaaaacacaagaaaaaaatagagataaaaggaatacattgtgttgctatggaaatcaattacgctaaaaatgaaattgtagattttactcttgcaaataaatgttgtcaaaacaatactagttagcactaatggaagtaatcagtcaacatcccccaaggtataagagaaaaatattagaagctttttcggaatgttttatttgaagatctggatataataatcactttcttgagacattatgaaagcactacaaataaaataattttgcaggaccaatagcaagaaacaaaataaaaacaaactttcattttatgttttacactctttttaacatgcttattttcatgcaaataaatgctacttacttgagaggactcgccaaaacacgttgccccaaagtaacaaagctggtttcttggtttgacataaaccatgctaaggatgagacactgtatgaacaagaatgtaagacaactatcagggagaagaaagaaaaaataaacaataataattacatttgaaagaatccagtcaaaccttcctgtgaagacatgctctctaacaccaagaatagttggaggccggaggccatggtttctatggaactcctcaagaagatttctcatcttcattgcctcctcaaggtagttgtcctacaaaacaaaataatttggctcattgttttcactgttggataagatacaatactaattgcaaacaacatactgtacaaaccaacaatacaaaaattatgttcacacaacctggataaagatactaatggaaccaagtgaaaattaaatacgtacaaatatctcacctgattcatgtcaatagtttgaacagcctccccgcgagtgaaaactatggcatggttttggttttcaggctttccttcgccaagttttggatctccaggaagtttgatcgagtatatttcctacatataaaaattagcaaatgatcatgttgacaaaatcggtcaaggaaagctcttccaagccatttaaaaagactagataaaggaaagagcttgcaatgcacgcacacatcagccacacaaatacatacacacatcatcagtaaaaaggtaaccacacaggaaatgaccacagcaaggaatttgaactttcacattctttcaaggtaactttttcattgtttacagtaataatctttatttaattatcttttcttgttacaaattttagaagacaaatatatatatatatat

SEQ ID NO: 218718 - DNA, 3678 bp, Cannabis indica
tatgcttgagatgatggactaactcaaatgctacaaagatattatcagtaataagacagatttataataaagcactcttagtctatgtgatgacaatggaagaacatctttgaatctgaggactaacacttttgagatcagtttgtaaatgacattgtacaaaattattggcctataatcactcattccagtttggttattgatttttggaataagagtgataattgatttattcagcatatccatatcctaaccatcgttgagaactcccaaaaccacattagtaactgagggtccaacaatttcccaatagttttgatagaacatggttgacataccatcactactaggactcttattaggactcatagatttcaaggccacaagtgtttcatcaggtgtaaatggctacgtaagattttcattcattgaagtagagactgttgtaggaaagatgtttattgtgtgctgaagtgccgaggtgccaacgggagatgcagtgaaaagctcctcaaaataagatgaaataatcgttgccattcccttctttgaattttctgtaacaccagctacattttaaagtgatttgattgcattattgttctgtctaaatgttgcatgagcatgaaaaaactttgtatctttgtctccattctacatccaattcactcgtgatctttgctaccaataagtctcttcttgtgccaataatttatcaagagttgtctcagaattttttagctccaccattgcttacttttttctattgctgtcattatttaatgcaaaaatttccttctacattattgttattttctgcttcatattcccatacttttggacatgccaatgttgtaaagatgaagtataaccttgcaaattatccttgaaaacctccacggcttttgttgctgttgatgagttccaattttgtttaatgatagcagcagcttcctcttcattaagccacaatttcttgaatctcaatcaaggtttgtgtttgacttgttcatgcctttgattgcttgtttcgacatcaatagtaatagtttgatgatctgatctatagtagtctatgtgattagtgatcaatggctcaaactgtgtttgtccatttaccattgaaaaaataccagtcgagtctctctttgatggtattagctttgtgtcgacttttaatctaagtcaattgatctccttgaaatggtaattcagacatattgcagtggtccaaagcttgcctaaagtcatccatttgatatttatttctcaaagctctcccttgcttatttgcattagaaagtatctcgttaaaatccccaatcactagtcatggtaaaagtggagctacatcacgtaacctctttaatgtcgtcaatgaatggcgtcgattattctgttttggagaaccataaagagcaataaaatgccaagtagggctgttgcaaaaagccatatagcagtcaaaatatttgaattaaaatttaaaagtattacatttacatcatccttccaaagtaaaagtgaaccccctcctagaccttcccgtgggacttcaagtccatcattaaaatgtaaagcatgacaaaaatgagaaatcacattagaaataagtttagtttctctaataaataatacatgaggagattgctctttgacaagcaaacaaagatgacaggatacattcggattcctcagactttgtgcattccaactaataattttcatgactttttgcgaggctgtgagccagccaccgtagaattgtcaaagaaactcgagtgattcaaggactagaaacactctagtttggctcatctctaggagacaaagttagagataacaaggcttgcttaggtcccttgcatctttcaacgttttcctcatagagaggctgtcaaattgtctctttatgatttgatttggggatacattttccttatttatagttgactgcttcattgatgaacatatgacaacatctgatgctgcaatggtggacatttgcagaggcttgaaaccaggtttatcatgaggatcgtgtatatcgttgatggaattggaggataagtggcaatagtgccaacatctggtatgtaaaggtcagagagatcatctacatccagagtctttactgctagtttatttgttacaattgctgaagaggattgacttgaggcttcattttatgcaccagaagttttgctgatgatatttgttaagagtactatttatgtaaattgtacaattgttgttgatcgtgtgtttgcagtggcaattatatttgtgttcgtgactgctacactttgaacaaaagcactagaaggagcattgttaatcaagggagaggttacacttaagggtggagtggatcttggagtaatggcttcaattctatcattttgttgcttcttagatgattctcctagcagaagaggccatggatgtggtgatgttctgctagagaggcccggaactgctgacactaatgaatttcgagccaagcgcgtgagtaaaggccaagcattctgaaaaatatgttctgcacctatcataaccaaatgtggggagcataaccctttttaattcagggccatatggtaattcaggttcaataccattatctattttttccatccattttaagtatttttgaaatggatgtccaagccttccacattccatacaccattccaatagcctttcataacaaaaatctacccagaatttgtatttgcataagtcgtatgttgcaacctcttaataatatcttagtgacatccagtttgacctgaaactgaagaaaatgatcccaaccttcttccaacgaatcttcatggacttccagaaattcaccaatgatgtctcctaaagctttggctaatgtttttgacttactaagaaaaggaagtttatagcattggaccgaaaaaggagagaagataaattcttcaaatgtgacattcaacagaacacttagcgtgcatagcataatatggtggctttgaaagtgataggtctccctgagaagcacccttcatttgtctccttcacatccaaatgtaagaacaaacaaattaagtggttttttagttatcattgtgtggtaccttccattccaatgatctttcatttgcctttgtagtgtagagaggaaaacaaattttgtaaagcccgcttagttaatttggaaattagcagttaatcatgattatttatgaaattatttatagctatttaaataatttattatgctgttatttatggaattcagaaatgcatggttatgttattcagtagtttttcatgttttgcatttccggtgcccggcccaaaataccccctttagtgatttttatgtgattttagtgtggaggggcaaaatggtctttttgccccattgacttttgtcttttagtgacttaattaaattgaaaaataaatgttattattttattatttggctgaaatagatttagttaaagccttcttttcctttattttcatttcactcaaagtcttaagtatagaaatagatttttcaaaaaactctctctctcaagcctctctcttttcggccaagccttggagcagcaaggagctgatttctccattgaagtttgcttgctaattcatctcattttaaggtccacttcaagctaggttagctcttgtaac

SEQ ID NO: 218719 - DNA, 6348 bp, Cannabis indica
ttttttagtcaatttttttatatgattatatattttgtagttattcgaaatcctataaattttttatcaaattcttagtatcactggaatggacattacatatacaaaaatataattctccgtacaagtaattctctccgtacaagttttgattccgttgtgatttcgtgtgctacgcaggccatgtacggtgggccgttggccatgggtagtggcctgctgcccactgacactgtacgttgtgtcgtagggtattgcatcccttttttccatgttaggaaaaacaatccttccatccttgatcctgttgatcacagcccatccatttctctgagtttccccctcaaacctaaatctactccctctgtcctggaaccccaactcctttactcctctttcagtatctccacttctctggggctagtgattatggcctcttcgaacgattcgctggtgaatgagatgattgcagaaactgagaactgctgcctggaggatttctctattcaggtggccccggacctggaatcggcccaggagacgattgctaagacggttgtggggcgtctctactccaaaaagatgatttctcatggtactctgcgtaagaccctctctggaatgtggaaacttcggcctgggtggagattccaagcccctgataaaaaaatctgtcttccgtctgagcagcccccaggaagttaagtttgtcttagaaaacggcccctggaatccctgtggggggtttctgctggttacgagcctccctgaggacggacgttgggagtccgctgacctcttgaagctggatatttgggtaaaggccaaaggagttcccctgccttatctaacggaagactgcctcgcccaaatggctaagcgcatgggtctccttcttagtgctaataaggttagaaggaatggtattgttgtcaatgacttcctccgattccaagtcagattagacctcagtcggcccctgcttgcaggtgtttctctccctgagataaaccagaagaaaatctggagttactttaaatatgaacggctgcccatcttctgttataagtgtggagtaataggacatcttgaggatgattgttctggtttgaagagaatggtgacggcacataatggtcgttcgctccccctgtatgggtcgtggctgaaggatggttcccgattggaaaatggttttgccttactggaggtggaggagattcaagatatccagagattggagaaagaagacatctcgaccggaggaaatggtccctcagctgctccaccagctgctcagttgggaggtgtggcgattcagttccctgaaaagtctactggagatcgtggaaaccctggatgtgctgaggtggcggatgtcccagctggacgaaccagagttgaacaggtgggcatggagggtgttgtctctcaaaagggggataacgagtttaatgtggcatataatgactatgtggatatgacccattttccctcaaaacatgtgatacacgttgctaaccttttcaaggataaattaggtcctattaagtttggtgcggcccgtgaggaagtggaccaaaccgggcctaagtcaggcttagttcaaaagctcaaaaaacccaaactaattgggccgagagggatacctaagccttctatatttggtaggcgacccaataacatgggtcattcttcgggtgccaaaaggaaaaaactcttgaacgatgttgttaatgttgatccctttgtcgccgagagtgatgggctaagttgtctggtgggagttgataagaccggaatcaaggatgcctttgctgaggagagtggtgttaatcaccttgcgaattcgaatagcagcgatgtatccgtagatcctaacaagaaatctagattgcttatcaatagtctgcgatccaacgaagggtccttcgggtttatccaggagcaaaaagatgggattaatggtagtgcccctactgatgaaactaaaatggctaatctgccaccagggcacaagagcggcactattcaggttagtgaacagagtatgtctattgcatcagatgccagaattggaggtaagtcagctattaactttgccgatgaaagcaaggagaatcgggattttattatggccgaggaggcgggccgaaacatgccccccaaggacccatgaaagttctttcgtggaattgccgcgggctaggaagcccggcggcaaagaaagctctcagagccttggttttgagagaagatccagatgtgttgttcttaatggaaacgaaacttaataggaggcgtatgaactcaatttggcgtagtttgggcttcggtggtgcttcctgtgttgatgcgattggtagtgcggggggcctttgtctctgttggaaagctggtgtcgaggtcttaataagctcggctgaagctggggtaattactggagttttctctaatgttcttaatggacctgactggactggtctgtttatttatggtccaccggttcgggcggacaagaaggtgttttgggaggcccgaatgatggaaattatgtctctaaatcatccgtgggtcttggttggggatcttaataccatctctggccaatgtgataagttcggtggtcgattggttgaggagggagagggccacttcctcttggatttgatgactgtcacgggggtgtggatcttggttgcacgggtaatttctttacttggtcgaatggccggagtctcccggcccttgtcaaagaacgtcttgatcgggccatttgtgaccctgattggatcatcctgtatcccaaggcgggggttaaatctttggctatcaaagattcggaccatgctgcggtgttgctggatctcctctttgaccgtgagaggttcaaaacaccttttcggtatctggatgcttggtcgagagacgaaagctgtaaggatgttattagggaggcgtgggcaatttctgttcatgggattaggagtttccaactggtatcgaaattggataatactcgcagaagattatcgatatggaatagaactcattttggattgtgcaaggagaaattgaagactctgaatcgtcttctccttgaagtccaacaacgaatcccctcggaggataatctcaaactagaagcagacatccttttggaaattgaggaagttgagatcaggcaagcggagatttggaaacaaaaatctcgggagttgtggtataaagatggtgatagaaattctagattttttcatgccgcaacagtcatcaaaagaaaacgtaattttattgattcggtcacgccagatggtttgggatggatctcgggtagaaatgcagtgggggattattttcgagctaatttcatctcgctgttgtcttcttcctcccctcctccccctcaattgcagcatctgattcaaacgataatctctgatggtacaaattctaatcttatccgtcccccttcggcttccgagatcaaggaggttgtgtggtcaatgccccctcttaaagctccggggcccgatggtatgccggggaagttcttcaaggaccattgggagatagttggccaggatgtaattgatgctgtgaaaaaattctttgaaaatggtgaattggataggagaattaatcagacgtttatggtgttgatcccgaagaagattggagctaattgtttcgatgactataggccaattagcttatgtaactttacctataaaatcattgcaaagctattggctaatagaattaagcctctgttatctgacattatctccccaacccaatcggcctttgccccgggtcgatggattgcggagaactccatcctggcccatgagataatggattccttcaaaaaatgcaaggggagaagcggattcgttggtcttaagttggatatgtcgaaggcgtatgatcgcattgaattgggttttttggagcatgttcttggagcttttggttttggtgggcactttattcgtctcttaatgaaatgtgtgcgatcggtttccttctcgatacttctgaatggaggtcctctcaagcaattctaccctaaaagaggcctctgccaaggcgatccgctgtccccttacctgttcatcttgtgtagtgaagttttgtctcgtcttttgctgcgggaggaggatcatggccgtatcacgggctttaaggttagtcgaagtagtccccctatatctcatttaatgtacgctgatgatactctaatattttgtaaagcggatatggaggaaattgagactgttcaagagtgcatccggacctattgtgaatggtctgggcaatgtattaatgttagaaaatctgcctatgttttctctaagaatatggatgactcaaggaaggctgagattgttagtttgctgggcttccgcggtatgaatagagatgataaattcttgggaaaccccattctttggtcgaatagcaaggtgaaggattttaagtttatcaaagagcggttatgtgccagaattgaaggttggcgctgcaaactcctatcccaagcgggtcgaacttcccttattcgttcggtggctgcaagtacccctgtgtattctatgtcaacattccttctcccaaaagtgttgtgccatgagatggatcaagccatcaggaagttctggtggataggcaatgccgagaaggatcgctaccttgctctcacaaattggaataccatgtgctcccctttggaggatgggggtctaaattttaaaaaatttgaagacatgaacttggcgcttgtgccaaacttggttggaaattggctaaaggggagaattcgctatggacaagggtctttgtgctaagtattgggaagggggattaagcttttttggaaccatgactctcctaaatccctatccttttggagcccgtagtatcctagcttctcgagatctcattcgtaagatctgttcctatgccatgggagagcctctaaacttcggcatgccccgtggatcccgtggtttggatttggggaccctaattttagagtctgccttcaagtcctatgatcactccgatttccactcatgcaagctccctccatttgatctccttgctccccatccaccatgaggataggctgatttggaaggatgcaactaatggggaattctctccccgggtggcatataaatcaatcatcaaggggagattaggtgagaaagatctgttctggggaagaatttggaaacttaagatatcggaaaggatgaaactcttcctttggaaacttggaagagatatcttgccgtttggtgaaagactccaacgtatttttggcaatgatgtggtgtgtgctgtttgtgaagaacattaagactcgactgtccatctgttttgccactgccctcttgcaaaatccctctggatggcaagtccgtggggtgttcgtagtgaggagttgaatttcagtagccccctacaatttgctaagtggctggttgagcctttccctttgacccagcaagccaattttgaagtggaggagttcaggaaatatggaatttccctctgttatgttctttggtctgtaaggaatcaagtgttccatgatcatattcagccatcctttctcactaccttcaactgaattaagtgcctgattgaggacttgaactcagtgtataccaatcatctggatgcgaactcgggccatccttctctctcggatttgcaggaacctttacttggagattttgtggtgtatgttgatgcggcctgcaaggatcttcgctcggctgcgggcattatcaccaccaattcgaactctgcattggtggaagccttctcggtcgcccttcaggcaaaatcgccgctggaagccgaggcttgggcgttacttcacgcggttcatcgttgtgttcgtcttggtaggcacaatgttaactttgttttggattgccaatctctggtgtatggtattaagcagcgcaagaccccggattggaagatggcggctgtgtttgagctgctcttggacgggttggatcgcatcccgttggcctcagtttcgtggattccccgttctaggaatgaaatagcccataggcttgctaaatggtcttttaattcaagtctttttggtttttttactgctgaggagttggcacctcttgttgccttctaagactttggtgttttctggtttttgcctttcaatgaagttatctttctaagccaaaaaaaaaaattcttagtagtttagagtctcaaattaaagtttaaatattttaatgggtaaataccattttggaccttctgttttacaaaagttactaattggaccctgtgttttgt

SEQ ID NO: 218720 - DNA, 2359 bp, Cannabis indica
gttctttcttctactactctctctctctctctctctctctctcacacttctctctctaaacagtactaagcagcagtaacagctttctctctctagaatttgtgaaaactgtgtgtgaagagctcttatttattgctcccgaaaaaaaaaaaaaaaaactcaaaacccatttctgcttatgcttttcgctggcctacccctattctttagggactgaaaataattctctgctctacggtccagaagaagttgtgtagtctaaacgagtagggaaacgacacgtgtacaaacatgtagtcgtggctgacgtggaacctttgcattgggaagagcttttaagggatcgttatttgattgggtaggtgataagtggtgcttcgttgttttattttatcaatttggtttcacgattgctgtcatgacttcacgcatgttgattagcgcgtgtggtggaatgagtgtcgttatcggagcttttggtagtgaaagcaacggtgttgtgagatgtaattggtgcgtggtgttcagtcgctgtgagtgagtgtggtggtggtgaattctttggtcagtgattggctgtctttgctttcataccctcgtgtcatgcttcgttaatatcttaaaaaaaaaagagtaaaaaataatatagtgtaaagttggaataatcctctgtgatgaggtgcactgtaatcattgttgataaaagtgtgtgttttttttttaatttcggttgggtttatgtcttttactataaaacaaaatcttgtctactcattttgttttatttttaaagtgggtttaattttattttaattttttgattatgcaatttttaatttaaaaaaataatactaatgagagctttcgtattgaagaaaacaataggaccaaaggacaaaaaatgtggtttttaatagtgttaagttttcattagtgaagcaaaagaaattacttagcaaaatagaataagatattcatgtttttaatcaatagactgcattttttacggctcttttataagttttaggggttttatttttagttattttttattatgaaaaaaaataaataactattattgaaacgaatgctccctctagattcgcatttcacttttataaaacgaaaaaattgaagtgttttttattgtgaaaaagcagataatttttgttgaaataaatattttctatgaattctcattttacctttataaaacataaaattttaagtgttttcttattgtggagaagctgtttttttgttgaaacgaatattctttataaattcgcatttcactcttatgaaatagaaatttttaagtaatttcttattgtgaaaaagcatatatttttttgttgaaatgaatattctctatgaattcacattttacttttataaaaaaaaaattaagtgtttttatagtgaaaaaatatatattttttgttaaaacgaatattctctatagattcgcattttacctttataaaaataaaagttttaagttttttcttattgtcaaaaaaagcatgtaatttttgttaaaacgaatattctatgtagattcgcatttcacttttatgaaacaggaaaatttaagtgttttcttattgtgaaaaagggaataatttttgttgaaacgaatattctctataggttcacattttacctcatagaatggaaaaatttaagtgttttcttattgtgaaaaataggagtgcatatcgggtgagttttaccgagtttcagatttttcgggttcatgtgtatataattagtaattcaaacccacatgtttgtgtgactgggttttcgagggcgggtgggtcgggttcgaattgaaccgggtctgtggcgggttttgatcgggttcgggttggattggcatttttttcttttttcctttttttttttgaaaaatatcatttttatacattttttattaaaaaacacaaaataatgaaaaataaaaaaaaaataaaagaagaagaagaaaataaaaatgatacatcattgtttagaattggatttttttttttgttttaatttaatgattttcaaaaaatatataaaaaaaattacaaaaatatatatatatttaggtttcgggtgggtttaggtgtaactcgatttttcgtgtattgggttaatgaagctcgaatccaagtggtgatgaatcgggtataacccgaacctaatttactaaaattgtaatcccattttttcagatttttttgggttgggtgggttttcgggtgtaaatgtgcacccctagtgaaaaaagcagataatttttgttgaaatgaatattgtttataaattcacatttcacttacatcaaatgaaaattttaaaatgtttt

SEQ ID NO: 218721 - DNA, 3801 bp, Cannabis indica
ataaaaatacataaaaaaaaaataataataattttaaagtgaaaatgaaaaaatccctaaatactttttattttgaattagaaaataattaaaataaggttaatatcaaattacaagtgatttatttaatttttaaattaatcataagtgtttaaaaatgatctaaacgactaaagataaatgtaaccatcataattacatatttgatataaccattaaaatatcttcatatatatttatactagtacatataaatattgtatacatcttttatttagtccctacaatttataatattcattcatatctacgtacctagattttggaacatagcataagcaaaaacagaaaataacaagaggaaacgacactatacatttataaataaaaaggaaaaatgaccctctaaaacgacacaactgattgtatcattatggtattgtcacttttattggccatatattatatgtagatgagtaaagcaaagtcattgaaaaatattgaatataaaataaaactaggatagccctaagattcgtagtggttggttgaatgtatatgataatttattttactgcagttatagggtcatataatatatgttttatggtatacatgatattaattatttgattactttccttttttccaagtatcattatattcacatataagatagaaacttaagaagcttcgaaatgtcaactatttagtttagacctacttataaacattattacacataaataatttattattggctctataaagaaagaccaccattacaaaattgtacatatatattagtaggagattctccaacaaatatcctgttatgctttttagtacaaaaatacatgaatacagtacgttattttataggtttataaaacatatattcttagccaaaaactaatacaaaattaaatgatcccttcatatacatacgtatgtatatatgtatatgtatgtactttattcattgattttctaacgaataaaatacgaatccattggtatatataaaatattttaattcccacattattgatcgaagcattattctattacactgtttaatacatcacctttcttaattgtttctgggaaaattcataattgatttgacattaatcaacttaaaaaagtatatttatatcatcataattattaattaatatgataatctgtaattaacaagaatgtttttcatgagtcgcattaatataatttttataattttgatgttgcttcatgattaacttactttaccaaaaaaatatatatgtatatatacatataaatataaatgtgtgttgtgagcccaagttgtcaggactaacaaactattatagtgcagctcattctttttcaaaattataatcgaaaacacacaaaaataaagattaaattatgcaagtgtcgccaaaaagctcactttctttaatttgaaaattaatgataattatttgaagaacaaaagtccccaaatttgacttgaatattacttcctcatcaagagtcacctaactagtggtttgtccatatatatatacaaactttatatttaataaggtttcaactctttaatgatttcattaacggttgatacctttgtctaaactcttttcatattttgtgttataattatgcatagagaaattattgtttaattattataatatttagtttttgtatgtaataaaaatccatgcacaccaatttatgttgtaataaaaactaagaaaatgtatttttaaatatacgttgaaagacaaagaatctagtacttaattagaagaacgcgtttgggaaaaaaattacaattttgaaatattagattctatacaattccaaaacacacagcaataaaaattgaatacaaagacgaaggtttggcttggcatcattaacatagaaatttaagccaaagtttgtttaagaaactataaattattaatttcatgcttcacttttctcttttttcttaaaaaaaaaaagacctattaacaagtctttaggtttagagtttaataattaaaatttgtggtgttcgaactttgccaaccccagaacgaggaatcatgcatgcataatgtgattgaggtttggaaaaaaagacgaaagggacagctaataacaacatttatataatattaaaaaatatatatatatattactattaccaattgagaaaaagagatatatatatatataaatatataaacatgtttaaagttcgttaataataattagaatctttccaggaagccagtttattatctatacgtataattggattactgatcataaagattttaacaatctgacaattagtattaaaaaaaacagtaatgaataatttaatagccacatggttgtgaatatgaggtagctagagagagacctcgtcaactacattgctgtttcgaccaaataggtatagtttttcttctcccaatttgacacttaacatagtcaataattatgctacaaacaaaccccaacgtatgatatctttgttcttcaacaacaaccctacctatatatacacatatatgtattattatattttatatattgaagcagcaagcaagaatcaatctataccagctttcaagattttcttttgtgggttaataagggacggtgtttcaattttaaattacttcttaaaagttttggaatattttactaaaataaaatctgccaattacataaaaatttagatataataaattcaaagtacgcactcctgccattatttcaatgacccatcttcgaaattcagccgcctcttttgcttttctgatttttttttctttttataatattaaatttcatttaaaaactcgacatgaaacatgctgcgaattggggcattaatggtgtcaaatactgtgttacagcctacagggtatcagtggggtgtaatgtaatatataatattttacatattataatttaatataatatataacatattacttaattacactgatcaagagagtatattgaaaaatacctcttttatttatcaattaaccaaatctacctctaatttatatttaattaaaacataccatgtattgtacccaaaataccctaacataaaagagtcgagtatattgaggtgacaggggtagaattggcaaagtattaaaaaaaatgatagatttaaaaaaaaaatgataaaaataaaaataacaatataaaaaaaaagtatagaatctaatttaaaaaatatagtaaaagtgtacagagttgagtcagcccatatttagaaaagcaggcccagccgggcctgtgtcatgcttcaatgggccggaccatttttgctaaatagggttggctcttttttttaatgggccctataacaaacttcatatagttgttgaacaagctaaaattgtatcagagtaagctttcgacattgatcttgcttacatacccatacttactcagaatctttcgaatttatcactgatagtatagtaaaatactaaatatccaaaatggtgcaagaacattacaataatgtactctacaacctaatataaaatattattacatacatttacacataatatttaacatttttgtaccatttaggatattttcttttatttggtgccagcagaaattgttcttattttatattcataatgattcatgtagcaatggcaaatatagtgtaatgcaatataggaattaagatatggagaagagactttgtcaatggagataagaaaggccacgcatggtcaatctagctgtagctgtatgagaagggagcaagta

SEQ ID NO: 218722 - DNA, 4523 bp, Cannabis indica
aagaagcatctgcatctcatagaaacatttctgaggatcaggaacagcagtctgaccgatcatactcaggactataaaagaaattattatggataagctatgtaagagatgtattccttaggttgtttctttctttgttgtgtttgttttttttttggtgtacaaactcatgtcttttcattactgatactttaaaaatttattgtgtagagaaaagtgagcaaaaactggcatatacctccgatatttcctagtgaagctgttatttctgcttacatttgtcctcaagtagataagtcaaccgagcctttcacatggggaaagcctgatcattttgttcttcgcaagtaagttatttctcctttaagtttcataaagtttggcgtttaggatggcagtctttccatccacagtttctttctagtgtcacagacagttaatcctcttattttatggaaattgagtcatgtctttgaaaaacagagagttacaagcatgtcttcattttctagagacagaattcatcactttttcggcattattttcgatctgaccttgtttataatttagagacattggagtaaatgaacaaatccaccgtaattcttacattttactccaagtagcttgagttttgttttggtaactataagctacttatttcctgatcggttctgtggaatgcagattgtgttgggacaaattttgctggggtagccagaaggcagatgatttattactacctgttctgaaggagtacaataaacatgaggtcgtgaacttgccatttctctgtccctaaaaacttattgctaagaatggttaggaacataggattgacagaatacaaaaaattgtgaaaatgcagttggtgaagctgaatctgcttctctcttaaacacaaaaatactagcattctaaacaaccatcttaaccattgcattagagcatatcatctatctttcatcggcttatgatctcattttctcactctctctatgctgatatgtattgttcattttcttgtgaagactcaactacgtttggaagcattttacacattcaatgaaagatttgctaaaattcgaagcaagagaattaagaaggctgttaaaggaattgctggaaaaccatccttggagttaatggatgacgttgtagaagaagtttctggatctaaaaagaaaagagaaagacctgatggatctggggatgaccaatcagagaaacttccacaggaaacagagcaaagtgttgccagaaaccagagcaagtataggaagaaatcaactcccaagcaatcaaagaaacaaaagatgcccaaggatgggcttgtgtccgaatcaccgtcactaccagatgacagaggagaaattagtaagaaatcacgtgtgagtggaagttgcagaggaagaggaagaggaagaggtaggattgcaggaagagggaaggggaaaggagtaccaaaaaccagctccagctccagtgatggtgagaatgagaatgatgatgatgtggaagaaattcaagttgaaacatttgaaaagccactagaagtgcgaaaggtaagctcaataaagaacaccagaatatgagaaatttacaccacaagttgatttatgctaatcttttgcccttttactgttatatttttcttttgaggccgtgcttaatctgtttgagattttgagtgaaaataagtacagaggtaacataaatattttgagagtgatatcctgaacaagtctctctcacagcatattgcttcatttcgtaatatatatccccagttctaactattctatcgccactcttttgacacttaccattgatcttttcatgcctctcagtcatcacgattgcggtaagcctgtaagctacaccgcaaatgactcagacattgatgatcatgacaaattatttgatggcgaggcatcagaaagagatttatttgaaaatgctaattctagtcttggtcaaaatgaaaagcatgatgttgaaaatccttctcccagaaacggcttggatggagactatcttgaagaaggtgggggtttctgtccagatagcggagaaaatgaccaaccaagtgtgagccaacttggtgtttcccatcttgagtctgatgtttgtgaagaatactataagactggaggagggttttgcatggaagaaagtgaaaccggcccagatgacagtagcatttctgggcaaggtccagctgctgttttagacaattctgatcttttccattgttctggaatggagagcgaagaggcatgtgtttcagagccaattattgatcaggcaaaatccgcagcgaatgatgaacagtcaaaattacatgggttttcgccagagataaattctgtgggaactctacaagccatgcctaacctgagaaagaaacgaaggaagaggtgaacatctgttctgtatttggatgcaaagacagtttttgtgtataattatcatttatgtgtatttatcctatctaggctcaaaaagtgttcattcaaatgtattaatattatacaatgctttaaggtgcagtgccactcagagaacaacgatgtataatttgttctactagggatttcgccgaggttggtttatactctgttaataacagaaaaagaacattaatcttaattagtgtaatagcacaatatttacgtatcttatattagaatttagagatatacttgttaatatttgataggccacgtatttttatttgaagaataaattgactattatttggttaacaaaaattgtgcgttaatacaaattacaataacgaattcaagaatagagtaataaactatttttatattaccatcaaacaaattaagtataccaaattaggtaccaatagaagttgacatgataacacaattaaaaaatgacaaggaattagcaagtttgggtttaacataaacatatgtatgaatcaaaataagttaaacacaattaaatatatattaggttaaacaaatattaaccttctaaattcgaaattggcacatttaacacgattaagtgcatattaataaacaaaattttataaaaaaaaataaattataaataaacaaaatttaaatatgtttacttaaaattattaaatatattaatttattaatgaaattacaatagattaagcatattaaaatgataaattttttttaatttatataggtaaaataggtactagatatataaaaaaaatgttaatgtgtttatggttatagaataaatttatattggtttagtttagaataggtgaatatgtgaattatgtgtttgatggtttgttgtggtaaaatagtgaagtagtgatgttgatgagtagttaatagtttagtaaatgagaatagttaggcttagagaagaggattgtatgagaaagtagtaaggctttattgatagtttggatattggttacaccatttgtaatccttaatggagtatttatagttgttcaccctttataattagaattatttcttctcgatccttcttttattaaaaagaattttatccaaacacatctatatgtttttaaagttcaacataactaggatattctagacttaatctaatctaaaaatcacttacattcttagataaatttttctacaaatgtatataaatttttaaactaaattaaataaaaacatatagcaatttctaatagtgttgagtaagattaacatgatctgaaataacatttaaatgccatctcaataaaattgtgtcgtgttgtgtcaagtccgaggttggtggtcgtgggtagctccggtctcttggctagatggaaggcgacagtggtgggtttctttgggctttctcccttccgattttggggacggcaagatgcagtggttctactcaggcgaaaacttaaactttggagagttgttcctcttttccttttatcagatctttgtgttcattggttttcttttcagacgttctagctctggtgcacaatagctcgtggttagcttttggagtattgttgatgtagaggaggggactcgggttttacccaaagggatgcgcttcccttgttctagcgccctcaccgttcagaacccctttagatggcagagtgtggactggtattttggaagatggcagtgttcctatgcctttggtttgcttgccctcgcgtgacctcctttgcgctaggggaaagtcttttgaagtcgttttatattttgttttgatttggtttgttcattttattctgtttagttttgtcggtgttgtgcaccctatgttctgtgtggcgttggctttaggctagtttttgggggtttgtccccttcgatgctcctgcgtgagccaagagcttactgctcttttcgttatcggcgtggttggccgacatttgagtcatctctagtgagagttgtgcggatcctccactggacttgtagggcttcggcctttgtttgaagttcccccctttaaaaaaaaaaaaaaagaaagttaaaatttgagaaaatttcaatgtc

SEQ ID NO: 218723 - DNA, 4554 bp, Cannabis indica
cgatttttggtttctggatttcgatcgtcagttttattgctttattgcactcctgatctcagtcacttgtaaattttatttcacttatttttttttgttagaatcgttaaatttgttgaatttatgacttgatttgattactctgatactcatttctcgtgcttctgaagattgtcgggtagtataagtttaatgcttttacagtttagtttttctttaactttggggttttttgggtattcaatgaatgaaaaataacattaattggattatacacaatattaattatggcacatttttgatgcacaacacaagttagtatacctgaattttaccatattaataaattgtgggctccatagttgaatttcttctgcaccagaggtgcccttaagttttaaaaaaaaataataataaaaaatataattattgaagtcatgttttgaaatgaaggagagaattcattagctataaaaagttttgactttgttcatccttctttactataaaaacatttattgtttgctttgcttgctactgattattttgggagtctgtattcttttaattgagttcagtgatctactagtcctatagaaaggggccatttctgattgttgtgataaatatttataagtcagcattatatgattgcttagctgggggtgccttctatggagaaaaatgtcagtgttattagtataagaatttgaatgtcgttttggtttggaacagttattattggcttgatgatttatcaatgttggcaggttcatctactctttcatgggagtggggattcttttgtgctgtattacttgcataggttgcattgcagctgaagcaattaatggctgctgcctatgttttgtatcctcatcgcttatgtcggttgttggctaaaattacagctctatctggggcttaaaacactgtttttatcatatactctttttgtttttttccttttaatgtgaacattccttgacagtgtcaaataaaatgagtaggaaaagataaaaaaaaattcattgcatgaaaatattcttcactaagaattaatgtttagtgcaagttctagaaattgattttttccaagtaatttactgaattttaccagattgttcaaaattgtttcttaactgttaaaaactaaattagtacacttctcttaaacttgtgtttattctactagaagctgctttggtggcatttattgcaattgatcgacgttgggaaaaggttttctttttcttcatcatttacttgtgatttattaactttacatctttttgtatattcttgaagtaaagtttataatggtacctgtcaggatcttccatatgacccaactggtgaacttcaaagtcttcgagcttttgttgaacagaatagtgacatttgcaagtggattggcattgttgtgattacagtacaggtatgttaccgtccattatcttttttttattaggaaaaacatgaccttgatttggcattttgcttacatgtttctgctgaattatgttcaggcactgtcgttgctactagcaataattctaagagctatggtttctactcgaaaagctgacgatgatttagaagatgattatgatgttaggggtagaactcgggagccactgttaaattcacagtctggccaagcatctggatcgtccaaggttgatggaagagggagtcattcagacacatggagcttgcgtatgagagataaggtatttgcctaaaagggtcattataatttcaaagttttacgatcgatttctatgaaccactagccaatctagtctaaacttttgatgttgataataccggactactggtaatattaggtatcatccaattacaaaaaaatgagcaaaatacgattattgaggaaaaatgacagctaactaagtaaagtagttggcacatgtgatgcaacagtttatgacatagcaaataataactaactaaaggctatcttgaacttgtcttgtgactcaccccaataatatctgaatcctatcccctatttatttcttggtccatcttatctatgttgtttgctttcttttcccttttcttaaactagttgcagtcatgtcctcatgtgaaaacaaaatgcatgtgatatttctttcatatgcttgaattttatttacacaagagttgtagagttttatatatcattggctgacatgcttttcccaagcctgaatccccacccccatatagaaaagaaacaaagaaaaaacactgaactgtgaggaagcctttgcagtccacttgcattttcatcctattttgagctatgaatgaaacctacagacttaaggaatttagacataacatactttcaattcattttgtagcattcggtacgtcttgtattctaataggttgagtcgatgacacaggtttctaccccacttatttgcataatggttgttggatggaaattgaggtttaatgtgtagcaattaaaaagatgagtacatataataaaattcttcttgttgcaagaaaatctttctatccagcaaactcattgctctattttagattagttattgcagagaaatagtttttgacttcaaaataaagaaaccgatttttggtcctacttctgctcctgtgttattatagaaactagttatgatcctcatgaatgtgtgttttttaaatttgtgctgcagtatggattgaactcgagtgaaaagtctaatgcaccgaatacaaattaaagacgagcagtgatgatattggaaggtttactgcaggggtgaaaacgtgtagcaacgctactcatattttctccaaattcccgctgactacagacgacagaaagagtatataatatttatcactgttagcttgtttatatttgttactttcctaagctcatctttaatcctgctcctgttcttttcatggtgtcattatgtatataggtctgatccaaacaaaaacgtatgtttctcaaaactctaatgtcttttgttcaattgggagtttttgtaatgtgtaaggaaactaatatcattgattgtaaaatgaagttttgtattcaattttctttaagagaagattgggtttaccctgataatcacataaacccaattagacttgaaaaaaaatggcttcaaaagggtttgtgcctctaatgaaaatgggaaagaaaaacagctcccatataggaaaaatccagtttttacattgtgaaaaagagagctacttggtaatttataatgggttttctctcttttgtttagacttaaaacagttttatgatttaacagatttattgttttcaagtgttctccttaatggtgtttttgggtgcttcgtccatggatgaccatcttcatgtgttgtaacaataatgtgtttaaataataatgtgtttcgataggaggtttgtaattatgaattttaatagttagttattatattaaaaaaaaattgcagtataaatatttatttaacacttggaccaattagggattgtcacgcgacaatctacttaacacttaactcaaatatttatataagttttagaattataatttaagtattattaccgtcaaaaattaaatttaaatatttatttgtaaccgtgagttaaatttaagtatttttaccgtaaattactagtaattaatatttaaaatataaatttttagtaaatacaatgtaattacacaaatactattcaactcaatacttatataggttgtgagaattgaagaatgtaattaaaactcctcaattctttaattatatataattatctctaattatattgaatattgttattgatcatcagtagtgtttagtattttttaatcatgttatcttataattggttaacgatactctctaaaagttattatattaaattatatgagattcgatattaaattatactaatagtgatgttgacacgtaaaaaggtgttagacactactaatatttttttaatattttttttaatatttctcaatgttattcattgaacagtaatgactatcaccttttagcatacctaaattcaattccaactataactttccaaacacactttttattgttttctggtgttctctttaatggtgttttttggtgcttggtccaaagatgaccatcttcatgtgcttaacaataatataataccaacttatagtcacaagatgtgtctaaatttattgccttaacatttattacaagtacttttcataaaactatacaatagaatatcattaatgattcaattcatttcatgcaaatattctctttcctactctgtctctctggccctctccaaataattctctctttattttctcaacaagaacctcatcaacatttctgacaacatttttttctctcttttatttctccatttagtttacatgtgcatcaaaataaatttattatatttatgagcattgttattagacaccaatagtatttagaattttttataggtgataccctataattgattagcaatattccttaaatgttattttcttaagttatataaagactcga

SEQ ID NO: 218724 - DNA, 4886 bp, Cannabis indica
aaaaacctcttgcaagtttatctattctgtccctttaactaccaagatggcagagccatgatctaatttctattagtagaaattattctccaaaaacccaagtcaaatcatattgaataaagttcaatgcagcaacacaagaattcaattaatacgattaaacttaccaaaaggctgatgaatgtctcgccgtctttctcacgaatctcaaagcagccccttctaggctgttgaaaaacaaaacaaatcattgttattatataattttactaaataatggtaatgtaattcatgatgaagcttaaggtttagtgtttaaaagtaataccttatctggattgagcacaactgtgattccagagacaccatcctccaacccctgtttcacctggagagcccttgtcttaaaggcattgcattgtttgctagagaaagcaaaaaagtaaattagaaaaacaaggtcaatacagatgatataaaacatattaagttagccaaactagaaatttaatctataatctatacaatacacaatacaatggttgagattgtgaacaaaattccacctgattaggcaaatctctaccattgtcctaattttctgattcagttgaggccaaaaacgaaataccatttacacattcatagactcaaaggtgccttagctcaagaaacacacagcacacacacaacctaactcattatcaagatattaacatcagaaatgattgatgctatgttttttaaaatatatagcacctaaagaatggaaagaaaaaaaaactttaaagaaagttgataaaaaccctaactttaatcacttgtttttctccgccattttctcagtagccgcaatatttattattagtcatttttcctctttataaccctagacaaaaactaaaataaaaaaaaatagagataaaaaagggatcttgattctttctttaccattttccaagaaaataaatatatgtaaaaaggaaaaaaagaaacaaagagcgatgttatgcactttctgccataacaaaacatatgcaatgcaagaaagaacctttttttttttctcaggaatcaaacatgataaataaataagtgaaaaataaacaataacaagaaaggaaaatcccaaccagtgttcaatgacgatggtcttcattttgggttcgaccttaaccttcatcttcttcttcttggtggatgtttcagctttcacctcaggtaccgggacgatggttccatcagtagctcgacgagccgcagcacgagtgaccctcgggacaggaggaggataaaccttttccgccacctcaatcttttcctcttctttcttcattgatttccttttcttggtcgccatttccacttgcagggtgagagagcagggcttcttcgttcttggacaaaacccacgaaataaatttctctctctctctctgtctttctttctctctcaccccttcactcactcactctctctcactttttatagtactgtaaggatggttttcgtgcccaagttcccgctcttttcttgtgtaggtgtatgattagactactccccccaaaccctttcattatctaaagagctggcaaatcctctttctttttctttttcttttaaataaatacataataattcgatcattcactaaccttttgattttatttaacaatttttgggataaaaaaatcacactcgaaaatcaacacaaaatttgcattaaattgtttggtatgtataagaaaaaaaaaaacattcatattaagcattaatacttattattaaattaatgtgtgggacctaataggtgtttcacaatattagtgtcttttaacatttctaaaaacaaaacatagaaagagaaatctgaaaaaatgatttatgagagaaaaagaaaatgcatgtgtggtgtaagagcaaaagacaatgcttaataatgagtgggaaatagggttttgtaattgaataaatattttgttttgtgtaattatattaaaaaaaataatgagtggaaaacaaaaaattaaaaaaagtcccaatatactttttatctctggtttctctaaattgatgagaaacctaaattgctaatatattttatatttaattataatattgctttctttctcttgggttactagggttttcccttatttttgtagtcgttgttcactttagctccgaggaggacttgtctggccttgagcgcagttatagtcgggccttgcctacaaactactttcacttaatattttatttaatattggtcattattcgaaattacagaaaccaaaatcaacatatattcttaattacaaaccagaaaaccatttgaaggaaagtctttgaaccaaatttagcctagcctttaatgaagtcatgagcattatattcataggctcttcggctaatacaaaatggttcatggcccatggttagtttagccgcggtacatgtcacatgctaaatacagtccattactaactgatatgctacatgttaatattcgaactagtatttctatgttctactatcgaatgaaattgtaataaaattaagtatgtgttagctattgtaatttgaaacctcctgtcttttctcattacaattttttattttatttttaagtgaggcattatactggcaaattatacaaaagaagttgcaccccagcaaaacaaaaaaaaaaagagaattccatataacttgctttgatcctttttaatttaattcaaaatcaactgatcaaactagaagagaattcttaaattgctttaaatttttatatatatatatatatagagagagagagagagagagagttgtacttactgatgattgctacacattaattaactatagatgaaacttattgtacatatagggaggggacacagaacagaactgtcttggtctacttataattaccaacaattaatatgatgattaattcttttaatttttttcacacagaagtattgcgtctttaggaaaacaaatagagaacctttggaccccttccccaaccggtattttgtcatcaacatatgtgatccgaagtttcacctcactttcaccaccgtaccggaattccaaagctccaaccttcaattcaggtggctcaaatatcacttggacccattcttcatctagtgctatcagctttcctgcccatgaaaatggaatagatagatgatgatagagagaaatactcatattacaattctaattttaaacaagtttgtaactttaagtctccaagagaataattaaaaaattagagttatcataatgataggaatttgaatctttgtctaagagcaaaccacatgttagtgcattttgtttaaatgtgacattgttaattaattgtaaagattaaaagcaaattatgtctagtttgaaaacagagaagaggaagaaaatgctatgctgagctcaagatagggtgagtgagaacttttctatttagggtacacgagaggctcttacagcaaattattacacatcatcagattcatcacagaatattctagcaattatatacaaattacaaccaacggaatatttcctaatgattggtactgcagggccagggtgcataccaaacttttgggaccactgccttttggtgatgaatcaaccaatttcatttctctctttctctcaattcaaacactctccttccttcctctctatctctaaccatccaccctcacaaattcaatctgatttttttttactttcatcatttaacaattaaaattttaattcaaacttaattctaaaatattcacttaaagatactaattcactaattttaatcctttaagtatatggatttgtttttttttttttggcacttcgtctcaaaacgatccacccaaacatacttgatttctgaggtcaaaacaatcattagtgatgcttccttcaaaacttgactttctaaggcaaaaaaaaatgatgttttccatgaaaacatgaattttgaggtcaaaatgatgcatttgtgatgctacaacaataatctcatataaacttgatttttgaagaaaaaatgatgctcaaattaagtttttatgagattatcgttgtatcatcgcagatgaatcgttttgacgtcaaagatcaagtttttatgcgagtatcgttttttgtttcaaagattaagttttcagcgttgtaacgtcacaagtatattgttttgacctcaaaaatccagttttcattggagcatagcttcagcattgttttgttcaaaattgaaacgtaacaaaactaattaaacctgtacaaaaatgttcaaaactcataaataagtatttcaagtgaatattttggtgagcgcttcaacgatgaagaaaggaatcgtgatcaaatttgtgagggtggttgagaatcaatggatgtttagatagaaagagagatgaacggtttgagagagagagtgagagtgacaactttatttaaaattgtaggaaactaattagaatgcaatgcatggatggtcaaatttctgtgtggcaaaagccatagaataataaacagaaagtaaaactggtggcagacagtataaaacatatatatatacatgtagatagatagatagaggagagattgtgatttaagacaaacctttcaaagagacctctccctccaggaatccaaaaaaagaaaaggtcactaagtttttgacaatgtcaggagattctataccctgaatcatttctttggttttaaaaaaaatgcgacccaatgcacttctgtacccacccccaggtgatgttggcaccgagcagtacaccacatcccaatctgaagacgaagaaaaagctacttttgttaactcttaggctatgtttggaagttggaattctgt

SEQ ID NO: 218725 - DNA, 3203 bp, Cannabis indica
tgaatgtaaattcttttttcaattcttacataaatattatatgcatgaaaattgcaacacctaattataatcattaacctaaatttaataagcatgaataaattattattaatgtaatgtaagaatttcgtacatattttattcgaaggaaaaatatttatatacatttttctttttgaaaaattcaagtggaacaacttgtgtgagtggttaaagctatagatccaaacctttcgtgctgaatcaaaatccaatattttggtgtcatttagtgacttttacatattgtaacacaatattaatatataaatactcatatactacctctagagctgatagagatagagatagagatagagaaagagaaagagaaagaaatttggaatcgaagcgatgaatgactttccacaaattattgatttcgttctcaaccatatcaccatcatttatatttataatatagagcaaattaaattattatattaaagatattaattggactggtatatatggaggattggctaagcgatgacctcactatttctagcaactacaatttttttttttttttttcatattttaacttagtataatttgtcattataacactcatgcacgtttagtagtactttttttttgtttttaattttttaatcacaaaattaaaataaaatttgtgtttttaaaattttatttttaaaaaacagaaacaaaatttaatatcattagaaaaatctataccaacgacttgacagtggagacctaatatcatcctaggagtgaaacctaatatcgcataccagcgacttgacagcggagacttaatatcgtcccagtagtctgacgaagatgtttgaatggtcaagggccttgacgacggagaggaaggtgtgtgaacgtccaggagcttcgatgtttgcacgtgagattggtgttgctttcgtcgtcagttattgagttgtacaggggcgatctgctgcgtcttctccaacatcattttcttgtgtgaatgtcttgtccattgtgacatggtgtgtgtgtctttgattttgtgttttgatttttgtattctggtttgatttttttttttcgtctagttttctgcaagttttcgatttacttctggtttttgggttttttgggttttcttggggtgcgactgggttgctggtgtgattttgggggtttctggggagcgattggggtggggtgcgactgggtgtgggttctttcaggtggcgatttggttggcaggggtatgggttcgttatgtgtgggtggtcggagtttgtgcctggggtctggttgacttcgggcatgcaagggttccgttcggtgcagtctgggttgtggggggcagattcattggtggggctttgttagttcgtgttgtgtcattaaagggttatggcaggtaaatacaaagtgccatggcttctagtagtacattgtatcaggagatggaagaacaatatgcgaatatttcacttaagggagaggatgatggggagttgggcattgactttcttgtccctgatgatcaagttttgaatgttgagttatgtattgtgggtcggttcttgactggaagagccattgacttcaaagctatgcgccatgttatggcctctttgtggcagccaagtaagggggtttatgctaaggagcttgacaccaaccgttatctatttcagtttttccatgaaattgatttagcaagggtggtagagggaagtccttagacgtttaataaagttcagtttgtttttcacaagttaagaatgggagatgatccgaaaagggtagtgctaaacaagctcgacatctgggtgcaaatccatggtctccaaccggggtttaagtctgcaagtgttgtggagaatttgggtaactttgttggtacgtatgttaaggctgatcctaagaattttcagaatgtgtggagagattatatgcgtgttgggttacattggacatcactactcctttgaaaaggtccaggaagctccgtcggactgcattggaggatggtttctgggcagaattcaaatatgaatatatccctacattttgttttatctgtggtgtaataggtcactctgagaaattttttcccaagcttttttatacaccaacctagatgatcataaagccttatggtgtgtggatgagggcttaaccacgacggagaaacaacctggagggttctcagtggttacgtgatgggaatgagatagacgagatgtttgctggcagattcaatggtggtgtggcgactgctttgggttacatcagcagcccaggagtgaggaggttgttggaggatcctgtggcaattcggggtgggaaatatcttcaatttaattctccgaatgttgtgaaggaaaatatgggatatcatgttggtgttgatcaaggtgggaacactgatattgatgatctgaatgatgacatcatgctgttggattctaaaaaaaggcgcacaagggatggattgcaatcgggccaacgggtggtgggccaacattctattgggccgtgttatgatccagttgagacggataatagtagtatggaggttgaggtggctgaaggtaatcaagatttgggctcaaaaatgggcctttggtgggtgctaagatccaggcacaccgtccattatgagtatcattagctggaattgtcgtgggcttgggaacccacgtgtttatcaattccttgtggatcttattatccaaaagaaacccaattttctgtttttgtgtgagactctttgtcgtaaggacaagttggaaaggttacgggttgcggtggggtttgatggattgtattttgttgatgcgagaggacatagtggtggggtggccatgctttggcgtaataatgacgatgtgcaactgcttatctattcttatcattacgttgatattcagatctcggaagtagcttctcctccttagcgtttaacagggcttatggagaacctaatagagctgttaggtataaaacatgggatttattgagatcgttaaagtcaaaatattcccttccttggtgtatcattggtgatttaaacaacactactagtcatgcagatcaaagaggaggaaatagatatccgcaggtgctggtggatgggtttaatcaagctttgtttgactgtgatcttgttgatgtggagttaatcgggtatccttacactt

SEQ ID NO: 218726 - DNA, 1840 bp, Cannabis indica
ttattcaatattttagactccgatcatacctgaacttggtcgccggcccaggactaagaccccgaacacggatcctgaacttagacttggacccagaccccggccccaaactaggaccccaaacatggatctcgaacttggacttggacttggatccccagaccaccccaaacatgcaccttggcccttggacttggattcaaacctgaacctgacctccgaccccggacctggaccaagacttgaacccagaccccgactccggactaatcattactaagattattcaaaagattcctacggtcatgaaccaacaaactaaattttgaaagcatatgaaaattactcgcaatagcttagacacaaactaagttgtccgtttccggtagaacccgatcccattagtgtctatctgtcaaactcaatgtctttttgataccaatgattttagcaatttttggcttaaaataaacctctcttctccacagtgaaagcttccaagacttagccaccaatattattacgtgctaagaaactcattctaaaccgactaaccaatctaaataaagctcaattaatatttacttggatctaagaaataccaagtaaagtccaatgcacacgaacacttacaccaaccataggtgaagacaagaaacttttgccaaataacatcattctgcatgtcatattattcacactactatcattgcttcttccaaagatccattaccaaatagttcctacaagccacctattgtgattcccaattacctcatttaattcaacttttgattctttcaaaaaaagaaaaaacaattattatatgtatgaatctatttttataatcatacatcgacagcatattttatcagtataatatattactatttatattgacttgtttatgaaagtaaatttgtgtccttctctgactctgtatatcctatatacctccatcacattaagcagcctcaagaagtcaattgtctcatccttattaaatatatataaatattttgttaaattaaactataatatatatcatatactcacgttcgtaaaacttaaaatactttttataattccaataatatttgaccaaacaatgaattaaaccacttaactataaatatcattaacccacaaacactaccaccatagagttctagattcatttcaagagaaaacatataccaaaacacatattattattacatacatctatatacattgatcatattatttatatacatatatatatatatatatatatcttccttagatctttaattaaaatggctgagaacaaggatcaagaattggccaaagctaatggatacagccaaattgatcaagaattgggggatttatcatcagctgaagagctcaaaaagaagaaaatgaccaaaatagccaaatatattgtggctgcttttctaatttgtgtggttattgttattatggtcttggcactaactatcatgaaagttaagtctccacaagtgatgatattagagaatgctcatatccaaacattgaccactactaattcttcttttgataagagcttctcaacccaaattaggatcaaaaacactaattttgggccctacaagtttgttagaatttgtgaataaggtgaatgaggttccatcccaaaaccaattggctatgggaggagtagcccattcctcttatatattctattatctttccacacattagcaatgtgggactctctaacatcccccctcaagatggtagctattttatttgctcaccatcttggacaactcgatcataagcggctctttttttggctcactatccctgatca

SEQ ID NO: 218727 - DNA, 3051 bp, Cannabis indica
ttaaaaaaattatttaatgtaaattagcatgctaactaaactgtaataataaaatattaaaaattgtataatagtaaatataaaaatatagcatttattgtatattatgatgtaaatttaaatcacttttgattatatgatatttttgcatcataatttagaacactattagagtaaacttttaataaaataaattatattttgcatttgcataacttatttgcatctccattagatatgctcttaacaacacttaaattataaccaaccgaaaaaactatgcaggtatatgcacaggctttttgatactggttgtagggagctcttggatttattggggagccaaaaagagaaagcttatcttactcaaacaaaaattctttcaacaaaatggtgggtttttgttacaacaacaactcgtatcaaaccatttattaggcgcagagactgcagtagcaaaaattttcacagctaatgagcttgaaaaggccactaataacttcgatcaaagtagaattattggtcaaggaagctacggaacagtatacaaaggtgtattaacagataacaaaatgatagctatcaagaagtcaaaaattggggatcaaagccaaatcgaacaattcatcaatgaggtcattgtgcttactcaaatcaaccatcgaaatgtggtcaaattattgggatgttgtttggatacagaagttcctctattggtttatgagtttataacaaatggtacactttatgaacatttacataacactttaggccaacactcttcaatactatcatgggaaatgcgtctaaaaattgctatagaaactgcgggtgcaattgcctatttgcactcttcaacttcgatttcaatcatacatagagatgttaagactgcaaatattttgatagatgacaattacatagcaaaagtatcagattttggagcttcgagactagttcctattgataaaacacaattaactactttagtacaagggacgttaggttatttagatccagaatattttcacactagtcaattgactgaaaagagcgatgtttatagttttggagttgttttggccgaactcttaactggagaaaaggcactttcatttgataggtcagaaaatgaacgaaacctagcgttgtacttcatttcttcgatggaagaagatgatttgcttcgaattctcgaccataatttgattactagtgttgaggataatatggaaaaaataaaagtgatggctaatgttgcgaaagggtgcttacgagtaagaggagaggaaaggcctacgatgaaggaagttgcgagtgagttagagggtttgatagagagggagttgcatccatggggagaagaagatctcaatgtagaagagactgaatatttgcttgaatcttcaggattatgtaatatgtgtactactgaaatatttaatggttgtaatatttatggtggtagttttagtaatataagtgtagcaaggatggaaagcttgagtaacgaaatttatttggagtcgtatggtgatggtcgataattataataattcatgtgaatgtaggaattacatatatatatacttaaatagtaattaatgtttttgtagtgtgattgtatatatatgtttagatttgttgtacagttactttagatttgttaaatgttaaggataaaaatattgactttatattgtatttgtacatatatgtaactttatatctgattttattagagtgattgatttttgatactatgtacatattaaaatcataacaataatgtgcttaagtaataaattttattctaaaatagatcacataattttaatttatttatataataatccaatacatattttatatatagaatatttgtgacccaataaacaaatttctaacataagtagccatatatataaatagtattcagtaaattaaaactactaagttgatgacatatgggagcaacaaaagagaaaaattaaagttgagaggggtcgatagagcttctccaaagcgagaaattaaggttttgatcatttacatatatattaccaaaataacatatatatatatatatatatcgattttgtaaaattggtcaaaatgaccattttaccccctaaaattaaaattccacataaatatctaccaaaggtaatttaatcattttacatcacataaaagtatcccatataatcatatatacatttcatgttatttctctaagcacataactcataaattttggacctcgaatccagttcgagtcaaaatactcgcttatgattatactgtgtttacttatcaaaagtcacatgtaataagacaatataaacatactatataataatatagtccatttgcacaatatataatacaattacaattttatctttctcaggctaaaattacgaaaatgctcctaactcataaatatagtcttaaatgcgataaatctcaaataattttacataattaattatataataattactcatttatacgaaatcaatttaattagggttgttaatctatttactcatctcaggatattacacctaagaagccaagaagcatctctggctgcacaagtggccaggttgtcgattttgttttacaagccatgttccaactcgtctacctcgagtacattgattctactgatctggttggacaatgggcatataagagtttgaccttacccaggttgtaattgttgttggtactcaaacccaatttgaaaaggaataatagcaagaggccgggccttgaccatagaatagttgtggttcaagacctggagcacccagtggatacataagcatacaggggttaatgggtggcaccattacaggtggatgcatttgagagaactttgcatgcaatcttgatcttctattacgttgtgcaagtgctacgtacatagagtggtttgctaattatcattttaccgttcatctttggaagagctcgggatgcttcctcaggataaagcaaaaaatctagatcccttgctcacaccactaggtttgcgcatga

SEQ ID NO: 218728 - DNA, 6031 bp, Cannabis indica
ttttttttttttttttgatgaggagcttccgttagttattagaattaatagtaatttatgattttagttatccttgttcacatcaagcacatttatagtgttgggttcaattcaaacaaatcgtatacgcatgaacagatttagaaaaaaagagactaatcttttcttctcttgttttcttgtattgattagacaactgctgaaaattttggatttctgagctgtaatgagaatctacaagttttcttagaggatatttggtttgttataaatcgtaataaaatcaagttacccattataatgtttgttttgcttttaaaaatgatgtaatggacattgtaatcataattacattatacaagagaatcccaattatattagaaaagctatataacgagaattacattacaaaagactaaataaagtaaagctaaaatgactctaatacccttctttatataaatataaaaattaaagtacagaataattttgtcaatttatcatttatttcaatattcattccaataagaaatcaaacatcttaatcaattcttattactattcttattctattacattactattaccattactattaaattccaccaaattaaacatccttagtgtaaattatgacatcttatattttaaatattattgttagttaaatatgacaactttgtaattgtatgtgctcatatataattatatatagagattagacttaattttagcatatttttgtgaagttatcaaataattttgaagaaaaaatgtacttttaggaagggtcaccacagtgcactgctccactgaatcaaattgccatctatatccagttaagatgccttataatattagtccccttaaacaaagtggggagtctagtgacatagtgaattgaaatattcttgatcctcaacaaagacttaccttgatggtgtaatcttaacacaaaggaaagtatagaaagggcatcagcagccagcaagcatctgattcctgtagccatagatccattatttccccattttgaaaccacacatatttatcagcttcagaataggattagcaacaataggaataatactcctcttcattatcatattcaagcttattaaaagaaaaagtaataataataacatacttaatttgttatggtgtgtgtgactgtggtacactgaaatgtattgcccatacccaaacctaatatattataggtgggatctgatcagaaatccattatttataaagcaactacaattatgaggagaatgagttttccatgaaagaaaaagataactttaacaatttagactagctttaattaataaaaaaaggttataaacaatgaacatgcttacttggtcagttgctgacccaacaaagactcagacatatgcccctgcaagcatcatgccgcacattccaaaatcaatttgacaggtctctctctacttctacttctatatattgagatccctcaaagctactctcaattcattctccaccggaccatttcaaggtaatatcttaatatgttgaaaatgcattcttaattcttcattcttatatgcacttgcttttctaactcttgctattactctcttcaggatagctttgaagatggatgttgttgggaggtccaatggtgccaaatacgagtgcttgctttttggtaagaaatgataaaatgttgctttttgaaatgtccatgccgatcatccttaaccatattgtgtgtgcatacagacatggatgataccctataccccttgagcttaggactcaacttggcatgccgaaagaacatcgaaggtatgactttttaaacaattatgagattgagactgatgatgatcataaggatatataagcccttatttcattttcatttgtagagttcatgttgcaatacttgcatattgaagaaactaagtacctacgatgtgccttgagttatacagggagtgtgggacaaccatggccggcctcaaggtaaaataactttactcttgctcaagatactttttttttcctcttgttatccccctagacaaataatctcttttaatcaggagcttggttatgagtttgacaacgatgagtttcatgcttatgtccatggaagattaccctatgatgcactgaagcctgatccggtgttgagaaaccttctactgtccatgccacagcggaaactagtatgtgatgcttggtagttcaagattttcttgtgtattatcaattgtatacaaaacatggggtgtggcgatttctaagagaactttcttccatgttggtgtatgcagatcttcacgaacgctgacaaagcccatgcaacacaagttctgcacaggttggggttggaagactgttttgaaggcatcatatgctttgaaactcttaaccctcctcctgaaccccttgactccatagctgctgcttcaccagaggcccattccaacggtttaattgagactaggaagcaaacttccaactccaaaatcctatgtaaaccctctcttgaagcaatgaaagccgctattcagattgcatgtgtggagcccaagaaaacagtgagatagaaccttcacttcagctcttcagttctgattttctaatgaaaacaatagacagttaaacagtttttacttccattttcagcttttctttgatgatagtgctcgaaacattgccagtggaaaggcagccgggcttcaaactgttattgtaagaaaatctaaatggattctggtccatttccagtcagtaatttccatttgaataatctgtttctcacatgaccatgttaaatgacttcaaaacatgtaaggggtgttgatgaggctgaagaaaaagctaaacacagttacacagtagtaagtgtcttaataagaagaagatttataattaatttgagaatgttgatgatggcaggttgggagctcagtactggtgcctggtgcagatcatgccttgggaagcatccacaacatcaaagaagcactacctgaaatatgggacgatgaagtggggaaacaactacagctggagttactgatccagtcatctgcggtggaaaccgtagttgcatgagcattaagctactcctaagtctactaagtcctaagtcctatagatagactatattcaaaatcacgtttatgatggacaaaatgtattgaaaagtcataagggtgatacaaagtattgaaaagtcatatgggtgccagtaataagtgattccacaatcctactgtactgttaaactattgttgaagtgtaacgaaacaatgacaatagaaagaagctgcctattgcttttgatatgtatctaatccattacgacttacaatactcaatctctatagtttacacatgggatattgcctcattcaacattacaaaatgaaaaacgaaaagaaagaaaacaatgagaaaagggggagagttgagtgtgaaaccacattattgaaaaaaagggaagtcaagtcaagcatcgaggggcaactctcccgagttgatgattctgcaaggggaacgaggggtatctgatctgcttgtctcctgggcttcaagtttgcgcactacatccattccttcgataacttgtccaaacacaacgtggcgattgtccagccatggagtctatatagatacaaaacaagacaacagaaacaacactcaattaagtaactaaaagcattttatgatggaaaatgcaaaagggtaggaagggatcataggaccttgactgtgcagatgaagaattggctgccattagtattaggacccgcattagccatgctcaacactccaggccccacatgtttcactgcatatttggatacatataaatatgttggacaatgaaaatgataataataataataacaaaaagaacagaataaatgcattgtataagcaaggacacacattcaaaattctcatctttaaagctggaaccatagatactttttcctccggtaccctgcacaggagatgcttgtttgttcaatttaatttatataatatatatcttttcttttcaaaagaagcaaaagagagagaatgaggttatatacatacgtttccttcagtaaagtcgcctccttgaatcataaaatctttgataatgcggtgaaaggaggagcctttgtaaccatatcctttctctcctgttgcatcaaataaacaaggaaaagcattgatatttgttatcaaaaaaaataaaggagagaaagagaaagaaagaaaagtttttgggtttgcctgtgcacaaagcacgaaaattttcgacggttttggggacgacatctccaaacaagccgagcacaatgcgacccacaggctcgccgccgacatcgacatcgaagaagcacttagtggtaactttagcttgcagctgttgctcctgctccaccgaactgcggatggtgctgctgcggcggcgtagcgttgtggctgttaatcttttcgctttagggaatgaagagaaaacaagagcatttggctttagagaagaagaagaagggttgagcttaaggctcgtagcaacagctcctgtacgagcagaagatgagattttggtgccgaagctaggcgctaacactccagacattgcagcagtagcagaagcagccatggtcacgaacttgaatggtgaagaaatggaatgtggatatggcaaaattgggggttttgtgttgtttatatataagggttggatgtcacacgtgtgtgtatttggtgcacgtgtgagtatgtttctataaaagaataggaattaatggagaacagagatgcagtggtactgtagcagcacattcgatgaagatgcgcgccagtgccactcccatgctgactctcacagttccaacctctctttctccttcgctccttttcttccaccgaagaaagccctcttttctcttctccaaccctaagccctttctctttcttcttcaccactcttctactgtttcatcttcttcttcttccttccgactccgttgttcctcctccacttcccattcccaatctatatcggaatcagaatcggaggatggtgtttgcatagagatccagaaacttcccaacaactcacgcagaatactctcctccgtcgccattaacgcttctctcctagctgtgtggaatgtcttgactgattacgaaggattggccgatttcattcccggtcttgctattagccagttgcttgatagaggacctgattatgcacgactctttcaggtttcgctctatcacctaacacctaatgcttcttcttcgttccatctgtgtaacccattttgctctctttcattttactcaggtgggtgagcagaacttggcccttggccttaaattcaatgctaaaggggttgttgactgttatgagaagccacttgaaacccttccctctgcccagaagcgtgagattgagtttaacatggtagacggagacttccagctcttccaaggaaaatggtcaattctacaagtatgatataaatttctcactttcttcttttcttgttagtttttttatccattcagactagtggcttggatattggaatttgtaagaggatcacagtatgccttctcagtctcatacgcccaaatacaaaaaaatttcgttgctttatctagtgcttggtattatggagacattattttgtgtttcagttttaaaaaatgtcactttaaatttatgctgttgcagcatgatagtggaggagaggatcaagaaatgaatacaactctctcatatttggttgatgtacagccaaagctttggttgcctgtacagcttgttgagggaagactttccaatgagataaaggtgaaccttgcctgcatcagagaagaagcagagaaagcatttagcaatactatgcgctctctttgatgtcatcttaaattgttttctattccctcgatcactattgtttactgaattctaaaatcagtaacaaaattataatgtgcatctttctcaagtatgttagctgagtccata

SEQ ID NO: 218729 - DNA, 3143 bp, Cannabis indica
aaaataatttccaacagcttgttgtaaagattgagaattgagctgatcattgttcaacaaatgatcaagatcagctcgcgttctcgcaatttggagcttaagaggctgttgagaagttatccaatccttaatgtttgagagacaaacgaattgcttagtaaggaaattctgcaaaggagagggggaggaaggggaaggaaggcaccaagaagcaaggactgtgtcagagaaagaaggatcgttgagccaaaaattttccagatgaaactgagagtgtttttgattctttgaaaaagtatcctctaattggactttcagaactttgtgatcagaaaaataaaagcccagatgggagagagaagcatggggaaaatggttttgccaagtagcattaaccgtacaccagtcaaggcgctccaaagtgagcccatgacgccacgtatacttattcccagaatgatggagaggtatgagatgtctttcatgtaaaaaatcatggaaatggtgcatagcatgtgaaggaggaggggtaatggagtttctatcattgatagacaaatagtcattaaaatcacctataactaaccaaggtaagagaggagcagtatcatataatctattaagaagagtccaagtgaaaggtttagcatcaggataaggggaaccataatacccagtaaaatgccagtttatatcatataattatttataaaacagtccacatgattaagagagtaagagacaacagtaacatcaatacagttgttccaaaaaagcaaaagacctccccctaaacttgcttaggaacttctaatacattatcaaaatgaagtttattgttcaaagaaaggccacaaacggcaggcaatttggtctccattacaaataacaaagttgcctgatgctgcttgaccagaagggagaggtgacggaatgctcgaggactccccaaacctcgagtgtttcagctgcagagactcatttttctcggcggggtcgcgatgcgacacccgccgtttgttcatcatctgaaagagaaggaaccacagcgtcatcactaggaactgctcgtgcgcgcttaagcatgcttcgaacagagtccccaacctgagcagactggcgtgtgtaatgcctcctggttcccaccgaagaagctggtgaagactgagagcgaggttcattaataaccaatcccgtaggcctggtgcagggtgagtggggtgggctggaagtaggcaaagctattcctttccctttggtagtgtgggtgatgatggaagtagttatgattggtggtggaatggtggaggaggggatctgttgggagaaagacatagggatggtagtgaagggagcgcttgaagtaacagtgcgagaagatggagtatccatgcggaggaatttgttcacgacatgttgcagactgtgaccaggagtacagtgtcgaggaaaaagttcctgaaaaggagttgagttggatatttcgaaggggttcttcttaagatgagcatgagtcgaggcccaaagagagtctcggtattcaaggataggaggggatggaaaattgtcacagcataaaaggtttttgggaaatctgttgtaggtatgatctagaaggccacaaaagtagcagaaatttggaagattttcaaatttgaaacttatccattttgggtcagggatagaccgaaaggggcttcggcatatgagatggagaaatgattactctgaagttaattctggaggcgatggaaatgacggttagggttgatttgggatacttctgagaggagtagaaaggatagatggtctgagcaagcattaaatgcacaaatggaggagccgccgaaattaaataaagctgggaaagagaaagagcattaaataacaactgagcacgaaagatccgggtgatacttgtaatgattaaggttgacatggagcaataaaagcagaaaaaacaacaagaggttggttgaaagaaacaggggaagaaaggaagagcacttgctcactcactgtaccagagcaaagcctggatgacacttcaagaagaagataattgccagagttgtacctaacataataaccaagaggtgttagagaacaaaaattatgtgaactaatatgtatagtactacttatggacaagtaattacacatgtagccaactaagataaataatatttttcacaacatgtgaaatttggtgataaaacaatcattgaaaaattaataattttaagccaaatttcaagaaagatacatataaattgcttgtaatatgttgataataaaaaataaagtctacaccataacagattatttttgcatcaaacaatcaagttttataaatttagaacaacaactaatgaaaagatgtgaaaataagaatattgatggagatttcatagtcaagataaatcaaaataagagagtgacgatgtcaaacaaaatgagaagaaattcaaaatattttctatgatttactaatttctaaaaattatcaaaaaaactatttgataattttaaactgcgtaattattattaaaattaataataattattaaacggagtcagaaaattaattaaaaatctttaaaaagttagaaattaaattttaactatgtcaagaaaataatcgtcaaaaaatgacatcatacgttagcgcatgtgccccctagcgacgctgtctagagttggcttcgctagggagggggtaatctcctaccatggaccgggtgtgaaagaaggtcacttgactcgactttctctaatcgggtcgaagacaaaaacgaaccaaaataatgccaaatcattagaaaaacgagaggttttgatcgggtctaaaagtctaatctacctatggattcaatttggggtaaaatacccaaaacaacgatagatcttgtaatttaatccaaaatttcaaaacaaaaaaacatcattaaatctactgatttttttactaagtcggtaattgaaatctgcaaccacattataaaatattggagtcatttattcataatcaattttagtcaataatgattataataaaaaaccccaaattttatttcatcattaaaagataccaaacctaaaagtttaatcgcaaaattattctaatttactcaataatttta

SEQ ID NO: 218730 - DNA, 2543 bp, Cannabis indica
tttaatagaaatatatagttgcctataaatatgatgaattcaccacttcacaaactacaaaaacaacaaaggtaacctacatatacatatatatattaagagtagcacaagaataatattgatcattatcatgtccgatcattattatcatcataataactcgagtagtactagtagttcttcctcttcaacgctaaagctatttggttttcccataacagaaaatggagaagtgttatcatgcacatcagataataaaaaagaagattatcatacctcatcaccatcaatgtgggacgacaacagaaaattcaagtgccaattctgccgtcgagttttcgccaactctcaagctctgggaggccatcaaaacgctcacaagcgagaacgtcaaagggtcagtgcccaatatcagggccggggcccacttctcggcaatgcgggcccaatcagcccagttctaagcccacattcaataagatcattatcatcatcagcactttatccacctggaagattcacaggctttaataatgataatactagtacagctactattcctacttgttgcaccaccattagcaggtttgatcatcaccggtcacaaccgtcgcagcatgcggtggcgccgccttcgtattcccatcatcatcggcttcctgataatacgcagtactgtttgatgtcgttgaggcctagagaacagtcgttttcaaccagtagtaatactgctagtgctactactagtacgcccaatccagaagttggtcatgttgatcttcaccttaaactttctctttccagttaattaattaaatgagaataattccattaaaaaaaaaacaattaataatttaattatgctccattaattaaataatattttgtaatttttttatcatcacttgggattccaccctattcgtgcataaattatgtcgaaaactttagaacttccacgtcgtatttttcttaatttttttctttcttttgtattaattatttggatctgtcatttttatagattcgatttgataatttattaaagcagagaatggcatgtgaaactgataattattgtattattattctttatactttaattattacttacgtcaaagtaagaacttaaaaaagaaacataaaactataatttttaaccaaaaactaaatttataaaattaaattgcttacaatataaaagagaagagatcggtaaaaccgaggttgtcccaactgaaaccaaagacaacgatttattaaagttaatattaatgtaaattaaatatattgtatttttatatattaaataatattttatgtacagttgagctcagagataagagagcaagttcgaaaattaatacaaagggatgagataagccaagttcaaagcccagttttcccgcatttcgagtttacgattctgcccctggtgctccaaaacgttctctgagtctgaatcgccattttaaaaaccctacctcatcgtttctcacatctccaaacatctcaaatggacgggttcggatccgggtcgggcgctacgcgctatggcggagtgggagaccgcaggcacgacattgtgagcggcaagagctacggaacaatgagtcaggtccatcacggaacgactcgtgttcactcgcccgatccgggtccggtcccagcgcgaacgtcgagagcgagtcgggccgatttgaaaccgtggagcttcggtgatccggaggcgaagaggaagaagaggatctacaagtataaggtttacacggttgaaggtaaggtcaaagcttctctgaggaaaagcatccgttggatcaaaaataagtgctcagagattgttcgcggctattaacttcatcgacggtgctgattctgccacgtgttggtgtggtccttttccccagtccacaactccattgtcacgaaatctctgcactatttgcttattttgcttagcgcttatattatactcagattttcttgattttattttgtttatatttagtggatttttatttgaccaatttcatgaatatcgtaagtgtgctgattaaactgtttgtgtggttaactgtatactaaatcaagcgtttgaaattaatataggagtcctcatttcatcaatatatttatatatatagtagttgagattgtaaaactaaacaatatcacctagaaaaagctaggcagcactaatagcaatgctctaaaactaaacaatatcacgccgtgaagccagttaggctaggtgaggagggatataaagaaggggagagggttccaacgcaagaccactacgctaaactaaaaaacacaatatcatgccgtcaatcctttgtttgaactataatttgaatatttttttgaaaaattctactataaacttttgacaaattttacctctccattcttaatttgtttatgtatttaaaaaaaatagcttaattatttttatagtcgttttaaaatatttttataaatttttaaaaaattcaaaaatatttaatacttcaaaaatataatttaaataatttattcca

SEQ ID NO: 218731 - DNA, 6564 bp, Cannabis indica
ctaaggacttttcgatctcgaataatggaatgctactttacaaggctcgggtttgtgttccaagcagtgatgagcttagaaaagagatacttgatgaggctcatactacaccttatttgttgcaccagggaaccaccaaaatgtatcaagatttgaaaccctatttttggtggtgtggaatgaagaaagatgtggtagaatacgtgtttaaatgcttagcatataagcaaataaaagccgaacatcaaaaactagcagggttattacaaccactagcacttcctatgtgaaagtgggaggatattacgatggagttcgtggttggtttgcccagaaccacgggaatgtacgactcagtatgggtcatagtggatcatctcatgaagtcagcacattttttgcaagtgaaaatgacttatatagtggatcaatatgcagagctatatgtgaaggagatattttgtcttcataaagctccaaaatccattgttttggatagggatcaaaagtttacattaaaattctgggtatgtcttcaaagaactataggtacaaagctgaagttcagtacaacttttcaccctcaaactgatgggcagttagaaagaacgatatagacactaggagacttattgcgagactatgtcatggactttgagggttcatggaacaaatacatgcctttgatagaattttcctacaataacaactatcagagtacaatatggatggctccatatgaagtgttgtagggtaggaaatgtcgttccccgattcactaggataagactagggaaaggaagtagttagatccttagttagttcagtagaccaatgaagcaataggaaaaatcaaggcttgaatgcttgctccgcaaagcaggtagaaaagttactcaaatcgtaagcgcaaagacattgaatattaggtaggagataatgttttcctattggtttcaccaatgaacggtataaggcaccttgggaacaaggaaaagttgagcccaaggttcagagggccatttgagatactcgagaaagttgggcaggtagcgtatcagctagctcagcgttgttagctgctcataatgtattttataattcaatgctaatgaaatatttttcagactcgactcatatcttgagttatgaagccctagaactaaagtcggacttattataggaggaatggccagttcaaattctccgtaggaaagagaaagttcttcaaaacaagaccatatctttggtcaaggtactctggaagaacagtaaggtggaggaagccacctgggagatagagcccaccacgagggcttaatatgaagagttattcaggttagatttcgaagatgaaatccttttaatgatggaatagttgtaattaccgcatgattagattatacattagtaaaggcgattggctttaattattgatatttttattattatacatgattttatattattatgggccccatttttagaaatgggcatcagagttataatttctcaattctggagattttattaaactctaagagtattatttatgctaaatatgaaatatgtaatttttatgatttttactcggcgacgatagaaattgcgatggatggccgttaatgtcacatgggtaagtttagaacctaattcttagtgggataaatatttgagatattttgattgtcgagttcaggtggtgttatggttttggaccattttacccctaggtgtatatgttacttaagttggaagcaagggcaaaattttaattttgtcttttagtgggttgtgcaaaattgttttccagccaactttttgtaatgaattaagtttaattattagttatttaaaatagaaagaaaaaggacaaacgacatttagattacccaaactcttcctccttttctctcttttttcgaaccaaggaagaatcaaggagattgcaattgatttttgtaaaattcagcaagatttctggttaaattcaagtaggaatttcagaggtagcttgaggtaagccctaataatctctattccttgaattctttaagctttggttggttataacatgcaatatgtgattttaggtcctgttagatttaagtttgattttagttcaatttatgagtttgttttaagttaaatttggttgattattgctttttttgttggttcgagaaaaggttgagcaagtatgagtttgaaagttcaagcttagctcaacaatgacaattttattttttgtgcatttttcttgttgttagtgcttggaaattattcctcgatgttagtacaggtgttttggaaaagttgagagagattgtggaaaaatttattgagtttcaaattgtttgggaaattatgtatgaaccggttctattggtactgtaaaacatggtgttgacctcacttctagccaatgatagtgagtcagataatagagcgattgaataatataattaaaagaaaccaaaaataataaagtaaaaggagcaccatgttttgaagaggttcgaccccgttagtgttgtaataacctactatccttaaattgtattaactcaggaaaaggaacaaagtgttttttttttctcctagaagcacttacaaccaatccctaaatgtgtttatttcttagatcacttttttctctctagaatctcactctgaggcaattctctcgatccctttcatactgaggcgaggtaactatttatagaggtttaatgcataagggacaatttcccttttgcttacaatgaataaaataggaaataataataattctgtaattacaattaaagaaattggaaactaaattatgttgccgtttttttgttgacaatcccacaattatagggattgtcttcttgtctggacacaatgaagttattttatgaagttgctatctcttgtaagtttctcggcataacaggcttcaacctggtcggatgttttctctacaaccctgcctggatatccggctattatatatactgactagtcaggtgtaggctgctagggtcatttccctctgcccaggtatcacgaataaaggacatgtcttactagaccttatgggcatgtcaatgtgcaaaaaactaaataaaatttggcccacatagactgcgcgggagcttcttggtcgcacatggacttccctcgatctggatttttttccgggtaggtgacgcgtgtgctaggcattgaatgacaaagcgatgtgacactgaccaagggtcccctcaattttggatcattaatgttgattgacagttttacctcgaatcatgacttgaagttcgtgcgtgatgatggttactttgccagcaatgagtacataacgtacactttttgggggaattcgaggagtttgaattttgaaatgattatttccttttctcaagttgcttataaatatgattgaaaaccctaattgatccttttattaattttcattatcgaaaaacaagagcaaagaaattttcaggtgatttctccctcaaattctttgaagaattcccaggtaactcttgtcaacacaatctgagcataacaaaaagctttaaatcagtgagtaagttcttcatatcttttttgtacatatttgcaatgaaatgcctgcttagtttctatatttctagctgtgaatcttgactgttcttttattgttctaggataattaagaaatttccaggtttagggtttaaaaatctcgatagtttttaaccacaatgtccgattctaactgcgcttttattttaaccttacgatatcaattttcacttatccattaggggtttagtgaaaattagattccaatttgaagttttgaacttttgggttgaaaattccatttccgagtgaaatttctttttttgattcctcaatcaaaactcgtcggtacattcaacctatttttattcgtttcccctaccaattctcatcttcttgtctcctaccttttgtagatgaaccctagtgaattttggggaggccaacactatatcgaccaggatctgctatatacgaggatcatcctcatctctgtgctagcccatcttcatctactgacaacctttgtaactctagttttgaagactgggaaataagtagcaaacacacaacttcccaagaacccgaggtgaaacaccacttctatcccaactagatccaaggttacggatacgactacttcctttgggaacttaagaatgggtggagacgctatctcccgtccaactggacgtacatagtccatccagacatagttgagaacttacccgagggccacccaaatcctactgctgtaggtaaatctattgccactttttctgtgacaattactaggcacacaaatacaactccatccaaacatagaatgatggcgctaaccaaacaaactataaaaaaatcctcactattcgacccacacattgcccgccttgccagcttacccaaggctgaacaggcttgaccttccactaaggaagaggatattataagggatgttgaagtccaagaggtggaggaccaaggcgaggtccgtcctgctactccttttgatgctgaaggagatgaggaagagggagtagctcgggtgctgccattcaagtgatgttttggaggctgatgaggattatgttgtcaaggaatacattaaggctattcctttgaggagacaaggtgcaccaggagcttgatgggtctctctactatctatggtgaccatggcaaagatgacgaatctatttgttcgtagttatcttgggaatgtcgaatgcttccttccctcccccgactagctggtgactaacctagggggaggttactgcgcttggtcgggagctaacgccaggcaatgtgcgatgttaccctttctcccatacctcaaaagggttgtagactattaccacataagtccaacctaattcactcccaagggcctcatatacttgtctaccctattcatactctacgtccaacaaggatggtgtgagccatccccacatgataccaattggttctttaatctgaggtcatgtcccaagcagaataggttgggatacttttatttttctcaaaaagagaagaaatggttaataggcactacgaccaccgaggtggcaaggattggaggttttgtggatgagtattacattgtcaagggtatggatcccgtccatacttgttttcagcaggtgttgtgcaactggcgccctccattcacattggagcttagtaagagggctcaaaaaattcttcaactccctcgtgctggacgaaccatttctctttttgccactgaggccaattttgtcaagtacaaactttatacagctacttttgtaccaaaggctgtgaagaaagcaaaaaatactgtgcctaaataggaaactgtgcccgaacaggaaactccgagcaaaattaggaaaaagaaggcccctccaagcaaccaagtacctgtcgagtggtctatcaggataagggaagaacctgaaagagttgctcggtcacccgccccagtggcaggaaagggaaaggtcgttttcgtggagaaggaataagaagattctttagacgaggagcctccttctctgcttgtttgggagaatgctcctacccacgtgtggggtattttaactcattttacttttatctttattggtttatattgtacttgtctttgaccttgtattggtttatgtgaacaaattcacagagcaccgcctaacgagctaatatagatgcaaagtccttggccttttcctatatggggcattgacctgatcggatagtttcccaaaggaaagggcggagtacaatatacagtgatcacagtggactatttcacaaaatgaacagaagctaagcctttagaaacaatcacatctaaaaaagtattggactttgtggggaaaaacataatatgaagatttggactcccgcacaaaattgtttcagataatggcaaacattttgatagccagatgtttacagacttctatgcgacacatggaatcataaaaagtttctccgtagtagcacatcctaaaaaaaatggtcaggtcgaggtagtcaacatgacactcaaagataccataaaaaatagcctgaagaggctaaagagaactggccagaggaactaccagaagtactgtagtcatatcgaacaacggagaaaacaacaatcgggaaaacaccatttgctatggcctgtgtttatgaagccatgctgccagtggagttagaacctctatcccaaagaagattaacctataatcaagaaaccaatcatgccctctcggcagaatcacttgatgagattgaagaaaaatgaacctcagcaaacctagccagtagctcatcaacaaaaggtggctcaatacctgaacaactaagggcaagcaaattctttgtttgagatatgttccttagaagagtattcctaaacacaaaagacaccgcgactggcgtgctcagacctaactaggaaggaccataccaggtagttgaagtcacagattctggagcatacaagttgggacggtatgacga

SEQ ID NO: 218732 - DNA, 4827 bp, Cannabis indica
taagcaagtaaaaaactcagaaactttcaaccgaaattaatatcaaaatgttagcaaaatgaagtgattcgaaaaatcaaaatgttgcgaatgataacaaactagagatcataccgagcaaattctctaggactgctaagacttgcacggtatgatataagatcacgagaaaaatatgaaggtgaaccacaatgagaaacatatctgccccatcagcctaaaacatgttatgttaaataaatttgaagaacaatatcctcagaaattcgggctcagaaattcgaagtcgtcatacttcaactttatggtaatcattacaaactaaataacaagcaaataactcattcagggatttgaagagaaattataaatgttcactctcacctatttatatagttagcaacatcaagtaattcagagaatcaaaatgttgtgaatgagaactttaattgaggttatccaattaccaaagcatcttctacatgttctctccacatagtataatgctactttaagtctgattcattctttcggtacaaaatcaataaaagcgaaaggacatagcgactgcattttagtagcgtaataattgaaattcaaaaacctacgtaaatgaaagcttccaaacctctctgacattagacgagccatctgtaacttcggaaaccaagctataagccacaaggcctgcagggaatattttaatagccatttagtaactggcaaagatttcatgaatctaattgtaaagctaataagaaagaagaatagaaatatcaagaacattattcattaatggggattttatacatatcatggaaatagcagcattcatgagcttaactgcttattagtctgttgtaataaccttccaaatgcacaaaaataacaatcctaatctgagtaaatatatgagtcacaagttagttagttcagcttagttccttagttagaatactgttatattacttttagttaaggctagtcctatcttacaagaggaaagaaagtagattactttctgggagagataccaaactgtttataagagtttggaacctcgtaattttccgataaagccatcaagaccaagcataagttttattacagtagtttattaagttttattctttgttttagttgtcttttggctaagttgttcggtttattttgggttagtagcttttaattaggagattagaactcggtttcagttatgttggaaagagtttagaattgagagaaatctagccctcttgattgaaaggttagaaaaggagaaaaagcctctcgaagagtcattttgtgtaattctttcgtgattaataaaagcattctggtgggattttaatatttgtgtctgaattcttttgttagattatttctaatctaagaagagtctgtcattttctctttaatatcaatgaactgcttatgttttaattctttcaagaactgaactagaacaatttaacactaaatagtttctcagtaaatctgaaagtatctgtctagattaactcaccatctttctccaccattgataaaaattgtcgtgttcctccaccgactccaaaataatgcttcttcgctgccatatataccacgccgtgtggatagctcatgcactgcatttaaaggtttttagctagagcaaatagaggttgaggagatcatgaagaccaagaaaaaagtaagactaattcgataaagaactaccttttttataagtttgtaaagtctttggaaaacagtgacagagtagactgtttctgccattaaaatagtatcataaccatcaacagaacaattttctgtgctacaatcgagttccttcttactgtcgcgtacataaggaagaagtttatcaatttcactccagtcgccagcaaagaaacgaacttctgttgctgcctcactatctgttacacctgttttcgagttttggattttcttctgaagattcgcatttacattgggaattgttaagcattttaggacctcggcgttaaagtcttggaaatgaacggcagctgcaccctgattcagtaaaagaagaagcgtaaaacatctgatttaggatactaaatcagaagccaagaatgaaaattcacctcgaggcatgcaaagattccagggagtccatgaccacatccaagctgaaaaattaacaaaagaaatataagtcttagaagactgaatgaatgcgggcaaaagcgatgactttcttgattcatttcttttttatatacgacatgaggtattccctgttagtcactggttcaactcgactattactcctttcagtgatgattattcgctattacccgaacaactcgatgaatagagagctaagcagttgactgaggttcaaataaagcctcaatgtagttctcatctccaaatgtagtttaacattatcaatgagcttgacagtgttaaaattgatctgttagccttgattcaagcttaaactattggtatcaaacaacgaaacatctgaaaccttaacctaagacaaaagataatgctgttgtgccctcctgggctaggacattcagataaacaaactgattactactcttaaggtaatcactcactaaatcacatattcacaagtctattcttgaggtacttcagtcactcatttgcacactcaaatcattgaagagttgatatataagaatgaactatgtgatcctatcaataaatctctagaatctgaatcaagtaacagacagatggtttaagattcaaaagtttgaattaagcttgaaaatagatatctcagttctaaaaatacattggcaaacaaacagatattttctagatgattactttgagatgagacatgaacacttataatagaagaagttacagcaatcatatcagattttgataccaaattgcatttgaaacattgtatacgaaaatacaatcactgcaaattagaatgcccacctctaacactcgcttcccggtaagagttaaatgttcatttccaacctcagaacgaagagctttaaccagatcaagtgaaccctcccatagcttcaaaccccctataagcgcaaaccgaaaacagaaagataaataaacattcagtattcatgatcactagctaaaagattggagcctaagaaaaatcaacattgtctcaatcaaagtaaatggaaatcgaaatctactagaatgatactatgaactgctcataaacaattaatatatgaaagtacaaagaaacaagagagtaaatgaatgtgaatcctatttaccttcatattttccagggactaaatcagaattcgacaaagcaaaaacctctcgagtactaacacggccctgaaacaaatcacaaaagcaaacattcatcatagttaatcttaacacaacaattataaacaatctaattcacaaggaaaggaaatgtgaagaatctagcctatagaaacttagagtaattctacagtacacctcctaaaaaagacgttttgatacgtctaggaaagccttataatctaactttttctttttttcatgatcgaatagcttacagtgtcgaaaataagattcgaatagtttattacacccgcaactattatttcttatacgtgcattaaacaactatttcaattttattttcggtaatgtaaactattcgaaattttctcaaaattttactagtgaacttaaaacactacaatgtacgcaaacaaaagtttgattaaaaaaatcttctagatgtcgaaacatatagggttctaccaaaaccactttaaaagctcttctaaatgtcgaaacagatatggttataccaaaaccgctcttctagatttcgaaacgaaacagataggattctaccaaaacagccagtgtgtatcctataaaaccagaatctttgatcattggcctaaaaaaacactaacctattcttctatgacaatggaaatgtaaacctaattcaagattttctaacaaaccaaacagacataaccaaaaaaaaaactgaccttgagcaaagtaagtccatcgaagttcacaggctccacattaaatttcacagacgacgaagcctatttcaagttaaattcaatatcttaaacataatcctagcttgaaagaagataaaaatatttgattatacgtaagaaagttgatgaatagtatagtacctcggaggaaagtacttcaacggaaggaggtggcggcggaaccggcgactctggagtatcgaaaaacccaaaaccagaactgacattactggcggaggaggagaagaggcgaaacgtttctgaagtccgattctggaaaaataattatgaaactgtaaaaaagaatgagcagaaaatagattggtttgaagataaaattatgagaagaagaagaagaagagagtattcaagttgttaatgaaaaccaacctcgttttccgccattgttaaccactgctctgctgctttgcttagtcttagtgatactattttgttccttaacacttctaattgagaagactttttttcattattaccatttcttttctttttcaattgatttataccacttttctaattgtaggttttagggtgctattcttttttttcttttttgtaagaaatgcttacatatattagattaaactcagttagacctcacggtcattacaaaatataatatcgggcatagaggaaagtggcacagagccaaacctctaatgagaaaaaacctacttagccacattatgggctataaaattacattgtctacgaaaaaattgaaacgtacaaccaataaaaaggggaaggtgtttttacaaaaagagacatagtt

SEQ ID NO: 218733 - DNA, 7372 bp, Cannabis indica
attaaaacgatcgttagtgccagaaaacttctcaatcttttatcccaataaatgaatattgttgactacatgggcacacattttcactattaatcataatcatttaattaattggtcttaaaaaccaaactcttgacagaaaatcactaatccttatagtggtgctgttaaaattctttatttaagcataagccccaaatagtatagaactaatcttaatttcagataagacaaccatcctatttgaatttcattcatacattattagtggaatattaaatagccataagggtacgagatggtatgtgtggggatcctgggatcgaatcccaaattatataatatgtatatacattgttagaataaattaaacatcatttttctctacgatattgtctagtttagacttaagctcttgcaattttatttttgaacacatttttaaaaggtctcaacaaataattcttttttacaaattctatcgtgagattaccggaactcatttcctttgtttaagattctaaggattaattcacatggctattttgggatctggctaagtcttcacgattttgtttctgaacacttttctaaaaaacctcaattaatagaaatattgtttgttgttatagacttatcatctttctcattttgacctaatgtggaattttaattgcaaactcaattattagcggggtaaataagtagcaataataacgagcagccgttttcgttatttaaattgtaaatataactatgtggaaatataaattgaggacctaagttaaggtgttgttgagtatttctctattattatatgtgcaagtagttggagcctaggcctaataataccccatgaaatgaatggtgattaatagttttgcatagagcatgaaaagcaaaagaagctataaaaagtggaccaagatgaggagaggaatccagacaaggggtcctaagtccaagtccaagtcataagtaactactctacttactctacaccaactgaaaaaggctgcaaaccccaatactaatgttgttgtacataatgaagttgccacgataagcaatgtttatgactttgggggacacgtggtggaagagaagcttttgcccataaattggtcatttcctttccaatccatgtggattataactcatgatgtaggattctgtttttcttctttattaatattctattagtattaactattggttttttttttattttgtcatagataattaagttaccaaatgagaatgagataaactacttttttaggcaccactaccagtaatgtttaacactagtgctatttttcagtatttctcttcaaaatttaccataaatcatataacataaaacaacatttagtgaagaaaaagaccatgttcaacgattctaaatcaaaggtagtaaagaggtggtcacatataagtgtaatgacctgggaaaaatcaaaggtgatgactgatgagtataatattaagatggaccaatgttacttactgattctcatcatcaatcctaagaggctgcgtaaatttaacgttgttgaccactgaccaccaaaactcataaaaacaagttcaaatccggaaaaagaagggcaaaataaaagattaattctttttttaaagagaaaaataaagttttaatctttttagttcgttcctaggtcatgaaaaacattcattcattccccacatggaggataataccaaagtacaaaggtactatagtactactttaataccttagcaaaatgagatctaatcaaggttcacaaaattaaaagagtattgttattgtatattagtagtgtccatctgacgtcttatgattagttagcgatattttttaaaaattattttactaaagtatataagatttaatacttaattacaccaataacatacatcgagaaaggtactaaatacaaatgttctttaacaattctcaaattaaaatacagaaaaagaaaggtaaaacaaagtaaaataagatttatcaaagcgcttaaaggccttcactttatttagaatattgataattatgtttctttatgttatcaactctctaaaaactttgttttttgtaatttttcgtttatttcgcgttgttgtaattttgctgctcataacatagctaattgggtgttcgtccagaacatcttagattttgtggaaccctcttcaattcatgatactatcatttgtaatgaccgtgaggtctaattttattatctatctaaagctttaatttacaaaaaaaaaaaaaaaaaacggtttaagtattgattcaataatcaaaagaagctactcatcttgagatttgtgaacttaatataacattattgctaatgtgtttaagagtgaagaccatagctgacaacagaccatccccacataggaccaccgcccgatttggaaaccccataataatgtattaaatttgctaatttaaattatggaggcatcctaatgatgattaagaaaagataaccttgtttaactaagtacttgtactattgtgatgatgacatgaacatgattcaaaatattcatggaggaggagggtatcccatttatcaagttaagtaacattcgaaatcaacttgggaaagttaagtagtcatctaacatcttcattaagacaaagttttaagtagcaagaaaaaaaaaagagtacttgattctctctagctgccattgcagaccacttctctttctctttttgcctttactttctttccaacacagagcttttcattgtgaaaccttcttattcactctgcccttctttctttattttctcttgagaaaaacaaatgtactcacttacgtatagaaaagatggcataacaatgtctgtggggtatcctacttaagtgggtttccttcaaatttggtgctttgaggaatctccatgtttgagcattttgtatctttgatgttctaatgtgaagaacaacaatggcgcggagtttgactgctttgcttcttattttggtgattttttcttctgggtatgcttcagtttcggccacacctcctgcaagtgagtgaaaagaaaaccccatgcatttctttgcatattgattttggtactttttcttttaaaatatgtatatataatatatatatggctaactagtttgattaaaactacagaaattgttagtgggattgtttcaaatgtggtatctgcacttgtcaaatggctttggtcattaaaatccacccccaaaactggtatagatcttcaagtgactcatctttgtgccaatttttttctatattgaaatggggtttgatggactgatttcgtgattaaaatattcagcaatttctagccgttcgatgatgaaatttgagagtgggtatactgtagaaactgtatttgatggaagtaaactgggaatagaaccttactctgttgaagtatccccaagtgggcagcttctggttttggattctgagaatagtaatatctacaagatctcaacaccattgtctcgatgtaagctactcctacttttgtccttttagtttttgaaatgtgcttctttgtttcttctttttaaggcttaaatcttttgttttttattaatttcaaatttccacatgttagatcatttgttggtcatgctttttctctcctttgttttgctagattgatcttgttgttttgatacagatatataattaatcattgtcatcatggctatgtatccaaagactaaatttgaaaaataaaccataaaatttgttctgaacacatggtattgtgtttaagtctaattgtattagattccttgctttccttgtcaaactcttaccagaaatgaaaattagctagttcaaaatgtcttcagttgcttttctttagttgaagactccacttttggaagtgcaatataacaaataagcctttttggagaagtctaaccccaccacctccatccttttagagattttcagtcttctccttccttttattcttagtttttgtcccctcctaatgatgtaaggaagatatctaatggccagttagtttagtttagtcatcctattgtcttttcttttcttaaccaatactttaaatattcctatacttttgactaaatgccttttcaaaacaattttttcattctccatgaattgctgatgtgattactattcagatgataagtttcctagtttagtactttgtgatgaactgttctatgaatttctttcagatagccggcctaagttagttgccgggtcacccgaaggatatgccgggcatgtagatggaaaaccgagagaagcaagattgaatcaccctaaaggacttactgcagatgacaagggaaatatttacattgctgatacaatgaacatggctatcaggaagataagtgatacaggtaaacctctaaagttattcacatttgctttgttaacatctttgactgtgaaaatttatgttagatgactaaatgtgaaagaaactctctcattcttcaggggttacaacaattgctggtgggaaatggggccaaggaggtgatcatgttgatggtccaagtgaagatgcaaagttttcagatgattttgatgtcatttatatgggaagtagctgctctcttttgattatagacagaggaaaccaggcaattcgggaaattcaactcaacgatgatgactgttcgtaccaatatgacagcagtttccatttgggtaacactaaattcaaaacgcagaaccttcattcctgtaaaaatgctttcattgttatgaatgtctataataatgcctttgtttccttctcattgcaggaatagcaatgctggttgcagcagcattcttcggttacatgttggcactgcttcagcgcagggtgcgggctatgttttcttcacaagaggtgagtaacgcaccccaaattcacgatagaattttccaaaattatccaaattccagaagtaggatatattggtcatgtaaggtaaattttggaccaccaattttgagaacaatttgaatattcttgctaatgttttcttttccttttcgcttttttgaatgttttttacaactttttttcacaggatgtaagaactcccataaagagaaccatgccaatggcaccatatcagaagcctcctaaatctgtcagaccccctttaattccagccgaggatgaatatgaaagatcagaagagggcatcttcggttcatttgggaggcttgtcctcaacactggctcatcaatggctgaaatatttggggggttgttttcagggttcagaagcaaacctcgtcattatcagattcagcatcaatttcatcaacaaaacaaatattcaaattcatggcccatgcaagaaagctttgtaattccagatgaagacgagcctcctccatcactagaaacgagaaccccaacaccaaagagaaactatccattcatgacgaaagaacttgaaaagagtcaccatgtgaagcagagccgagcttattacaacacgtgggatggtgaatagcaccaacaccaacaacagcagcagcagcagcaagtgcagccacatcaccagcatcaacagcaacaccaccacagacattattcagctagtcctgaaacttactacgaaaagagctgtgagacgaatgagatagtctttggagcagttcaagagcaggatggacggcgtgaagctgtggttataaaggcagtagattatggggatcctgtttataatcatcacaacatccgaccacggctcaattacacgggctattcccatgtctattgatcttgcttcatctctgcacaaaggactaaaagaacactttccattgttgtactgaaaatgagatgagattaagccaatgtaggaaataggcccttaatgtatgttttcttgtagtttagagtttatgtaagaaagtaatatactagcctgaattgtatcttattttaactagcagaaatcccaatgaaacaaattagtattccgggtttcatagcttattgaaactcggaagtcctttggcatcaacttaacaagttttgtttcaaatgagtatcaaaagctttggttctttccaatcaaaactagtaatgatatgaagaaaaatggtaaagtgggtcattgtatactaataccaaccataagttcaaaaaatgtagatctcaaccactagttacataagaaaaattagttaaaatttttgaagagtaaatgaaagacagaatttaaaatacaaacttccatttacgaaatttcgtctcaactttatattccttgaatgtaaaatttcccaaaactcatataatactcggaaaattttaaaaatttgttttatagcatgtgactggcataatgttgatgaagatgttgctatgcatcattataagcggtgcaaattaaattgtttaactatttattaactattaataaacaaaagtaaactaatttgaaattttcttattaactaatgttaagaaagagatttcttgaattttaaattattttatattaaattatatcagtgatatttatgtggtaataacacattagttatattaatattttataagtaaaatgagataaaacttaatagacattttatattttagggaatttttattgaaatattttttatatacatgcattatacaatttgaaattcgatcccaagacctccatagacatacgcactcacctacaccctttatggccactatttcaaagaaattttagcaactaaatttttaacgtacacaaattagtaatgacaatagttctggtataaaaatattgaatagcctattaatataaaatcaaaatttaactagatactaatgtgtgacaaagtaatgaaataataagataatgtactttattgttccacttgagctagtggccataggtgggtgtgtgtctggagatccagctaaaacatagttataatatataaacacttaaataaaaaaaaatgtactttattgtttcaaaaagtaaaagagaatatatttagaaacggaaaccatagtaaccaacaaaaaaagagacctataaggatacctaaatatggacttcaaccacttcatattctattacatttgttgactgagtttgaggtaacgattaatgaactggtaacgattaatttgtgtattaaactagatttgaaatccaagacccttgtaacacaaactcttatttatgtattaaggaaaaaaaaactaccaattatgggaacatgtttttattatcgcaacaaaaattataatcataaacactaaaaatatttaaaggtaataatataataagctgaacaagtgttgtaaactttaatggcctcctccagaagaact

SEQ ID NO: 218734 - DNA, 6958 bp, Cannabis indica
aaaaatcgaataaaaattacaaattgaaataacttgaaaaaaattacaaacccgccaaattaaaccgaccaacccgatttgtacctttaattttttttttagtttttattatatataacaatgattaaatatataataatatcattggtccgagttgagagataaataaccaaccctgtaaatgtgatgggagaaagagatgtaacattgaggagttgattgaaatttgacattatacccaacaatgaacacttaatcctaatcctctttaacaagttatgagagtgaaaagctagtcttgattcttttctgagggttctcactttgaaatcgaagcctgaagaagaagacatatggtaatattcacacgcaagactttgggattggaagctgggttttactaaagaactagaaccaaaggctgaggtaccaaaagaccaattatatgtgactattactgtttcagattttaatgatttaattcggtcattggatataagagagagaatctgttttgatgtaggaattgctccttaattttcatgttattgtttgtgtcttccatatgttcgacgttttgcctgactgacacatttattgttgaatgccccaagtcaacttataaagggtcaaatcaatcattcttctcacttttgatataataaagaggttgtttggtaaagaaaacccagaaacctcaaccatcacttcattcattcccctcttctttacaaactcacttcttagacatccctccacttcaaaaatatatgacagtgtttctaaagtatatcccaccttgtaaatttctaaaaagctccgtgttttaagaacaaaatgataaactcttcactattttgagtgttgttctttcttttccttgcagttgagcttcctccaatggctcaaggaagccttaacaaggccaccctcagtggaagctctactaatgacaatagaaaagttgataattttgctaggtaaacttccaaatacacactattctgttactctgctacgaacttaaacttacttttcttttattataatgcaggagacaaaaattgtcgcagcatagaaggtctcttcctattgctaccggtatttttcccagaaaattgatctctttatcttttattttgctcattcatattcatattcatgttggttagtttatttaattactttttgttttatgaattattttcattgacagtcgagcgaagactcatagatgaagttcggaagaatgatattttgatcattgttggtgaaactggaagtggaaaaacaacccgtatgtcattcttccacttcacacacacacacacacacactcttacatatatgtatgtctgcataaggggggaagagatgacccaatgagtagtttactttgttattactctttttaatcaaatatatgttgtgacatgctttatagaaataccccagtttctgttcaatgctggattttgtaaagaaggcaaatctattggaataactcaacctcggcgtgttgctgctgtaaccgttgcgaaaagggttgctgaggaatgtggtgtggagttgggtcaaagggttggatactcaattagatttgaggatgtgacttctagctcaacaaggatcaagtacatgactgatgggctattgctgaggtagaatgtacagatcatcatttgtagttccaaaatagttgaagtcactaatattcagcaatatgaaacagaatatactttatctataagatagttgctaaatttatattgtttttctttggattgcaatctgtaagcatcattagcaatttaatatattgactttctaaatgacagaagctatagtatagaatggaagttagtatgcaaatattgtaaatagtgtgtacatgtattttgagactatcaaatcttacttacaaggcttccctttgcatttgccagattttattggtaagctgatattgattcctgttgcatctacagggaagcattgttggatccatatctcagtagatattcagttataattgttgatgaagctcatgagagaactgtccagagtgatgtgttactaggccttctaaaaaatgttcaaattgcacggtcaaaatcaaatggccatctagatactgaaacaaaaaagccaaagaatggcatggtgttagagaaagaaaatgacattcaatcttcaatttttctcaagcatgaccaaggaaagaaattccctccactgaagttgattgtcatgtctgccagtttggatgcacgtgtcttctctgattactttggtggtgcgaaagctgttcatgtccaagggcgacagtttcctgtggagatattttatacatttcatccagaaccagattatctagatgccaccttaattactgtattccaggtttttgttaatatcattctttgctttggcatttgagtcttctaagttcttttcaatttgacaacatatttggctttgactttaagaagcataatttatttgtgcacatgtgggctacgttttatgtagcccatattatacatggttaatcgttgaaattcttatcttttcatactccgtaacccatattatttaactattgttttaggaagtctagctcaaaagttgctcaagtttgcattggatattttaggacctctaatttgttatcatatttttgccttgtcatgattttgaaataagggttattttcttattgtgcattgctgcatcttgttagattcatctggaggaggcccttggtgatatacttgtatttttgactggacaagaagagattgaatccgttgagagacttatcaaagagcgagttttacagttacctgaaaacaatcaaagactagtgattgtgccgatattttcatctcttccatcagaacagcagatgcgagttttcgcatcaactccagccggatatcgcaaggtacttaatacaaagatgaacctcactgtggattgtattcactctgaaactctgatatcccaaaatttatacttacaagagtggctgaaaaatctccatgtcaatttgatttttgcaaaattttatgttggcattttggtcagtaccctcgcacttcattatcattattgttgctgattccgttactgcaaagtagtcacatcttaaatctactgctgtttgctgaaattcacttttgtgcaacccaatcacatatggcttactatttttctaaaataataaatctataccttatttttcccagaaattgttagggttgatgttagatgacattatacctattcatttgtcttaggtgatacttgctacgaatattgcggagacgtccgtaactattcctggaattaagtatgttatagacccaggtttggtaaaagcacgatcgtatgatccaaagcaaggactggaatctttgactgttgtaccgatttcaaaggcgcaggctcttcaaaggaggtatgagtgctgagggacagtatactttgtgtatgctcaatatgatatttagttgtcttacacttaatagggtttatttgacaatcaccaaataaagtataagttagtttgaaattgcttattacgcttgtactgataccctgaacctgtttagaacccaacaatctgtcacatctataaagttcctgcttgtacaaggaattgcttttgtttatcatattgtcgaaagtctttacatttttcattgctatttttgattgggaaactaatcatacattgttggaagatttcacctttatctctgttttgttgtttggagaccattcatatgtttgccctttcgttttaatatttgcttgtgtatgtgctgttattttttagcttcttgatgtcaacagaagctgcaatcttttgtaatttaacatgtggagtctagtatctttaaattagtcgttgttgggaactttttttttttttgagctatatagctatgtagttaagatctaaattgcttgttttgctttggaggagttcgctaagctactttttctgtgaataattttggacaaacaatgatgtattggtacagtggacgtgctgggcgagaaggggctggaaagtgtttccgtctttacccagagagtgaatttgacaaacttgagaactcaacgaagccagagatcaagagatgcaaccttgctaatgtaattttacaactcaaggctctgggtgtggatgatatcattgggtttgactttatagaaaagccttcaaggtgcagttcttgatgcttttgtttcataccatattattctatacttttgtttgtgttggtgtatcatggatgtatgcggataagttcaactatatttgcgatgccatatcccttaattctgtcagagaattatatgcagtaactgttttgtctgccatctaatccttaaaccatgccattgataacataataaaaccagggatcttttattttgatgaacttgtctatagttgatttttgatggcctacgacctatggagtacaatatcagttctgatgaatctttacagaatatagaacacaattttgtggaatttaatttatgtgtacatgtctgtagatatgtaaagatgtatatattttttttcatgtatattggcatggagggggatgtttgggtgattggtaaagtaactttgtgctgatagtcgttgtttatcatcattttttgaaaacataagatctaaagtgatatatttaagcaggtcagctattgtcaaatcattggagcagttgtttttgctaggtgctttaacagatgaatgtaaactctctgatccagttggtcgtcaaatgtcgaaacttcctttagatcctgtttattcaaaggcccttatcatagccagtgagttcaagtgcttgcaagaaatgttgataaccgttgcaatgctttcggtggaatctatattttatgctccccgggacaaattagatgaggtgcgtgcatatgagatattattcatacatgttttccttattttcctaaatagaacaattctgcctatgattctgataactcaatttttctaggctatttgatttagtaagtaatggcatatacttctttaaataaagtaataaactacaaaagcaagttgttgttgattagcaaatctttatcctttcttaaaaatttttttccttttaaagtttttatattaaattatggtctaatattattgtatgggctaggcaagagctgcaatgaaacgcttttcaagtcctgagggagatcacatcactttgattaatgtatttcgagcagctaatgagtttatggagaagaacttgacgtgtggtaaagagaaagctgacaagatcctaagaaaatggtgcaaggaaaactttattaataatcgctccctaagacatgctcgtgatattcacaagttagtatgcttattccttgtttaattaaggtttttatatttataattttttagctggctggctcctagatcaagctgtgcattttaattatatatttttcggcttaatgtgtcttctctggcagccaaatccgagaacatgttcagcaaatgggtcttcatattgtctcttgtggagatgacgtacttaacttccgcagatgtcttgctgcttcattctttctcaatgcagctctaaagcaacccgagggaacatataggtatcagcttttctctctctactttttcagattgtcttaccgtttctttgggaactttaaagtctttatttttcaataaaggcaaacaaggtcatccactaaagttctttattggccaaggttgtccacgttcttgtatttatttatttatttatttttctataacatttacaaggcctcacgtttaacaaaatggcagggctttggcaagtggtcagatagtgcagatccacccttcttctgtgttgttccagaaaaagccagaatgcttaatctacaacgaactaatccaaactaaccataagtatatccacaaaataactagaattgattacttgtggttaactgaattggctccccaattttattccatgcagagttgagcttctgtaacctcaacacccaacaggtaaattcttattgtgaactatgaacctaatccatgaaatctcacttgaaattttgataatgatcatgtgtgttcatattatattccagtcattcatttgactactggtgcagtactggccacaatgggattgtggaaagcttctcaatcctgtccaaacagatacaagccatcacaagtttctttcagccgcattgcactgcagtaacattgcaacggaccgagtttgtttggtgtcgaactcgtttatgtccttgctcccactgcttttcaaaagtttgagttcagaatgcaacattattattattattattattggaaaagggtagaaaaatgggacttattatattacaaacatatcattattggatttggatctatcgggattgacagggctcgaacctgcagctttcgccttgataggacggtgctctgaccaattgaactacaatctccaaaaaataacataataaaatgtacagtcattattattattattattgtttaggtggttttgaagaaggcatcctttcacagaaggtgggttttgtagaaatcaagaaagagtatccgttttatgttttaacttattagtttttggtcctttgtaagacctcaacttcaacttgaatttggaaaacgagtactttatatgaatatagttgagtaaagtttttcattatttaagcccaaagtgtaaagcaagaaagcttgttgtcgtcacaatgtgtgtgctgtgcatgttgttgttactctccaatttcctacactcaaattggacctaaactatacaaatttagacgaagttaagacgtggtgatcaattacaatccacatacttctatttgaactttcctaaagtccccaataatatatatatat

SEQ ID NO: 218735 - DNA, 4921 bp, Cannabis indica
gaggtaaaataaagaaagtaagaatttagtgagttattttaaaaaacagaatagagaagctgttgtgagtgctctaagagtaaattacggtataattcccaaaagaatcatttcgctagtaattaaccccaaattcttattttctaacgacgaaaccccctataccacaaatctattagcaaaatcacatctccgtttaggggtgttcatcaaattacctacaccacataaaccacccgcacatcaccacacagctcaaaaaatgcagtttcaaaccctttgtggtgcagttgtagtttgtattttttaaactgcgcgacgcagtgcggtttgcaatttttaatttaatagttgtagaccgcaactcactatataatacaaagttaccaatttttataatataatttttattttttttaaaaaaatatatgtaatatattatataattttttaaagacaattcaacataataacttgacgattattatacatgtaataatgttaaaagttttctatatattcttatatataatttttttacatacattttaaataaaattaaacatttctttatacatacaatttttttcttcctttgaatttgttatttattattttatttattttaattttttattggagacataaaataacaataatttattttattttgttgctaattatgtgaaaaagatatatttttttaaaaatattaaatagtttaatattgaaatgtaaccaatccaatcctcacttttgcagaatagattggattggatttgaattattgtgcagattggattgaatgcaaaatataaaatttgcacttagtgcagatcggatgtactatatacaaaatagtacggattggattgaatgaatacccctaaacattatagtctgtaaaaaataatcaacattgtagtcttaataaaattttaagcattacctaatttaaaataagactttatgtatttgtttaaataaaaaagacttttatgtataagttaattctaatgtaaaaaactcctaataaaacaaattatagcattttataataggatgatcattttatatagcatgtatagagaaacattaatctaaaaagtagaaagcattggttaagatacttatcaactaaatgcccagccttacatatttgcatatctccaaaattaatgcattgctttcagtatagtttaagctaacactaaaaatcatactaacaccactataaaataagaaattacactaataaattttacattattaaattagtatgtaaacattaatagttattgaattgcgttaaaatagtctatttttgccaaaaatagcttctctagtcacaagtttgatccctctaacccacaactcagccatttcaaccccaccttcacaaacaaaatgcacctctttattcttagtggtcaccacgtggaacaatcctggctcatcagtgtcgaatctccgccgtcgattccatcggaacacgtcactgggccccacatcagctcccttacacaccacattccttttgttcatccacttaccccaccttaacaccccaatagcttcaaccatcctcaacactcttctatgaggagaccctttaccacatctagtatgtttcttcactcgggcacccttaagaacaagctctttagccatcttatcctttatcacttgtactacgtcgtttttgtccttaccaagagagaatgccgtctcatgtttatgattctctacttctaatttagctcctaaacatatcaaaagctcacacaactttgcatggcctccttttgcagctaacatcaatggagtatagccatcatcatcaatagaattaacatcatagccttcatttgttattaacacacgaacataatcaaagtcacccatttctactgcttggtgtagagaatcaaaatgacaacgaggactttttattgtcatttctagtgactcttttaacattagtttctcaaactcaattctgttatgattcacttctgatagtttcaatgcagtctcaccatgtttattacgtaacttcatgtcagctccagcattaagaagtaatttaaaggcctctaaatgaccaatttttgcagctaccatagcagctgagaagccattttcgtcttgtctgtcaagattaacaccctctgtttcgataagtttcttcaacgcttcagtgtcatttgctctagtcacaaacatcaaaggaaaaaatactacctcgtttgttgatttaatgacaaccccatctctaattacatccaaaacagcttgttgaaacccaagattccacttactagactcggcaattgagctagcagactcaccagtactagaatttacaacactaaaatcagcaccagctgcagccaaaatctttagacatttttcacttttattacgagtgcagatcattagaggggtatctccatgttctccagttaccgagttgacattgcaccccgctttaatcaaatgttgaaggatttgtgacgatcccagccgagcagccaagtgaatggggcggagttgtgagtcgattttcgaagtcgtcttagtttgagcttctatatcagcaccacaacttaagagaatatctacaacttttgcattattacataagatagcatggtggattagagttcttcccaagtgaggagtgttaggagaaaggtgttggagaagcatggttagaataacaccactggcctcaaaatactccaccgcacaccaagtgacactgtaaggctctgctagtcctgccccaactcgaaaatcctcccctgtattcgtgtcccatgaccatgctccaagattcacttttatatcagttctgactccagcctgttgatttgttcataatattattgtatgatatttattacaataaaaaatatatctatatgtataaaataatacctgtaacaagactctgactacgttaatttgacgactaactatggcagcaacaagggcactgcagttgacattggcatgtagaaatggtttggaagattgaagcaacaaacgatgcatccactccacactgctaacaatcaacatcatctctgtcaacatcatcacaaaaattcatagtatgttcaaaacaaatacaagaaagaatcttttacacacaaccctttgttattactcttctcgtttggaacgcatcaagccgtattgtattgtattgtattatattgaattagattatatatcatatttttatataatactattttaaactttaatttatactaaaatattatatatttaggtgtttataaaagttaatactacatatagttttgtataaaaatattgcataaaatacaattcgatataatacaatacaatacaatacgacctaatacggcgttccaaacgagcacagaatgtatatatctctagtcaaaaacaaaatgcatcttcagtaaaaaaatcacaaaaaataccttgagaagagcagatgcgacatcaacaaagcctctgcaagaggcagacacaagagcatgaacagcagcccgagagcggatcatgtctgactccatgagcatctcagcaggcctagcaagtcccaagtagctggcttctaataatgcctcctcgcatgccagctgagatgccccacaacttataagaacttccaatatcttcaagtgcccttctctcactgctgccgtggttgggtacccccgaaacactctctggttcacatcggctccaacattctggagtagtaattataataagagaagaaattaagctcaacaatattaattagtggcgtttgaggtgtgagcagtgtagttttttctttgccaattttgaacaattttccaaattgtaactgtaactatagaatctaaagacaaaaatactagtgcagtccggtagctcaagatgaccaaacaaatttttataataaaataagtattgctatttgagcaactctaatgagtgttgctataagtagtgatatcagaagtggtatagatgaggttgttgacctttttttgttaaccttttttgttagacattttatatgcataaataaaagatatataaaatgcggaattaataaaacatatatacactatgaataaagatcaaaatacttccagattttttgagctttaattctatacaagcaatccttttacgttaccttgttagcgttggagatggccttaaacatgtgtggtgcctaataccatcaccaaatagatttttttatactagttatttaattaaaataagtaggactgagtacttaactacaccgataacttataacaatggtggttggtggtgttaactgttaattagaacctgtccagcatttctctaataatattcagctcttaaaaaaatgttcacaataaaatttataacaaagttaaaaacaaaatttataataacagacaatacaattaaagtgtgtgcatgcacattatgagctgataagatattatatatacatgtaaaagtaaaagaaaaatggcatgagctgcatttatgaacgttaactaattcagcaaatcaagggtgttaagtaaaaaaggaccacaatgaactgaagaggaagataataacaatagtaaatagttataacaattatagttaccagtaacttcctaacaagggtgaagttgccagaatgagaagcgagaaagagtggggtgacgtctgtgttgaactcttcgtactcaacaacaacatggtgagccaactcgccacgtaaaacgaactcactcttcttacactttaacatcactgttccaacatagttaacatccacaaaagggttgcctattattaactcagcatcagcatcatcatcacccgatcttgatttggtatcatgattatcatgatcatgcgccgcatcgattag

SEQ ID NO: 218736 - DNA, 3266 bp, Cannabis indica
aacattccaccatgatgtattgcaagtgtcaaatactttagagtatcacctgtttaattatgaatcaaaaataatagatcataggtaagtaaaatattagtacctcttaaattttcatccacaaaattatttgcaaaagaattttgtcgacaatagaccccattatttgtaggtgcacatgcttaaagtcagtacaataataacacaacaacacccaattataaactttgaagattctaattccttctcacaaatagtgtcgtgtaaaatcccaaaaaatatcttttttatgtataaagagaagcactgcaaacaaaccaacaacatcacacacaatactgccaaaaaaaccataatttttcaattgcaaaagagtctcatccccctctgacccctttcattgtcaaacaacaaatccaaaataataaaaatttccaaaaccagcagcaaaccccaaaaaaatatcagaaccctcactcacatttcagacacaacacaaaaaatacccataaataattcttacatttagaattttcttaccgtaatttggggaatcctctccatctttcctgaaaaaaagtcatctttgcttttcaaaacatggtacaacctaaaaaatctcagtcaaaatccaagatttatcctcactcaaaggcgtcgtagaagatgggatcaattgaaggtcaaggtcagagatagagaacttcaaacaatggtcttctttgaagaagatggaattgatggtcttctccatgaagagttcgaccctctcaagtgttttctaagatttttttttcaatcttgttaatgatattttgattttagtttatgtttttgttttcaggtttgatattttcttataaatttcacgtataattattattatgttagattatagatttaattttatttaattttttgtttctattaatttatagattttataattcatattttatggtataaatttatattagttgtagactaaaatagatattatgtggctattgttaaaatgatgtgacgttatttttaatgatatttcttgccatctggcacctagcgtgccgaaaaatggggaggtacttacggaacttccaaaagtgtaatacaaggtattttcaccgttaaaattttaacttaagtattaaattgtaactaaaagataaacttgagtatttataccacaaattactctattattcatataatataatatttagattaaacaattaagtgtgacaaaatcaaatagtaacatacaataggaagttacaaaatttacaaatctttattagatgataataacaaattttgtaacttctctctatattatcactcttaatagtaaattgagttactggttgtatttgaatgtgattaaaaagtagttatgaaaatatagtttttggggacctatttatatcacttatcgagtgtataaatgatataaaatcagagtgaaaagttttgaaccgtttggagttattttgctaaatgctgaaaaaattagtaattggttactagttatcagattttgagattttacactacaggcgacatgtctcctggccaaatttcagcatgcaatttttaacgttttatgaacgttgtgctcgatcttaatagctcccataactttcaaacaccaatttaagtccataaatgtccaatttaatattggtaacagccaacagcttcatggtggtcattcatgttcaaatgagagtgaaaaatctataaatagagatagaggtcatattattcacttaaaaaatattattgagaggatatgtccatccttagacactaggcggagcatatgagatttaaaaattcttatgagcatttttagaatttatctaagtgtccgtgtgagagagaaataacttctaggacaaaggtcctagccttgattaagcgtattgtgtgttcttgagtgttagtgttcttcttattctcaagttttcttgtaatcttgatgtaatacttttatttatattttaagtattttaattgtaacctcctattcttttgtaataaaaaaatgaaacaagcaataaattacaaatttcttgataacaaatttttatttagtttgtaaggtttagattttcgaaaacaaaaaataaaaatgtattgttacaaattcgtacattttatttacagcaaaataaatttcgtattgacaattctcactttgcatttttgaatttttttttttcaaattaaactacttttaattaaaaaaaaataacataaacataaaaaatttatatgtgaagaatgctattagaattaatgaatgcttcaacgctacaacttacacaaaccaaattaactaaacaaaatctaacacaaacacgacaaaagataaactattcattatactacataactaataacattaattagtaacacacattttgccaaaataatcataataatataaaaattaaaatcaagttaatatttttttttttttcggaatcagatactttgtattgacataaaattagactttttacaacttaaacagcaccatataaaggcctgaataatactgtagttacatgtataaagaattgaaccaatctcttttttctaggtattttttgtatctaataagccattgatgctatacttcacattctctttcacttggtgaacacacctgtgcacagtttgcattttaccattccataaacaatcatttcggttgctctagatttgattaatcaaagcagccaccgctgttgcataaatattccttctaaacttggatgtcttaacccgagaagtccacctgcatggctgctagaggacgatctgctatttgccaattcaaccatgttttgatctcttgcaaacacctgttactgaaatagcattcaaaaaataaatgatttattgttacaagctcaatgctgcataaaaggcaactgccttcttgacagacattaaatttcagcaatcggctcctggtttggagcctcttttgaacagccagccacattataaagctatgtttaggcatgttatatcgattccagacttctctatgccatgaaactctgttttgatcaacatttagcatcttgtaaacttggtggatactataacttcttctcatgattggctgcaagtgagaaagatttttatgtttttctttaagctttactacttgtctccaataccagctgtcatcattggtttgatagtcccaccaatttgaacttttgatgtatacatgatgcacccatttt

SEQ ID NO: 218737 - DNA, 8186 bp, Cannabis indica
aaaagcaaaagcaaaccttaagctcatttatcttgtcctgcaaactctcattcgactgctttagcttctgggattccattcgtaattggttaaccattcgaacagcctcacccaatataacacccttgtccattttgggaggtcttccaggatccaaaatagaacccagttcaaggaaccttcatatcatgccaatgcacaacgtgagacacagaaagagatagagaaacaaatatagagagggagagagaatcagagtactcgaccatgcctgtcattgagtttatccctcctcattttctctctacaagcctttgaaccggtggtactgcatgatccaggtctcaccctacgatacaataaataggtacaaaactgatcaatgattgtatcatgggattgggaggtgactaaagtgaaaatagagaaattaaaatgattagaaaccccagaaaactttacacaagtcaaaggtaaagaaaacccaaaaaaatgcaacaagtttatagtaataataaactattcccataacccgtttccatatcagaatagtatatgcataccgcttccgggagccagtttccttaagcccatcatcgttggcaaatgagtcatcaaagtccacgctgacagaacaaaacaacacaacaaaataaaatgagatcctgacgaacttaagaactttttatatgctaaataggtgtttaaagaaaaagtatatatgtatatgtttatttatacattctacaaagagataacttcaattttctttttcatgctactcaacaaattcttctgaaatctgaaaaaattatgtaataaattaacttaattttaaatcattttaccaattttcaaactcttgctctttactattcatttcgagaaaaataaatgttaagtaaaaacaaaatcaagcaaataattacaattaaatacagaagccttgtgttatcacaacaacaaaatcaaaaatattttactttataattaaaaaacaattgaccatctagattatcaacataatgcatagattaagcaaattataatttgatagttcaaaatgtggaacgcatctcgaatgaactacagctatgaagtaaaacccaagtggggagagagtagaagcacctgagatcagtgggagttgtaaacgagtgagaaggccaagcgaagccaggcggctcaagggtcggaaggtcttctatcaagctgtaatcaaaaacccagttgggatttcccgccgaactcatctccgatcagttgccagaaagtttacggcagtcgtttccggtgattcgcactgaaagaaagcttttgcgccgccggagaagatggtcgagaagagagaaggatattgaaaagaagaagaaaaaaatcaaggaggaagaagaataagcgaaatgagtgaacttgattggtttgttaggatatgaattggtaaggaagtggggttcgttagaaaaagaacgaaaagggaatgggggagagtctcttggcgccatctccaccacaggtagtgtcatcgcatcgaatcaccttttctatattttattccctttttcatttgtttattgaatttctatcgattttgtaattttgtctttcctgttgcgtgtcttctgtgtttgggccgaatctatacccaataattaacttgggccactgctgtgtttctttgggctgttagaggcccaacagtatgcactaccccactaccgcacctttgtccaactttcacttcataaacatggaaaagttaccaataaaattgaaataattactcttaaagatgtatgtgaaataagtcatgggatattaatgaaatgaaagaatttgttttattcctctaaaaaaattattataatttatttagtgcatgacaatgattttagcatatcaatatggtttttgagattagttgttgcattataattcttttttaatatatactactgatttgttagggagaaattggtttttttttttttgggggggggggggattgttagggatagtttgattagctaaattaggtgcacaataattaatatttgtcttctggttatgactacttactacacaccgaactgatatttttcacttttctaaaattgaatattgaaggatgaattcatcaagctacaaaaatctatcctccaatcaaatattttaaagcgtgcagattccacttttctttagcaaaagttgaatataatatctgaaaagaaattagttcatgtagtcttttttttaaaaaaaaaattgaaagctcacactttcaaaccattacggctgcagcagctactaagttataacatagtaaggaaagaaaatcataaaaatatcatgaaaagcaaataacttgacaaattcaaaaccaatgctgctgatctgaccaccacaactattacaagcacaaccacttattcaattctgtatgtacattgtacacgaaaactaactaggcaacatatacgcgactagactgaacaaaactgtcaatccttttctttatctcatctggattggcacccacaagcttgtccacctgagctccatttctcatcaacacaaaagtgggcatcgcctttacatccattctacttgctacctcctgacaaaacaacaaaacaccaactgcctctcaaaatctttaaaagccaaacttcttcaaaatcaattctcaaacgccccttaatgattgaaagggataccttgactttgatgtgataaattaactttccaattattctaccattcacaacaagaatatctcttaaacttacatgtcagaatatatcctaaactaaagtaaagtttcagattatataatctcgggtactgactgtgtgttgaattttgactattttgttcatggactgtactaaaaactttatactgattggtgggtgtaaaaggagttccaggttctcactagtggcagaataattgattgaaagcgatgtgtatgtactgtatagcacacgtgatttatggatttgcattaagcatagaaaatcactaattagatatgcctttaccactaatattaagacaaaatgacaatacacccggttagataaaatgacaattagatatattaacatgttgctaacgaataacgattatgagaatctacttagcaaaactagataagatcaaactatttagatcagcatgcatataattgaagctgctctaacaaaccaatatcgaatagaaacaattaccattcatatcaagcatatatgctcattatacactgcactaaatcatatatacttcaagttcaagcacaaaaatatcatgttggctttaccaagcttgctcacctgtgcttgggaataatttcaggaaaatactaattaacacgtggttgaaaatcattttaagaaaaatcaataaatacatgtcttgaacatagaagtcccaaatcttatccatgtaaaatgtaaaaatcaactctgaaagggaaatcatttcctataactatcttattagctcaatctcaaagaagttcatggtgattgtattctaagaaaaatacaaaagcgaaagatatccatcagtgcatatcttaattctagagagagtttcattacaggaaccaagagaacatttttgttctaaaatacattttctatattcactttatttagatctccatgcctttatgattaaaagcattttctgataacgaaaaataaataagcagttagcataatctttactagatacgatgaaaagagccaatttaaagatacattccaactaggccccagcccagcgacttgtaaagagaatctcaaaatatcttccatggaacaaatacgaaattaaacaaatatctcacatgaaaaaaattctaccaaacaacatcaccagaaaaatatcaacaaagaaacagaacatttttaaactctatccacatatcatattaatattatccactccactcaacatgttcaatatattaatagatatatactcatttctaaattattattaggttaggctctatcacagcacgccataacagatctttgtctgttgtttcaaagttctttccagtcaatttaccttaatctcatcaacatcaaccgtaagaaacaagacatctgtgtaggttgaggctagttcttcaaatattggattcatagctaccgaaggcatgcaccacgaagcagtgaagtgaacaacaatctgcaattaatatcaaaaaccctttaattcaattcaaaagaaatttcttctaaaccacaaattcatatcaaaacaaaaacaaaaatcagaacttgtatcggtaatcatttgatgctaaagttcataataactaatagaaatttgaaacataaaaaagaaaaaaaaaagggggtattaagaattagagggtttctatcacagaatcatagatgcccatttctacataaacaaaatataaaactcacaggggagccttgactggtggcctggttaaaacatgagtccccaacactttggacttaatcccctcttccaggttactttccatcttctctctgtcccttttattttatttttgctttgctttgctttcttcagcctagtttgaactttatctagttgtctacgatcacagctcactctattttagagaaactatttttataaccggataaatatgaatatgatttgaactatggtattggacccaccttttcagcggcaatgtacaagatggggtattcctaaatgcccattatgtttttctttctttctaaatgcaaggaatttggtttttgatgttgagtagtattgggtttagaggtatatatataatagtgtataccattacttttttagctagtggatatgacatatctggaggatgaaagtgaaaccctaatctcaataccatttcttcgattctgtctctgttgttaccctagaaagtattacagatcggagatcggagattggagagaaactttgtctagttgtttgagttagttttctcaagttttgattctctctgctttgctgtgtagagttgttttgcatttgcattgatatgggaatttgttattattcatcctattctctctctctttttgataatagttttatttttgtcgtaattagtttatactgttaattagtacagttcttagattggtatttgttcctatgtgtatatgttattatttcattactgtgtttaagttgtttggtgttgatgatgatgatgatgaagtgtttggtgacattgtgaaatttgtctttaaataaaatctaattgatgaaaagtcacatagaatagaacaaacaatgttgtgttgttgattggagagataatttgtagttggtttcaaattttatctgctgttttaattggagaatcaaaatatgcaatgcttcttcattggagaagagatgatgataatttgtagttaccaattaataacaattatgatttgttcatttgcatctctttagcattgttggtagcacttgagttcaattttaatgttgttttatatcatcaagaacttttgtaaattgtttccctttttctagttttaatgtaatgaaaaggacaataagtaacttgagagaaaattagctctcctgttgaattcttcttatagtatgaatggtttaagcaatgttaggtaatagattccattgataatatctaatatcagttttcttgttacattttttttttgaaggatttatagttactattagctctgttttctgatgtcatgtttgctacaatttcgtgttatcataaatatgaggcctctgggtccaaacattgtcctttccttaatctaaattgatgtcctatattgctttaatggttttcttctttcatgcttttcttttctttaagaaaacaaaatcaatcatgtttatgcgttgatattaattttgatatttgaagctattagttgtttcctgagcttatgctgtttgtcattttcggttttttgttaatgaggctatctctgtttttatatcaaataaatagcaagaagaggcgaaacaagtcatcattctctaagcgtggaaagaggcaaaaaaaaatcaatggctactttgaaggaaatcttaacacgacgccctgtgtccgccactattcgcctgactgtaccagcaggaggtgctcgtcctgcaccccctgttggtccagcactagggcagtatcgattgaacttgatggcattctgcaaggacttcaatgctcgtactcaaaagtacaagccagacacccctatgtctgtaactatcaccgccttcaaagacaacacattcgagttcacagttaaatcaccatcggtttcttggtaccttaagaaggcagctgggattgaatcaggaagcagccgtccaggccatgtaattgcatcgacactgccactcaagcacgtgtatgagatcgccaaagtgaagcaatccgatccttattgccagtacatgtcattggagtctatttgcaagtccatcattggtactgcaaataccatggggatcaaggttgttaaggacttggaggaggagtagatcatcaattcaatcgttgtccgaatccaaggtaggttttaaggtgtcctcataaacttttgttttcttccctttgtggaatttgttgctgaggaaagtaacatctttttaggcttagtttcaatccctttgtagaagatgcaaagaaaaagtaaaaaaaattacaaaagagaattgtttggtaaatttatccttgagccaaatgtgtgttttacataagtggtcaaacaatagtttaccatggtgagattataattttttttttttgaataaaagcgtaattatcttaaatggtaaatatggttagaccttatggtcattacaaaataagtttttcggtatgaaatctactgggataagaccaaacatttggtaagcaaatgcctatttagccacattatgagcggcaaaattataagttctactaacattaaaaaaattacaactaataaacaaaggagagagacttaatgagattttgaggttggttacccaaaattatgctatttgggtgctgaggaatctttcttaatccaaaggctttctcatgattcattatgttatgagaattctcatgtgtagttcaaagcatatttgtcaattgtagttgtgtgaatgtgaggccatcttaaaatgtgaaataatctcacttaatttgctatatacaactatttatggttaaataatgtaattcacagtctttttctacaaccataaaagattattttactaataaaaaaatttataaagactatttttatagaacacccttaaaatccaatgaaaacaattaggtgtgtttctaaatttgaaatatttgcatctaaaagtgaaagtactcattttattacatttgtaatatttaaatgttcatttttttcaggttttggtgttacatattactaattagtattaatatatgcacacataaattacacatagatttatattgcatttaattttaactattcaacgtattttacttcttaaaaatgacttgtgacataaatatatattaagatcatgagtaatttatatttgcaaatattaatactatcatatcataggccaactttaatgagtgttgcccatatagttgtccaaaaaattgtgggtcatattagtagcggactcagaatttaaagtgaggggtgtgtaattttttagttttttatttgtaaagtaaagagaaaagtaaacttaaaaaaaaaattaatattttttatgagaattgaagcattgtcctctactctatatgtaatctagtttatcgattacactaaagttaatttatgttcataaatatcatttttttattacaagtatatgtcgtaattaattaaattgcatatatatttttgtcccaatttttttttcagggtaattacctcgtctcgcttacatgtcggttcgcccctggatcatattgtattatgtgacaaaagagagaaagagagataataaaatattctaaaatggacatatacaaggatcattacccatttatatttttaattaaaaaaattgtgattagctaatacaatgatatttacaccatataataacttttttttaaaaaatttaattatttatatttttaaaatataattgtttacatttatacttttcctact

SEQ ID NO: 218738 - DNA, 6813 bp, Cannabis indica
aaaaaaaaaattacaaaaatacacgaaaaccgaacactacaagtcccgcttgaagacgggtaacttttttaaaaaattctatgttaccttaccaaaaaaaaaaaaattgttgctatatatatacttttgtatttaaacgaagcgcttcaattccattgcgaaaaaataaacgaagcgcttcaaattcaattctactcacatttttcttacatgccaaacactccttttcctttattttccaattctctccagttgcagaataggtaagctctattttactccatatctttgtaaatgctggactgtaggtttatattattcttttaccgtttattttcttcatttctcgcggcgaattggtagatatcaatcatgcgtttgcatttgcatttgtcattaatcttaatcaatttttgttaatacattttgcgcaaacttcaccacagacatacattatttggcgtgttaagctttgaattttgctaaattcacagattagagttcgtttgattgaagtattctatcgtgaaatctctcgtcttccagtgtttttttgtttgtctaatcggtctttccaataattcgttctgttttaatgcaatagctacttttatagatggccgaaccgcagaaggaaacttcctctgtaaatgctgaaaagaaaaagtcactgctaggtattctctttacttccctttctttcgaccagttttgactatttattgtagtgttttttgaaatataattcgattgtttctttctttgcatcgttcaaatttttactattggaatgatataagatcattatgtgtttagtcaatgtatttgcagcttaaatgatcagatttaggggaattttacagtaggattttttgctggaagatctcttgattgtatgctatgatgaatcctatatttctcttaatacagatgatgatattggaaatgaatttctcaactcctggaagaccatgtcagttactgaagacgacacaatggattttaactttagtacggtttccaatggcaagaagaaggcatttgatttcgataaactgtatggatatcataataatttattgttgcttttatttctttcttttctataactcattctcacatttggaagttttttctaatcgcagttgcatttgaatatgttagtcacttttatgcttattcttggtgtgcatgttgatgttttgttttctgtgtggaaaactagaaattcttttgagaatgaaagaccaaatacaaaatcaattagttccttcaattcgaacttactttgagcagtttctactttctagttaccatttgaaggtaatttttcttttgttcttctattcagggacatggatttcaatctggatggtgattttaacaaattatcatcttttaaagtggacatggaagactttgatttctcagccccatccaccaaagctgtaaagacaaaggagaaatctgaacaagaatcttctaatgggaatcagaaagggaagaaaaaacagtttgatttctcatttgactttaatgagtaagtaaagaccttcttcttgtgtagattccataagcactattgcacttgtacaaacaatataactgttactgaaatacatcacttatttgaaatatgtttgttgttgattgtaggctagattctttcaattttgactcatcgttaatgaaagaagaaaaggcttctcaccagagtcatgatggaaaaaagagaagttcattagatggagatgaaagtcggggatccaaaagtcaacttagcgaaggcgttaaatgttttgacaccgccacaaaagtacagccatttgaggatgttcacacttcaaaggttgaaagttcgttagctgaatcatcacatcttacttccataaaagatggctctgcaaaacatgtgatctctgaggctgctattttatcacattgtgctgaaccttctccagaaaaagtaatagctactgagaaagaaatttcgtcaaaactgtactctgagaaggccattattgatttttctagtcaatgtttagaagacgtcaattcaaataggtatgctctttgtgaagggcagaatgaaagttatgaacagagctcaggattaccaacaaccttaaatcaaaaggatgtaaatgaaaaagtgacggttggtgtgttatcttctcatgaaaatttacccttgaaggattcactgtcacttgaaaacactactttagaaagtaataatggtgagacaaatacatcagatagtaagaaatcaaaagaaaactgtggactgtactgtgtcatctgaagctgatgaaaaatgtgaggaaaacttgaccagctttgtctcaagtaaggatcaacctgatgtcaaagacaacaaggaaaagcaaaatttgtcaacagaacttcctatagctcttccttccaggtcaatcctcttgcttttggtagttgcaatcagtcattgattattcagctctaaaattaaattatgatagtcatatgttctccaatcttcttttagttggatggttttcaataaggatgagacttgtggaatattttcagatttatttgctccatgactatcttcttatgtttataaatatgatgtttaacttcttttgaaatgtggtcatttttagtgatatacaactgttcactacattctgagtgtgctcaaaagctgtgttctgtgcattgcctgtaatatccagactcatagcatgtccttttactttgtttactaaagtaaacctgtgggtgataaagtgactgttacaactgaaaatgaagctgtccaccttctcagataaatggaactgcatatatagtttgccattcatttaagtttgttaaaatttgtttcctttaagactttgtccttatcatatataggttcagaaattataatcaactaagtggggctgtgtaataagtccaatatttggtgtttatattcacttatttttgtacaatcttttcagggagggtttaaattctaatagtgcacgaattggaaaagagctttgtggaaatcctctgttaggtgctagagaatttactaaaggcaaagatgcattgcaggagggtgcaaagagtgatatgaatcttactgatatcaggtgaggcaaattaaccgtcaattttcattttttagcatagactcttattctaatgtactttgaactcagaatccctcaagactatgtgaatttacacttgatacagtataaccacttttctgctcaaatagttatcccttgttgaaattgtttcaacagagatagctttatttctaatggtttaccaaatggaagcaaactagttggaaaatcacagctgcctgacgatgaagctacaaaagttgaacccgtcttgccggcaagtgataagatgggtaaaggtcaaaatacttagggtatggtatttgacttttgattttcttttacttttcatttagctgtagttcatagtttcacttcttcagtccataggcacgtttttagattcaaaacgattgtgcaggaccataagtttgagtgtaatattttagctgcattactgtcttttctatggacgtgtctgtatcatacttcaacatttctttgcatgatatttgtgaaaaaaaattttataaaacaaatttatagctctgtttgcactgcaaggaaaattttgtttacatgttctaccacatgtctcaggaaatcaacttttcgacacattcattttcattgtgtgaatattgcttcgatttaattgttctattcatgatcttggctatgtatggtgtaatttaatttttgatttgaactttatgagtgacgaatccttgcagcctccgagattgtccttctagttcatccgagaagcaaattagatctagtaatcagatacctcttaattctaaagcattttcctcaaacatggaggctcttcgagacccgaacccaaagatcaaatcagctgaagaaactacactttgtccagtgaaggctgtcaggaagttgcctgatctctctaccatgaaagtttccaagtatgatgctttgaaatttttcatcttcttcagtgccttcctatgaggaaattttgtaaaaaaattctgaatgaccatctagatattggacgactggagcaaaccaagttttatcaaattctctacctcagaaagatattatttctcttcagaatccagagaaaaatgtgcaagtgcaaggtaacactgccaacacagcatcggatactgcatctcctgctatcagcactgagaagaaattgccactgaatttatctttgaagcggaaatcattggaggtttgtctttttaagcctttacacataataaaatttattatgactgtactatagctttggcaacatttaatttcttaaaactttattgttaatgtacttaatccattatatacggaaaccatgttgcagttatcacattcagatttagcatctctgaaggctttaaaacgaccgtacacatcactgattgaaagcaggtctttcattgtcttgagacatgtctattattaactgcaatgtctttagatgactcactcaagacattttggccaaattctgcagagatattaaggaaccgttgaaacgagttgttgaagaaaaggtattgtatcaaaaactttgatggaatgattgatcagtaatgatgattttatttcatatgcacagaaaaaaaaaaaagcttgacgtagcatactattacagttttctcctgcagaaaagaattcaatatctgattcagggaagatcctaaagcctctgaaatttccttctgagtcatttggtggaagcaggttttttttgtttaactgctgacaatacaatttttgtaagtatgttggccattgagataacaaatgcttttatgcttaaacatgtgcagaaatttgaaggaacctttgaaaagaattgatgtcaaagaatctgtaagaagagttgatgaagataaggtatcagctcaacaaacttaatgagattatgcactagttagcatgctacaatattggatgcagaaaagattttgaactatgaagcctgatccatgataaaccaaaactattgacaagtgtcttttgcaacttttctaggctaactttcatgagaaccaggtaaagagtaagcctaggggcagtccctacaatagtccagcccctgcgtatgaaagttctccaaaggttaacgtgatggaacttgaaatttcatctgttactgaaaatgatggaactgttgaaaaggcagaagcattgtcaaaggagcttgaagaagtgagtaaattacctagtcaatttttcatgaaaatgtggtttttgacctttattagatatcataccatgacatactgctaaaactataactaaattaatacttgaaattgtatgcctgtgatggaatcaaataaacactctggctgttgaaaaataaatggacattacaagttcacaacatgttaggttcttgtttctttagttttaactgtttgtaatataaaagtctactaatcctgagagtcagatctcagatttatggtattggaaaaaatgttagtaaattcagctagaaatgtgagcttcagtattatcagtcctgccaagcattactgcttgtattacaaatattatcactaatatttgtagcttttcttgctcctagtcaaatgtcccttttataaccccaatcctctacagatttgcaatatgctgaaaaagaaacacgatgaagccaaagaaatactagtgggagcagttgtaaacaacaataatttactcatgctgaaccatcccctctatgaagagaagatatccttcaccctcacttttcttcagttctaatgttgataatgacttctatttttacttataaatatatatttgaatattccttaatacctaaaaacatctacaagatccagaaatttgctgctgagctgatgtccaaggagattaaaacgtgattagaagagcactaggattcttcacacaaaggtatgctgattctgtcactgatttctgagatgcttgaagaaattgagtagtttttagcctataatatcataaccaatactttcaaactatgttgagcataaatttcacaggagttctctatagttagtcgaatgcaaatcaagcaagggtctggcattattgaatgacaaattatacgtctatgtaaaagaaagagttattctgatgtatgtgaattgtgaaccatataggcactattctattactttagtggttctactacttattaacatttgcacattgacctttcaatgaagcatgcttttttacatgtgtgaaatccttatcggtccatctattagtctagatttaaagtgtcgtttcagagcctacaagataaaactacgtaaaaacaaccatttggcaatacaaaccatactgttttaaacatacaaaaattaagatcttgttctgttctcgtatgttttcccaaattatgtctcatcatgttgtttctatgcaatttggtaatatacatacaaacaatcatcccagaatgaaacaaccactttatagatcaataaacatgtaagaagtataattgagatcaacatatactttagatttttctcttcgtgtttcgatgtgtatggtttgaatttgtcaaaatattcaaaacaatattgtattggatcttaaataaatggaaatcaatttaaaaagggcgtggaaaatggcacaaatagatggataatgaaaattataaaaatatttttattttatgctattttttttaagaaaattatataataat

SEQ ID NO: 218739 - DNA, 2818 bp, Cannabis indica
tttgaagcatggaaacgaaggagaagagcagaaaccgagagtcatatccaagttccaggccccacctcaaagatcttgagtaatggacccgatatcacgaccccagctcattggggattctggggcagcgccatttgaaaatagacgtagcggtaatgacacggccctataggatgcgtcaaactggaatagccccaaaacaaggtttctcatcaggtgttcagtaggcatgagagtaaagtagtttgacaaaagcgcttacctagttgcatcaaccgcctaagtgattgacatattctcgggagattttttcaaccatgggaataaaattttgcaaatacgtacggtattttgtgaccgaacattgtccagacaaggatgtgcattcttttataacacaaccatcggagaccaagtggctgaaataaaagagccaaagtccttgccagttgccacaagcaacactcgaggagtcttgcttccatttttcccccttctatttattttttttctttttttctgaagatgagttcagttttaatatgtttacttgtatagtgaaagttaaggaaaggattactcgttactcatctgatgcatgcaacatacattgaagagaacctgtgtatcctaacggaaagtgtacattaccaattttgcaataattttggctaaatttcatttcttgttatttgtgttgccttttattgtatcgatgcatgaattttctttgattctgtgaatcattgtcctctgcatgttactgttacactaggctagatctttgtctatgacaaggtgaagggtaatgtaatctttcatagtttcattgatagaattttctggggtagggcatttactttagccactacctgtgaggactttaggtgaatattattggtgggatacaaaatgcagtatttttaattacataataataaaattatttaagtatttcaatcaaacaaatgaggaaaaatccataggaaaaattgcactctagaggcaatgaagcagcttgaaagggtaattctgaaaaaaaagtaaaacactagaagattttctccgcatcgtctgatggggaaagcaatgtgggtagactaattgaatttaatagaaaattgtgcttaaaaatgtactgctactacgagtctatttatattgtatagtaaaatttttattggtcttggagcaaagacttctcgcggatccttttgttttctttttttttttttgaagaaggatccctttgtttttttagttttgttcgtagttccttataaattggctagacataataaaaagaaagagcaacaaggctaatagtagtagcaaccataatgtgctttaggaatacgaatttgggatgttcaaggttcttggtttttacttttgtttaacatttttattatttgataaaatattaaataaaataaaaaaaaaaatattatacaacattaataaaattaatcacctcctaagtctgaatttggtaataatacttttcttctgaaaacagtaagacaatttattattatccaataaaaatattgtcagtgccacttaaaatttttgtgttcatgatgtatggagatgaaagtatcaaggtatgagtggagatggatttgtcaggctcatccgatagtcggcattgagaccatacaacaacaaattagcaagatatatgaaaattatcacatatatcatttattacagagttttaatttaatatattttttcattactacaaaattaagtattaatttaatatattttttttcagtactacaaaattaacaattagtatcaagagctaattccacactatatatatatgttaaatattgtgtgagttttcttgtattatatatgatatgtgaatggatggttaaatgatgatcattatttatatggtgataatttggtgtgagaatcatttttaatattcttagaaattttataagccattattggcgcataagtatttttttatctaacttatttttttggaaatatttaagtaaaatatatattacattgtaatgcttacgaacacagagctcgaattcgacattgaatccatatcgtgaaccttgctggactcaaccgcgcaaaccactttattggccttcgagtatcatgcccatcccctgtgtttgacgtatgaaagacctgaaccttcggtcctgcccatccggtcctcctcttcgttggacccagcatcattggctcttttgcgtgaatactacgcagtgaacctgaagagtttgcctgacccagtccatgcaagaagcctcgacatcaaaggccatggatattctgcagttgaaggggctcggttagaaactgtaacaaccatctgatgccttgcaccacctcaaagtactttttcggggacattcgtcccttttttgtgctaccgtaacttgtgtatatgtagtgcgatagataatggacccaatagggtttagggtctttgacccgtatgagtttcttgaggcctagctcaccgtaagccgttgtggcccatgggtctccacctagatctgctggccacagtggtggtttaaagtgacacttgttggaatttattttaccaaaatcttatttactaatcaagtatgttgattataacattatgttacatcctaaatatgttgttatttgtgattctggcaatagacacgtgaaattcgggttgacatcaaatgcccattagtaggcccatcaatgaagataaagtgggccaagcccatttagacaaatcctttcaagaacgtatcccaggttcacgaccatagtgttgggttttatgccc

SEQ ID NO: 218740 - DNA, 4685 bp, Cannabis indica
caatcggattcaatgtcaacattaataaaaatataatactaggaagaataacaccaataatattttttagcattttttaacgtatatgttttagcatttcaatattcttattcaaatgaatacaaagagcatatattttgactgtagtacgtactgtcttttattaactatatatggaaaaaatcattcacgtggaaataatgagataagctttacaagcacctaataaagtaataattaaattttctccaaaggttatctttatcaatatttaataagggaaattattattttatataatattttttaatttttttttttaaaaatttattatttcagtccttcaatgaattttagttgtgattaagttattttattaatgggtatgtagaattgtaaattgttatgttaatttccgtttcaaaagtgaaaaataaaaaaactcatagtatatataggtgttattagaagtgttacctctcgctcacaaaattattaaaccctagccgctactatagtctataggtggtcaaatggatactactcatttctcatctatcttcatcttaatcattccttttttcttattccaaaccaaaaaacgacatcgttgtggtgacaaaaacctaccaccatctccaccctcttatcccatcctttccttggccacctccatctcctgaagcctccaattcaccgcacttttcgcgatctctcccgaaaatacgtagggacgaaatcaaacggctactagatctgtaagctggctcagtacgataaccagctgacagaaaaaatagtagaaatgaagtcattactttcaagtttgactttcaacatcataatgataatggtggcgggaaaaagatattttggtgacgacatcagcgaggagagccgacgatttaggaagataattgaggattcaacgaagtacgcgggggcagcaaacgcagcggattatttgccccgggtgttgagttggtttggaatggaagaaagtgaagagtactgttggtaggaatatggatgagttcttacaaggtctcatcagtgagcatcgaaataagggtactacttcttcttcttccaccatgatccaccatttactttctttgcaggaattaatctcaacctcaatattatactgaccagattatcaaaggttttacacaggttattattataattcattaattatatactatagtactacagcaaaatattatttaattagttaccaagtaggtacttcttttttctaagcgctcgttaattaattaattattattaccaaacatgtcaggattttattaaattaatataaaaatattttttttaaaccaaacgtattattttatacaattatccaaactgtatcgtgagattaagacttaagctaaaatatataaatgctgaaaaatatgtgcgttttgggtacactgtgttttaattacaaaagttattattaattggatcatttcttttgtaaaataataaattagactgtgaattttttaatagtacaaaatattactttgatttaattttttattaaaataaaacttaataataattactctacttaaaagtattatgacaagattagttacatttttgtatggcattaaaaattttcttcaaattagttatatatattgaaaaaattataaaaaattgagttcaaaagtattttacactattttgatcatttttacaaaactcaatatccaaattaggattaactcttttactcttttataaatgacaattttttttatttcaatatagactatatttacagctggtacggacacatcatcagtatcattagaatgggcaatgtcgaatcttcttaaccatcctgatgtccttaaaaaagctagagccgagttggatgatgaaattggacaaaaacgcttagtggatgaatccgatcttcataaattaccttatctccaaagcattatctcaccttacgactttacccagctgctccaatgctatcaaataaatacatgatccaaaatatatcaccatataagtgcatatgtgtgatattgtaccaaaagtattgcctactaattaatattatagtgtggagcaacttaaagtactaaattataatattatatatctataaagtctcgaataattataaaaagagaatagcacttaatttgctcgagtggtatttgtatttatattatataagtgcaatttttaattatacctctcatatgatattagcaagaaatgctcttctaaattgtacaaatacaacttctacatttctctctcgcatacctacaaacccaaaccagggtatacgtaccactactatagtagttacaaaccaccactttattcttccttaccaaaaaaaaaaaactaaaaattaaaagaaaacactaaaaagtttacatttcatacttaattaaggatacattacttcattaaaccttaattaattagtttactcgtatctggtctgttgagaagaagggctaaagactgagatctcatccctaccatacttcaacctccttgcttgctccctcgaaatttggaaagcattggccaaaacatcgtcaggcatagccctcatggccgacaccttaccagcaagagggtttctcatggcgttgtcgttagtcttaacggcgatccactcgaacccttgggcgctggccttcttaaccacggcgaagttttgtggcaccacgaagatctgtccctccctaagctcgccgtcaaagacgttacggccgttatcgtcgacaacttggagtctggcgctgccacgtgtgacgtagatgacgctgtggctgtcgaggttgaagtgtggggccatcatgccgttcttgtagaggactcctctctcggccgtgagctggaggaaccgtaggattgggaggttgtagttgttgagagtgtttaatctgccgccacgtgggttgaagatgtcggcctgtgatggacggtcgatgttctgtctcagcctcaatgtgcagaaggtctcttctaatccgttgtcgcggctgtaatggcgtctctcctcttcttggattctagaaggtgctatgatctgaaggtcttctcctctgactcggacgattctctctctcatgtcgtctctgttttggagtttgtgagccaactcggtgtccacgttgaatgactcggctaagattcttgtgtcgaatccgctgaaaatgtttccgttgggagtttgttccccggattctcttcttagctggcttcggctttggcttcggacacgaacctgttgctgtgttttctgttctcggtgtgggtttccagccaggtggaatctctgcaattcagtgtttattaagtgcttcaaaatttgtgtacattatcgatgtgggactaataatataagtaaagtgaagagtgaatttactctggagaattggtcgagttggttggcttggttaccaacatcaacgaaggcaatcaaaacaagaggagagtctccgttgttgtaaacccaatcagccactccggcaggcattgcaaccatgtcaccttctttgatttcacgaactttctggtgttgttcgtctgatgatgctccctcggatctgtatcctctggatgatggtgaagaagttcctctctcgaatgtctctggacaacctgggatcacggctccatggatacctctacctagaataatcatttatgtatttattcaggttagtaataatatatatgtatgaaaatatatatatgaatataataatttgaatgattgggttgccttgaatgacgtagaacatcatgggtgcgtttaagaaagaaggcaacaaaaggcctctgcgctgaatggtgtggcgagcagtctcaacaccagcgcagtgaagctcatcgtcctctgtgttttggatgtcccaatactcactcacaccggcctcgcattccactcttcggttgggttggcgggcgttgaggcgttggaattggcactgagattgccacctgtgctgctgcctctgctgcccccctcgctggcttcgttgcggcatttgctctatttgagcaaagcaagcgtgggagagaagaagggagaagagggtgaaacatagcaacgaagtagacgaccttgccattattagtgcttttgtttgattgatcttgttgtggtgagatgagagactgtggtagtgatgagtggggttttatagaatgggaaatgggatttgggatattggacgtggtgatgcgttgatgagaagattgatgacatttttgttgtgttttgtgcatggttcttttgtagtatatgcatggccttacagctctttattgcttaacacataatagtttgtgtggcgttgaggttctgagaggagtgttgcatgcatattcataagttgtctgtttatgtgtcaagtttgccttacttgattcctctctgactcatctagtcatttatatatagacaaagacaaatttactataaggtgagtataatattaatgatgtagaggtatatttcatgttattttgtaatgtgtggaatttgataataaattagacaaattattctttaacatacattattttaaggctttatactcgccacagctagccgtggtgggaggctcttagtgtcattagggcaatcttaagttgaaatgaactttaagaaaataaaa

SEQ ID NO: 218741 - DNA, 6430 bp, Cannabis indica
gtatttatttatttaatgagttaaaaaaatcaggtagcttgggtgacattattttgcaaattttattttatggaaacttgaatgggctttttgttgtatatttgatcttttgacattaaatttggagaaatactaaatggcacaatacatcacaagggaatgactcttacgcatgattttaataataaagtaaagaaaaaaaaatcaatcggcatgttaatctcaattaaagcgaaccaaaaaattaggattgttgttagggaattgttagttgtatacctaataaaaacaaaaatatcagtgtatttttaggagtgtatttttaaattaaaacctttgattttttttctttttaaaatttttcttttttatccaataaaaaaaaattattcatgccctatttttgtgatatttttttttttttcaaaatgacattcaagttattgattggcatttacataataaaagttcaggatcaaaaggaaatataattattaattgtgacaatagtatttaaaaattcaatgtattttaattaagaaaaaccactcatgacaaaacttataaatactttagtagcccaatagcaatactcattaatagataaagcactaagcactacttcgttaagtcacacaataataaattaatcacttgtctcatgaacaaatctcaataggaattctttttaattgaaaaaaaaaaggtcatacaaggtacaagatttacttcccacattcattcatatataataaagtattttacaagacaatcaaatcagtcataaataacttttttttcctttctcttaacaaatcatgtaaattacacaaaataagaccttccatatggcttatttgaacagtcaaatgtacacacacagttttatggaacttgagtcaaaacctctggttacaccaaggaccgttgaagaagaagaagaaaaaaaaacaaaaaaaatcaaacctctccctgcattaccatgtcgattgtttctaaagtagcttagaagtgcctgcgcctgttagcaacaaaaaggggaaaaaaaataagtaaatatattggccataaaatgtcatacaaaactaatgattgtgtaatgcctgcctaccaaccttctaccttatatagtatatatatgcgtagtgaatacaaatattatgaggagcagcataccttttctttggcccttggagtgccagactgtgacaatgccaccaaaggcggaactgctccttcttgcagtaccatgttacaaaaccgactgctatttgtgcagagttgtaatagagcagctgctgcattctccttccctctagcagagcccagctcaacaacctcaaccaaaacagggatcccaccttcctgaccgattgcggtccttccttcggggattgtcgcgagatttgccaaaacagcaactgctttgtccaccatgccagctgctggatccatcagctcaactaggtacttcacagcaccagcttgaacaatccgagccttgttctcatgaaatattgacaaattgaataaagctgtggctgcgtctttctttcctctgggagttccattccccaataaatcaaccaaaggcttaatagctccagaccttccaatcctaaccttgttatcctcgatcactgaaagactaaacagagtggcagctgagttctcctttgcctcggggctcccagtttctaggacataaatcaaaggttcaattgcattggcaccagcaattgcagttttgttgttgtcattgattgacaaattcagaagtgctgtaacagcattttcctgaattttggcatctgtcgaacggagcaactcaaccaacaagacaatggcaccacaacttgcaataacaattctattgtccatattatttctggcaagtaaccgaagttcagctgttgcatctctttgtagtatcaattgaattgctttgtagatcctcaacaagcttcttaacttgagcttcaaggccagagagatcaggccttgtttcaacagcagcagaagaaactattcttggttgcaaacctctcagacggccgacgccatattgtttggcttctagatctcactggaagctgaggagcagcctgttgctctctgttcacatccccagaagcatcactgctgtagcctgtcatattagttgaatcatgtagagtctcactagcatcgcctggtctttcttgagaaaaattggaattagaaattgtgctggaagctgacacagttctactatgtctctgggatggctctccagctccaactgaatcacataattcttttctagatggcgaaggagaaggtgggccaactgaatctgggctcttttcttctgagttactggacctgtcctcagaactagtcagtgacattcttgaaatatctaaaacctgcccatttgcagtgatactagacaaggaaccttctgatgtagatcggggatgcaatggagaacttccttctcgattatttataccagatgagcttacgttcccactaggtgatcccgcaggtcgagttaactcaggtgacattggttggttggcccttggatgcggaaaaacatgtgtttctttggttgaaccagactctgcatgccccagaagatgtgatggttgatttaaacccatagatcttacgggatcaggcagcttaacatgattagactcacaccaatttactattagagccttcacagtatagttggttatcaaattggtgtgagctagagtttgcctggtcttaggacaaactgttagaccaagatcaatccaattcttaataaaagcccgctcataggtttgccctgatgccacaatcacaggatctgtcattagctcaagtgagagaggacaacagaaatcaggaggtattggaactgggctgcagctctgagactgctttattgtaattagtcgctcatgcatgcgggttacaagagcaatcatctgatcaataaactcgacttcgtcagtcttttcagattgctcagcattctccttcaacttttcaagtgctacagcctcaataagaatatcttggtttgacctcaagctaaggctctccgcaatcttaactaggatctctgagctggatccaccattctccacttgatcctttatagcttctttaaaaacttttgacatttgttcatttcccatatgcctcattttctgtatgcagggctgcaatcaaaatcatccattagacattataattataattataatcatcccatatgcctcattttctgtattagacattataattataggagattggtccacactttgaaacttgattgttcactgtatatgctaaaaataacttttttaacatccctatatattttatatatatatatgagagagagagggatcacttgtcttagactgaccccgtagttggacaatcaaacagaaggaattttcatcttagtgtaacaaaaaaggaaccaaggcagagaaattatgcactagccataccatgttaagatattcaaatttaaataatgcaaataacagctagtctgctacctcaagagacgttgaatcaatttcatccgggagaccttgatgagaagacttcagcagctggaagatgtccaagccagacgtgcgaatcttcaatattagcgaatcaatttgtagtacctaaataatcatttaaaagagaaaatggtcattaaatgtaggttgagactttgaacaaactgcagctgtctccatttctacaagtatagcagctgaaacagcatatagtgattgcatgcaactgataaaatgctacagagaaagaactacaaaccaaattgacagtttgacactataattcagtcaagttctttattcctaaagcagtgcttcctaatttaaaaccctgagaaaatgtaaagttatacagtcactaagagaacagtattgaaaatccacactattatagtgcaatgatttctctacaactactactttcagtgccacaaacaaccttcactttgatattaccaaaatttcttcttagctattggcaccaccactatgccgtgtccatcatctatctagtaaaatgagaaaatgtaaaaccctgagaaaatgtaaagttatacagtcactaagagaacagtattgaaaatccacactattatagtgcaatgatttctctacaactactactttcagtgccacaaacaaccttcactttgatattaccaaaatttcttcttagctattggcaccaccactatgccgtgtccatcatctatctagtaaaatgagaactccgagattaaaaaaagacgaccgacaaatacaacggaaagagaaataaagataaaacaaactaataactaagcactgtaaaagacattaaaagtgacgaaatatgaagtttcaagatcagattagaagtccaagatatttgctggttcctaagcatgaaaagcacctactctgatcaagcatataatcaaacccttggtgtttaagcaccaccactattatgtcagtatacgtaattttctttaaaaaaaaatgagtactttaactgaaccattccaattcacaaactacagctaaacaaaagttgcacttacaaaataaactttacttgacaaggattgccaattctcaaactgttcccgcaaatcatcaaccaagcaattcaggtcttcaaatgactttttaagtatttcattagaagttacttcagtgtcgataattgcatcaagaattgtcttcaacaactttaatatctcttctgccttttggtggtacttcagaattggttctgagtttatgttatcacgagatgataaatgaaaaaatgaagagatgttattaagaagcgcctttaacaatgatatctccatcacacctgcgtcaatatatcaaagaaataaataacacgtaagagaaaaagtaataacaataagatttcatgataatagcaaaaaaaatgcatctaataattagattacataatgacgatatcacaatataaaaaaaaggtctaacagaatatatctataaaacataacaagtgttagaagagggaaggaaggttggaaaattagcacaaatgacaacttatcagcagtgtcaatcattaaaattgagtaaagcattgtcgtgaaatactgactactaaatcttgtcatatcaccatctgacaagttcaataaaagaaaatagtacattcaaaggaatttacaacaagtttttcaggtaaaaagggaatgaattgtacctttcttcagcccaaacctatatatttagaaaccagagaaatcttctctcatccttatccttgagaaatacaaacagcatacacaagaagaaaaactctattcagcatcccccaggaaaaaataatgaatcgtcactatcaagatatcccccacagtaaaaggcctggagtttaaaatctacaagtgaaaatctgcaccgatcaaaacattaacatatgaattaccaaacatactcggaactgtatatgataaatatttcatgttaaaaataaaaacttgaaaaagaaaaaaggaaaacatgtttgagactttcaattagtatatgagaatatttgggttctccatttgaagacagcccgtagaaaatccactattctataacaagcttgatcttaagttcaaaccaggacagtccctgcttatgaatgttgcttagtgatagagatgcagcaattagaattttaccagattaactacacagacaaattttctagcctcttttaacaataaagttacataactgaaattgaaggtgaaaatattgttgatagataatctctaacaatcatgtttgtgtggcaatatatttgagaacaaatcaaatcctctctgaactcacctattattcttctctctataaaatcatctaagcttctatgcaacaacaagtatcttcaaccctaacaagaattccttttgtgtatcatacaaccaagtttttttttcctttgcaatccccttagcttaactataatttagtacatatgagaattctcttgcagttaaaaagtaaaagacaaacatttgtgaaccacaaatggcatgtagtatagattctcaataattaatttctaacgcaaataacatgatccagttccaattatggtatcccaaaattggagcataggcaattaaaaaaaaaaaaaaacgattcacgggcacgacagaaaaaactctttaatgcaaaacccaaccgagtaaatattatagaaatttcccaataactaaagtcattatttgaatcaattgtagcatttctaacccaagaaactcaagagcgataattgaaagttctaattctgaataacccatgatgagattaaaactaaagcatatgtaacctaacatctacaaattcaaaacaaattgattcgcaattgaaaagga

SEQ ID NO: 218742 - DNA, 3068 bp, Cannabis indica
ccaccaacaaggccggtatttccaccttgaggaaccacagccaagcatctggaattacagtaattaagaatttgagatacctgaaagaaaagtggggcaaaaatccacagaaggccttagtttgatataaagctaactatcaattacaatgtagaccttttgagagttcaaaatctgggatttataatgctttgatctaaatcataccaaatgataagctatcaaaaaactatccacccaaaaagtcaaattcaaaattaacgagttgttcaagatttcaaatcaaagaaaaaaaaaaaaaaaaaaaataaaaaacctcatcagttgtcttgggcagaagcaaaagcttacttgaacctctatacttctccatccaatcagtatttgcagtcaaaagcctatcttcatcctgaactacattcttctctcccaatattcctttgaaatactcaatgtcatcagagctcaacatcgaaaacgaagggtttctctcaggcactgtagtagaagctgagccaaaacacctaaactggaatctaactccatttccatgaacaccctttcccttttcaattgaagctcttacaggaactctgttacctgttaagtaacgaaaacaatggtgtagcttccaattttgataattcccagaacctattataattatcaacattacaaaacaatttcaattacctagaaagattatcagaatgaaatttcgcatttttcaaaattgtcatgtcatcacaaaattgaaacgatgatgatgatgaattagattgtatagtagtagtagcattaccggaaacatgcatggggattggagtacgagaattagggttagatcgaggggttgtgcatgaggagaatctgagaaaacgacgaccagctctccacttctccattttctggcttagactcacctctctctctctcaccttgttactatatttattaaagattgattttttttttcttttttaagggatataatgcattattgattaggattataaaatgacataatatttattttcaattagattacataatggataatattaaataaaatagtaattattatttatggatagtgagctgtgtttgttaataaattaatgatttttttttctcatttgtagtcttaattgttttacactttcctcacaattttattttgttgagacattttggatgagtttttagtgtcttaaaatatgtaaccatatttatttatttatttaaagaaaacacaataatttcattaaaatgcacaaaacctgtaaggtctcaaatcacgaaacgagcttagaaaattagacaactaaatctataagaagacatggtcatctaacatgtaacacatctaaaacaagagttggctttgcaagaaaatgagcaataatgtctttagatctattacaatgaaacatgaatatactaattaaaagtatttactaaacacgagaactatcattaacgaaatattaaatttattgtgttgaatgtctttactgtccacagcaagaacaaaccgtagacaatcagaaaaagttgtaacttgtaacagtcttgtactccaactaattaatcgattcaattacaaccgaccgtcaagcattaaatatacaattgcgatcagattagattgaatgttatttttgaacatctaattagatctgattggatgtttgatggtgtatctaaaaatctaatacatttaatatttaatcgaagtaattaattttttcatttaatttggatgagtaattagattttaagctgttatagataaagcatatattaaaattaacaataaaaatttactttttttttattaagttgaccctatctaaaaaatactaggtttataagattggataaactcaaattaaaccaatacatatacatgaaatacatccaatggatacaacctatccaatccaacattcaatgagatcagatcggagggaaaaatctaatatccaatatatgatttgatcggatctggataggtctaaaacattaaatgtgttccaattaacacccctaacctcaactgaaggcaaaaagagagcccatgaagcagagctttggcctctgcgatataaggcttaaaagtaccaacactcgaaaaacacaccaaagaagaaaacatgatcattgggattcgaagcaacaacccccatccttatttcgcattcttcatcaggaagcctagcattcataaataaattgacctcgctcaaagtcaggtctagtttggcagtggtcgcatcacttggccccagaggagaagacttattagacgaagatccaacaacactagcatcttggtacctccaaatatagttaatagctcaaggactgaccttattatgtgagagaatcttatgatcataaacaaaagtattacatctatgtcaaatgcactagctaaggacaatgaactctctagttcatgtttactcgaaatatccatacaagctaatgaaagttcataaaaaagagaggcgccctttagagaatcatgctcttttaggattcaattaaagcgaatagacttaagcgaagggcaaagctaagaagtctgaatttaaatgaaaaaagtgtcaaataaccctatcttgcctatcaaataagaaacaaagaatagacaatatagcactagcttccatattatcaaataactcttgaaccaaagaggagttccaacaaccaaaatcaaacttgagatcactaaccacttgcagatgaaggccacccgtgtaagaataagtccaaccaacatggtccttaagaatccaagcagcctcccaaatttttatagaatcttttgaaccaacaagccaacgacatccttacttcgaaagatcacgaccacacaaaatactcttttaaaggaatgaggcccgcttcaacaaatttattttttgaatttgttgaaagacaaattttaaagtaaactgatagataaatgctaaaaagcatcaataatgccttttatggaataccattaactattttgaggccttttcatttttacactttaaaattagttttttttt

SEQ ID NO: 218743 - DNA, 3738 bp, Cannabis indica
aaaataatttccaacagaaaagatatcataaacttactgttatatatttcctaagtcaatatcccttagttatcttagatcaaaagatctttatcctgagatggttaggttctagcttaactgtattatttgcgatcattgacttgttcgttaaaagtgaccaatggatcgccccaatacttacatcttgggaacatagtaatgcaattgagtggaactgctaatcatgcatatagaatctataacttctataattatatagaagtgaaatgatgattttctttaaacttggcttaacaaacataaatggaagagctctatttcagtaattatattgtctactgtaatatcatttataggaagctaagtgttttaaggataaaataaaattaggggtagaacggtaaatttatccctactagatgtaaatcatctatagaggatctataattatttagattgaaacaatgtataattcacagcgtatctatatttggaagatatagagcgttctatgtaatcaggagtacaattctgaatctatagtggagttaggaggaattaataagttaagaaatttacttggtaatttttggatctacttatttggagcctggttacataggctcatggtccccacattgtctgtaataatattgtcttgtaaactcaattaattggttttaatcaagcaattaggattctaaataagactatgtcatgtttgtgaattttcactaagcgagggcttaattgagaagaaagaaaggatttaaggtttgtttattaattaagagactttgtaaggtctaattaataaataagttaaatgacaattttatttgataattaattataatcattaaatagatagatttgacatttatagagttagaattaaaatatggtatctgtgaaagaaaaagataagttcttaaataaaatggtaaaattaaaaccttgtagggcccactaagggttcgaccatagggttgaattaagagccattattttatcttttttaattctatataattctaaacctaaccctagaagaaatcctataaatagaataagatgctgttaatttcttaacctattattagaatattttgtcagacaacttaaaaaataaagagagagcctctattttattttcgaatccttcctctgatatttttgaaacccctatagtgaattgaggaattgcccacacaattcaagtcaatactcaggcctttgtggaagattgtgtagaattccaacaattgaagaagatttaggttcagatcttgattatactctacgacagaaaggatcaagggttagagatctgaacggaaggagacattatattccactgccaccaatatgagatttttttatacctttatgtgtgttaaattcattgttttagaaaattcatatttaggatgttagattatagtcttataatcaacatacatgttaataaatctagatcttggtaaaataagttccaacatactagccctacctaattcaaactgcaacttacctcctaaaccaatctccttctgcattacttaaaggaagcaactctttcgagttgttacatagtaaacctcccaactatgatcatcttcgatcatttggatgtttgacatatggttctacgttagaatccaaaagacacaaattccctcccaggagttgtgcctctgtttttattggttatccctcgagcatgagggcatacacacttcttaatattgagaccaatcaaagatacatttcttatgatgttatattctatgaaaacatcttcccattctcttttactacttctccctcagagattgacaaatgcttttcccaagcaattcttccaaatcacaaaccagtgacacaggctccctgctcacaagaaccacacttggacatgcaacaaccctatgttgacctaaacaaccccctccggtacaagaatgggtcgcataattattaaaccagcacatatgacagattatgtgtgtcatgcagcttccaccacacatccaattagcctttttttatcatatattaaacttcatcctcattttagagttgttgttcttgcagcttatactcaaactgaaccacaaaattatgttgaagcttctcagctcaaacattggcttcaaagccatggacaatgaaactaaacctttagaaaaaaaaataacacttgaattataattaaattaccctcaggccataaagctattgactacaaatgggtgtacaaagtcaagtataactaagatggagaagtagaacgattcaaggctggacttgtcgccagaggttacaaccaaaggcaaggaattgatttctctcaaatatatgcacctgttgcaaaattcaataccttaaaaattttccttactttagttgctataaataattggaatatccaccaattagaaatcaataatgactttcttcatggggaccttcatgaggaagtatacatgaaaataccttcgcgatacaaggctcctccaaatattgtttgcaaattaaacaaaagcatctatgtcttgaaatgggcttcacaataaatgtatgccaaaattagtcacaccttatccacagatggctagaattaagttaacaaagaacaattatagggcaactcaaaccttggagtatatgtatatgttgatttgtagggtccaatagtcagcacaaaattgtgggtgttcttttttttattttgaaaataaagcgtttgatagagaagaaaattagacctcacagtcattacaaaggataatatcaggtattgaggagggctccacaaaacctgagatgttctgggcaaacgcccaattagccacattatgggcagtaaaattacaacaacgagaaataaatgaaaaattacaggaaaaaaagtttttagagagttgattacataaagaaacataattatcaatattccaaatagattaaagacctttcactgctttataaccaattctgaatcactgtccaccaaaatatagttgtggtttttgagtctagctgagtccaaagcaagatgacacgccgccgcctcaccaattagaggatctctgaagttgagcttggtagcagcagcccacacaacagttcgagagtgattcctagccagagccgcaatgcacatggaatctccaccaatcttggcatcacagttgattttgacccaatcttcatgcggaggggtccaagccggagaagccaccggagacgccgaagggagaagcagaaacataatctgtataacaatgaaaaatagaatcaatggctattgcaatgttactcgggtgaaagttatgtaccttgtcattacggtttttccatattgtgtcaacgatgattgaagcataaaggaacagcttgtcagagtccaccccattcgacttcaagttccaaagaaatttaacccaatcccaaactcgacccctagagtcagggatcgggaacacccccaaggggaggacctccagagatggtaagcaaagttgtaatagaggaacatgtgttccatcgattctgcagtttccccacacaacgggcataagtcatcatcaatggggattctccttgccagtagaccacggacaggcagagcattcgaaaggataccccaccaaagaaatttatgtctttctaaaattttggagttccaaagtttgttccacaaggtcggcgcaaccacacaggcagggg

SEQ ID NO: 218744 - DNA, 3030 bp, Cannabis indica
  modified_base (127)..(127): a, c, t, g, unknown or other
agttaacttggttgacttaatttttttgtttttttaccgttcgacaattgtatagtgcaactcagatacactctaaaaaaaatgatgagtttactttataatatggtggtgcttgacattattgtanatatatgttatgagtgagtggttaaatttaatgatttaaatatttcagatgaatgaaatctgattgcaatatttttttatataaaaataaataaaaaagtggctattgtatagtatatgtgcgtacgtattccattgatgccgaaatttggcaaataactagcacactatcggttaagagcgggcctagtttaacatagaaccatagattatgaaatattgaaatgcaaaaagtgctcaaattcaaacctattctcacctcaaatttagcattaatttgactttagcacttgtattaaaaatgctaaaaaaatttgcatatcgtggctagtaaagataaaggtacatttataataataataacaataaagttttgctcgaaaacacaaaaggaagaaattgattctttccacattgaattgctcaatcactataaaaacaaagataacaaataaaagaatgtcacccatgttacaaagtgtagtacaactacaatcattagagataaaagaattcatagggattattcattacccgtaatttcagctccctatatatttttatttatataaatgtatgttgatattgaaacacgcatttcaggatttatacatagttgacattttatttgctttaagatcaagcctattagtttttatgtagataaatgcacaagagaggttggtgaagccaatcaatgccaagcattgacaccagtcatcatggaccttatctcaatctttgtcactagtagcatttgcaaatccacactcgaaactaggatgatattatgaaaagtttatttattttctctcttttctaagctttgaagcttttcttgtactcatcgatggcgagtcttatctcaatcccaaaccctcccatagccaaagtgattgaggagaaacacgaggttggggaagcatttcccggaaagctatggttatctaacatgtcttctaaataaaatgtcacttttaaggcaacctaaaatgatatcaggaagatttgaacttccaaaaacaacatagaaaaaacgacctaaaaagacttgcacatctgtcgtgaaagatttttctatttgtgtgattgctaatcaacttatgttttatttcaaaagctacaagtgatgagtagagtaattcttattacaatgtgagacattttggtcagacaacacagtaaagttggtatcaagtcggtcttgaaacacttttaaacgtgcagcttgatcttgctacacagcttacattttggtcggaccactaatgctgcattggtcacggttcttgagtaattgcagaaatttgagtaggatttccagtgctgtagaagaattttgagcagtatatactcattgtaatgaggctcgaaagttagagaatagttcctaattttgacagcgccaagcaacatgatctggatactgggtttacaaactaatcaaatttgtagttgacacatatacatatagagtttgatgatgaaattcgagccttgttttttttattatagtaactagtcttcaatatgcacagcacttgtacttgctctcaatttgtcttccttcctcggtcctttctttcgcttcctttcagattgaggttctttggctttcaactcatgaccgagagacctcaatgaagcagctagatgttcatttctatgagctgaaagaatatcttgatgagactccattttcagaggttactttgttttttaaaaaatcaatcatatatatagtgaaggagctgaaagttcctgcagctgcaggctttcaaaaactcaccggcaagtatgacatcttccgtgttcacagatttacggctggcatgctgcgcaaatagctcaaggtcttttgctaactgttctgctttgcggcaaagataataataacaacaagaaacaacatagaaccattactaatatcccataagatagtacacaagcacttttagaattacttgcatttaatgtcacttatcaaagcctaaacccacaataatgcctagttcgaattatactgtttggtggtgcttttcaccaaacaagagctatagtccttgattggtatgctgctaagaatgatcattcaattaccaagtatgctatccttctcctttgaagaagtatgaaattgaatgttttgcaatagttaattagtgtggcaaacatgaaaatgagctatcttccatttaagccgttggtgagacccaactggatttgaacccatactcccccaaccacatgggctagctaagtcatcttcaacatcacatactaaaaactttgataaatctcactggggctgttccagcccaaattatcaataaacaaatcaataaaattctggtcttggtacacatgatttccttccaatctccaagcaatgaaatttaataatatgaaataaattaaaataacaaacaaatttgaccctgataatatgagacaacatgttaatagaatagagcctatcacattcagaacccccaataacatagatataaatataaatgataagaacccattctcggaaaaggaaaaagcgacaataacagaatccagtgggaacaatacctgtgtatttgaaagccaaatcgccaatgcaagctactacggtttcagatacttccatgtcattttgcttcgctgtttataggattagaatcaaatgtgaattgaaaagaaatggatttaaaagaagaaggaggaggaggaggagaagaagaaggaaccttgggcttcggcaatagagatggtagaaagcctaaaccggtctcgcaacaactcggtcatcgaatcgtcctcctccgtgtcaaccatggtttactcgagccttggggtcttgccctttactttttctggcgccaaaatgaaagagggtagagtgaacagtgaaca

SEQ ID NO: 218745 - DNA, 3316 bp, Cannabis indica
atatatacacatatatataagtataatcaaatagaaactagaagaagaaatagaataccagatattctatattaagcacgctacaaaggatcttggagggaagattaaaaagagggagttgctgattcacttcctgatttgtggatgcttccaactacaaaacccagaagttttcaaccgaaaaaaacgatttttagaaaatgcccaagaacaaaggcagaattttgatccatataggaataatgaaaaaagtgtgatgggataggattgaaaacggagtttacctgttccatgtgaccttgaggaaaatagaagactctctctcctggccgaggaacctccaccagaggaccggcacaggcgttccatagttccttgaaaatactgtcctccggacctattcaacacaaacgtacgaaccaacaaatcttcaataaggaaaagtaaatgagtctaaaaacttcatgttcagactcagcttggtttctgagactaggaatttgggaaatatacaaataaaacactacgaactccaaaattgaaatcttaaactagaaatgaaaaatgcttaaccaagttcagctcaaaagccaacatgaagccaacaaggggacccaaattttgataaatttgtttccaacaaagtttcctctgtttttctatccatgtatttttcataaacaaaaatctatggcatttccattccatatcctcaactggtctttgtaaataatctatttagtttttttcgttaacgaagctgatcaaaacccagtaacaacacccccacctgtttcggaacgagaaatcgacgagccaccttcaagatgagccattcaaagcccagacacccccgaaaaacgacgtgtcgtaccagagcccagaaaaggatacgaaaatagaaaaaataccaagaaagcaaaaggcgcgagcggataaaaaagacctcttctttacgcactataacgcataataggctaccccatttgagaacaaggaagacccagatgaagagaagaagaagacgaagagtccaaagaaataataaagagctaaacagacaggacggttatgccaagcacactcataattatcagaagtcgtacaattatctctccttttttcctttttctttggctctctgtaacgactgtgatatttttaatggcttgtggtgcagttctgctatctgagtctgtccctattcaccgcttcagttacgaaaaaccaaaaccgccatttcttaagctacacctaccaatggtctttatttgtattttcagagccaaagtaatttccttttttctttttttccgggtatcctctgctgctgccgttgtggtctgttctatcttgttaagtaccttgaatcgacgttaccaaatccccaaaaatggctttctgtgagtcatatacataatactaaatatatataatctatttcttttgttctttctctttctctctcttaggtttctttggacattagaaagaaacactaattcagtggcttattatgcgtagagtgacttagctcacatcctatactgtgctgtgacaatctctgcagtgaccccaaaaaaaaaaaactgcactcatatttgggccacttcatctgaatcaatatcaacatttcggacccaccaagtcaagtactacaactctgtacaaaataataaattattactatacattgtatacaataatacatacatcaatattatgatgttattttatcagttctttttttatttcttttgatcttttcgaaggtaattataaagtaatttaaggttaatggactcgaattattgtaacatatgtatgtatggaaatttaatggatgatgaatgataataacgttttgatggttgaaaatagagtttgttcgatcatagttacaataaattagcactacttagaaagtcaatgatagtgataaaataagaaatgtttatgcattagttacttctagctagttgtgtatgtagtgtagtgtgccttgtgagatctattaataatgtaaggtttttcttatttgtttattataataaaaatatgtaatttatgtgagaatttataaacaaaatataaattaagtgaatgacaattattggtaaattcatatatatagaagaaaaaaaaaaataacattttgaaacttcaatcaatataaataaataaatatgatctaatggtgggaatcgtattatatctccaatataggtttgtaagtttttgtttgaatattataatgctattttttttataaagtgtgagcactcacaataaataaattataatagctaaagttaaaaaaaaaaaaaaaactcatacgagcttaatattagagaattgctaaagggtaggtgtgaggtgactagcactctttttagtgtcataccgctattgatataattaaatagcgcgtctcatataatttaaaaaaataagttttagagaacatctctaaccaatcataaggtcggacctatagaaggtgctgggcactggtgcctaataacaatactcttaaaattaatcccatcaaatattttaaaacttcatcccaaattccaagaaatttttcatgtagctcaataaatataagagagttaaatgtattttatatatttttttctctttaattcctttaatttttgttttttttttttttgtagtaaatcttttaattattttttattagtttactcattgttgtatttttttttctaaattcaaaatatatgtaaataaaaaaaagttaataatatagtataatgtaaatgtaagaggtaaaataaatatgtggcataataataaaaataaaatttagtggggaacaaaattaagaatataaataaacatattaatttattgggaagaaaaactaaaattttcaaaattttatgtataagaaaattaatttttatatattcaaggggcaaatgagcacataaagcatctctaatggtaacatcttttaagaatgttaaaaatttacacattatctaaaaatataatattttactttatttctcttccacatcattttggcactcttacttctaataaaaacactccaatgtataagactctttaaaaataatataattatgatttcacacattattatttaatatatatcttaatttttagctacattaactttttagcttcaattttttattaaaaaaagaatagcatcaatgctacaacatagcatccatgcaaatttctaaaatcatatttttttatctacaatggtataacatcttaatattttgccacataatatgttcacctcactaagcat

SEQ ID NO: 218746 - DNA, 7209 bp, Cannabis indica
tatagtagtaattatttacaatataaatatcttgatgtgattttttttttcctctctccatctcttttatagttttatctctaaaatttataatattattttatttattttttttgaaagggatttataatattatttcaacttaccttgatttgatacgtgagaagcacatatttatttaaccgtctcacagaaaaataacgaaaacaaaaatatcatattaattttaactaaactctaaaatatcgaccaattttatggattactataaaatattcttatattatatttaaaaactaccatagggtatataagtttgttttgttaatcaattttgttggcatacaaacacttaaatatatcttttatttcatattttatgatcaaagatctacaatatatttaagtacttgaattgtaaaaactattttatttgttaatttatagtatgaaaacaactgaatccatatcacttgtttggaattgtgtagaattgaatgagtcgatttgatcaattgggatttaatatacatagatgaatatgtatcttattaaactaactagtaattgttactgttggctatgagaagaagaaaaatagtaatatatggcaaaaaaaccacctggtcaagaataaccaacaatatatttaacaatgaatgatttttcataaaaaagataacatgtaaagaaaataaaagaaagaaaaatcatctcaactcacttgatgatattttgcttcctaaagaatataatatagttatacaagtttatttaaagattcaaaaaacaaaacaattttacatttttcactcatcacccaccacaaagtaactggaagccgatttggagacggagcacaactcacacgaacagggtaataattgcagcgttgttacgttaatatcttaagaataatcttcgatgaatttaagcgcctttgccattgctccatggcttgagaactgctacgacgatgatcacaacgatgatgagaaggattatgattgcaatgcacatccatttccttgaattcttttgtagtgacttagccctttgaagagcggtattcccttgatgcacatgatccacggcacttgaaacctgcgagagatattgcatgattagatcatccaaccaaatctgtcatccatgaccaagaagaattctctcgaaattatgtacctgtgattctatgttgtcaagcaaatccccttgtgcctccaccaacaccgccatgtcaaggaatatctacatataataaccgacacaattcagctcctgaatcaaaacaatgaatgccctctttgtagttggtacaatctaaaatggtctttcaatccaaggtatcttgtttaaacattcttaatagatcctgcaagcttttaatatgccattgatgaataaattcaaacttctcttttccgagttaacaaaaattgacatctttggctgcaacttaattttgtttttaatttctagatattacattattatcatttctgattattaaaagaaagaaaatgttacactgcaactcaaagcagttgaatcggttacaacgacctacttcgagcatctttttcacgccatctgattgccttaacaatatttaaaatatgacaaaaaagagctaactgactatgagctcagattttagtaagagatctgaaacctaggttgtgtgctgtattataaaacaaaaatgacattctcaacgatttggtattcatcacttcaaaaagggttataaatacctgttgtagatcaagaagttttctctcaacatctctcacagcatcatggcgctcttgaatttctgcaagggtatccattatctgcaaccattatgttcaataaaaattcagatgtggactacttgctaatgattaggttaacaacagatttcagtaaattgaattgaggtcaaaccaagataatttattcatactggaccccaaacaacgtccctaagttattcaacttgtttggagaatattggtaagggaaatgagaaaaagaaacatacccggcctcggccctgttcctggatagccttctggaatatttgttcactgtctcctgtctcaattaatcgctcgattgtctgtatacattattaaaagattagaaatgaactttgaatgacgtaataaatatttatgattaagactcattatgcttcacctcttcatcagctcttgtccccgttactgtgaccatgaaaaccgtcaaaaaatgagaattgcattaagatatatcatcaaaaatgacaaaccaagttgcagaaataatatcagaaagcaagatcagaatagttatattaacctgtaaatacacgtctctcaacaacttctcgatattcttgatggatgttttcccttaaagtctgaaaaatatagttagaatgacaaagaaactaagatgggagagaaaccaattcaataaaaggtgtttcatcttctgtacctgaaactcagccatcttatccttcaatttcttttttagggaactgcaacaaaaatggttcacagaaaattttagttgatattcagaaatctatatgctgaaaaagtacacctgatgatatgttgtaatgtagagaacaagaaataaagcaaaaaggacaatgaaatcctgttagccttttttttggcttcgaaagctgccaggatgctaagtctgaatttttataaactggggtttgaaaaatagaaaacaaggtggtcacatgtcacacaatccttcctgtttgtaggtcagtctaattaaaattaagttatcaaaatgattagggaaaacatttgcgttgatacttgttacaaaatttattgttatcctatgttagtttgtcttctacattgatttcggcagtaaggggtataatcaggcaagtcttgcatgcataagaagttaacacagaacaatatgccaagtacctaaaattcattatataaatgtatttcttccctgagattaatttttggcagaaacctttggtgatctctcaatttaatggcttttatatctgattctacatgaatgaaaacataaagaagcaattcaggagggtgacttacagagttgtcgacattcttgaccgatctacacccgtaccctttccacaacctggcttttgtctatttgctaaattctgaaattaaaagagaaacaaaccaaattagtgaccttaaatttaaaggaagcctcacaaaagcagcaacatgttttacctctcggtcaagttcttcgatttttaacttcactgatcgagcaatctttccaacttcatcaacatccttctccattcgttgcttgattgcttcaaacaattaatgtagttgttagttttaagagagaagtcaagagctaaagtcagagaagcatcaaaggttgagtagaaatctcaaacaccaaaaaaaaagtgtttatttacagcagtcatgtaaaggtgtctttcttcatggagaaagcacccagctctccctcaaataaagaaagaaattatggaagcatcaataaaaacatgagcaaatgattcataaattggtttgcttgttttgtacatacaatttaactatcagtgttctccaaatacagcttttatatataagatactatcagaattactcttatgttttctaataagaaatgatatattatgtatcaatataaaagatgacaaataatcatcattttatagtaatatgacatgatatacagggcaaggcataaatagcataaaatatgacaatttacttgatacgcacactacaaggtttcattacctttcatggcaggagccttggtaacggccttggactcctcatgtgcatcctacagaaacattagctataaattacttcaaattgtttgaaaaaaaaaaattacatgacattttatgccagcaaagcatcagcaaaaacaggcattgtaaaatcatctatgctatatcaggtagccccattgctttatgtatgtcgctctggtgaacaaagaagctaagctgactctactagacaatacaataaaactctttgttgcgtaattatgaaagcttacagttgattatctatgtctgtgagatatcaagtacttgaggagatgccctttaagtaagttcatgacatgtttaggaaagtaagacatgaacattgaacatcctatcaggtctagattgctaaacaagctacaatttataaaactttggaaaaataaaccaagccgaataacagagtatagctatctaaaagaaagttaagaaatgataagctaacatgcataactcttttcatattatatgaattaaacaaatgccatatgttcgtgtcaatatgtcggtatggtatgagtatatatattcattttggcaatggtatgcgtatattaggccttcaatatacctgtaattttctgagtagcttatccagcttctcattttgtttctcaatctcctgaacctgtaaaaagaaaagaaaaggaaaagaacgtgtgagagacaaagagagatcataacagtgtcagttttaaaaagaaaaagaaaaacgggaagaaaaaaaaggacgtgacatcacattttagacacaaactttcattgaaaaaagccaaaattgaagaaacaaaataacattgcccaggctcatacgatgaccaaggcctgtgggtgaagatatatatttatatatattgaccttgtttggctaatcccggaggttgaatccatattaaataagaagtcatagacatagaaccggattgatggacagataatagaataaaacttttacctttttgaagaaactctccagtccttgatctcctgtattcatgggagcttgtgttcctagctcaatatctccatccctagaaggctgaccccgtgggatctcaaaagaatcctgcagtcattaaattaaagcacagatttaagagacttatttgagttacactagtttttagcatacatttaaccgaatttagtgtagttgtaaaatgaatatataaaaataattgagtgagtacataagtttttgcagcgagcagatgccgacattcaacataataaggctcgggtagtagctaaaggctatacacaccagtatggcgttgattttctgaacacttattcactagaggcaaagttggttacagttaagatgtttactttccttaatagcaatccatggttggtgagtttgttaagttaatgtcagtgacccttttcttacatggggatcccttcagagaacactttcttctcatcacaactaagtaaactctttagtcaacctaagaccctccactttctaactaatttaccaaccaaactaagagaggagagaatctaataacaaaaatttgttattttgcaattagattctctctcagcaatttcttattgcccaagtttcttattcaaaggtgagaatagagtcaatggaccaatcaattctgatttacaagctctatacattgtattgtttttcctctttacaaattaatgagacaataacatgaaaaagtcacaacaatataaccaaagaggatttaacaaggacatttcaaaatccagaaaaagcattctaaacagctaattgattatgaatttaattctctcaacaaatttcagctctccaaattactcagtgatcaaaatttacaccaccattttattcagtcataaccacacaatgatcagagtaatcacagctatcaaaatcattcaaaattgctcaaatacaacaattctaagctctccaaccaaaacaaattccacaacccaacaattaaattttaaattttgctaaactacagatccacaaaatccacacacaaatccaaaccggaccagatcaagacaaaattcgaaaaaaagaaaggctccaaacacgtccaaacaaaccaattcccaaaaataaaaaaaattgaaaacccaatcaaccaaaaaaaacgaaaaaacaaataaagaaggagaatttaccgttaggaggtcgttcattgtggaaatcagctaccgagaattggaagatcaatgctgctgttttgtgaaattaagaagagagaaaggaaaagttaacgtaaaggacctggttttgtttggattgaagaggagagtgtgattgaggtggtgaagaggaacgcaggtgagtttttagggttttccaggagagaaggaaggaagggaacaacgtgggttgctctctttctctttctctctctctttctgtgtctgtgttggaatgttgaaaaaaccaccaaagcaataagcaaagtaaagaaagagacagagaaagacagatcgattgattattggaccctcaaaccactaaacctttccttttctatttattttaaattataatttatgtttttctaaatttaagatttttttttaattaaaaagaacaatttttaaggaaacaggagaaacttggaatgagaagtgttaaaaagaacatgcggtgtctgatatctttttatgtgttaatatcgctattaatctaattaaatatcaggttatatatagtttaatataataacttttaagaagtatcgcaagacgatacgtgtgctagataatattagtgccaaatagcaatattcatttatttaaaatgagatatttactttttaaattgttattttaaacattaatggaactaaataatttataatatatagttccaaaaaaaaaaaaattataatatatatttcatatttggtatgttttaaatatattaatggaccgagcacaagtggtttataggaggtttttgggaggtatgtgtgaattctggaatggaatctcagcttgtgtaatttaaaagtatatttatgatttgtttcgataaaaatgtatagagaattgctaaaaagtattattggtgtttagtatctttttctatgtaataccgctattagtttaattaagtattaagtctcaaataacttaagaaagaaaaattaaagaatatcgctaactaatcgtatgacactacctatagaaagtgttgggcacactggtgcccaataacaatgctcaaatatatatagagttatttattaatggactattggttagggttgtaccaaaaaaattgtaaaccgcccaaaccgaataacccgcccaaatcgaaccggaaaaaccgataaaaattacaaactgaaataactcgaaaaaattacaaatcgcccaatctgttaattggg

SEQ ID NO: 218747 - DNA, 5534 bp, Cannabis indica
ataaaaaaaaatattcatgatcctatttgtacaattttagaaaatacaaagtctattttattatttaacaaaacagaagtccaattggtaacttttgtaaaacacagagtacaaaatgatccaagatagtaaaaatccaaggccaagcaacaacaattcgaggttttggcagaatctgcttcaatctcagaacttcttttggcgagctgcttttgggattttgccaatctgcttcaatctcagaacaaaacatgttgacatctctcccatttgctcaatttgtcgctctacttcgaaaactgcatctcatattttactttcttgtacttttgcttatgttgttggcgtaatgtgagtctacctgctggcatctctcccagagattctttctcaagctggcttgattccatctttcagtatcttgataccgaccatgtctgtcagatggttatggtgtgttggtctttgtgaaaagcaagaaactctattgtttggaagaacaaagttcttactattgcaaatgtcttagcttcagcacgtatgtatcttgatcattggctaaaagctcaggacaatacatccctatcatccatcaattttgtagtagtggtgatgaggctaagttatggactaaacttggtacaaatacaatcaaaattaatgttgatgctgttatgtttgctagtaaaaacaaatttgaatacggtatagttgcaagaaacaactcaagaatactcattgacgctaaagttggctggtgtatagacacttttactcttgaagttgctaaaattattggtattaaggcagctttaagctgaattaaaagatatggatgacacgaacacaacacgatgatatttttgtcactcctacatagagttaaatctaacttttttatagcgcactcgaagcgcgggctattttgtagttgcattatagatatcatagtgttatttttttggttgatttaaggttaatttttattaatttttaattgttttttttagtagaggatatttttataattaaaaattttagattgtaaaattataaataaaagataaaaagaaaataataaataacaatattatggtaatttgagtgccacgtgaaaataagaagagagagagggagccagtcattattaaataaataaataaaaagaaattccatcatttgcttcaatttttggctttgagattacaatttcagagttcagaccatttggaattggattcaatttgagtcggagagcagatggccatgcaactccaatttccatacggtggtgtacgattacgcgtctcacaaccggcgcaccttagcagaaggcttactccttttgctaccctatctcctccccgagccgatgatggcgttgactgggtcaaagctacttcgaccttcttccagaaagatacccgacccattatgttatttgatggtactctttaatatatattactacttcatttacatctgtgatttcagcttattataagtgtaataatttatttatattatatatataggtgtttgtaacttatgtaatggaggtgtaaagtttgtacgtgataatgatcgaaataggtgagcttttataaataattatttgttggaatttttcagtttcaaatttataatgaacaaattactaaagggaatgtgttaataatgacaggagaataaggtttgaggctcttcaaagtgaagctggcaagaatcttcttaggaggtcaggaagagcaccagatgatatatcaagtgttgttcttgttgaaaaagataggtaaactaatattcattttgttgttattaatgctaaatttattgcccaaattaatgtttctttgttgaatttcagatcatatattaagtcagaagctgttttaaagataatggaatatatagacttgccttttccccaattagcattcttcctacactttgtgccactgtaagttttttcattcaacttaaaaattttggtttcgaaacattgaaaatagacataatttgaaactattttttgctttgaattgttgcagatttgcgagagattttatgtatgacaatgttgcaaacaatcgttacacgatttttggtcgttcagaatcatgtgagctatagattatatcatcagtaatttctattgtactgtatgtggaaagtacctaaaacagagatcttgctctgccaatactatattgctttgttttgtattgtatgcaagttagtttatgtgtttattaactaatacacgattgaattcagaaaggcattgaattgtatactaatttacaaggaacaagtgatatttatatgatattcttattagaaaatgtatgtgtggaaatactattaatctctatatattatatatatgatatagtagcatgagagaaaaagaaaaaaaatggaaaaaacagaaagtatttctctgttgtctattgttgaactacaaagcagtattattattgattggccgaacgccatatagcttaagcaagccatatgcatatctgcaagttcaagcaattactattagtcaatgtgattgtgttgttttcacaagaagaggaaatgtgtatagaaaaactcaccccaaaagtaagactagcaaagctgagatccacaagatgtattgataacatttgtgtctaggtttgcgcttgaaattgtacccagcaggaatgtatttacggctaacgtatccaaactgaggacgaatcagaagaatgaagccgagtagaaaacccgccatgaagcctccgatatgagctgaattgtcaacgtgagggagaaatccaaaggccaaatttagaatgattatcagaatcagagttaataaagctgcacactgaaaaaaggagttagaacttccaatcaatctctctcacacacacatatcagtctaattgttgaatcaaaatacttagggagcgtttgattggaagtaatgaaatggaatgaaaacgaaaagaatcaattttttattttattcatttgtatggttgtattttaaagtattataatgtcatttcaatataatgatttttctaccattttatattcttatattttcattccttttaactaaatgcaatcttaatttggactcaaatggttggtgtagaaattatacaagtaaaaggggttatggtctctaatacattagtttcttctcttctattcaaccagctagagagtaatgaagggagttcaattaagtatggattaagataagtctcccattgttgtgtgtatcttcctttgaatcaacaaaggttggttttgagaaatatggtacagggttttagacagtattgaaattattggagtaacatgcttagaattagaaatttgccttgtttgcataaattgtccagttagtgagaagttcagataacatggctcccaacaatccaaacagagcaccagatgcaccaactgatatggttggtctttcagatggatcaagattaagactagacaataaacttcctccaaaaccagaaagtacatacaagattccaattctcactgccaccaaccaaattcaaaacattaagaaagtatttcatgacaaagaataaaaactttgcagacagacaaaatccagaaatggtttcgagttcttacgaaatccaaactcctgctcaaggcggattccgataaagataaggcttaacatgttggtgagtaaatggacaacaccagcatgaagccacatacaagataacaagcgccatacttggtgatgttccacaacaaggtttctatccagagcccctaattgtttcagcctgccaaaatttagaaaaccccatttggttttttcctcaaaaaagaaaacaaaagatgaaaatgaagaggtgaaaaattcttacgttgtggttgtagggccaatgagaggattttctttaaagggttggaaagaaaacctcttcaaataatgatagagaatacattggtctagagcaccatcaattgttgaaggacaatcgtttaggtacatgctgtacacaaacatggcaatgttggccaaaagtatgagaggtacgagccaagggaccatggcttaggtgttggtggacagaattgtggcggtggtggcggtggccgggacttattatgatgatgatgatgacccttttcaatgtctggcggcgatgtagaccacttccccatagcgactccacgctgcgaggaagagtcagaaagagagatgggaaagaaagaagaatagaatagagaggtttttttatttggatggtaaagagagagttttgcaagggagacagttaattcaggtacttttttctgctatgacaagttgtgaaattaaatggtgatcctttaatgtgttacattataaatagatataataattaaaacacatggaaagagagagctttaacattattggattttgacctcctacattattggatatgaacattttaacattgtagccttcgaaagaatattttaataaaataaaaaaaaaaaaaaaatcatctagctgtgtagacaagaagagggtttaacagttccagtattagatccataagcattgttgcaacttgacttgattctcttgagtgattttgctggtttcaatcgtatattcttgaagttaatattggtacaaggcactgatttgctacaatttagattcatagccacttctgaagctgatgtcccaattgccccttggaatttcacatcgtctatatgaactgccgtgggctgcattcaatacatttatttcacacacacacacaaaaaataattatacattttgaaatgaatataattttgaaagaaattaataatatagagagatgcatattttctacatggatcaagaattgccagtctaaatgaaaaactagagtgatacaaaaagaataatctcgttctcattaatggattttctatctaaatggacccatttatcttattaatattttataataggtgtttgtatttttaatatattaatatatttttataattttttaaattatgttttttataataattagtacataataaataatgtataatattttaatttttatataatttaataatttatacatttaaatttttaaaataaattttatttttatgattttctgcctctcattaagggattttctgaccgtctttaatgaaaaataaacaggaatagagattaaaattttaatgagaatgagaataagaataagagagtactttaagcaaatttcccgttcctcatgtatccctaaggaaataaaattaaaagaaaaaattaccaagtctgggcagccatttggatcaaaacagtagtgttggtcaattatgattggattttccacgttgtggaacgttagatttttaaatccaacatgctgaaccattccttttccaacctgaccaaattcataattaacaaaaaaaaaaacatggacagacatattaataaattccaaccagaaatattaattaaccaaattaatattaataaattttaatgtata

SEQ ID NO: 218748 - DNA, 2791 bp, Cannabis indica
catctatctagtctattaatatgccacatcagtataaatactacaaatctaaaatattactagaaaattaaaaaacttaaatattcctctactagaattttagtattttacaatttaacttattttttaattaaaaaaattattgcaagattaattttttttttattcacgttgaattgtttatttaaatcagtcaattttaaaattaatatatatataaaaaaaaatgtaactaattttattatctttacctctggcgtaattttctctttaattttatatataataagcatttagcatgtgtggatataagaccgaattcgagtaattcaatataaacatattatatatagtcagtcaagtgaagaggaaagaataatgaaattaatagttaatttggactataatagtttcacatcttaacatgtacaatttacacatattattcattggttaactgggggactttgtaataaataataattatgatatctggttgatataatgaaaaagtcatggtatatatatgctaattaattacagctggcctttatttatagctatacctctacatagcaatagctaaacatttcctggaagctgctcttaaatctccaaggaaaacgacattgatcttatataatcatgccaaatatcttgtcattataatcataattaatctgcctgtgattctctccacttgtataaaaaagagaagtagtgtaactccatctttctctctatatttgggacaataatttttcccacaaaaagaaatatatatttagtatattttggtgagacaaaataatatgcaatatgcatgaaagtcctataaatagaatatatgattataataagttttctttgacacaaaataaaaataaaatgttgtatttctaaatttatttatcaacttttgaaaacattaataatttacttttttgtttaaattatttaattttaaaatcctttcattcgattgtcaaatagagacaataatttaattatttggtacttatcgattcacttactcgtggtaaagtgaatctcattgtgaagcgagctatttttgagacagttactttattgatagtatcgtcttaaatgaacccagttccagtaccttggtacgagtactgaattcaagtagcaaccatagtgggttaacttaattatacgtctcgggttctagtgattcaataacaacatatggtccttcccaagaaggtctgagtactcttactgttgcattttttgttttcaagaatactcatagtataaaaccatatctctaggcttaaatttcttatctttaaccttagtgctgtagtgttgggtgatcctttgttgatacacggccttccagagcttagacttctctctaatttcctcaattttgtccaaaagctaagcagtagttgatgattggcgtattgatcataagtgagtctctgatgtgacaatgatgtgagttctacaggtatatcattgcttgatatttgttgatcaaagtgaaaggagtgtgactggttactattttttcatggtgcggtaagactacaacaccttgggtaattcttcgagcagttttctttagcttgctctaggcacttttaagcgtatcttaaggagtttggttgacaatttccacttgcctattttttcgtgggtaagcaactgtcaaaaaactcttcatgattctgtgccttttacaaaaattagtaaaaaggtcgctgccaaaactgtgttctattatctaacactattttctgtggaagtatgtagcggtatatgatattcttgactactaagtcgagaattttcttcgatgttatattggctaaaggctctgcttcgacccatttggtgaagtaatctactgccattaccgcgtattggactccgccttttccattaggcagtgagactatgagatcgatttcccaaacaacaaatggtcagggagtttgcatactcttgagctcgtttgggggcagccctaagtaatttagagaattattgacacttgtcacatcttttgacatagtccatcgaatcttctaccattgttggccaaaaatacccttccctcaatatcttttttgagagactttaccccctagcgtggttgctacaaaaaccttcatgtacctcgactatgagtagtttttcttcttctttcgtgacacaacacatagacgagaatcttgaacggagagctataaatgaggtacatatgtattttagcccatgtttataaaattgaactctaaatgtggtgtataatgtgatttatatttgacacatgttaaaagttgtactaaatttagtacaaattaaatttaatatagtttttatatactttcaataaaaatttaatatttttgttaactcgtttacacatttttattaaaataaaatttattttacccttagtgcattggaacacaattctaaaattaaaattaaatataacactaatttattttttgagctaaatttaacaaaatttacaccattcattaaaaattatctaatctatatgtattcggagtcatttctctccctaaccattttgaaactaccatatatatttgggctgagatgcaaaatgaccttaaatttgaaaactaagttagtaaatgtcatcttttaaaaaaaattaagaaaatgaccaaacataataaattagctaataagaattataaaaatacatttatcacatattttttaaaaatatataataataataaataagttatatgatttttttagtattgcatattat

SEQ ID NO: 218749 - DNA, 9018 bp, Cannabis indica
ggaggctttcaatcggggtcattcggggagtattcaacctgaagttgtagagatgattggcatcaaagaagctttaagttggattgatcggcacaattggggacaagtgattttgaaatcagacaacttggtatgcatacaagttattcaaagtaaaatctctatgtcatcttcttttggtcttttggtacacgatgttcgtgcgttgcttttatctttagaaaatgttgatttgtgttttgtcaaacgattgacaaacaagctggcacattgtttagccagagactcttgtttctttccaggtcgtgtgcttcagttggagtattgttcctctgaaacacgttctattgttcttaacgatttaattagttaatgaagataccgattttattcaaaaataaaaaatagagatatgacaccagtagttgccttttagcatttatctgttctaccttgtcgattaatgaatgatagactcttcaatggctctccaacgtgtttgaaacgttcaagcaacactacttttcaaaatagtttaaagatcagcttgagttgattcttacactacaacttgtttgtctcacttaatccaattcatgtccattaattaataattgatagcttaattttgagttgactgactttaaataaaattccatcacatttttctattccataacaaaaatcatttcaagaaaatttcaatcaatacttttctttcttaaacaaataatgaaaatattgtgattttgtgttatgaattaagcctccattagcaatattggaaggggaatgagtacttaatgttaaccatgtcatgattagccaagattatttttgagactaattcaaaaagttatatttatcagtcacaattttttttgttgtgactaaaaggttgtaactaaaagtagcatttttgcatagcgtgtcaccattagagatgttctttaccttatctacaacaagggaccctagctttgaccacaccactatgagttagtattctataaatagttagagtttttttataatttttattaaaataaaataagtaaaactcgatattaaattgtactaataacaaatattatacctgctaagtaccataagtaccttttaacatttctctttaattattgatccatttttgttagtttatttttttttagtttgaacaagtcaaaccctaattattaaaacaactagaaaccacaattattgtcttggctatatgcatgtcaatgccatatctagataaacatgtaatagggatagttcccatttttttgtttatttatttatttaatttttgtgtggcataaaaaaaatataacttacaagttaccaaaactttcattatttactcttttccaaataaatttttcattaatattagattttggctgattttgatctaaggttagtataaattttccctaaatatgcttttatttgcattaggttttttaacttctcaccctttaacaaaaactttttaaaaggcattgctcgctgatgtttagcaccctcttataggtattatattgttatttgtgcaattaagtcgagtcccatataatttaatataataacttctaacaaattttgttcattataattgatcttaagatgccatttttaaaaaagtcacacgtcactgatacttaataataatactcataaatattttattggtatttaagttttagtgggggacttatatataccactcaccatggtccaaacctaataaaaacttttctaattaaacaacctacaattagctaaaaaggctagtttttttttttccacgtattgactttattacatcaatcatgataatatcatatctacattatacatgtatattagggataattttttaaaaaattataattaaataatattactattttttagttaattacaagttttgtgtgtgtatagtataagaaaatatacaatttttaatttaatttatttattatatattaaggtagaagataattaatggaataaaattaaaatgtttgttaattaattaaatatctataaaaaaattgatgaaattaaggaaccatgtttctaataaatatttaatgttattttgttttttctttatttggtgtatatgggactctttaaaatatagtgatgtaatatgacacatttaaacgtcaagcatatctatatataaatatatagtacaagacaacattgatcaaccacttctagtttttagctttctcctatatagttttcaaaatggtaacaacaacaagtaccaattgtgatgaattcgctactcaaacaacaccaaaggcgaaaaacgacagacaaagcgagctcaaagcttttgacgacacaaaagccggtgttaaaggccttgttgattctggaatcgctaaaattccaacttttttctatcatccacctgatcaatcatcatcagtttctgaagacacccaagtcagtattccagttatagatcttaaagggattattaatggcgagcgaacaagaaaagatgtcattaagaaaattagagaagcgttcggaatttagtggggcttctttacaaatcatcaaccagtggaatcccaattagggttttggagaaaatgaaagacgatgttcgttgtttttacgagcaagaggatgggattaagaaggagtattatacaagagatgtttcggaaccatttgtttataatagcaactttgatttgtatattactccttgtgtgaattggagggatacatttgcttgttttatggctcctcatcctccaaatcctcaagatttgcctctagtatgcaggtaagtatctttaattaattaccaatcctaattagttttattaataattatgtttttagtatatagatttgatgtttaattgaattaacataaagttatacactaaaaacaaaataaaacaaagcattcaatttaatttgtggagacttaaaaaatatatatatatatatatatgtaataatatggcatctataaaatgataatttaaagttctcaaacaaaaattgtaataattttagtatgagctttatgtctcttattttatgaaagtttaattaattgctttaaaacaattgtgaggatctttgtgttttgctattaatattgggtaaattaatagtaaactaataattttaatggttaactctctagcttgctttatttttagatgtatcaataactaagtgttatataatactgataattgctaaaaaatattattagtatctcggtcatatttctattgggtgtaattaagtatcgagttctatataatttaaaaaataccactaactaattataaaatgtcacctatattagttactggccaccactatatatactatatatgaaacatatttttgtatgggcgcattaatagggaattaatgcacttaggtctatgtgtacgtggaaataggacagccaaaagtacattatatcttacaacataaatattatttttgatattaattaataaaaatgattctaattaattacttttctcatagggacattcttcttgagtactcaaaccaaataatgaaacttgggattgtgttgttcgagttgttatccgaagcattagggcttgatccaaattacttgagcaacataggttgcgccgagggtctatccattttaggtcattactatccaccatgtccgcaaccagaactaactatgggaacaaccaaacactcagacaatgacttcattacattgcttctccaagacgaccttaatggaggtctccaagttctaaaagataacaaatggtttgacgtaccgcctattcccggggctctagtgatcaatattggtgatattttccaggcaagcgtttaattatataagttttatctaatctatatgattggctcgacatgacttatattttattttgtgcttctaataatatttagtcaggtgttctacacggctcttgattataggttaaaataaatatatatatataattactttattatttaaaaataattatactaacactactataaaatacactttttatgtcggtccaaacgtatttaaaactaccctatttcttaggtagaatcgaggaacataattgtatttaacatgttcatccttaatttgcactcacttatgtatatatccacctgtttctccactcttaagtcggtcctgagtacagttgaaattgttctatgcaattgtatttatttttataattatttataatattaattattttatggtgttaattttcagcttataacaaatgacaaattcaaaagcattgagcatagagtattagcaagtaaaaaaggtccaagaatatcagtggcaagtttcttcagtactaatatattaccaacttcaaaggtgtttggacccatcaaagaattattatcagaaaataatcctccaaagtataaagaaatcactttgagggactacaatatctttttctacaataaaggccttgatggtaccaaggctttggatcattttaagctttgaactatagaacttcattaattacttatttaattatacctatatgttataatcatatatatatatacatgaatatggatgttaatttgtattttgtaattgagttgatgtgttacataaatataataataaacttcaataagccatgaaaaattatatgcgtattatattctcatttgactaaatttttacttttgtttatagctaaaaataagataagtataaatttttttttttttttatcttttgaataagtactatactttttgtgcaaaaatatgtatttttttttttttaaaaaatattttatagaaaaattgaaaaaaaagttaaaaatacgagaaaatcaagtaaaggtaaccaaactggtaaccaattaccataatagggtaactaggtgcctaatggtgtttttttttcttctaaaattttctcataagataactttttgagaaaatattatatttttgcaaacttatactttaaaacttataaaaataaaaattctcataatcctatatatatttatgaaaacctgttgccaatggtgatctttaatccaactaagggccttcacgaactctcattacttttgccaattctggttccacttcacctcgatgaaaagaggtccgacttcaacagaaaatcatttgcattccgtgctactataccataaccatacccatgatcttctcaaaacaaagctgcatttacattgaccttgatactattaatttctggcaaaatccaatgctcaggcccatctcccacctgtacactaggccaagatgactctaacgtagagtattgagcatgtctccattgatcaagatacttttttttgcagttacaacaacgtcacccgccctcatcacctccttattaatattccacagcaaatcatttctgcccccaaagagcccatcaaactgtggctaaaatacaatgttgctccatatccaaggccttaaagggtgttatgcactacttaagaacatagttatttgggtttaaagatgtgctgatacctattctattccagcaaagttgtgcctctagacaaaatatcatttttttttttatttatttaagtgaggggagaggaggtaaagtgataaaaagtgaggtgagaaaaaaaataaagttaatgttgataaaatggagtacaatataaactatgattaagaatactatttaaataaaaataaattagccttatctacaacaagggtcgaccctagctttgaccacactactatgaggtaacattttataattggttaacggttttttataatctttattaaaataaaataagtagaactcaatatttaattgtactaataacaatataatacctaaatataagtgctaagtatcatattatcctttagtaattctcttcaatgatcaattttttgtttattttttttattttagttttgtcaaaacctaacttcttaaaaacctaagtagtaaaaccaacctaattaattttcttggtctatatgcatgtcaatgccatactctagataaacatgtaatagggataattcccaactttttttttgtttatatttattatatttaattttggtatttattttggtgggggacttatatataccactcaccatatggtccaaacctaattaaaacttttctaattaaacaactataaatataggaaccacaattagctaaaggctagttcttttccacgtattggctttattcatcaatcatgataatatcatatctacatttatacatgtatattagggataatattcaacaaaaaaaaaaaaaaattatgattcaataatattactagtttttagttaattgcaagttttgtgtgtgtatagtataagaaaattaatatacaatttttaatttaatttatttattataaattaaggtagaagataattaatggaataaaatgtttgttaattaattaaatatctataaaaaattgatgaaattaaggatccacgtttctaataaatatttaatattattttgttttttcttatttagtatatatgggactctttaaaatatagtgatgtaatatatatgacacatacaaaaatatattattattaatattgatcttttatttactattttaaacatcaataatgcatatatatatagtacaaagcattgatcaaccaattctagcttttagctttctccaatagttgccaaaatggtaacaacaactagtaccaatagtgatgaattcgctactcaaatgacaccaaaggcgaaaagccacagacaaagcgagctcaaagcttttgacgacacaaaagcgggtgttaaaggccttgttgattctggaatcactgaaattccaatttttttccatcatccatctgatcaatcatcatcagtttccgaagacacccaagtgagcattccagttatagatcttaaagggattattaatggcgagcgaacaagagaagatgtcattaagaaagttagagaagcttcagaattatggggcttctttcaaatcgtcaaccatggaatcccaattagggttttggaggaaatgaaagacggtgttcgttgtttttacgagcaagaggatgggattaagaaggagtattatacaagagatatttcggaaccatttgtttataacagcaactttgatttgtatattactccttgtgtgaattggagggatacatttacttgttttatggctcctcaccctccgaatcctcaagatttgcctctagtatgcaggtaagtacctttaattaattaccaattctaattagatttattaataattatgttgcttgtttaattgaattaacataaagtactaagaacataataaaacaaaacatgattcttcttaatccaaattggcaatataaaatttagagacttagaataagaaaataaataaataaataaatatatgtaataatatggcatctataaaaatgataaaaatttaaaacaaaaatagtaataatttttttgtagcttaatttatttctattattttatagaagtttaattaattgcttcaaaaaatatttgtgagtatttcttttttttccttaatatatattgggttacttgttattaataaactaaaaggaaattattttttctagtgactattttttttcttcattcttttcaattcataattggttatgctgttaaatccattaattgtcaaaaattggtgcaagttgtgcatatatatagttatgttttaatagcttcgatttcctattattgatgattgtataggagatgacttgctttcaaatgtttctatttttttattaaactttttgttggggatttgtttgtgtttgggttgcaaagctatgaattgatttaaaaaaactattaacaaaaatacaagaatatttatatggaaggatgttaattaagcttgctacaataatgaagtgtaatatatggaatgtcatatagagtattgttcttagacactacgtaagaacctaacaccacttatagagagtattgttatatggtatcaatgtgcttaacacctctatgatataatgtcttataattggttgacggttctctataatctttactaaattaaaataagtgtgattcgatattaaattgcatcaatagcaatattacagctcataagagtgttaggcaccatgggtgccttttagcgtttctcatatacatgtggcattaccgagaaatgctaaagggtactcatggtgctactgcctagctagcacctttatgaggtataatatcgcgctatttgtataatttaatatcgggtcctccctattttactttattaaaaaatatagaaaactactaaccaatcataaagtgtcgcctcatagtgatgttagataccttagtgctccataacaatgctatatggccaaaaatatacactatcttataatagttttttatgattaattaataaaaatgattgtaattagctgcttttctcatagggacattcttcttgagtactcaaaccaaataatgaaacttggaattgtgttgttcgagttgttatctgaagcattagggcttgatccaaattacttgagcaacataggttgcgccgagggtctattcgttttaggtcattactatccaccatgtccgcaaccagaattaactatgggaacaaccaaacactctgacaatgacttcattacattgcttctccaagatgaccttaatggaggtctccaagttctaaaagataacaaatggtttgacgtaccacctgtttctggggctctagtgatcaacattggtgatattttgcaggcaagcgtttattcatataacttttatctattctagagtaaatactattttggagtctgtgttttgcaaaagttaccaattggaccatctgttttgttaaatgacaaaatgtaccctgtattttctaaaat

SEQ ID NO: 218750 - DNA, 3040 bp, Cannabis indica
gtacatgtcaaagtttagagaaaaaaattactaattaacctaaatttatgttgcctcttataatgttttgcatcttaaggttaaagtgtcttatagcatttatcaatttgtaaatggccctgtcaatatttaagaataataaattatttataatatatggctgcgaatattccgtttattaccacctgcctaaagcagaaaccctatcttttgctactcttcaacttgcctaatttgaagagaagtgatcaatcgaagaccttctcactaaattaatcactttttattaattgtggggccaaccaataagaccaattcaaactcaagctatgtccaaagtgttaacatgcatgagtacaactactatataattagctagtacctcataacaaattattgacatttattttaattaattaacagatgatgatcatatgtccccatgtggtgttgagaggagatattaataaattaaaaaaaaataagggtagaaattatcatctaatcacaatcaccaacaaatttaagtgctaaagaactatatctttggtaagaaagacacaaacaagtacatatcattatgtcatggttagttttatttattcatattatatactctaatcaaatttataatcataaaatatattttattttagcattgttattgtgtaccaatagtgtctaataccacctaaaggtattaacgtcgtacaattagttagcaatattctctaaaattattaccttaagttaaaacatgatacttaattatactaatagcgatatgtaaagacggacccacatgtattaatgtgggctatagccccactaacaaaaatattgtcttttaaaaaattaaatgcattcttttaatttgataattatagatcaaaatagtagaaaaagtccccacaaaattaaataaatttagtaagagtaattataatataggtataaatattttttgatgataaataagctcccacacagtaaaaattttagatctgtcactgacgatatgacaatgagaaaggtgttaggacatatttttatttgtagaatatgtataacccctttaattttcttcttcaaattatatgggtaaaaaaagaaaaagtcttcttgatgaattataattgggatgacctagtgggaggcctttgtcattaaaaaaattgatgacatggcacgatatgtaaaggctactttgtccatagcacaattgttctctatttaagccaactttctcaaccctattaatgcatgaaaaacacccaactttattattagagctaagtctaaattaagtacttcttcactttcttttataagactaattaatagtatttttattatggacacaatagatcaatcagtttctagaggtatgagtggtcgtgacacaaatgaactgacctctagtttgaatcccaaacctcaagctgaggataacacttcaggtttctgggctctatataaggaccacttcgaacctggtctttttagaaaggtatatatataaattgacataactaataaatgctatatatatttttctacgtacgtaactttggccacatgagccatgcacatgcatcatcatcgagtacttaatatgtagatgttggctgaggtggtatcaacgttcctgctggtgttcatgacatgtgctgcggctgccattaatggaagcgatgaacggagaatatcgcaactgggagcatcggttgccggtggtcttatcgtgacggtgatgatttactctgttggtcacatctccggtgcacatatgaaccctgctgttactattggttttgcatcttttctccgcttcccatggaaacaggtatatattttataattatatatatttttatataattagttagctgatccattctaattgtttatgtttctatttgaattaatcattttattgtattgtttcttttaaattacgtaagcttatttgaaaatttgccctcgatcgctactgaaaaagtcgtcactttgctttcagttgcgactttgttatcgttgcgaggactttcaaatgtgcttgctaacaatgtgttagctcgtcgttgaaagtatgtcgttgttgcattgcgaggactttcaatgtatttgctaacaatgttttagattatcgttgaaagtttgttgttgatgcctggcaaggactttcaatgtactagctaacattgcgttagatcatcgttgaaagtttgtcgttgttgcatatcgagaactttcaatgtacaactaatattgtgttagctcatcgttgaaagtttgtcgttgttgcattgcgagaaactttcaatgtacagctaacattgtgttagctcatcgttgaaagtttgtcgttgttgaatagcgagaactttcaatgtacaactaatattgtgttaactcatcgttaaaagtttgtcgttgttgcatagcgagaactttcaatcatgtacaactaatattgtgttagctcatcgttaaaagtttgtcgttgttgcatagcgagaactttcaatgtacttgctaacagtgtgttagcatatcgtacgttgaaagtttgttgttgcaaagcgagaactttcaatgtacttgctaataatgtgttggctcattgttaaaagtttgttagagcttttagtgtacctgctaacattgtgttagcttaattatcgttgaatgtttatcgttgttgcttgttagcgagggcatttgtgcttactaacggtgcgttagctcgtcgttgaaagttgttgtcgttacttggaaagaattttgactgtacttgttaataatataagatttactcactatatataagtttgttgataattttcttaattatacaagaagttattagtactagcaagaacagtactcttacgaaattaaaatttttctatggaaaatattcaatctgatgataatttgaagatttatgatactaattactagaataaatcaaatttgtcccccctaaaattttgacccttctatagagttgtcactaaattgttttttttttttt

SEQ ID NO: 218751 - DNA, 7541 bp, Cannabis indica
ttaatccctcataactatcccaaaacaaattttaaatagaaatagaaaatcactcgaaacaaaaacaaaacaaatgaataatatcataatattatttaattaccagaaactcaaacccaaatcctctcattacttacgagtccttctagcataaataaatcgaattggtggcctatcattacaccagtgggtgggaattcattagaattcttagggaggcataaggtatccccaaatttccccttctatctctatttctttgtatttaataaaatttgagtaccaatatgcacggctgaatagccattttcatatctaagttcctataagaattgaatcaagcgacaacttcataaacaagctcgacccaaatacccaagttcctcgaggcctttaaggatttcagagacactttaaacaccaaccaaattacctccttcttcgggtcattaaactgaatcatacttaacgaaggaaggaactccaatttatgtaaggccttattacttatagtgatgttttcatccatcctttcatgtatttatttcatcaaattgcaagatcgatatttgaaaaacatatatatacaaaaagagttaaaatctcaaacaatttctattcgagtcttgaaataagaaaattagcacataccaatcctccagaagatttagctagtaaccattttgaaagtttcttatgtgatgatttcttgatgtctagggtgatgcccgagggtcgacatggtaatacatggtttgacctaacaaccaaacaaaaatcataatcaattgttggagaactaaggtagctttcgattggcaggaataaaaacataggaataggaatgtgaatgagaataggaatatgaatggaatggaataaaatttaaaatgcatatcaaatagtcattccaacaaaatggtggaaaagtcattccaatggaatgaaattccaatactttaatatataaccaaagaaaggaatggaataaaaattgtttcctttccattctgttttattaccaaccaaacgccacctaagtgacaaagttagaaaagaataatagattctttgccccctgccatcgtgccattgaattattatcggcgttaaaaatgctccccaactttaaatgttacttttaaagtagtattatgttaacttttatcaaaatcagtttttaagttgctagtgtggcatgtttttccaaaaataaatttttcacctaagcaaagctaaataaaataaataagaatgtttcccctgaactatgaatcgagttgattgattcaacttaagactggtgttttcatgttttgtctacactagaagttaaatttcaggcaggtatcttagcgatttatttggccattcaatctgagtgggtgaatcttgctttcttttcggattgtaggcagccttgagaggcttttgctgcgcagaggtagccactgtgggagctggctgctttgtctttgtccttatttgctggtttagactgtttggttgaattatttcttggatttctagagtaaagaattcagttagactgtctaattttctagttgtcctcatctttgggagttaacactctttgttgttaacaagctttgagtttttgttcttggaataaatttttttgtttagcaaaaaaaaaaactgacccttatagagttttgctccctagacgttcttttttttggccaaaaattctctaaactattcaaattgttgcaaatattataaggtctatttagaaatttaagctacccgaaatccagtttaccgtacaaaagaatcttatctttagcccatgtttgctttgaaaagtctttcttttcgtcctcattgctctacatttttcccttatcatttatgaggtatacaaacgagaccgttcaaatattcttcttttcgttttttttttaatttcattttaactttttaaatgttttagtttcttattcatttaattccttttattttattattttaaaaaagattctttgatttcaattaatatttttattttttttgacacataatcaatgacatagatgtactgtacacatcagtttgtacagtaaaatgtgtccaccgtgtcatgcctgtttaatgtaaaattaaaaaaaaattgtaacaaaagtcctaataattactattggttaaagttaagtggcatttttaacaacgttaataattcaaggggtataatcgtattagtgacagttcatgaggcaaaatacctatttacttataagaaaatacataacaaaaatgttacataaataactaattgaagactctttaaaacatagaagcctaggatgatgttaatcttaccatagggtgcttcccggcatgggtaagtcttttacggttgtatgcaacgcttgcaaaagacacttgtccaaaagcatgtccatatcctccacggacaaaggatgttggtcctctgcaattgactcatcaccagaaacattatctgttaccttcacattggccaaacttaacattatctcttgttcagctgttttctttacagcatcaggtacagattgatcatcagcagcatcaacagagtctctcacttcttcatcatttattccatcccattgattatgagaagaattggccgtgtcatcatcatatgaatttgatgtctgacacaatgaagatgaggcaggatcctcaaacacaacatcctcaagaaatcctgcattgggcacatagtggccttctactgattccctaccaaaaggtaccatcagaaagtcaatgaaagcaatgaagtaagccagtttttccaatactcattttcaatagatataataggacagaaagacacccaaaatacttgccagagtaaatcacgataatagtgagtaattttcaatgcctttcctcgcaaaccggcttttaatgcttcggtgctgctcattgtggtactcccaaccttgaaataaagtcccaagaagaaaagaaaatcttaatctaagctcagaaaccagtttgaacttaaagcaatatatattcgcacaaacataattaggcttactgcgattggagcagggttgccaggaacttttactgcccatatttcaccagctgaaaaggtcggcaatccttcaggaggaatgctaataccgggaaacatgagatccgccccaccaatcacataacgagacacctcaccccccttcagcaagaaactaggcaacagatttggaaccttccacagggcataaactgccattatttttaatataagatatgaatgtcaaaaaaaaatatatctatatctatatatacatatacttatccaccgaaattaacaaaataaatatggcgaatagtggcttaccagttgggaaaacttcagtacctctaccatcaacatcgaaaaacataggaagcccaccttctaccccataaacaataactcgattttggaatttgtcgactgtaatctctacctagaatttggtaaaatactattttcgataaaaagcaacaacaagaacaacaacaaagggtattttcttttctttttaatcccttaccttaggaggcagtaacgaatccatatcgggatcggaagcagcagggaacctgtccttgatggtcctcttaagctttttcctgtcagcaccagataacctctggtgtgacttcagctccatggacttcttaaacatatttactttcaactaaacttagattctattgagaatgaaacaatgagtaaatacctaaagaaatgcctttgttatacctacgtcacactgctttcatttgctccctgtcttagcctctagggattttctaaatggagacggcaatgcaagcttctggaaattataagcccaaattacatccatgtccttttcgttttttttttattttattttttttaacaaagtttttatgctaatttgtaattttttcttcagaaactttgacacttaccaaatcgtgtctcctgaactatttttgacattaaaaatttcccctaaacttttgataatgttaaatttgtggtattctgtcttgttccgttcattttaataacggagtgttgacgtggctcctattatgcagtctacgtaatttgacacgtgtaatttttcttttttttaggttcagtttagggttttcaaacccattttctccaccactcacgaccaaaacatccccaccaccacgagaagacgacaaaattctcccacccaccattggaagaaattccgacgagaacaacacccatccaccgtcatatttttgggtcttcttctccctcattctctttcttcttctctgtcattctctttcttcttctccctgattctataccaatcggtgtgccctttcctccattctccttcatttttcttatgaaactaaagaatttcgcactctagcaactcagtcaatagtggtagaaggtataaggaagagattcaatggagtagacccatctgtagttgtgggtttgaatctgtaatccgcacgtcaagaactgttgataatccaaacagaaagttctatggctgcccaaattacaaggttagagttttttttatttatttattttccaatattgatattcaaggtttcaagtatttctaaaatttatccttcaaatccatgaattaaaaaagattacttggttttcaacaaaatagataaataaatttgtgagttttttttaaaattaattttcattaatcactttaacaatatatcaacaccagcacctgcagaacactactgaagaacactgctgtggtggtgtgggaattgccagactgtttttagccactcacaaactgtggtgatgtgtgggaatgggcaggttgtgttgtgccagcctacaggtggtcgttagactcactgatggctgctcatttaggagaaagggaggctagattagctcatattttgtgcttgcttgattagggtgagagcaatgtgcttgaatgtgaaactataacatgccttggaacctaaccagctgaaaatatcagcaacaatttctttgaataacaacaatcaaactaaagatgcttgctatactttattaattgttattgtttttttttttggcagaataaattagatcgaggatgtaatttcattatgtggatagaggcaagtggacgaagaagtagaaatgatttgggcggcttgtttagaaggttgggagaaattgaggccaatgttaaacagttagagcttaagattcaaggaagagatgaaaaagttgctagaataattaagctattgaaaaatgtcaaatttgctatatgtgtttgtgttagaatattatcttttctattgtatatgttatttagtgtttaacaaatgtagatgcacaatttaacagtttaagaaatagtgtaaattggcaatgtagctgcacaagtgtttaacaaatggagttagtttgaatagttgtgtaaaatataggtatcactcttttctcttctctatcattccttttctgcttaaggttgtgttatgttgtgttgtgtgtagaacactcctaggtttcaccaaagtgagattgactttgatttttttcatattgacctcacattaaactcatgtatttaacttccataatttatagaagataatgaattaatcttttgattatataatgccattaatttgcactatatacatgtttatgtttacatatgctttcttaatcttcatttttgatatgaaactgaattaagaaatattaacttagtacttgtggagaaaagtataataaaatgtgcatgaattcaattattaatgatgttctttcaaaaatcatattagttgaagaagccccttgaaagtattcttgaggttgtctctacaaaattcaaatattaaagaaacaaaactgagaacaagaagttgatctgaattatactaacatgatagcttgtatggttcatttttctgcagatatgtgtggatggcaaagaagctttggttagcatttttggttgcatatttgcatgcttcgcaactacttttctttccttaaatttctgatccttatcactggcggttaatctctacttttaaggtcttgagctgataatgaagcaaagttattgaaagaagaaggaccacttgattctaccactgattaatgtgatttttattgtgcaaagttatggttcatttttcttgtttgtatacatatatataagccaattctctaactattttaactaaagtcacatcagctgaaccaactaacataacagctcggccaagttgtcacgccaatactcgaaccctataaatataagcagtttggattattattattattgttctaactcttttaatgttgagcagtagatggtgtaatagtagaattatgataaagaaaattcaaagttcaataagagatctcttatgcttactggttatagctcaaacaaaatagtgtgttgcatgaattgacaatccatacatagatccatatataaactgttttcattgctacatatgtgaatttatacaaattcaccaaaaaaagatccaaatttatcaaaaaagatttatatattaactattactgttccaacatatgtgaatttatacaaattcatcaaatatatcaaaatatgcataagccctgctcatattcaaaatgatgcataaaatcttgagcatccacttggctttaactactttatcttagtgttcaatctttgctagttatatgaatttgtacaaattcatcaaaagagattcaaaataatgcataatctctgtatacaaaatgatgcatacttcttgagcacccactttgccctatctattcattcttaagcacccattcatagctattctactctacaaaaacataaaatataattaaaagcatctcaaattttgtacatatttataattggattaatttttaatgtatggtacctataattgttcatttctatcttgtacaattctctttgggctgaagagctaactgaagcttgagacagaggattgttgtttctcccataagtaccaagatcctttggttgagttttctttgcctacacataatcataaaaacaaaagtcctttaaaacatgtaacacttctggaattatcaaattcaacaactaaactaaactagctattgatagaataaaatctgtaggagaatttgacacaaaaaaaagaaagtagcagtagatagtagcaatagcaatacacacaataaattgcacaattcaactgcttaatatctaatatccagttggtttgtttaagtagatagtagcagtagttagagaataaattacacaatacacacaataaattacattagatagtagcatagtagtagtagcagtagatagtagcagtaaattacacacaataaaagcactctctgtcaccaagaaaaacaaaccatgggaaataaaaaaaaaattacaaaaatattaggtaaataatagtaaaaagacagtgacaaacccactgtaacaccctaactaacataggcgtattacgtgatt

SEQ ID NO: 218752 - DNA, 4986 bp, Cannabis indica
agacttacagagagcaaactcattacaaatctcctctctacatctttcaaattcctttgtaatatactataagttctatgcttaatctcctttttaatcatatctatagtatgagcaacactataagtatagcctttaaaaatgctagtgttttgatttgtccataacccataaaccgtggctgcaatgagggctgacaaaatctcagccacaacatctcttttcataccagtaatccacccctgccacccttcaaacttccaaggccaatctttcccaatccaactttgcaattggagaatagcctgtttagaataggaacaagcaaataacaagcgtctgtggttttcctcctccaaatcacaaactggacaaaaagtgctattcatggtaacatggaatcgatccaagttatctctagtgagcagtttagagttaacaacttgccaaagaataaagcagtgcttgggaacacaaattattccaaacaaactgatggtatttgaccttctcaagccttataaagctcatatacaacctgccagtacaaaatttaccaagagatctagcttcttctctttcactttgagaaaaaactcccttgatgttgcataatttcctccaatactagctggtattgccaaaaatcttgcccctttaaatacaatttggtcacccattttacccaagggagtccggtttcttgctcaacgcccaaatatactttgcaagcatagctttattccacctagctccttcttaaaagcctaatcccccataagctttggggaggcaagcttcctcccaagaagtaaagtgaaaattgcttcttgtgccattattgccccaaagaaaccacatacacaacttgttcacttccttagcaatactttgagacaacaaaaatatacccatccaatagttcctcaaacccaaaagaacagaagtaatgaattgagatctacctgcataggaaagataacgactggcccaagtgtgtaatcgaagcttgattttctttagaatgatcccacagtcctcaactttccaatttgtaggacgcatagggactctaagatacttgagagggaagctgcgttcttcgaattggatcactttgagcagctgttctttttcctcttgagtaactcctccaaaatacaattgagacttttgaaaattagccccaagccctgtagattgacagaattcatcaaacttatccttcacacacttgacaaaatcattattagcttgcaaatggttataagatcatccgcaaaactaagattgatgattctttagttcttgtgcataggatgaaatttgaacttcttatcccgcgccccaagctgcaacaatatagtgagatattccatcactaaaacaaacagtaaaggagagatagggtcttcttgtctcagccctttgactccttgaaaccctccttgagtcctaccattcatcattagaatatacgaggtgcctttaagacaagtcattatccacttaataaacttggtaggatagcaaagacaagttgaaagcttctccgagaattcccaatccacagtgtcataggccttgctaaggtcaaccttcagagcacaccttggagatgcattattcctattataattcttgatcaagtcttgaaatatcataatattatgagctagcgagtgattcttcacaaaagttctctggttttgacttataatattgggaagaatctctgaaagtctactacaaagcatcctagaaatgcacttgtaaagagtattgcaacagacattcggtctgtaatccactgcacaagaaggaaattcagttttaggcgctaaggcgatcacagtttcatttaactcagctggaatccgccttgtttcaaaaaaattcagcacggcatcagctatctccacacctatgtcaagccacatagccttgtaaagctccgaaccataaccatcagggcctggacttttggtactaggtatactgtacatagctttctagacatcatctctagtaaaccatgtctaggttgttaacattacaattttggagcatttttttgatttaataaattttcaagtcagggtgaggtaaagtataataagaatatggtcacatgtctttggaaatggaaaattcattgaattacttaagctgaatgaattactctattttgtggttgtagcacggagattagttttattctaagtccagtccctcatagcaattacttgatacaccacagtatgaaaaatacagaaatagaagaaaagagagatcttaattgataattctaggaaattcgagagtcctagtttctctcccaagagccaaggctcaatacaaattggaataagcataccctagcccttcactctcaaacaatttaacctcaaacactttccacaattaaacaaataacacttcaccctcactcctaatgcccatgcctagcaaaggtataccgaattgggggtctgtcatcagcccccacccaaactttcaccttgtccttaaggtgaaaagaaggaaactgatgtagaaggctggtgcagttcttccaagtggcctcaaagaggggcaagtccttattggattgttaggcagagagccttgtttcaaaaagaaaagtagtcaaaagattagttcataatttctcaaacttgacttttgagcagccttgtagctcagacagttaggttaggtcaggggatggcttgctcctacaagattagaggatggacgccccccttcttaggtgtctacaaaatattaggcccggtgaccagtttcaaaaaggaaaaaaggaaaaaggaataactctcaagcagcattacaactcagttatccattctgcattgacttcatatatatttttgttacattttcatttgttttttgtgtttttgacagggaaagaactccgacagaaaaggttagggaagcacatagaagggtgatggtcgctaaccatccagatgccggtggtagccattaccttgcatcgaaaatcaatgaagccaaagatatcttgcttgggaaaaccaagggtggtggttctgccttttgatgctttttctcttctcgattttactaatgccactaatgagtttgaggagggttgagcttcacttcaatttcattatttgcctgtaatactaattgtatatataaaccataaataatacttatgaactacaagggaatagtttttagtttttcaaattatttttgggggacctataattgattgtgctctatttattttctttcattttgtactatgattttataattttagaatggtcacttaaaatctcttgtattttcatagcataaagataattttgacagtaattaaagatgccatcatatctaataagctcaaaatctaacactatatgtaagaattacttgctattgtaaagaattttagactcactacaaaaaagtgagcctaaaaggcaaaacgaccgctcaaaaaactaagaattaatcaacttagacatgattgttttcaaaataagttcatttgattattttgagtacattatttgcatatatcaattaatttattcgtttgctagtttcacaatcttcttttattttgagtacattatttgcatatatcaattaattcattcgtttgctagtttcacaatcttcttgccaatgttggtaccttgaaagagtccaataaaagcttttggaatggtgtccaaaccaattgaaatgtcttcaagtgtcttgagactaccattacgaagatgattcatggtgaatgaaatgaaatctggaaacatatctacaaaatcagacaccaaaaatccttgaattttgattctcttgtaaataatatcgaccatatttagtgaagcacgattgtttgtgtttgtgtactcagatatcactccacaagctgcaactcgtccaaagtgtttcatgttagcaattgctgcttcaagcatctcacctccaacattgtcaaagtaaatatctattccatccggaaagtacctataatttatgttatttaaaccttaattattgacattaaaataaaagcattaattgaaacacaattcgtttgaattccacaattttatcttactttttgattgttgattttaagttaggttggtccttgtagttgaatgcgtcgtcaaaaccaagtttttcctttagtaatgcaacctagaaatagaataagagtatcagtattaggcaccgcaccactaaggtgacaccttcagagtggtattggagtattccataaaagttagggatatttgcggcgaattttatttaatatttgcaattattatacatatgaccttaataaaaaaagtggcagcaaaaatatattatcttacgattttattgcaatcgtacaattttttagatgttaagtgccaattaagcccgttaagtgccagctcaaaaaacaagcggtgacatatttccttaacttatttaatacgttgtccaataatatgtcgctacatgtttatgagctgacacttaatggccaaaaaagagtacgaccgtaacaaaatcgtaagataaagtacttatgacgacacttttctttttattagggtcatatgtgtaataattataaatgttaagggagtttcgccgcaaatatccctgtttttgtattaaagagtaatttgcggcataaatacttaaatataactctgtatgcagataaatacctaagtttaatattttgacagtaatagtaccttataagttatatttctgaaacttttgtaggtacttgaccgttaagtgtcaagtcaatggccacatgacactctctgattagtccagatcattattttttttatttaaaaattaatttaaatataccaataaaaaaataacacgtagataataacttgacacttaataggcgggtacctacagaagtaacaaaatataactgtaaccgaaaattaaacttaa

SEQ ID NO: 218753 - DNA, 3525 bp, Cannabis indica
atcccaatgtgcaaactcctggaaacacgagaggaccacaaatgacaaaccccaagcacgttaatacacaaccacctaaagtggaccattgagtgacttcccctctggctgggatcacaccagacgtacaagagactggaaacaccaattcagccgcgatcagtccactcccaacattgaggtcccatctacaactaatgctcagaggccagttggacacaacactaaaatccagaacctgcgagcagcccttgtggtgcttgacaccttatttatcctaaagtttgcacaactaacatggtccttccatgtggcatgatctagccatctctttgacctagcagagaacctccacagaaaaatatgtctggcaggtctatataaggagtaacgaccataggctataaatgtctcatgaatcatatggtcaggttatcaacttgccagctagataagatgagagcgacgccctgcaaggatgattctacaagccaatctcataaggagacaagtgtcaagagacctaaccgaatgaccaacataccaggcagatcttgcaattttagggataccaaacagagatacacgatcctttattttgtcttcaacaagcttcctcacatatctacaattgagtcctacaaactcgaattttataaatctatctgagaataaaggagattcaattcaacagattgtaaatgcaccctaaaatttaggaatatttaccatttgtttactccttttatggagcctaatgtaaaaactgtcaccctataaatagtgaaggcattcacaaggggagggggctcaaaaacaaagtgctatacttgtacttttgaatctaagagcacgttgctgaaagatatcctctctaaataccttgagagccgtagctagaaatcaatttgtcttccttaatgatcttcccaatattatctcacaagtaatacaactaaaggggagtaggtcattacccatatacaagggggtcgaacctctataaatcatgtgttctttttatttatttattattctaacctccttacaagttattaatcaacatttattagacttcaagttagttggctattttcctagctgagattttggtgcttcattaagagcttcaacattcttgcgaagatctcatcacttggtaatcactatggttctaataaggaggagcaggtaaacaaagcctcaagatgtaatggttatgaatcctaatgtctagattctgccaactagtgagaacccgaccaactctgtctggccacctcagttagtcccatcaatagtgactaaattcaagggtctaatcattgtcgagtaggatcccataggtgtcaggcaagtaccggtcaatgttggacaacctggctagagtactacgggggtacccctgacaaggccacccctatgtatatgctagagaaattggctagaggtttgccaacttggcatcaacatgccccatgttgacttgggggatgattctaaactagccaggctgagagaagccatagggcaggtttagggtcacacaaatatcctccaccattaacaagaagaaacatgtgctgctgtgagcgatactttcacccagaagagatgcaaattccatgaatggatgaatcggtatgttgtgatcctccaagccattaggcatagcttaactaccaaaataggaagtgaatgaaattattagactattcaacgaaagggctaggtctagagtagaggaaccaccactcataagggcccccctttggggaaaaagtccctatgtcccaaagtgcatttaacgccctaaggatcatggaaaaacctcacgaatagaagggccaactacatctcaaacaaggcctccaccctatcggcccgggaatatggtaggagtgaacaatttcaacccctgcccagatatgaagagaggagggaagacatcccaccaaggcaagatcgaagtaggtcttgtagtggggagtctttccccaaccttaatgaggacggtgccactagtcgccccagtagtgagcgagctaactggagaactcacaataccaggcgcaacaatgacattccaccctagaatgcgcaaacacattgtaaccctaggcctagggactctgtgtttgatagagtgggtcgaagagttgatggggatgtttggaatgacttaaaccgaaggagagctaattaggataggaatgatccactctagaataattaaatccctatcaacccacttgtaaggctagctggataggggttggcaagataggagtttgcaggacaagtgctggtcggacaagggttggtcggagtgttgtgcaagcacaaatggatcaactcaagaacctgatacaggcctgtcaggcccaatgtttttcaacctggagcttgataagactcgagggtcacctttctctgcacacataaacgaattgcctttgccaacaaagtttaagatgccaacttggaagatgtacatagggaaagaagatcccttggcccatatgaaatatttgaaatctagaaggatttgaaaaatgttattgacaatacccgttataggatttttccagcaacactatttaaaactgcacagcaatggtagttcaagctaccccaaaaaggtttgattcttgggacgcattcactggtgagttctacacacagtttttgtaagaaatatattacgaggatcttagatttactaacaagtatgttgtttaacatcctaaatatgaacttttaaaatgatataaataaaaacatataaagtatgagaaaccttacagtgactgcagcagaatataatgtctccttccactcagatctctaacccttgtatcctttctgtcgtagagtatcaccaagatctgagcccgaatgtccttctcttgaatctggattcttcacaatgttccacactatgattgaggtaccacacgtaagggggggggccactcactctatcactcaagggttcggtttcagaagttaagaagaggaatagagagtgccagctaggtttaaagagaaggcactcagtttttctctgaaggaataagatgcatcatctttttcctgaagccatcactacctatttatagtcaaccacgaagggttaggttagaattatttggcattaaaataatgaaaaaataaatgataaatacctacataagtggctgggctaggtataggatattgggccccacttttgcaattttgctattttatcatttccacatctcattttctcaaaaacactaatttctaatttaaccatttaaatgccaattccaattatttaataaataaaaattaattattatataatcatgtcatttaatatatttattaattagactaaccaaagtctcttaattaacaaatgtaccctaaaaaacctttctttacaatttcgcccatgcttagtgaaaattcataaagagatagtctaatttcagagttataattgattaatcaaaataaattaactgagtcttacaa

SEQ ID NO: 218754 - DNA, 1972 bp, Cannabis indica
tcctaaaagttttggtaacaccctcttgaaaatccctccaagtctcttcttgatctctaatggggtagattatattttgtggccttctaaatctctgacttgcatgaaacattttggtgttttcatcactattttttaaccaagcaagcttatttttctagctaaggtattggatgtaatttttgtgagcaacaatgtaatctttctatgcagtatcttcctctgtagtcaagtcataatttctaggatcttgttaaatattctattgaatagtaagcattttattttggcatgcttgatcctgaatagcaacattaccataatcttgtttactccactcttttaggcacgcttttacattggctgctcaaaaatattctccttccaaatagtcttcacatcatcttaaaaatgccaaaaattcttccaaaaattaaagtatttgaagggtattttaatgttctgaaggctaggataaattgaaatgagtgttggcaaatgatcaaattcaccttctggtaaaaaagtcacctctattaactgtagtatatttatccaactagttcactgtagctaatattctatcaaattatctctcccttcttgtttattattccaagtaaagaaggagacattgtatttaatgtcttctaaaccacaagtagaaacacaagactgaaaaggaatcatatatatgattgacatttcttctataacccaacctctcgaaggtattcaacacaacattgaagttactctcgacattccatggaaatttcataccatttaaaatagttttcatgtctttccaaagaaactctctacctttactatcattagtagcataaaccacaattaaggcaaaatgatctcctctttttggctttaccaaaaaatgaatcaactgatttgttccacccttaatggccgcttcaaaactacacgagttttaagctataataacccacccatttggatgatgatcagcaagattagtagtgaagcaccaactcttaaacatgttgttatacccatattttgagcaattaatatgataatgacatgtattaaaaagctaaaaaataaatcagctcatgttatgagataataaatacattcaataaactcgtctcgaaaaatacaactggtagaaaaatttgaactcacccttttaaagataatggtgagccgtgaataataaataccactttatgagaccaacgagatgaacaaccaacgtagaaggtctatctcgagatacacagagtacacagcagaatgacggtgcttggaaagggtagataatgaattctttaaggagcttgtagctcattgacccatatactcatgagtatatgttgaaagaataagggaagtactcgatccaaaatatacataggtgccgagagccaccctcaaaataaaataactttagaagattatttgtattgcaagatgaataaagcatagtcagcctaaccgtttacagataaagacaaggaacggttatatagttattttattattatcccatgtgatataaatatgaaacgtaagatttgtccatgtttaataaatgattacaaggataagatctcaagagaataattatcaccctaaaactcctataaatagggacatgaacctagggagcaagggacaataaatttgagaaaagaaagaatcggacaaataaattcttctattttgtattccatatacgatttttttaaaaaaattctagaataaaatagactcgtggagtataaagaattaacttcaaaatcacgttaaaaactttcttaccatttattattatttatttaattttagagtttattttattactttaagattcatttatttgttaacgaaaatctgcgttaacgacattactcaaaacgaaggtactcaaccaggagaaacaactcaacctccaagaaaagaacatcagaattcccataggacaagt

SEQ ID NO: 218755 - DNA, 3453 bp, Cannabis indica
aaaaaatattactaactaattgtaaagcgctaaaagtgttgggaaccgtgatccttttaaaattatatatgtggagcccaatgttttttatgaatagtaattgtaatgtatagttgacaagaacactacaacctatatacatagctgtataaaaaggtcaaggccgccgtagccttgtatatatataataataataatattgaagagcatattctttggataatgtaaaattgtatactacacacgccaacaaccaaagctgtaacttatcttattaattgaatttttagtataaatttccctaaattttactttgtttgaaaattgagttatttagatttttaacaagttttgttggcttttaaaaatagtagcaattaagttatttcacttatttttttcttcataagtttattaattattgaattattttttaaattattcaataacttaggtttgtcaaaaaatgtttagattatgttgtttggttaaaagaaataaaaacatatgaataaaaaataaaaataagaatagaataaaataaatattaaaaaattattaaatttttgttcattttttattaggatagtctttcttctattttaaattagaatagtcaattcactaaaatagattaatgttatccgcgtttcaagaaaaatgatgtgtattttttaaagcccaacattagctaaagcaggtccattcttgggtccaatcaagacagtaagtcaacccacggagtcaagatacagctctggatccagatataagtccagcttgtagacattacaaggccaaacgtctttagtctgagaagggatgttaggttcaaaaggcgaagggtctatcaagatctacacggatgctccatggggtaatccagtcacaggcaatggaagagacatccaaaagccttcagatatcatcctacgcggtgtcctccagacacagggtcccaccatgttaggggcttgtcccatacgttaggcccatggagtatgccaccaccaaaaggcaaccacctttttgtgcaacaccatattctttgacattcttggtaccaacacaacagctcgtgacacgtagcatcattaatcggtccccacttgtacggacgactgttaactcgtgaattgggcctcacccaattggccccaagttaatatatattgtattttaccccatcgatgagcttaattgacactgaaaaaccctactgggtctgggtttatccacacccagttctatcctataaatagaacaagatccctttgtgcaaagggattagttggaaatcaatttctgagatcaagagctaagaattaaagttcttcgtctagggaaaaaacacttgtgtaaagacactttgaagtttttctagctcaataatattgatcgtgcactagagttcattaacactcgaaccacgtaaaaatctctctcttcttctttaatttatttccttcttaagcttattttatttcataatcggtttctaaaaaactcaataaagccgatgaaatatttaccatagttgtcatctataacgatggttgcaacctgaaaggcaatgttcaagcgacctactcgatatggtagggataatgccgccaatgatggcgagaactattttcttaaagatattctgcataagagtgtctttttataattatgtctttttattttatttaatattaatattttttttttattattatattgtatttttaaatatattagtgttttaaatcaattattttgtaatgaattttaacttgatgactaaaatgtaagaccataaaagtaaaataaactaagggttaaaatgtgaagaaaatcaaactcctatgttcctttcattatagtatttctgaacaagttcttggttttacaccaaataagtgtagattcaatatcaaacaccattaatagtgtagaatttagtgcacaccaacttggtgaataatttggtatgtcattggagtgaaatcgtgtgaagatttcataccaatttaaaatagtgcaccattgaagatgctctaatcaaaaataccctcagattatatttcattaaaatatactcacttttgtgagtaggttgcccaatataccctaccctgaccctccacttaagtctaacacataatttacctaaagggtataattgggacatcatctataaaaatgggtatcttaaagaatatgaaaataaaagtaaaaattaaaataaataaattaacatgggtatataatgtaattttctcatttttaatcatctctttatacataatataataaatatttttttgataatatacatagagtatatataataaatgtttataagaacaaatatgcacttaaaaagatatgataaaatacgcataattttgaaattcttacctattttaatttaatcattaaattctttttagaagtttaaccatggaaattttcaatttatgatcatcccatcccactcgatttttctactatgtttttattaatgtgaacacttagcctcactttgttattttaatgctgtgggtcaaaagtcaaataaacaaactcctttgccctactccacaacttgtcagctgttttctcaactttgttactttcgaattaaatcaatttttagtaatacatgcatgcatgcatattttttacttgtgaaatacccaattttattcatttatgtatatggatatatcatatttgccactataaggttttctttttcttcaatcatcattatctgaactagtactattattattaattattattgtttttcagcctaagccatgcttttagtttttttttttcaaggtcaacctctctagctagctctaattaatcgaccaccacttgtcctaacccagttgcttcatttatagatcattcaactgtttctttaaccattttttttttaattattgaattttcgactttgaaaatgagggcaaaaaaaaatgaaagagattaaaagtatattgacatttgtgctttaaaataaggagggtttactcaaaatagattttgaaatttgaacgtattcatcaccgactgtttaaaataaattaataagtatacagagaaattaatttatgtatatattttgctaggaagtttgaaaagaatcatcgtattctattaataaaataataatccttaattaacagaaatataatattactttatcaacaccacttaattaatactaacacgctaatatatagactataacagtaattatgtcaaattaatattgttgagctttttgagatagtagcatggcatggctttattgtacaacaatataacatagcacgatatagaatactgttagttatgatattaatttgtgctggtacgatgtatcaatatataatttaatatcgggtcccattattgttattggtctaatttagtatcgggtcctatata

SEQ ID NO: 218756 - DNA, 3890 bp, Cannabis indica
ggagcattttattaattacttgtcacaagatattcggattgtgaaagaactacccaaggagctgggatcactagatttgaaatccatcggtagcattgtacgttcatctcctcaatttggaatctctttccccttcccccttcctttttttttttgcttctgctatgtttttgaattacattgatgatggactgttgtatcagattacagatgaagacatcagaaaagaggcaaagccaagtttttacttgaagaatgttctccctattctacttaaaaatggagttgtacattttcttggatttggaaatcggttggcatttgatccaataccatttcaactgcaggtaaacaacaggttccacctcgcggcatctatatatataaataaattataataaattgcatcctttgcttaattagttgtttcttctaccgcttgttctctcttcctaattggggaatttcatctagagacttcgatgcagatgtaatttccatgctttgcaatttgctcccaagattcaagaaactggggctttaatcttcaaaggctgcgtcatcatgaaagtcatcccggaggaccattggatcattatcttgttggttcatatgctgaagcatttaagagacagaatcaaagtcatccaaagaaagcttccagatatctagctttacacttgagatttgaaattgacatggtagctcattctttatgtgaatttggtggaggtgaggaagagagaaaagagctggaagcttatcgtgaaatccatttccctgccctgacacttcttaagaagaccacaaagtatgctttatgcctttcctctattgctgttactgctattatatccttacaattatgtcttccataatataaatcaagttcccaattagttttatgcttcgatgtctggtgtttttttttgtgccactgtccagttgtgctaactggctttcttccgcataccattacaatatcatgcgacatgatttcctgttttgaaatttcagaatgtgttagtttgatattataaactatataaagattttaatatgaaaattcaagcttatttaaggagttgattttttcaatattctatggcttagcttattttattaatgatttgtctttcttggtagcagttggctttctgatgatttgtaaatttccagatatcttagatacgtccttggtagcagttagcttacctctttttgataaaagcaatcaaattgacaataaagtagtttgatttgtaattgattttttttttcccaaaagtttttactacaggttaccgatctctgttatttctgtgtagcagttgagttagagattgcgttttggtgaagtctccctcttttcataatcttttacatttttactccaggttaccttctccccaagaactcaggtcagaaggtctgtgtccattaacgcctgaagaatcaatacttatgcttgctgctcttggttttaatcgaaagacacgtatatttgtggcgggctcacaaatatatggtgggaggtcaaggttgattgctttgacaaatttataccccaagttggtcactaaagagaatttgctttcaccgactgaacttgaaccgttcgctaacttctcatctcaggtaacacaatatgctgcaaactcttttcagtgttacagaatgctcagaaactttattttctttcttgctagcaaaaacagtactcaactatggtccttacatgtgttaatttgtttttcttgtaaagttagcagcactggactacataggctgtgctgcggcagatgcatttgctatgacagattcaggtagtcagttatcttctttggtatccggttttcggatatactatggtggagggaaaatggcaacaataaggccaaacaaacgcagactcgcaagcatctttacaaagaactctactattgagtggcgtatatttgagcagagagttaggaaggctgtaagacaaactaaacatgtccaaactaggcctaaaggaaggagtgtttacaggtatccaaggtgtaaagagtgtatgtgcaggacagaataatatgtttttgctttaatactaattgtaaactgttagattaagtatatccattcttaattcgtttttttaatcatttattgtcgattcattataatttctatgattcattaacttggtttggataccatggaactccataccagaaggttactgtttgataaacgctatatttctttgtatcaattttcctcactgttactttcattaatgaaatatatattttcttttatgttaccggatacatgatcttcattatttctatactttaataggataaactgatactggtatccttataatatgatttaaactcccagtcagaacaatttcaccaaagctgaagtcatccattgctttggtcacattaaattcaacaactaactcttggcttccttcggaagctatagaaaaccaaggtggatgcacgcttactgcagtcccattaggaggcaacacagcacagaggtaagtctctggctttctttgtacattcttgacagttcgatgaactgatcgagatccattcaatgctgaaattgttattgaaggcaggttcaaattgtctgggtgagtgagcgagccattgcagctttctccggtggcattttttattgtggctggatccattccgggcaatgagcacaagaaagcaatgtaatcttcataccctgcttcatcaaagaaagttactatgatatcctgctatgcttttgcagtgatcataatgtagatttccattgttataaagaaatttgaattaaagtgttacctgaagaaaataccaggccaggatctaaggctcgcttaggcgagactaggccagagccaaactcgaaagcagttgagggatacaaactgccaataccgtatccttcagccattataatccttccattgttttcatcgtacttagtggccgttgtggcaatggcagatgcaatcatggatggtgtccatgaaggattaagctgctttataagtgctgctactccagcaacatgcggggtcgccatgcttgtaccagataatagtgcaaagctgaatcctagattaaagcaagaaatcttgtttgtgagaaagtatgaggcaatagcgccaaaataaaaatgaactagtttctgtttactgctcacccgctagtgttggttccaagacactcatggggctccacgctgcccaaatttggtggccaggggctacaatatcaggctttaaaacatcggctaagtttctatttgcatcaataatatcaggtcctcttgaagagaatctgctaacagtgggttcctggtctttgaagtaagcaactcttccttcccctattaaggcttttgccccaaatctccttacaatatttttctcgtccctatgtgtcctttcttcatagtagtgcaatataacctacattattgccatcattaatatcttgtttaaatatgtaagattcctcaaataatgtacatgcaccttcttacatacctgaacatcagctacatatgggatcaaaatgccagaaacgtcaaagggtataggctcagcaacgaaatcaccgtatgttggattcgctacgagaagaaaacctgaaaatcctaaagcttttgccgtgttggtgacggcggtaacagtagaggtcccattgaagaacccctctgagaatgtacatatcacaatactacctttcactacatttggatcaaaagcttcaggatattgacactcatcaatataaggcacagttttgggaaatgacccatctgtcttcacagcatcctttgccaatatcagcttgtgtaagaaaaaaccccatcaccaaaaa

SEQ ID NO: 218757 - DNA, 2028 bp, Cannabis indica
ttgttgacaaataaaactcaaattactgatatgatatggtataatgtgaatatgtgttaatatgcaggatttaagcaaccattggtagcatgttgtggtcatggaggaaaatttaactatgacaagaacatagggtgtggatggggaaagattatagtgaaaggaaaagaaattttgttgggaaaatcatgtgaagatccatctgtttgggtgaattgggatggaatacatttcactgaggcagctaataaatgggtttatgatcaaattgttaatggggcattttcagacccacctattccattgaacatggcttgccatagaaatatttgatctattcacatgaaacttagtatcttttttgtcttggtaataaaatattttaagttctgaattatccccatttttgtattattttagtttattttgcctataaaccaagagcattccattgcttgatatacgggtctatgtaaattaatttagttaagacaacaacaaatagtagtgccataaaagtcctatagtaaaggtggaccaaccaatactaaaaagtccttttataatccaaaagaagttaaatttatcaaccaaaacctcctaatagagaaggaaggttttatagaaaaaaaaaatatcaaatccaaaacagtcctttaaaatcaatatgatatctagtggggattttttattttcttcattatattaggtagtgacataatataagccagccttctttctctgtattattactacactctgttcacatacaaatggaatctcaatgctccttctcaagattaagtgttgtttttagggtagtgttggtgctaatatgggtggctttggctcaaagtgttgaggcaaaaactgatgataggtggtgccattttccggccatattcaactttggagactcaaattcagacacaggtggtctctcagctgcatttggacaagccccttttcccaatggagagacctattttcacaccccttctgggcgattttctgatggtcgtcttgtcattgatttcattggtatttcatccattctcaatcttttctcctctttcttgttacaaattctttgctttgctttttattaagaaaaataactttatagaagaaaacaaaaatatggcattattggatttggactgttttgtgtgtctacctctgagatatcataagcatagatctcaagaccatatcctttcatcagattcaaactcaaatctttaaagggtctctgtccaaaatttggtgtgcatgtgactacattttttttgcacataataataataataacatttgaattttgtttgtattactgcatttaaaattgaatttagataataacaacataaatgtatttaaacattgtgcagaaaaattcgtgactcgattattttacatattaaaataaaattggctgaaatgattttatttggaatttgttttgggaagctgagaagttgggattacctcatctgagtgcttatttggactcattgggttcaagctttagccatggagccaattttgccacagctggatcaaccattagacctcaaaacacaaccatttcacaaagtgggtatagtccaatttccttggatgtccaatttgttcaattctcagattttcgaagcagaaccttaagtcttcggaagaaaggtgatcatttgtttttgtgtttggattttgttttaaatgaaattgggcataaattaatgaaagtggttgtttgttttggtgcaggacatcaatttgagaaattgttacccaaggaagaggacttttctaagggtctatacacttttgacattggccaaaatgatctcactgctggttacaaactcaatctcaccactgaacaagttaaggcttatgttcctgatgtgcttaaccaattttctaaagttgtaaaggtcagccacatcaaaccatatgtcatctctccctcttcttttttttttccttaaatatatgctaaataatatttttagggaacttttatttgca

SEQ ID NO: 218758 - DNA, 3918 bp, Cannabis indica
ctgaaactgtcatctagtattgtgatataaaacacaaaaacagttgacttttactaacctttacttatgttctcaagtgttggcttcacaactgaccagctcccatcttcatgcacttctgttgattacattgttttcttttaagtaagagaaataattccacaaattcaattcactattacaaaacgcattttggtctaagaaagcaaggttttgaaagatgcattaccaatttctctcaacagcactgcagtgctatccaatggtggtcggtcgtataccccaagaacatctgtctttaatccacataaaatgacagaacaaaattatggtccattcatgttgttgttccaagaataaaaagttatggtcccttcctaaaatgtcaaatatgcgagtgcaagttattactcatgagtaaataccataaaaactacgaattcgggcttgaagtgtgctgccagatgtcgtatgataacatctccactcagtatggtgcatccctgattaagaaagtcaatgagctagacatccttacgattgaactacagaacttagagttgattaatttaaacagagggaccacaccagttcatcatcaagtacagcatctccatgggtaacctattaagaagatattcgcgcattagtcagcacacaaggatgtacaaggtggatatgtattctgttgcaatcttcaagaattgtatacactatgacatgagcatggccaatttcaataattaaataatgtgatttgccatcaaacccaagtacactaaaccaatcccctaatgtgtgtttttcttaagaagcattgggtctcataacaaacctcccatcaagaaatgcctccacacatttataaactttattgaaggactctagctctgttgatatattacagtggtcaatttcaaagagaattctgatggtggatttctattagtttgtatttcatgccactcaaagcataaaaaagatttaaacagtaagaagctaggtaagctaattatgatgaaagaagtgtcagaataattataggccaaaaacttacaggtacaaaaccagaatcaatagcattagtcattgcagataaatcagctgaagctatctgtcaaaataacaagtgtttaaacttataaaacatttaatgaccctttcccttcagaaaaggtaaaaatgagtaattttagaatactatgccaagagtaataaagttactcacatttctcatattggttgaccatccacatgaaaatggagacactccaacagaaggaataccctctgaaacaaaagtgcagacaaactaaattgactttatctgatatatttatcaaaatagtgaatttgaaagagaaatggtcatcactaaattgtattaaatggtttgtcacctctggctagagctctaacaatttcatgattgagctttgtaacctgtaagaccatcaagaaattatcaaaataagtatagagatcttgttatttatgaataatatgagagagaaaggtttcaaaaaaaaagaaaagaaaggaatgagagaaaggcagatcaaattttaagatgactaaagtttcgaaagacagaaacacagcaactcaagaagctgacttttattaggacaaaagtgtcataaatgtctactttatccatcattatcttcaataactttgcaagtttccagtgtttagtagtggatgaatttaaaacttcaaaagaatcacaagaaataaaaggattcaagtcttacagaaatgcgcgtagcaacaaaaccagccttaacaagaggtttgttcagtcctcctttatgaaccccagatttactagcttgaaagtgcccaaaagaacctgaggccatagttgtggaagacaaaacttcttattgcatatcttcaatttaagttttcttatgtggtgaattctacaaataaagatgttcctatagtgttgttttcatatgatcataaaccatataaaacacaaatatcaaagctttggtttctaaagcctaaaggatcaagtttgaggtctgattttgagaaccttttactaaggatcaacaggtaaaattatatgtaatatgaatacccattattcaatctcatatatttcaacttgtgaatgaagctttccacaaaactaacctgcaccgtgaacaacaataaatgagctggaatccattgctggcacagcactaaaatcatttatgctgcatgaaatttctgattctccagctcctttgctccaatccatcccaagaatcttgccagaaggcgactgcacattcatggattccctcagctgcaatgaaacctccttgaggttttcatcatgtattgtctctagttcattcttgcaagtaattgctgccccccctgctccattaaattacgaaagtgggatgttgtaaaaagcattaacaaaactatttgccaatgcattctataattgtacattaatcaaactgaccccaattaccccaaagcaaacaaaatatacggaccctgtattcacaatcacccatttgtctaaatagcctagtgaacttgtgagtatctgatttgtggtaaccagtgtaatgggtacaaatttaattactgtacactgaacccagtaagatcctcatcccacaaccaactattgtaaattcacaatacactcattaatctaatctaaatagccaagtgaacttatgagtaccttatctttggtaaccagcggaatgggtactaaattaattactgtacagtgaatccagcaagatcctcccaaaaccaactactgtaattcacaacacacccattaatctaataagctaggtgagcatgtaagaaccttatttgtgttaattagtgcaatggttctcttaaaatatcaataaatttaacactttctatgggatcatatcacaataaatataaacgactgttaatttattgaaaaaggaaaacaaaatctaatactaaatatataagatgacagaccgagcttgacgatgcatctgattggtgttgagagattgatggaggcgctttgttccatcgtttggttttttttctccatttctcgattttgttttgttttgttttgtttgaaaatgctttgcttttggttttcggaaacgcttctttactgagtagtttggtcctaaatttgtgccaagttgtgggagtgccacgtggtttatagtcaactaaatactcttgtctgctggacatgtattacttttccatcttccgaataaagtggacttatgcagatgttaagtgaaattttccgtaagttataaaaaaataaaaaaaaaaaaaaaaaagtagaaatttacccgtataaatgatgagttccctatctcgtaaggtgtgtttgatagtagtgtggagaaagtcattcaatttaattttaagtgaccgatctaattccaactaaactaatagaatcggatatccaattataattggatcgaatcagatacaaattttaaaaatccaattgaatcggatcgaatgttggatgagacatccgatccaatggatagccgaacctatccaatccaatatcatccaatgtccatccaatcatatttaacatttataatttcatatatttaattatcttgttttaaaaaaaaataattaattattaataagttttaactgtgcacctgcacacattgatttaatattttatataatatttatataatatttgcatttgatgtattggacttgtttattaagacttttgtcttattaaattagatttgtgttatattttattataagatcatgaaaattaggttggatttggattaaactattgtttattattggattataggttaaatttttttttcttatatattttctttttaattagtaatacagcctaaataagtggctaaaataggagtt

SEQ ID NO: 218759 - DNA, 3525 bp, Cannabis indica
ttttttgtttatataatttttttaatgcttgttttagtgctacaagcatattgctaatttgatatgcctgttttcttttttctttctttttgaaaatatatattgcagggggggccaaaatgtctcgtaccatcagcaagtccaagttccagttccagccactcaatttgaccgagtagtcattaactcgactctgcaccctaatgttcaaatagttcatcatttcaatcgcaggtccgtactaattaatacaaaatcacttttaataaatttaccccaattcctggacatctcttattgttaattacaatttatatataagatattgttatatgatcgaataatgaaattatgtgataatcttattttgaatttaggcctattgcacaacaagaagcaagaaacaatgaattcagagcatcatcgtttaattttactatgccatcttccttatcgtcctcaaggtagtttatttaccatctaatatttatgtataaataatctctagtcaagttgttaattatgtcctcaatattaagttgatttaatcaaataataatttttgttatgaacttaattaggaccaacctggcgtcacaatattctaacgtgaatgtcccaccacaagtacaaccagtccaatttggagataccattattcaaccatccaatctgtctcggtatgtatttatcttaaacttacccttcaaatcaattttgttgctataattaacttttataatttgttatatagaaattaagtgatggtaacaatttatacctggtgtgaaacaaacatagtccctaatttttgttgacttgttaatattttattcaggtttatttttgctcaatctcttttcctaattttggtttttcatttgatttattaagtagggtgaatttggacaataatcagcggcagcttcaagtgaatactactaataatgctatgaactctaatcactttcgtggagggcattctttcttttctaggtacaaagtgaaaataaattttagaaattagatttttgaaatattagcaagtaattaataagatttacaattatgcagatcgcagggtacacctaacggtggtggtgtgtatggtttgactgccaactctaccaataatacagcagatcatgtattgatgaactcacaagtaattatatatatatacaacttattttcaaatggcatataatctatttaagaaataattaattaattacacattatatataacattatgatcttaatattctcaggaaggtggggttggggttggaattcagagcaatggacaggcaactgttattcaaaacaacaatgcagcatctacacaagaggtatatttaatatatcaaatataacaaactaataacaatcataaaatttaattcccatttctgttatcaaattaagttcatgtaattgattttatttatagagtgaaataacttcggagaggcgtgggcgtgggcgtggccgtggccgtctcactactaaaaatcaacgagatgaaattggagagtcgtcaacgtcttctaaacgtttgaaggtaatttattacaataagttgcttgtacaaagcaccaaaaaaaaaaaggatttggcatttagaaaaataatactcgtgtacgttatagttatttaagatattgtatcttgtaaaattttgagaaatttaaaataatttacaacataaccaatgttggaacaatttatttcaaacgcataaaaattaaagagtcgcacgtgcatcgtttgaacttaatttttaacgtgttcaatttttcaaaaaatttattaaaatttacaaaatgtcttaaataatttccgcgcacacaattaaaaagaatagactaaaatgttcttcccattagattttgttattggcacaaccgcacaagaaagtttatatctatatattgattaactaatacagtactctgtttatataataaatatatatatatatatatatatatatatgtgcagaaggaagtaagtaggaaatgaaaaagaaattgcagaagtgccaaacaatgatgcagccaataactccaaccagcctgctaattcctcaaggtaattaacttctacaaatacaatattttcaatccctagaaaattttatagtatttaattttatggtacttacaaaaagtataactcaattttcttggacgacagtatttatattattgttatagtagacatattattaattggaatacataatgaatattcatttaaatgcaggcatatctatctttataatacatataaaattaattatttgaactttatttgataaattattaaatatttctaaaatttggtgggaatgtgtaaaaaacaaaacaaaaattgtattataatttcatcaaatgtcgaaaagttacacttctactataattacttcaaatataatatgtgtatgctagtttgtattaatgtacacttaataattttaatgcaaaataataataaaaaaattaatacattttgctgaaaaaattacaaatatatttcatataatttcattataaaaatgatctttcaaaataaataataagaatatcgtgtatataatatttaaaattaaaaaatttagttttatatatttactagtaaaatatacagtataaatacattatttttacaaacaaaaaaattattaaggaaaaataaattcttgtatatacaatgtccactttgaaatttaatgagtcatagaaaaaaaaaaatagacttttatttagaaaaaaaaatatagtattttttaaaattattaaaaaaaataaatttttttggcctttaaattaagtgagctcttagtataagcctaatttgcctaaacttcaagcccggactactttcatgtaaaattactgtcagtgtattctgataaaccaataagaactaaaaatataattaagacatttcttcaaaacaaaacaaaaaacataattaagacattgaaagaaaaaaaacaaatgaataatcataactttttttctattgaatggatgggaatttattaattatcaacatgggtgaaagaatttacacaataacgttattttcaaatttcatactacagatataacactttggatttatcttagtcttctctcttttctctaataaggaaaaaataagaaattaattaccaaaaaatgagaaagaatattacgagaataaatgtgttagcccatattgttgaaaaacaagcactactcaaatgaaaatagcactgactagagatacaaggaatcatgaaagaatattccttaatctacactatattatttaaagaaaaaaagtttttaccatacaaaccaaaaattattctcataaattataactaaggaaaaaaaaaacacttaattaaaataagatgatagtgtatacaaagatatcgatgagaattatttaaacaattaagatatgaaaagaaagaaagaaataaatagccataacttatttttcgtacaatgagaatttacttcaaat

SEQ ID NO: 218760 - DNA, 6626 bp, Cannabis indica
ttttaaaaactaaaacagttttttagttatgatgccaaacatgcactgaacttttcttctttcaatatgctttggagaataattttttataaaattacagagcaggctgatagcttatcttgtgcttagtttagtacttttgagttttaagagaaaattataagatcatttctcatctgcgcaagaaaccggtgaaggagttgccatgcctttatcagaagagttgttaagttctttttatttccacgaatatagtctaaggaaggtttaattagcaatggaaaatagaacggcagattaccctgtcatttctacaggatttctaggtaacccctagaaaagaatatatggtttggctgaactaaaataacttgaattcatctttaaactcttatcagaaggaaagcagcaggcgaaaatttctaactgggtgtcaattggcctcttgaaggttatttgtaattgagtttaccagtaaacactcatttgttaagtttaactaggtcctgaaaaccaaatgctttggctatatttctttaacaaaagtgtagtgagtcaatttattttaaaggctaagatctgagggataatcttgaaaagaaaaacaataagaaaaatgaaataataaatttgataaatatgggtttggccacctttgaattaggatggtgaatataggaaaaataaagaggacgaccccttgcaggtatagaatccagcaggaacaggatcacttggaggtaggttttttttttttagaaagttcaacacttcaatatcatcttaattatgacccaaatttagcggcttctgtgaaaaagcaatagtgtgagtgactagttatagatatagtatttatatgtgaagttactttatcattatatctcatagttgcaagagaattcttggattcatgtgtaaacactgatgttttttctccttaagccaatatagccctggcttttctaatccaatatgattctgactttcaagagcctacaatgaggtggaacttccagttgataaacttcattcaagaaatcatggtttgaagtttacagaattttcttagcaccttagggctatgtttggatcttggagtttactatagaaaagttttataatgaaaaagagtagagaaaaaatgaatggaaaatatttttgtaaaattgtaagagacttgctttaatatttctctttttgagtgcatattgttttaaattttataaaattatttttctagaaaataaaacgtaaatgtagtataatttgcaagtgcaagcttctcgagtcaaaccttcaagatataaaaaaaaataggctttctagttttatatgccttgtgttgaaactgaactttgaatattgtgattgagcattgcatgctgaaaaaaaatggatagggaccacaagtttagtacaatcagttatgtcaagcttgcaacttcattttttgtttagtgttatcacaactacaatttgtctcaatctcaaccacaacatcaacaaataaacaaatacaaaacaaaggtaactagtaataacatgccaaattttacttcaaatttgtaagacttgttgcattaaaatagtaatcataaaccacaaaggtaggacatgggaaccatttacccaagaaacagaagcatcatgagaagaaaggaggtaaatggaagggacaacctgttacctcttttaggagataaatcataggtattaggtgcacaggatattagagaatattaggactaagactgatggctgcttagaatgatgctgtttcctagtgaaaatgtgcatttgtagaaaaatataaaattgagcaaattttctgggatattgtagctgaggtttttcatgcagaaattgactatgatgcgataagaattagaggaaggagctctaactccgacaatttttgtgttaggaattaaatgactggtatatatagatagtgtagttaggaagtgtccagtaacagacaattttataattctgcatccaactttcagtgtttaatttgtttttgctacagatcgatggttgtgattcgaaggagaatgtgtttgcacaaattgatgtcaccctagagaatcttcttcagcagaggaaggaagcttcaggatcccttgcggcatagaagatttaaagacgtgagccttacaagccttcataacagttgagtgactatggaaaacataccggtttttgtgccgcttcttaatattttttgttggtgctggttccatgctgaatatactggcaacaaaccccttccagatattgattcacatttcacacatgtgcttgtacatatattagcttccagtgacaataaacaattcattagtttttttttcctttttggtttcattaaaatttgtgtggtggtattatttcacctcatgtagtgtgaaacattccttgtaacgggggaaaatgaataatgtaagcacaatagcatcatttgtgcaatgtgttttctgtgatcgctttattctattttatttatgatggaaaactcgtacatttatggcgccctttatttagttattgcactcacacacacgcctacataataaatatgttgtatgtgtgtgtgaatagggacttgcatttttatagtgtgaacaacattcgaaaactgctacacatatccagttgagtatttccatttaagttacaaaataattggatgacgggtgagtggttattttttcccaataataatagtaccacattatgagtagtttcggtttggttgtattaaagtgagctttgaatttattttgtcaacaagtttttttttttattattattattattaaaaaaaaaaatgcaaaatagtccaactccttccatttccgtcaaacaaaacccttatttaaataagcatgtctaactctcacattaatttgagaaccttcgttctaatgattgagaactaatgtcaagaagtcgtcctccaagccgagaagacttgtaaatttgcacagttcttatttttcaatcaatttgacattgtcattgaatattattttctttccagagctggatttgaatcaaccaatgacccaaaaaaagggaaaattatatggactcgaataacacacttggcatcatttttctagagtaggtaattatcacatactttttttaagcataaggcccacaccttagtgaacaaatgagaccaaaatttttgaatttttttacgtgtgaaataatactaataataataaataaaaattaaatacagagaaaagaaatgaagaatcagttttgatttacaaattgaccaagtcagagttggtggtgtaatatctacgtggaagactcggttgaggaccgagagagctgtggccgagccaaacacgcagccaaggctcgttctaagctacttacaatttctgtcatagatggtctgtctcgaccctccaatgtgacacaatcaacagccaagtaccccacatatgccactgcctcaatctcaaatggggtcggtggtgggacgtttggatctaaagctctgtgtatctcatcttgtataataaatggtaccatataatctaccacatttcttggcaccccgatttcatttttatgaatggcgtttaaccctgaaagtaactcgagcaacaatatcccaaaactataaacgtcactcttagtggttaaaatttggagccgaaagtattctggatcaatgtaacctactgtccccgcagcacgaagagagaggtgtgacacgtcatcttcgggccccaacaatgagaggccaaagtctgacaccttggcagtccacgtggcatccaatagtatgttggaggacttaatgtcacggtgtatgattgaagggactgcgtagtcgtggaggtattggatccctctggctgcgtcaagggccaccctgattcgctcggaccagctgatgagaggcgagggcgagctctcgtgtggtttgtggagatggtcgtggagggagccattggtcatgtactcgtacaccaaaactctctccttgttgtcctcgtaaaacccaattaagcgaaccaaattcttgtggtttaaccgtgaaaggaattctagttctctgacgaaagcgttgtctctgtcctcttgtcgttttgtggcagtagcacccacaaacgacgaagatgtcgatgcttcaccccttttgatggctacttctctgccatcgtctagctttccgtagtacaccgaaccataactgccacttccaatttttcgctcttcagagaaattgtcagtgacttcaaggaggacccctaaggagaattcttccaagtgagtcccattgtttcctagactgattaaatggcttagtcgcttttcaagcaccggaccagagtggctttgacgatgatgatgatcattagtgctgcgtggaccactctggttgtttctgctagaaccagcttcaactgcatcgtctaaccggcctgagtcatgtactcgactcccactaaccttagaaaaccttaaccaaataaagaaacaacaaaccaatactaatgccgttgttccaacgcaacccaccacaagaaaagccaccatttgcttactccaacccgacttccgccggggcgagggcggcggaggaggaggtggtggtggaactggagtctccggtgaaggagaaggcaaagaattggatatctctgctctacaaacacttaatccttgtgggcagaataacccagagcctggtaacactgaaccgagacatttacttctgcagggaccaggcaagactttgtcaaacacaacagttttagactcaaagtatcggttaccccaacaatgcaaagagaagttggaattcaaaactccacaaaaaactctgcgtttcgcttcgatagcgatgaactcactctgcctaagagactgtggcaaggcgaagttgttttggccccagcaaatcactgttccgtttggtctcaaaccacagcttcggttttctcccaaagccagggactggaacttttcttggggctgattctctcttccttgactatctccccaacattccaagcttccattcgtggcgattgcgcaagcgtgagaaaacccagcagcgatttcagtatatcttcctccgggcacactccccacgacgccattgttgctccctaagcaagagacgtcttgagtatctcccaatatcccgcacaagaaattctgcccaactgagattttggagaagttctgttgactcccggaggaggagttgaatccgtgccattgccagcattcaaggcgattggtcccgttgactattccacaaatgtgggaatctcccgcgtcgagttcactcagatatggaccaaggtagattcgcttgtactgaaaatccgaggcaccagtaacggtggagaatctccagcaaagcaaggccgattgttgaggcaacttagtcaacccgcaaacgaaaccatttccggaaacagtttccgaaaaatcgggattggaagacggaagtcgaatcccggtaccaaagttagtacaattgaaagacttagaaaaagatcggctgttgttggattgtactgtcaatgtcactgcacagataagaatttggttagaagtttcagagatggaaacagttgagagggaatgaagtgttggcagaagaagaagaagtggtagtagtagcaaagagaggagagaagcagccatggaaggtggtattagtgttataagaagattgagaaaatttcatggcgggaaggaagagattaggatttagaggaaacaagtttatgaatttgttgagttgagttgagttgtgagttgtgaggaggaaatgaaatataaaggaataagtgagacaaaaaggcaaaacgcggtttgtggtttggattggagaagagttttgagttgtggaatcaggactgactcagtcatttgtttgaaatggttttgtatatcatgttttaacgaacagtgtacacacacacgtacaacagaactagccgtgtgagaggtcaggtcagtccagctgagctgagtagtaagtactacttttttttaaaaaaaagtactactttttttaaaaaaataaataataataataatataaaaaaaaaatgtgaaacccaactaacttatacgtatgcatactcacttccaaatctcccaacttgtctgaatattctctttcttctttcttcttaattttccttttattatgtaataaatatgagagaacaatgttgtaacattagtttttcttttttagaggaaatgtagtaaaattagttgctgcaagaaaaaatgctgtaaaattaactgttgcagagtagtagttgaatttgtggcacttttactctgcataatttaagttctaaagctatgcttggttaagcttcttttagattgtttttttgctttaagaattaaatcaacacttttggaaatgttttggtaaaaaatttaaaaaaaaaataaaaaagaaaaacattcttaaattttatggtttttttttaagtccggattcctaactactcaagaagctataagtataacttttatattctattattttttattttttattttagcataaattataatgcatcatacatcaattatttatttttttt

SEQ ID NO: 218761 - DNA, 3099 bp, Cannabis indica
cgaaacttattattacaagtttttattaaatttatttattgtatttttttctcatatttgaaactttaattatttttaattctatattttttttgcatcatttatttatgctatataaaagtgaattctcgtacattttcccatatatatggaaaaaaaacccatctaaatacctaattggctaattaggaattttgtcccctaaactttgacatgtaccaaattatgtcccctgaattttttcgatcgttaaaattttttcctgaactattgatatttttgaatttaaggacttttgtccaattcattcaatttactaatttagtgattgtttatgtaataagttatgcttctcagactttaatatctaccaaatcacgcttctaatactttgacatgtgccaactcatgccccctgaactttcatccatgttagacttactaaaattggacaaaattccttaaatctaacaatctcaatagttcaggggaaatttttaacgaccaaaaaagtttagaggacatgaattgatacatatcaaagttcgggaacaaaaatcctaattagcctacataatttagtcggcacgttatgatgcatagacatgttcaacctttctctattaggccaagactagtgggctcttctattaaatcattttttaaggttttatcttattattattattattaaacttggagaggcaagaaaaatggatctttgacaaaaatcaccagagggcctacttcattggtcatccaatcactgctctaaaatgttgtatgcgaaatcttttgactccatccgtggcaagattaaaataaattaagctaagctaagctaagccaacttttaagcatggtggcagaaagccttagagaggaaattaatgactaatttatccaattatttgttttttctttggccaagactatattatagataagaaaactgagaccaattccactaatttccacggttctcaaaagttaatctcaatgaaaaaacactagttattagtagtatacttggtttattacagagatgatgtaatggtcaatatgatcaatcgggtcaaaacgccaaacacgtaaaagttgttaacacattctcactattcttggtttattgcaagccctttataaagtaaagaaaaacagtcatttaataagcaaattatttttaggatctgaagtgagaattaatacatttactatacaatactcaagcaaagcttattacagatagtaaaagcaaaaacagaaagtgtgaagtatatactacttgtttattttattatatttaagaaaaagaaaaacagaaaacataacagcttaattgctatggcgataggaggaatggtggtttcaaatgtgggaaggaactacgaaggcagtggcctcaatgcctttgttgtggtcacttgtttggttgctgccatgggaggtctcatcttcggatatgaccttggaatctcaggtttgataaaattaatctcgattaacacatgacaatattataaatatatatagtactgatgcataaacgaatttattatttgtttttggcaggaggagttacttcaatggaaccttttctggagagatttttcccatctgtgtacagaaaaatgaacgatgaaacaattcatcaaaacgagtactgcaaattcgatagcgagttactgacattgttcacttcttccctatacctagcagcattggcagcctcattcgttgcttcagttataaccaggtcttttggtagaaaagtctccatgcttattggaggagtggtcttctttataggctctatattaaatggtgctgctgcaaacattgaaatgctcattattggtcgcctattgctcggtataggtgtcggttttgccaatcaggtacacatacaaccatcaataccatttataacatcgtcacataggatagaacctcgtacttcttcccatacaactcacctatcctaaatattttaatttgaaatataacacatgagattagcaacaaataaaagttgggcaaaacaaatacataaagaaatgtgtttctgagttatataattgtattaatgtgatgatcataacatgaataattgtatatgtatacagtcagtcccactctatctatcagaaatggcaccggcaaagatgagaggagctctcaacataggattccaaatggccataaccattggtatcttagtagccaactttgtcaactatggcactgctcaaattaaaggaggttggggatggagagtctctctaggactcgccgcagtcccggcagtgatgttaaccgttggagcaatgttcttacctgacactcccaactccatcctcgaacgaggcaaccacgaagaggccaagagaatgctgcaaagagtccgtgatgcagtcaatgtggacgatgagttccaagaccttgtagacgcatgcgaagcctccaagaagatccaaaatccatggaagaacatcttgttgcctcagtacaggccccaactcaccatttgtatcttggttccctttttccagcaactcactggtatcaatgtcatcatgttctatgcaccagtgcttttcaagactcttgggtttggtgacaatgcttctcttatatcttctgccataactggtgttgttaatgttcttgccaccattgtctccattgtttcggttgaccgatttggaaggagagttttgttccttgaaggtggcacacaaatgattatttcccaggtattacatacatgatcattactagtacctataaaagtgccagtttttcactctgttttttccctctcaaacaaacaatgagtaatatagaattactaaatatttggctcaaagttgttccttaatcattaattttgagttaaattaaagatatccttaacactttcttcatgtttttgtatgtatagattgcagtagcagtcctaatagcattgaactttggtgtatcgggagaaggagtgctgacaaaaccagaagctgatctactactagtgttgatatgtgcatacgtagcagcatttgcatggtcatggggtccattgggttggctagtaccaagtga

SEQ ID NO: 218762 - DNA, 3725 bp, Cannabis indica
atttcattgctcaactttgtcacacttgcttcagcagaggctcgtacactcgatgcagcattaagaaagctggaagcccatttcgaagaagatgtagctggagctctacctagtttctgctcctctttcttactcctatttagaagactcataaatccaaaacttgattctggtttctttggtccgggacatttgtggtcagctccaaaccggtgcttcaaacaatggtctactaagcattccctgcacttgagtgtgtttgaaaatgttaggatctccttgcatctgggtactggacatattttcttctttgtgaccctctcataatttgatggatcacaatcagtgttaacatgtgtttcccaagtaatatttgcgtcctcgtcgggatttagacgaacacctttggcacagagtggacaaatgacaacagtgacatcgtttctatcagcctttggacaatggtgtttgatgtagctccggtgctccaaacaaaacacctgatcaataattgaatcagaacattgcaggacgagcagaagcaatggaaaaacatagaatgaaaagccatgtgtatgagaaattctcttatcattgaaagataaaaacaactatataagccagaaaattatatccctgaaacactattacataacattttttcaacttcaacaagtaaattgaaatcatcaccacctcaatcaccatttgagaacattaatggctcaggtcctctatccccattttaaagtatagaaagagccaaagtaccaaaaattaaagagatatgctaaaggcaacccatggtgcctagaacttgtatgaggtgtcatatcgctactggtacaattcaatatcgtggtgccacctcatagtggtgctagtgctaggcatcatgatgcctaatagcaacactcaaaattgaatataacacagaggttgaaatatctttaaaccagacatacttattctaaaaagtacaaccatgaaaatacccttaactaaacttgaaatttatgtgtatgaaaccaataagaaaaaccacttctaactaagaatatgattataaaaactattatgaatatttaaagtggtggtgcacgcagagaactaaagaacaaataggctgagaactattaactgtaaaaaccaactataactaaatcaactaacttaaacctttatatcaagagtttaccatcacaaacttgggggaatttaaaaccaaccaaaaattccatattcctactgcaacaatccataatctaaagattgttaaatatacatagagaagataaaaaaggttcttttcctttttgggtatagtttttcttttacaattcgttttcatgtaagaataaatttatcattttttcttctaatcttttatgggtcactctcaatctcctccttatcaaaaatataataataatccaaatcatattttgtgagtggatacaatataaacagaccatagaaaattcaacaaattgtaaatgtgaattaacataatgagatagaaaacgaaccagacggcagcgatcacaggtgaagggtaagaaatcgatctgcttgcattcgtcaacggagcaatgcttgcccagatcagggaattccggagttcccatggaaaatcccaattgaaaacaaaattggattgaatccaattaaattcaggaaaacttgaaaggcctggttttaattggtgtagagaagagagtcctttatttgatgggtttttcttacgcggatatgtatgtagcgtagcgtagcgtagcgaagaaggagacgaagactccaaccccaagaaccaggagtcgttcaaacttcaaactcaccaaatatttttgtcactatttttcttcacaaaatataatatgtatatcttttttaagattaaacatatgtacaccaatactaatgagaattatatcttaagactagtaatgagttgagtaattatgtaaagtttaatctaaaattcataaaaataatgttttttttaacaatgaacaaaattttattgaaaaaaataagagtttagtaagttgaaaaagaaaaaaagaaaattttatatccaaactagcttattatccattctaagtacgtgcacaactaattcatgagcagctatattggctgaccgacgaatatgaattaggaacgcctcaagaaaattggatagtaaactagaaattctaaagagaaccaaggtcattacaatgagaagatcttttagcaaaagcagagatcacaattaggcaatcagattcaatagaatggagagggagatcaattccaagagaccaatccaacgccaccataatagttactgcctcagcttggataactataaaattccctacaaaaccatcgtaaaacataataagattcaccttaagatattaaactaataaaaataataaaagctggtaaaaaattaaataaatatcgagtctattttggacagaagggaaacctcccttcgtccgtacaaaccatataaacattgaacctaacctcatactttatttggaagtatgagaaacaacatcataaaaaattcttaaatcagcaaaacattaataaaaaataccattaccaaataaagatttcgacatgcatgccatcactaatctttgtgagtttcgaataattgctctaactctaattgtatcacttttatcatccaatgatgcatccacattcaatttaaaagtccccaatggtggagtaatccactttgacattgatgtacaaatagtcttctcttttaaactagtggtaagttggatactattaaactcatcagaaagggattgaatacatgaaactataacttcaggagaacaaatttggtgtctatgcactacttggtttcgctctcctcaaacataccaatctgccacaaggaatacttcaaattctgactgtgataacacttttgatgctttaatgattatttgttgaaaataaacttcgatagagagactatttaagagtttgaactttaataatttccacaccttcttaaacatactataacaaaaaaaaaaaaatagcatggctatttgtatccagattgtaaccacatagaggacagttggaatggttaataatattccttttcttcaaaccaacattagtaggaagtatctcatggaagcctcgccaaacaaagtttaaaatctttttaggtaaatgcattctccaaaacctcttccaccaaactgaaaacacatctttagaaggagattgattagacaaattaaaagtagaggctacaacatagcaacttttaacagaataagaaccatcataaaaaggattttaatatattaaaaaaaatataaacataaattataaaatataaaataaaatactaaaagagtcccatcagggcagagagtgtgatccctgtgtcccgtttaacattcagagacaaaaaataatcctcatattcgctccattctctatttaaatgaagaaaccctacttcattagggacgagtctttgctgggctccatcctccatgacaagaatgtgcatccctagtcataataaaattgtgtataactctctttggatcaattggggtttgtaaaatttatccactttagtatcttggtctatttaaaattctaatattctccaactaatcctattttaatatttaataatgggttaatgtaaacaattatttttgttttagatatttacaggg

SEQ ID NO: 218763 - DNA, 2682 bp, Cannabis indica
ttaaaggtggggtggggtggggcagagtcttgtgtgttttgataattgtatttgttatctttggctttttcccagaaaggttttgtctaaaggctttaattttgattagttggcctagcaaaatttgtggtcctcttgacatgggctgaactgctgactgatttattgtcatacagctgttaattttttaaagcctgccataaatttcttaatagctattgatagtctcagatgaaaatttctctatttttttaatagtccactaattcctttgcaattgaacaaaaattgcttgaatttctgcttcatcaacacatgagtaatccatgaaagtattgctttggtaggattctgttcaagctgacagggatgaccccagcttacctttggttactgctccctttggacatgcctctcaggtatacgatcacatgtcataagaaattaatcctcgggtttcgtgcttcagtttttttgaaactatttaaatgtttacacaggaaattgtgaacctgctgctatgcggtcaggcagtccccaacgtgtttgatggaaggatggatttaggtggtggcatgttcttaaagggcatatctagaaccgtggaagttggtttcctcactctgctggaatctctaaatttctgtaaagttggtcaaaatctgaagtgtccgaaatggccgatatgggttattgggagtgagtcccattatacagttgtatttgctcttgatacttctgtccaagatgagaatgaattggaagaaagggaatcacaaattcgaaaagcttttgatgcacaggatcagagtggaggtggtggtttcattagtgtggaaggctttcaccaagttctcagggatacaaacacaagacttccacctgagaaggtggaccacctctgcagcacgggttttattgtatggagcgagttctggcaggtaattttagatttggataagagtatgggaggcttgaaggattcaacaggtttaatgggtaagaaggttttcgagctttatcattttaatgggatagcaaaatcagatttgaatggtagccaattgatttctagagagactccagtccaaaggcctagactgactaaattgagggtctcagttccccctaggtggactcccgaggagtacatggctgatgtggcagtgtcctctagttcaggtggaaatgaatccaaagggaaagaaaatgaagtgacgaaacccgagcctcctcagcatgctcctttagtggactgcataagaacacgttggccccgttctgtatgcaattgggcaggggatccacctagcatagtctgaaactattttggtgtctgttttctaggatgctctttgttcatacgaacaagcataggtgaagcagcaaggaaatgggctcgtgctgttttcgagtctcgggacactccagcacatgaatagggtgaaacttttcaaaagttgtgtacattgttgcttcactcagttcgattttgattgatatgtctttcttcaactgtttaaaagtgaggatattctgtaatattgttgtctgttggaaagtgtaaaatcaattcataaatgaactcttcttctgttgtggtttagggaaagattagttacttgggaatgtgtaataaacatcgagtccgttttggcatattacaattgttgtagaagtagtagtgtagtagtagagtttcacctatgtggtgttgaaatttgaatagtgaagtcattttattaggtgtgatatggcagatattacatccttcatctttgatccttcgaccaaaaaaatatggtcaccattgttgtaatcactatcattgttatttttcaactttgttcccatgagttagtatatcacattatcaccttttccttttcccgacggcttttttattttatatttataaataaaggattattttgctttaacaattttttttcccttgtagattttaacaatttattatttagctttttctttgtttgacattatttgaacttagagggacatccggaaagatatattattgcctatgatcattattatttggttatttaggatttttgtatgacttcaaattattcagtgttgtgaatattttagcttgttaaaagtagtcatcgaactatttacagtatttttttgatcgaaaactcaatttaacttatttcgtacttttactcaatgagaaaatgagtcaaattttacaagattaaacttatggcacttaataaagaatgatggaaaagaagaaaataataaataaaaatgaaatagaagagcaaatgaataaaagattgaattagtcctacttactcttcgaaacgaagtggaagaagggaagaggttcttgaactaggaaaaaaaaaaggtggtcttactatcaattttttttacacgtggcaagcaaaatgataatgtagatgtgtataccactgtcctattatgtgtaatttaaaaaaaaaatgaaatatgtatcttttaaaacgtattaaactcatttatcaaaaaatttattaaactaaaaatccattaataattaaaaatatttaagtagttacaaattaaaaatcgttaaattatttattttcaaattaatcacacatgtggcattgccgtgattataatctaaataaccatatcataattattattttgtttgctacatat

SEQ ID NO: 218764 - DNA, 2653 bp, Cannabis indica
aaaaaagagaggagggaccattcattaagattggccccccaccctcgagatatataaaaaaccctcgctaatggcggaggaaaaccgtggttacaaagtgcaccaacttctaagacttaaacaaggtctcaaagatatgattacagcaagcactcccctaggatacacctaaagaattatgcaattgaagcttcacatcaccatctttcttcaggaatttctcgcttagacagttgtaaagttgagattgaaaaccatatttctttacaatggtagaacaggctagatggaattccttaatctatcaaaagcactggcaacatagttcaaaggttgaactcattcacttcatcacttattcttctattgttagtttttattgagaaaaatcataataatttgtaataatatgcattgaaaaaaagaaaaagaaaaaaaaaaagaacctatgcaaacatgttttaagctttttgctttttgaaaattgtttttagaaaacagttgcgtcataagattttaaaaactacaaaacacggtatcctactcttacttttaaaaactgaaaacataaaacaatgccagacaggaaacagaatacttccaattccgcttgtccaaaaggaaaagttattaaagaaactattgttttgaaactcacaaacaatcatataagaatttccccatctccaagaaccaaacacaaccattttatttgaatttgcaaaacgagtcaattctagttttagtggtgggggcaatttatatattcaacgtggccaaaaatagaagttttgctaaaagaaacaactttcaaaactcatgatccatccacaaacaaaattggttatagtacttttagttatgataagactaatttttgcaccttagaagataaccaggatttcttatgtgtctagcgtcttactcaaaaatagcttaagttgtccattttgacaccataacttgagactaaaatcacaaacccagaatatcaacagaggcagttaggttggagcatagaaacaatagcttttgtctagtctaatatcgactcgttgatcaggggttagctaactaaatctagaatcctaggattgcctaaatgttagtattaagacccaaccaatatatccgttagggtgtgttcgttgaatctaaattccttaaacttatataaattctgaagttgtttaattccatttacttttgaaattggttacttgatcttacataaaatagaacaacataaacatgagagagagtgaacaaagcttacatgaaggccatggagacctgtttgagatcggtttcaaagttttttcatgttggcaagcgattgggcacagaatatgatagctagccacgagcaaagcttatactgcatgaacaaatgaacacacaaattaaataaattgaatacccaaaatcacaaaactcgaaaaagaagaatctgaagaagggttttagtaaaagggaagtgtgatcggatctgagttcgaaccctgaacatgacgccgaaaacgccaaagatgacggcgataaatcccgagtaatcgacgggaagatcttgaggagccactggttgcggcatgaatggccttgccgccgatggctgccgcggatcgttcaccactgatgcgttcccatgagacgacatctctctctttctctctcacacagactatcaggtatcaacgatgtaatgaataattgaatagttttacacttccataaaatctcctcattttattaattgatgtcgttttcatagcagttgtcgtttagttgtaataatgtcgtacactgaaaaccccttatatgtgtttatttttttttttgaacaaccccttatattattattattatttgggaatttctcataaatatagaaaaataatttaaagtttacttttatatagcataaataaataacgacaaaaaaaaatataagattagaaaataattaaaatttaaaatatgaaaaactaaataaacgaccatacataaatttttttttttttttttgacaaagaccatacataataaaacttctaataacaaatatcctcagagaagactttggcatcgaaaaagtcacagacaccaaaaaagttactgttgttggaaaagatgttagaaaattctttatcgccaaaaaagtcactgaaattgtctcgtcgtcggaaaaatcattggagttagatatctcagatataaattaaaatagaatcgtatctataacataatgaataaaaacaagtaacacacaataactaaaactggatataattaaataaacaaagatgaaatctgtttctaaaacactcaaacataaattaaaaacaaaactagtttcataacaaaataagtaaaaataaataacacataatacctcataagtaagttataatttcttttaaaaaaaaaagttgtggatcaattttaaaaatactgaagcataaatctaaacagaatcggttcataacaaaataagaaaaaataaataacacacaataactcaaaaaataagataaagaaaccaattatatttatcaactagttaaaaatgtgagacaaagaaactagttctataaagcatctaagataaaaacttacacacgaaaacaagttaaataatataaataaataaaaa

SEQ ID NO: 218765 - DNA, 2546 bp, Cannabis indica
agggagaggtcatgagttcgaactcaaagcgtttaaactatcaagttattaattgattgtaatactattatactacactccaaataaaaaaatctataacacctaagtttgtaaaagttattctttggctgtaaaagcattaaattaattattacattaaaatacttatttattcaaattatttttttgacaacaaaaaatacaataaattattatgttggtagtaatatctaccttattattttggtgctaaagtatacttatatgttataaaatttacttataattaatatcggtactatatatatacatatatattaaaataaattgagtacatgaactaaggcaattatagcaaatgatctcaaattataggactatattagtaaatgtctttattttaaaatttatagagaaataactcttttaaactatttgtaagcataataatttaagtacctttgctctcaatatattaactctgatacttaattaactaaaaattttaaatatttttactgcaagtatatatattcataaataaattaagttgggaatgatgagttaattatgttcataattaaagatttaaatttgtgaaattttacttgtcaatgagcaattatgtgaaaccggtagcatgtcatatggggtgagccaaaacaatattttgtgattatttgacgacaagaaatattctttttaaatcttttcaaagggagacaaagcaaaagttaatgagacccatttggcaaaggacctaatcatttgggagaaggatgaagggaaagaaatggggtttccaaagctttactttcactatcattattttgtgatcatcatctcttgaaaaggaagctttattgttggttgattgtgactctctctactcaaaaggacaatgcctttatataaatatatacatagtaaatatatacatagtaaatatatataccactacatctactttctaactccttatattgaagactactactaccaccaaaaattatctatttgatacatgttatatattttggataccccagtcgtgaatgtgactcttttcttgaatttataatattccataaataataatatttatcacaatcatacatgacccacaatttaatacgtgtgagttagaatatttttatattaaatgtagtcatttaattaatttttacgtgtatataaatactctatggtcagttttctattcactaattaatttatttttcgatttaattttttaaaataattatcagaatattctaacaattaatgtaatacaaatattaatgaagtatctcacctacaaatataggtaactgattcccgagatccttactcattttgtaaaaataacaaattttatctacagagagtaagatagcttagaagccccgattacgtaattacttgcctgcactaactagtttctttttcttttgtagatccaaaactcgtagtaaaaatgaaggtcaaaaaatcaatgattggaaatattttaattatcccatgtatatattaaatttaattcggtattttatacacaatcatatatgttttatatcatttatataaatttttaatagttattatcaagagcatatctacacctctaccttgattaattgtatatataatcttatatgttcgaacaactttttatcaatacgtacgtatatatacatagttcattatgtatttgtttgggcatatttcttttatttctcttatccattttacttttttttacctcattactaaatggatctatatttatatatataaataaaaaattaaaattcttttcgactgtcttagtgtttggtaatagttttttttttttaatgtaattcatatttatattttatgaataactatttgagaaatcgtttatttacatttggtaattctttatgtaaatttaaattggtttcgggatcttttgcttttgaaaaaatctgacaaacatgtttatactcgagaacttattttcaaattaaagttaatttttccaatttctattgacataaaaatgtgattcatattttaatatatatttttcggattgctttggatctacaccatgaatcatggataaatatattattgaaaggcaaaataaattcaaacatgcttgtttcagcttaaaatattcatgaacacttaattgatgtgtctcgatcaattttgggcttgaaaatataatttttggcgacaaaaacacgattttccgactgggtggggaatcgggtcctgttgacccacgtacgagaatccgcatcaagaagacccggttagctgaggaagataacttatacaacagctaattttgcaaatgaaggggaaaatggcagttttcaaaaaaaaaaaggtaaaaattatgaatattataattgttttaagaaaaaattacattgtatacccactttactttacttattttaatttttacttttaatttttttattctttaaaatatacttattttatagatgttgtccccattaaactccttaagttaatttaaattatat

SEQ ID NO: 218766 - DNA, 13469 bp, Cannabis indica
aaataaatcatcataaataattattttaatatcaataaataatttccataattaaaccctatttatctgctaatttccaaattaaactaagcgatctttacataataactcattttatggacaagaatggaagtttcagcctaatgaacaaagggagttgactaattgtttcaagccctagaaattattttagatgagccgaaaaaatttggagagctgaacttttttgagattaaggccattggtggtggcattggagtacaagttacctcagaatctaatgccagaaccaatcctttaaaaaaaaaggaaagttgatgaaggtacttgctcctttagtgtctgccccaaaaaattacttcatcagcacccaagagtcgtttgagattttccttaggataagaatgggttgatacaagatacaaatgaaggagtctacttggttattgatagtcactttgatggtcagctgctttacaactcggagattgcctttcaaaccaaaaaggacgtgacgcataatcaaacgattaatgcaaccttggtggatgatgctgactatcgtatcttatctcatgttgctacccctgtggaggaggatgtctcatctccttcacaggtgccattagaggagtagcttggaactgtaaagggttgggatagacctctacagttcatgaactaaagtcccttacatcatatttctaactgaactaaagattcacgctactccactggtacgtattctaaaaaaccatcacttttaattcaatatctctgtgcctgctgttggttgtgcatggggtattatcttagcttggaaagttgggtttgaatttgaacgtgtaaattgctcccacaattaaatttcgggtttggtctacttgaaccccattggccacccctagctcttgtcttgtgtgtatggcccgccatacttccacgctaagaataaattttgggatgagattatgaaaattggagatagatttggaggcccttggttaatcttaggtggcacaaatttcgttcttaacgagcttgagagggaaggttctagggaaggatttctttttcctatcatctcgaacttagtggattctcggggccttattaaattttcgattcaaggggacaagttaacttgggacaatcatagatcgagcaatgcgcatgttaagtctgcgctggatagaggcttggttaacaaggagtggctcttaatcttcccgaatgcgattcttcgctcgtttcagaccaggaattcatatcataggccactttgcttatattttgggtgattagaagccaaattcaaaaagttctttgaatttgaagaagggtgtacttgggatggtagaagtaaactggttgttgcccatgcttgaaactctgtggtatactcttgagccccggccagactgttcaaaaagttaggggctactcgagtcgcactctttcaatggaacaaactttgatttggaaagattgactctaccattaaagatctagaagctaaatttgaaaaggctactagaaaagctcttaatgaggcggtgtataaatgaaatctctcaattggaaacaaagggcatgtatcttttggcttaaagatggcgacaaatgttcaaaaattttcttcctctaggctactattaggggaggtgtaatgctattgaaagtattttggataaagaaggcaagtggatccattcgtgagacctgattggaaaagagtttaccaagttccttagtgggatctttagtaaaaataactttgaccctgtgcttaattgcaacttcctaattcctgatcgcatttccaatgaggaccaggaagacctagtcaaatccccagacattgaagaaatacatagaaccatgtttagcatgggaagcaagaaagcgcctggtctagatcggatgtctaccattttttttcaagcattattggcagatagtgggggaggacttttgtgctgcaatcatggattttttagctcgagctctatgcattggggtgtcaatgcactaatgtggttttgatccctaagattcagaactctacaaggaattgtcgcttcagacccatctctctttgtaatgtgtcgtacaaggttattttgaagattattgcaaatagaatcaagcctctcctccctaagattagtttccccaatcaagttgcgtttgttccaagaagaaatatcgaagacaacaatatgattggccaagaaattatccactcctttaaccgaaaaaaaagaaaagaggggttctttgccatacaaatcgaccttacaaaagcctatgataaactaagtgaattgtggatcatgtgatgagatgttttagggtcctagatagattatgtaattggatatctcaatgtattacaactaccaccatctgtctcaatggggggcgaagtgggaagaatttatccctcttgtggtattcgtcaaggggaacctctttctccttatatgttcatttgggttgggaagattctatcaagacttattcaggattctttcgaaaacggtagtatcatggggatcaaaatttgctgcggggggccaaccatctctcatatcttttttcacagatgatctcatcttggttggaagagccaccgttagggaagctagaggtatgtggaattgtttggaaaacttttgtgactggtcgaggaaatgtgtcaataagcttgaatcctctattttcttcagcaagaatacttctaagaacttaaaactggaaattaaaaatgccctgaaattggtggtccagaaggcataactaaatatctaggtcttcctctttttcgatctagacataacgatgcaaatttcaattttatcttggctaacttgacctctaaacttgaaggatggaaagaaaaaactttatccaaggccggttgtgccaccctcatcaaattagtgggtttgactatgcctatttatgccatgtaaactaccaacctttccaaccgcctgatctctaagattgatggcatggtgcgtgactcttggtggggtttcaagaaaggtaatcatgggatccatttgaaggtatgggacaagttgtgcctccctaaatcccagggcggcctaggcttcaggaaaaccaaagaaatgaatcaagccttctgggctgagtggggttggaaacttcttacaagatgttagtccctatgttgcaagattctagaggccaaatatcttagggggaaggatatcctaaagtgtaaagctaagaatacggactaatagttttggaaaaatgtagtgaaagctaatgatatccttaggaggggggcttgcaaagtaatcactaatggtaaagaaacgaagattttggaggacccttggatcactcatggtcaagagttctacccaccacggactggtaacccttctcattattattctaaagtgtctgagttgttgactatatctggtgattgggacacccaaaaactgctttacctttttaatgatgagactgtttttgccattttgaaggggggtaaaccttcgggcctagggagtgagcactaggtctggactaaggagggtaatagtcgttgctcctataagtctgcctacttaatccaagctctgcaatggtcatcccattgtgaggtttccccctccctctagaacaaattatggaatagtaagatccttaaatgccacaaaggtatgtggtggagcattttgtcaaatgcactcccaactaggacagccttgttcaatcgccgatatcacctgcccaatttgtggggtagaggaggaatctgttgagcgcctctttctttaatgtaacatggctttccatctttggtgctcttccccttggggcatcttccccatctgtagtacatgtatccgtgtgtgggactgggttaaatttatctaaagcctaaagaacagaggcataaatgcagatgacatttttctttatgcatctatagttattgacacaatctggcgggtgcaaaatgacaatgtgcataataataggatggataatgtgaatcagtgtattgactccattctttactcttatgctgattacaaagattcccttatcccctccccatccccgatccccccgctctttggagccctcctcctcaagattggctgaagttaaattgggatgttaaagtagaggggagcacatgtgtattgcacttgttgctagagactatctaagtaaagtgctttggctgcatacagcaaagttggatatttcagatgctctctgtggtgaggcagtcactgttcgtctaactcttaaagtggctaaggacaaaggcctcaagtttatcctagtagaaagcgattctaaggttgtaatcaactccctcaacaacttagatactagatgggaagttgagaactattccttatttgtaaagatatttcctcattcgttggttgtttattttatattactactagaacttgtaattttatgggtcatattgtggccaagtgggctttggcccatatcagtttgggcgtttttgccatctcgtctattcctatgaacttattttgtatcgagaggtctgaaatctatttaaattgaacgtttctttgaaaaaaaaaaaactcaaaggggtaatttagtcaatttaatcattctcattatatttcctcataaagtaaataagataaatcactatcattccattttcaagcagttttagtaaacaacatattataaatattgattctgattattctttattaattttgttatatttctctattactttagattgattttgaataccgtgtatgtagatataatatatgaatttgttgaagttagaaattctctttgtgaaaaacaaatttcgtgtctcttatataaaactctcggtataggttcatcagttctcgaactgggcctaacacaccgcaataaaacacatttaataattaaaatgctagagttaaccacaattatttcttaagaaataaaacaaaacaaacactttcattcacaacaaataaaaagatgaataattaactcaaaatgataatttagcaaatttgagcattttgattatgtttcctaacaaagtaaataagataattcattatcattctattttcaagcagttttaataaacaacatattataaatatcgattccgattattctttatttattttattatatttctccattactttattccgattctgaatattgtatatgtagatataatatatgcattcgttgaagttagaaattctctttgtgaaaaacaaatttcgtgtctcttatagaaaactctcgacataggttcatcaattctcgaactgggcctgccacaccgcaataaaacacacctacaataattaaaatgctagagttagccaccattatttcctaagaaataaaacaaaaacaaacaccttcattcacaacaaacaaacagatgaataattaaccataaaaaacattcattcttattatatgtaaataaaaaatctaaaaagtagttttagtttgatatttttaatgtgtattaaaaataagtattaatatttaatattcactgtttttaaaccatatattaattgctataattgcaattgttgttcttacttaagtaacttgtgtgagtataaatgttgttatttgtttaactgttttgtatagttgtgattagctgggggacaaattgagtgtgttagagagaattagtgaaaaagcttcttgctttagtagcatgtgtaagtatcatcttcaaatacttttctcataaaataattttttaacgttttcactctcttccttcctcttttatctgtttttctttctattacaatatgtctacaagatctaatagaactatatgctattttgaattaaaatatgtaatgaaatttaattttgaaatttacaaataaaaatataataacaatatgttacacaaagttttgataaacaccattgatgttccctaagaatattcattgaaaaattattatgagttagtagtatattaatattaggggtgttcatcaaaccgcccaaaccgctgaaactgtccgtaccgcaccacactgcaaaaaaaatacggtttgaaatttttcgcggtgtggttgagatttgaatttttcctaaactgcacagtgcgatacgatttgcggttttgaattattaatatgcagttcaaaccgcacataaaaataccaatttttatattcatttaggtccaatatgtgaatattcaactcaatatcttatgatattttgacaagttttgctcaagatttgttgtatttgtaatagtttaattatttaaagatagtccaaaccacaaaaaccgcaccgcaccgcactattttttgtagtgcggtttttgcaggtttttagttttgcagtgcaggtgcaatttggaaaatttgaaaaactgcatgtgtggaattgatttaaaaaaatgatcaaaaactgcaccactcacaccgcgaacacccctaattaatatgagagcatgaaaaagaagagtaagacattgcatcctaatatttgtagtgaatatttttaaatactatataaatattttttatatgaatttggtacatgagttacaattctatttttttatgatgtaaaatattcaaaacttcttttattttttaaaattgtttagaaaaatacaatgccgaaagtaatttagataacttattgctcacacatataaatatcaaaatttataagcacatattagctaatttaatttttgtttcataaggctctgttcggtaacaattttaaaagtagatttttatttttttaatcaaaattataaaaatatggtttgaaagtaacgttcggtacaggattccaacacccagggcttggaactaacacgtagtaagtgtttggatgtgggactcatacctgaactcaaacccgaacccaaactcgggccctgacccaaacccagacccgcacccaagacttaggtccgagtccgagattgggtttgagtttgggaaatagaatctgactaggacccaaacatagacccggaccaggacgcagacccgaatcaaaactcatctcgggaattgggacacgaacctgaacccagacacaaacctggacccagaccccgagccaagacctagaccgggattggagactcagaccagggcccaggacccagacctagattggggacccaaactcaaaattagaaccagaatcgggacccacgacagggactaggacccaagaccttaccccggtctctgtcccaaacctggacccaaacaaggacacggaccgacacccaggatctgaatcagaatgagacagggacctaagattgggattcagatcttgacccacgacccaaggcttggacccatcccgtagtcggtgtccaaatcttggaatcatactaagacccgaaccttgaaccattaccagaccaggacccaaacccagaatcgaacccgagacccgaaatcagaacaagtactggaatcgggaccctggaacaggaattggacctggacaaaaaactagatctagacgagtaacataacacggacccggacctagaccggtatctatacccagacccagacccaaacccagacccagacttctaccagtacctgcgacccaaaaactcgaaacccaggaccggtgacctgggactttgactagaaccaacacctgtaacagaacccggagcgagacccaaacccaaacccagactaagacccgaacccatacatagactgaaacttggacccagaaccaaacccagacccagactcggacccagacccggacttataccagaactaagactcggaccaggaccgagatcaggactgggacccatacccaaacaaggaccaagaccaaaacctagactaggactagaacccagattgggacacgaactgagaccctggaccgagacctgcgacccgagacccaatactcagactcaggacttgaaaattgaaccgtggcccagacctagactgggccaagactcgagacaaggactagtaccaaacacagactgggacttgcacttagattgggaccctaacccagaccgggacgtaggaccctaacttgaatcggggacccggacccatgacttaggacccaagacccaaacctagacccaaacctagacctaagacccgtagtaggacccaagacatgagctagaattggcccaagatctggatttggacctgggaccgaggacccaagacctgaggcttggacccgacccatagtcggtgtcgaaattatggaattggacctagacccagatccaaacacggaccagaaccagaacctatacctgaacttgaactagactcgacatgtggttggtgtttggatttgggaataagactcggacctgaacccaaacacggacctagacccaaaccaggactcagactgagacccaaacccaaaccttaaatcgcaccctgtgacccgaaactaaaatttgaactataagcggaccctaaaccctaaaccttaaaccttaaaccctaaatccaaaagtctttacacttccccctaaaccctatgcccaaaaccctaaaccctaaattcctaaacactaaacccaaaaccctaaaccctaaaccctaacctagacacgggcccagacccatacccatacaaagattcgaacctaggacccaaacccggactcagatccagacccacacctagacccaaactcaggatctgaacccagacccaaacccaaaacagaaccttgtcttggacctagaccttgattcagacccggatcgggatcttgacctaaactcgaatagggacctggactaagaccgggactcgaacccagactcaaacttgaacctgtactggaacctagacttagaccgaaactcgggatccaaacctgaacctaaacttggacctagacccggaactaggatccagacctagatgggggacttgggccccaaacccgaacttggacccaaacctggactaaggattcgaacctagatgggggacttggacccaaaactaggccctgaaacttggatcgagacccaaaactcgaccctagactcgagacacgagacaaggccttggactcgaaacacaagacctgactactgggacacaaccccgaacgtggaccaaaacccaaacataggatgccgccctagacccgaggccagaactagaataacatggacctggattcgtatccagacacaaaccaggatcgaaactcgatcctgaatctagaattagaatcggaccacgtttgggacttaaagacaaacctgagacagtaacaggacccaaacgtaaaccgaaactcaaaccagaacctatacctcgacttggaccctaactaggacctgtgacatgggacctaaaccaagaccgggacctagacccagaccagacctaaaaactaagggccggaccttggacctaagaacaagactcagacttaggatccgaaacttggacccacacgaggactgggactcgaactcgaacccgaacccaaatcgagacctggactcagaccgggacttaagacccgaaattaaaacggaacacgaacttggacccagaccgggacctaagacttgaatatagatgggggaccaagaacctggaattgggcccgaaaactgggactagaactggggcctcagaacttggatcgggatccaagatcaggtccgagtcttggtcccaaatccaaacaccaaccacatgtcgagtctagttcgagttctggtacgggttcgtattctggtccagctctgggtttgggtccaggtccaattcctaaatttagacactgactatgggtcgggtccaagccttgggtcttgggtcctaggtcctgggtctcgggtccaaatccagatcctggtccagttctagctcatgtcttgggtcctggtttaggtctcaagtcgaggtttgggtcttgggtcctgagtcatgggtctcggtccccaattcaggtcagggtcctaggtcccagtttcggttagggtcccagtctgagtgcaggtcctagtccgtgttcagtacttgtacttgtctcgggtcttggcctggtctgggtctaggtcacagttcagttctcaggtcctaggtttgagtatcgggtcccgggtccctatctaagtccaggttctagtcccagtctaggttcaggtctcagtcctattcttggtataggtccgagtcttaatctcactacgggttagagtccttgttctagtacgagtcagagtctgggtcttgctctgggtctcagtccgtgtttgggttcaggtcttagttagggtttgggttttggtacgggtttgggttctggtccaagtcttaggtcatgggtcctgggttccaggttttaggtcacaggtcttggcgcaactcttggcccgagttcgggtctggttttgggtatcaatcccagtctaggtctagattcgtgtatagttctgcgtctagatttggttttgtgtcagggtccaattccttttcaaagatcccgatttcggttcttgttctgattttttgtctcggggccgagtctaggtttgggtcctagtctggaaatggttccaagatctagacactgactacgggttggttccaagccccgggtcgttggtcaagattcggatcccaatcttgggtcccggtctcgttccaattcagatcctgggtcccggtatgtgtctgtatttgggttcgggtctgggactaagatcggggtcgggtcttgtgtcccagtccaagtccttggtctccattctagttctaattttgactttggtccctaatctaagtctaggtcctgggtccaggtcaaagtctctaatcccggtctgggttcttggtccgggtccttggtctgggtctgggtccaagtccatgtctgggttttggttcgagttcgtgttccgagtctcgattcaagtttttatacgggtctgcgtcccggtctgggtctgggtcctagttagattccagtacccgaactcaaacccagttttgaactcgaacccaactcaagagtacaggtctgggtctaggttagggtctgggtgcgagtctaggtctggttttgagtccggtaatgggtcctaaatctaaacacttactacatgtctggtccaagcctcaggtctaaatcagggtcacggtctcagatcctagtctagttccactacgggtcccaggtcccgatctgggtccaaggtgagggtttgggtcttggtcgggtcttgggtctcggtcctagtttcgatgcccgtgtctctagtctaggtcccccatctaggtacgagtcctaggtcccgatccgagtccaggacccagtcgtggttcaagtcctgagtcgagtcggggttcgggttccgatcttggtctaggtccaaatgtgggttcgagtttaggtctaggtttgggtttgagtaccgagtttcgatctaggtctgggttctgtggcctaggacctggtcccccatccaggtctgggtccaaggtccgggttggggcccaagcccaagttttaatttgattcagtgtctgggttcaagtttgggtccgggtttgggtcgtgttcagagtcttggtctgagtcaaggtccgggtctggatctaggtccggatcccgatttgggtctaggttcgggtctgtatcctgggcctatatatactaccaacatttttcatttctaagacgctaaattgaatagtttcaagaggagactttgagtttgagagagaaagagattgagatgtaaagagaaaaatgagagattgggttttgttttgtatgaagaatcttttgtagatgaagaagattgagagttgaaacactttgagagatccaacacaaaatccttcacaactgtattatgcatgttcttactctatcgagaaagaggatttagtggtgtttcaaaacttgagtagagttatgaccacatcgatctatcagacttgaaccagtatatatcttggtgttaattttatcattttactactttaatcatttctaatttttaataatctgctcattcgtgttttctctgattactattttgtgtttgttattcttgtcatttataactgtttggtgattaaattttagttcatttgatttttcactttagtcctaatttgccaacaaatcagagcttggtagtccatcaacaacatagaattaagattctttccgttgcaattcatgaaaaaaaatagtttatgtcatcaatggcgagattcgaattggagaagttcgaaaggagaaagtttaaaagggatcctagagcatcagaaggtctctaaagttcttggcaggggtgtagaaagtcatccaatccaattacaactgatcgatccaatcctaatcaatctaataggattagatatccaatcataattggatcagattggatgtaaattttgaaaatccaatcggattggatgggacattcgatctaatggataattgaaccgatccaatccacttatcatccaattatatttatttaaaatatatttataatttcatatatttaatatatttatttaaaaaatatattaattgattttattcttattgtgtacctgtacacatgagattaaagaaaaaaaacttaaatctaaaatattaattctcatcttcctaaacattaataaaattatcaatgcgtattgaataaattttattttttggcagttttattataggatcatgagaattaggttggactaaactaatgtttattatgtatgttgaattattaggttttaaattatgtttatatatatatatatttctttttattaaaattagcttaaatggtagctaaaatgaattggatggatccaaagaaaaccaattaatgcatctaatggttagaatcgatccaatctaatacatctattggaatggatcggatcgaatgactcaatttggctggattggatcagatgacaaaatccaatgtctaataaataattagattggatcagttgggtccaaatccattggatttgatccaataaatacccctagttttttaacatgagaagttattggccgaaaacaaattgaaagagaaagcaaaattggaagagatggcatattatacgatcatcatgtatctgtcaaacagtgtttgaagaaaactcatcacagagaagacggtgaaaggattctagaacaagttggaagaattatacttaaaaccatcaattgctagaaaggttatacggttttagaatgatttcttctatttctttagatgataatattgagaggtttaatgaaattattgtaggattggataatataaatcaaaaggttaatgaaaaaatccacaccaacattttgttgagatcgctcccaa

SEQ ID NO: 218767 - DNA, 3557 bp, Cannabis indica
aaacttgaatatttgcatgaattgtctttgaggtttttaaatttttgaaattattttaaattttcctttcaccctttctttgaaacatatcttgggcttataggcttattgacataaattcagctatcatttcatgtgttataggctaatatttataggcaaaatacacactatcattagttacaaatattattaattattgaatattctccataaattctagaccacaatgagcatttaggacctggtctttcacggctacatcaggtttattattattccttagtccacaatagacattttaagctgtctagaaccttggtcaggatatgcaacagattagccatttctcttatttaacttcttgtgggacatgttataaattatttcgcgtgccagacattgcattggcacgtcacttgtgtaaatatcaggataacaatgtatatgcatatttagagttaatatttgtatgtttaatgtcaataaattagattttaagtagtttaaagttgttgaatagaccctcatacaaaaattatacctataactcatagccacataatcaaattgttttgaaaaatgagcagaatgtaagaatgtaattggaggggatattcaaaataatttgtataattcaagatagggctgaacatttgggcctgcaaaacttttccacctagtccacctggtacattatgttgtgaattttcaaatattgggtttcaggttaaatctaaactcaatacattatatttatatatctatatatatatatatatcttacactaaacctaacctaaataacaacattagcactagcaaccgttctcctccactctctccctcatcccatgttggctaatgtaacttcttcttatctttataaatatatagtgtatataaaatgtatgtatatatatttatacttgtaatgtgatagttgtagatatatatataatgatagtgggggagaaagattagttataagattttttgagtttgatgagcactggtggagaaagggagtcatgtggggtcattttcctcccctcaactttttataatataaattttgcatctaaaattttaagtatttacattttaacaccacaaagatattatgttttgatttatgtgtttatatatttttatattgattactatagaatttatatatattttttttatttttatcccacatatttttatttttatcttctagaatttagacttttacttcttatttccacatattatttaattttatcctcacaaaatttatattttttattaatacttgttgacactaaaaagtggccaacaccagttttctagcttggcaagatgaataatgaatgtaagtatataatatagagagacacacaaaatttatagttgttcactccccatgtcgcgatagtaatggagctacatctacttcaagtttttatttctcacgagattacaagaaaaatggctaagtgtggaagctctaatttctaaagagagtaactagagagagatgctctgacctgatggctacttttctgaatgtggaggtccttgaaaataagaataaaataatctaaaaatatgaagaaaaaaatataagctggatattttttatcatagatgatgatctaacggtgaaaattaacttctgaggttgatcgtcaatttttggggcctgggtcacgacggcgggacccgctctgggtaagctgtaacttaaatttgtaattccttgggagtaaaatttggaatcgataacttcaaaattacaattgaagtgtgagaatatgtcttgatagataattgaaatagcttcaaaacgcaagttgaatcacgtaaatcagatcaatattgagtgagttatggccattttactgaaggcttttctcggctcagtgcccaaattggcatcccagcgcctaggttgatatctagcgctcaagttgacatatgatgttaacctaacactggatgagtgggaaaacatcttgggaatatattttttgatgcttaagtgatattttaacatcacttagtttattttaattttttggcaaagctggtcactagcttttagaaatattattgttctgcgaaaatggaagactcaaaactccccattttcgagtcatttaccatattggaaatgagaaatataaatttttgaatttgacttttctaacttcatggctcttagtcattacgaacggtcgggacagaataagaatcaaataagtaaaacctagtgcactagcccatatgtcaacctgggtgttgggtgctcattttggagcttttgggatgtcattttgatactcccaaggttctaggacttgaggaagaagtcttgaaccccatttttgactattttgaaaagaatgctcaaaatagaattggcatttgattgaaacaagcgcaccaagttaattgtcaacctgggcactgggcccaacacaaggtcaaccttggcgctaggctgagtttctggttttctccccaagtttgcttgtatcttcattatttctgatgacggacaaaatgcccaaaacatttttttgagaaactggttggaacttgtcgaggttgaaaatatgttaacctgggtgttgggcccagtgccaggtgtcaacctgggtggtgggacccagttttgccctcttaaaagtcctatttcgtccatagttgaatcttaattttttctaaaaacagagaatatgctctgaagagttcttagaatacatccttgcatttggcctaggttgacaaaatatcaacctgggtgttgggctttgcttctggcacccaaaaaatgttgtttcttccttgaaagcacttgtttccacatattttatgaagatgaagaagatgcatgagtcagatttttgatctgatacttggaagtggcctagattgacaaattgtcaactcaggcattgggtgggtgtcagggcaccgggtgctcaaaaatgaactttctctgaatcttattctgatgcctcaaatatgtatgtgtcctctctagttcatgtcccaatgcaatgtttgacccatttgaaccaagacagtcccaaaaactaaaaccctagttgaagatgtcaacttgagcgctaggtgaaaccctaggtgcccaggttgacttttggcgtacaggttcatgtaattttagctctcaaggcctgaatttgattgctccatgtcttcatagtacagaacattgaaagatagtgagttggaaacgagtaatcgaagtctgaacttcattttgaagttttaaaagtcaacttgggtgcagggctagagacgcttcccatgtcgacttgctatgactcgggactactcaactatgagacgtcatatttcttgccatgtgtcaaacattgacgtccatgtcattaggtttaattttggtgtaaacattttccccttaagttaactttacacttgtgtgaggttgacttaattacgtgaactaagcccgtttctctcgaaaataccaggtgggcatgaattttgacaatattggacaattgtttctattcttc

SEQ ID NO: 218768 - DNA, 5071 bp, Cannabis indica
tctgacctgtatacatacccccccaactctgatcaacttataaattcttttcagatggatggattcgatcaaacagtgaatgtgaaggttatcatggctactaatcgagctgatacattggatcctgcacttttgcgtcctggacggctggacaggaagattgaatttcctttgcctgataggaggcagaagagacttgtttttcaggtaagtttcgttttgtgcatacaagtctatgaaaaagatgaaatattgaattcactctttgagtctacggtgttatttgacccttattattctcaattttaaaattttgcattacaaaccgtgtttgtgaagcctttggcttcctcaaaatttctttgtattgtatgttaattatgtcttcctttatattggcaagtagtttaaatttctaaatttgttgcttcaacttcacctgttctcctatattaccttcagaatttcctttttatttggttaaattggacttggaagtctgttgtatatacttcataacagtatgtccaataagaaaatatgcattctttgtcaagtgtgtttcaccaagctactgcagttttttctgaaataagcttatatgtaaaattataaaccatgcccatttattgtacaggtttgtacggcgaaaatgaacttaagtgacgaagtggatttggaggactatgtatcaaggcctgataaaatcagtgctgctgaggttagttgacgtgtatctttctgaatataagaaagaaaggataaacatcttgaaattttatgtcaattattgctgttattagctttacttttgcaaggtccccaaagatcttaacaccttccattattattttaattctttatttttgaatcgatgcttgcagattacagctatatgtcaagaagcaggaatgcatgctgttaggaagaacaggtatgtcatccttccaaaggatttcgaaaagggataccgaacaaatgtgaagaagcctgacaccgactttgaattctacaagtgaagaagttatgttggacttttccagtgcttgctgtttcgaagatctcgtgtactgaaactcctgaatctacttgtactagcacgctgttgtttgaacatatttttcctatcattttagccaaaaagggaaaaactaaattacatgttctgatttcatttgctgctccaccacactccccttgacatagtatctatttcttatgttctttatgtagtggtagtggagagctcagagctccctttcctgtaggttgctgggcctgttggatgcatttcattattcattgagaagaatttttataatgtgaccttgcctcattggtgtaaataagctgttgtgtgagttgtgacaggccttaattaacatgggccaggattatggtttggcctagaaccctacaaaaaaccacataaagcaaaagagcaccaaaccctaccataattataggcaccaaagtacaagcagaccttgcatgcctacctattgattactttccttttccttcagctaaattacaagctcacatgtgcgctttatgggcccactgtattcttatataaggtttaacaatagtgtgtattgcattattctaatataatgaagacttatttcctattgattagggactcttgtatggttttggggaggtagtagtactggtttcgagtagtgccaatgtagagtggttatcactcaaatgtttggtagcaaaatcaggtcaaaggtcttatcatgttatactatgtgctttggactaaagttatttgatcccaaaaactcttgaaaagccagtttttcttttcctagctagcactttgaagtttcaagaaatgaaataatttgtaatctattcaattcaaagtatctactatgttccaaacattgcaatttgatagtgaaagattgtttccttattcatccgattaacgagagaacccaaaaggaaaataaagaagaaaaacaaaatgaaaattgctcttaaaagcttttagaaaaataaaaataaaattaaaaaactaggttaggaagattccagacgtacaaaaggacagcagagcttagttatacacacacacctaattcaaatagagtgattgactgtatacttagagtcatgcttgtctgttgccttgtgtctttcttggacaccattctctctttctttccattcttgttgttaattaattcttagtaagtgtttgtgttttattttcttatattaacccaaagaaggaaatatatttttactttcataaaatttggaataattaggaaattattttcttcaatttttttctctagcaaaatttttcttctggcaaagggttagcgtctttgacttaatgaatcatgagtttaagatccaaacaacaaatcaataccttaattaccatttaaattttaaaccacattaatattgattaatgtcattgttcatgacattgatattatgccttcagtcaccctaagattattattattttgttgtgttatatattttgcttgtgctttatgctaattattatataggtttgattgaatagaggacctacattacctaatttatttatttattatataaatatgtatatattcattctgactttgaaattgtattgaatctctaataaaaagatgctactacaaatacaacaagcctaattattatttttatatataatattggtttttcctttttcgtttccttttagttacagggaccgaccatgtggtgataattttccattgacctttataaataagctttatatatattcaattatatataaaaattaaaatgattggttattttatttaatatgttttttttctagcaattatttaatgtttttaattcatctaccaaaacattttttattgaaaaagaaaaatccttgttttgttattaattgacaaagtatatatcacaaataaatatatattttttgtaaaacaacaaataaataattatactattgggacagaccacatatatttattagtaggtaataagttatatatatatatatatatatatatctgtcatatatttggattttcattcctcttctgccgtcacctcatgcagatggagcttatgcattaattaaatataaatacaccaagataaataaatcaagagctctcataaatcaaatagtaatgaattttcttaattaattatgtcgattatttcatttgcatgtgtgtataatttgtatcaatcttcaacgcagatcagaaacttaaatagagattaagaagaaatatttaattataagataaaagttgaaaatttcgttggacttggactttttattttaaaaaagttgtcaatttttttaaaatatgattcaaaataatacactaatctcaattttatcaattttttctcttaatatataactaatcttaagccgatttctagcattaacaaatgagaaaatgtaattaacatagtcataaaacctcaggttatattattatgttttatttgactaaaatttggctaaggtataattttgttatctttaaaaattacaaggtttatagtattatccaattaataattttaataaaatacaagattcaaatttgcattggctggtttaagtaagaaaaaccccctttgattttagttgaagctaactcaataatatttgatgaggttattatcttggcacctgatccaaggtcctattaaataatgccataaatattttatcaatcaaactgagaagtcttgctagctcttggcagttttgttattgtacgtatattgtataaatatatatatatatatatattaaagtgaaatatttaattaaataaaatttatatcaatgggtttggaaaaagttgactttacaactctcagtttctaatctacatgtatacaagttttcattcaataatatattacatacataaatgtaattaaacttttttaattctttctctttttctttttcaagcaatagaatttcccaacaatatatatatctacaattatagtaattgatattatggataatattaatattccttattattataagtattagattaatattttaagatataaattgaaaaagacagacaagcttctgagtcgactgctgcacaaactgtacttgtctgccaagctgtgataattattccttgtaattaagatcactactattgtaattgatatttatagaaaaattaagaatatataattaatatacagtttaatgtaattaatatggtattcgcgtcctgtgcttattatatttgctgaaattaatcgatcgatgttgatgttttcttaatttatgcatgtatattaataataataataatttattttattatttatattttacgtacaggttaagaatttactacaattaatgatataacttaattaataaaccacgctagtcttgcaagttaaaagttctgacttttttttttttagaatgtagcatagtgatattgtatatttttaataatggaagatcttggataaaattgaactgtgatgtaagggtgtgttcagaaagtatgtgcttagcggtggtagctagaaatcattttggctcggtggttcggattcacacagatcatttggacttctcggatgctttgtgtggagaagcagcggcttgttgtgcagcggtctcgttggctctagaggaaggcttcaagtttattttggttgagagtgactcgagatcagttatcaatgctctccatggatcggagtctctttgggcgattgacaactatatctcattttgtgttaagtcctttccctccttttcttgttgtaatttcatgtatgttaacagaacttgtaattttgcagcccataatatggctaactgggcttttattaacaagttgtatgggattattccggtttcttcggttccggagaaccttttatgtaatgaccgagaggtctaactctatttattaatggtacattcacgcttatttaccaaaaaaaaaaaaaagaaagatcttgaattcgaactctagaaaaaaaaaaattgtttcaaatt

SEQ ID NO: 218769 - DNA, 3915 bp, Cannabis indica
ttgaatttacaaaaacactatgattatgattcctttgtgatcagagtgacatgttaaatgaactcagatagatagtagataagtatctaatacctaagtttgcgtttgtttgcaagtttcagtagtcaattaagtttaggattgtacttgctttctaaagcatgttaaatttgagaaactgagcagatattttatattttccacggttctacagtctgatgctgtttaattatgtgatccttctcataaggaagaattttgttgtgtcttgtatcgaattactctgatcaaaagttgtatttgcatttttctaggttctcccttctgttcctccagttaatgcaaccttggaaccacatcatcagatgctgcctgtgggagttgttttatcggtaagctcagaagaaaccatgaaatacctgagaaatattaaattcaaaccttagcataaacactgacatattgtaatatgataacttattccttttgatacctactggcatttgtatttttatgttttaactgtgactgaatcaatatgatgtcacttgcaatcttgcagataattggtacccaagttattgtggaagggattgagaaacatagtcctttaaatgatggttctattctatggataactgaaagcagatctccattagggatggtggatgaaatctttggacctgtcaaaaacccatactatgtggtgagatacaattcagaaagtgaagttcctgctggtgtgcaagctggcagtttaatttcttttgttccagagtttgttagccatgtgcttaacaacaaggacgtttacaagaagggttatgatgcgtctggtgctaacgatgaagaggtgtatgatgaagcagagttttctgatgatgagaaagaggcagaattcaagagactgcaaaaagtgtcgaaaagaggcatgaacgaccagaaacctatgaacaacaagaatgataaaaggaaggttaaaaatagagctgaaccatggaaaaatagtaaacattcatccccacaagcaccaacagatgtaggtcatgtaccacccaatcaacaccagcatcatttatcatcccatttagcaccagttgataatgcaaatagttcaaccccttttattgtagaacaaggtttgagtagtgggacaggtttaattccacaacttcgacctactgcacagactgcttgttttcatccaccttcaaatggagtttggggaaatggaatgccatttcaacagccccaaggtgcttttttccccggtggctttccagcttatggtatgccatggcttccacagaactctcagccatatccatttcaaatggcaatgccgaacatgtttgcccagcaggtcgatcctaaccagaggttactttctggtaatttgctacccggtcaacaatcaaatacattagcgggacctgcatactctcagggactcatgggtcaaaatggatacaaccaaatgacatttggaatgggtttacaaggtcaacattctcagcatatgttaaatgttggccaacaaggaattaatccaaacggggtacaaaatggacagaattgtaatgcgccacaatctggaggaattccaggaaacaacaatgaagcctctcagcagttcaatgcaggtgctccttctggtcgtggaagaaaaccattccatggaagaggtggtcgattttcacgtggaagaggtgggaaccaatctagatagagttaacagctgctctgctgcacgattttgatcttagcttataggcttaggagtacaaccgctgcattttgattttgttttttttttgtatgtcaatgatagtttttgtagcctatattgcaatggggaattctgaatttatatgcatatatatttagtgcatattaaattttttgaacataaagcttactaaaattaaaaaaatgggcacactttatattaatacctataatactcttttcttttatcttctcttctaatttcactattcatactcttcattttcatccatattggtggtctaatggcagttcgatgttgcttattttttttttttttttatataaaaaaaatggtagcatcaggccaccatcggatcatattttacatttatagatattaaattctattcattaagctattcaagaaggcatcgggccacaatcagactaccatcagattttcgtcttcaacctttattttaacaacaagaaggcatcaggccactattgggcctaacaaaaaaaccagttttttgctcaaaacttagatctgattttcgaccataaatctaacaactcacaaataataaacattaatcatacaatttattcttttgacaatattatcgatggagaagtcgtggttgatagagaagtcattgggtccgtgggtcgttgggtctgtggtcacggtggtcgtggagagaagggactgatgttgtgggtggtcattgggtccttggagtgagttcacagagcaagagagagaagggaggaagaaaaaaggtcaggtgtttgaaataaaagggatagaattgagttttataaaatgttagcctattttaccaatatgagttaacttaagtttaagaaaataattttaattcaataaatacatagaaagtgtgttactttttagttctgtatatgtgtgtttatggattttctccatagtcaaggatgctttatagtattcatctctctattttcatttgcaatttattcttaatttgtttggtattaatggatacttttttgaggtgcttggtaatattttatattttaatttttaaatacaaaattaattattttaaaagattaaaaacaaaattgttcataatttatttttaaaaaatttattttaaataaaaaaaaaatgtgactatatttaatatttttaaagtaaatatacacaaaattatgcggcgcctccttatgtcttggttaagataaggaatgtacattttttcttgaaaatttttgtctcgaaaatttttgtcttaattaatttaaaaaataaataattactaatttgataattcaaaatagattctaaacttccatacacaatatttatcccaccccttgataatgttttacggtggcaatcagggaatcatgaacctataattctaagctccaataaactagatttatttattgaatctcatcaatcaaataatcttatttattccatgattactccactattaatatagaattgaactcttagtaattatagaattatatttattgagttttactgtagtgtccattgatataatcaattccagtgattaaccctccttgtgtcaatttgtaatttaaattaccgttttactcttttaaaagaacctaataacatgaacaagagcttatgattactctgaatttaggccgagctactattgatcatctttatgatgtgatttaggtctttatagtaaatgacatgtttgataaagacaactttattcatatcgttccttgtcatatacactctattatatgcaacaccttcacttagatgtaatgctacattagttatccgaattgattttacttgcaccgaataacaagcatcaatgaaccatagtagcaatcattggttaaagattcctaaattttaatatgttgctgattgttttattcatggataagtgatcttaattctccgtacaactacaagtcacatcctcatatatgaataaagaattttctgatatttatataaattattcaatattaaatattaataatttaacatttatgcatatatcaaaatgttcaactcttattaataatcagaaatgtctttacatgcttttcaaggtataaatctcccacttgccctgaaagaaaattgggcatctcccttaatcccatattagttatatgacccat

SEQ ID NO: 218770 - DNA, 3663 bp, Cannabis indica
atttcatggtactccgtccaaacatcacattttgtcgtgttcacaaggttattacccttttcagcgccctgacaattaaccatttaagtacaaaaataaactaacatgggtccaattacagttatgtctataaccaactgtgtcacagactcataagtaagtttttagaaagtacccctataaatctcgaccctctcaatctcagagaatgtactgcagctatatctttcccaaatgatatcattctcccataattcactcccttagttgaacccttatttattgctccattttggccgtttgctagtgtgccattgttcttcagcttctttgcagtacaatcataaaatccttcaggtgaccgatcaaggccaccccatatagtctcacctcctttgggtatcattgacattgttgcatcccatgtgcgggtcatccgcatcatgtgctgtaaagtctgaagaccaaaaacatccttatctaaaacacctggtgcgaaggccctgcattattagagaataacagttcatcaaatgccccaacaaaaagtgacatgcttcttggaaactaattttgatttttaaaagtttaataaatatataaaaatccatccgtttgtagaggtaaaaaggttataagatggaatgttttcaatttgtacagtagattgatttcaatgcaaaggaagaaagatttaccaatgaatgtagcagaaaccacacaaatgatagtatcatgtaatacaccaaaaggcttatggagtgaaaagctttttttatttcaaaattagaattaaacttctctaccagatgtatgcaatagactattctaaattttatgttaggtattctgcatggaataaaaactgttgggtcttacgatattttcttcctcccaactttaagactgaaagtgatactagtccatcaaacacgacatggataaggataaccataaaaataaagtgtccaggtaaactcaactgtctgtttaaacataaaaactatttttattggcatactgttattaactgaaagcgtaccaattaccgcacaaactgtattcagctataccgtaattctaagagtgaaagaaataataataacgagaaaatggcctaatatcatcctattacacagcataggtcaagagcaaaacctggcaacagcaatatcctttgcttcaatggagaaaagccctgagactgcttttggaacacctaagaatggtcctccaatgttcattacagctttgatatgctttgcacaccaatctgatccacccccacctcccattggtgctggtgcctcgacccacttcatgaaatgcagaaagtaaagaacacccattgaatgaggaataactacaacctttttcccaccatttgtagtaaccatcagttcaatattgctctttatcctgcttaaagtttggtcccttacctaatcaaatcaatcagagtagctcattttagggctgaaagatacatactgcaaaaaaagaacaacaaaaacaaagacagtacattctttcaaatgagcctcctgagggaatcttcaagaaaaccaatgactgacttaacaatacctcagtgttttgaaatgataatctccaatcatatgcagccatatacatggttttttcttcatatccaatccgagccaagttagcaattaaaactgcccagacaaaataacctggtgcaaagtaatcagctgccacaagtccagatacaggtcttacccttacgcctgactggtccattccagtttcattatccagagacatatgctcagcccagcataatggtctgtaaaaataaaaataatccacccatagaaatcaatccacctaattacttctggaaaacagtaagaaaaacagagagatttggaaactaaaacaacctgacaaagttacaacatgaagaaaatataacattggacaagtcgtgcaaaagacatgatacattttcgtagttccctttcttcccagctgttttaatattttctccagaaaaatttaaagagcaaaaaggaagtgccgcttgatcaaacattataatttgaattatgacacttagtatgagatgcagcacctaaatgcattctaaatacttgtttaaaccaccttttatttatgaaatgaacatcgtccagcaacaaaatatacgtgggcgggtacgattaacccgtacatctaaagaaagcagtgcatacctataacaagtaagaatgacatggctggaaagacaggaatccacaagctgacagctggtgtttgatccaacttaaggagtaagaatcagaaatattcagcacacgcctataattgttaacagaattcagctgataagatgactagccatggacccttggatagaacgtaattgatatattagatacaatcatgttttacaaaagtttagttgaattaatggcttcaaaaggtgttgttacatcctagactaaatcaagtactatggttgtagaagaagacacaagtgtagcatctgaactggccagggggtattgaagtttcaaaacaaggatcctggttatacataatccgtccagctgaatcttaaatcttatctaacctattcttatcttagaaataaaaaccataaaggatagagcttttaagaaagttacatcggtgcataagtttctagaatttgcataaaaccgtcattaagattttgagcaagcccttaatacatgagctaactcttctataagcctccacgtgaattttagataatgtctcatgaatcatgattatttgacataccagttacataaggaaaaagaaaattattgcataacattttcaattatcacatgacaatcagctataagttttcacaatagtacaaggacaatgtgaataaaatactactgggatagcactttccttcagacagaagcaaagcagagcaagtaatcaattcaagaaatcctttccagaagaactaaaacaacattagatctaattgtaatgaatattttaagctttaccaaaacaatttcccctaaagattcttaagctttaagaaacctctcaccctcatagctttacattgcaaaagcagaaattgtcagctttagcacttcagtaccactcctactcccctcacgtcacactcattcaaaagttgaaaatttcatccaacaaatcaaaacccacaacagcaaattcactacatacatcatacaaaacagaacacagcaaaaaaaggaaactccataccaaatcaaacccaaaagtaaatttttgcattaccttttatacaattccccaaacgtgccgccccacaacctcttcctaaacaagtcatcagcacaccgatgcccctcccacaattcgaggccgccggtgacgataccgggaacaaacacgaccggatgtttggcactcaaaccctctttccgcaacttcacgccaggtgggtcaggtaacggaccggtaatcgcttcggtcacgtactgagggaacgaagccggcattgtattgtacaaaaacagcaaaaaccaccaagtcgaacatatacagccaataaaccagcaacaaccatcgatacacgaccacttccttctcctcctctcgatttctctcagcttctctcctgttctctctctctctcgctatcttcatttaaat

SEQ ID NO: 218771 - DNA, 4283 bp, Cannabis indica
tagcttatgtattattaccgtaaaaaataaaacttaagtatttatttacagtcaagaattgaatttatgtatttacgccacaaattattataaaatatatattataacgagatatttacgttctaaaatatagaagctataaaatattgaaagaaataaattaaaaatatattatattagatgctttaaatttttttattttaattttttaaaaaatttttactacatttgttatacatttataaaatactatttatcgctttaaatatattaaaaaaatttaattattttttgtttcaatatttctttatataggagaatatgtgtatatattaatattatatatttaaaattaataaaatttattaaaatttaagaaaaaaaagtaagatgtatgtaagaatttgaagtaaaatagactgagcttgtagcaacttattttagataatagaaaaactgattagagtctatttgaaagttaattttgttggttctcttctgtattttagagattaatcacatttacagtagttgatgtgagtaccataagaattctaaggaatttcccattatgtgtccaccttaatatactcacaaaataaattataagtgtccaactagtacgttgctataaatttttttttaataaaaaaaagtagaattcatgaaaaaattcgttgttatagaagaacttaaaaatcgagaataagcatctgtctaaatacaatctcttaaactagaaacaaaaattgctagggtataaacaacaccattggctaatcacaaaataagagtgcaaaaaccaccaccaacaacaactaataattcatatcacatcattaaataagtacttgaggtggacaatgcttccaaaaacacttggttcgaacaaaaactttcccctgttttatgaataatccatgaataagataagttagcttttatacactaatatctcctgtcatcctgaagtgctgaactttaccatgaatgttgttctacctccattaaattgggaacatgatccaaaatttcttcaatgcttgtggtccataattgataaatgcatagcaaatgaaaaattaaatatataaggcataacaaatgaaagaaaactaaaaagccatcttattattctattcatcattaatacaattacaaaatttttgtatccacaatctaaagaaccaatgaaaaaatttcaattaattataataatactaatgcacaaagaatacactaatttttcttgcagtaatgcaaaaatacacgcaagcacgcagaaaagcaaattgttgcctccatgactatgttgataattcatgaaacaactgagaacatcattaacaacatccaaatctctgccttaatcattcccatttggtcctaatatgatgagagtgcctaaactcatggctaagtgctgtgcttccatccattcttttcaaaacaaacctctcaatcaacacataacacccaaatctcttccaacccaatgatcctccacattcctctgtcctctgcactctcacttctttttctttccgcttaacccatccagccctttcttgctcccatttaattctctcaacaacagctaaactcaacccaatactagtctcttcttcatcactattcatacttctaaaccacaaaaccccatcagccacaaacttgtcatcaactacagcttcctcacctccaaccgcaaccgtttcgttctgaacaacagcatccacaaccacacaactccctcctccattgctattatgttccttttcacatatcagttcccaattttgttcaagtgtcatctcgtaaaacatgtagttcctcatctcgtctttcatggttttgggagttccttctttgatgaacacaaaagggcaataccattttcctacaaccacaggcttggatttcttagtggctaatgggaagttgaaatcaggatggtgggctctgagggctgcgtctacaccatctgcttggcctagctcgaaccaaggcgactctgagaatgtgagtttccaaccaccatttctacccaagaatcctggagcaaaaccatctggggctactgagtccactttgaacttttcactaccccaaggagtgagatatcttccgtggagagaaagctccaattgttgatactcattatggggatccaacggctgtggttgagtctcaggagcatattcgtaaaagcagaaggtttccagctcatcttctttacagcatgtaaaagcttccctgaagataattccaaaagggtattcgttcgtcagtcttggttaaaatcaacacagtttaatttcatcagaaggatattaaaaattgggtaaatatcactacccattaagctacaccaagaataatttaaaagggtattcatcaatcttaacgaaagaaaacaaatttataaaaatatcacaatttagtatagattagaagacacaattttggatcactaatttaacacgactaatttagcttcttcactgagtgaattccaacagggtattcgtcatattttcgaatcaaaagctaaaaaagcaacgtaattccttgaaacaaatatctgaatttggataattaagactgcccattaagagcccctcattaaatttcaaaagggtatccgtaaaagttggtcaagaaccaaaaaatcaatcataatttcattttaaaaaaaatatgaaattggatcacacatgaaccattaaggttacttaccctctatcttttccaaatggatgtacagcataatatttgttagaggacaatggctgaccaagaaccggaatgaaccagacactgtgaaaatggagatctctatcacgagcgaagccttggacgtaataaacttcaagttttttattctgaggaagaggaagtctcctaatcctatcgctcttctttagaccaaaacaacatttgggctgagcttcctcatcttgaatgacgatgatcccagagctgggaccctcaggaggaggctccgacagagcagacggagattttttgtacaaagagagaggcctcgtcacatacattatcgatcaagttttgtttttttttccttttccccttaatcaaactgctatcgtttacgtacgtttttgcaaaattgtaagagagaaagagagagaggttttaggtagaataacttggtgaaagaagaagaagaagaagatgaaggggttggtttgtgatagagtggatcgcagtggggcttatatacagtactactaagcctttttagtctccgcgttaagctgcccgatttgaacatggttgaattttgactgtgtacgccaacagcctaatacaggaccacaatcactaaaacccattataaaattatgcaaatgggattattattttgagattaattacttcactttatactaaatatattaattatgaatcgtttgtggaccattaattcgttttgtaaccatgaaaattatagtaattaactttcgtatttaatatttatgttcttaacaccaactaaagtctacaaaggaggtttttcttaataattatttatcagtgctgagctgtttctgtttttattttattttattttttttcacttttctcttttttggtggaattttataccaaatacacatgcacataatataaattatcttaatgcaaaaataaaccaacataagacgtaggagtaggagtagtctttcatagtgctcgccactccaagcaatagatgggcagattgtgaggtgtctgacattagggaatagaacaaagtaacaaacagtggtatgaggtttgattgagagtttgagtgacatcaacttactcttcttcttcctctcactttccaaattcttttttcttatatatattattggagactttgttatgagcctattacagagtagcattgctattttgggtattagggttgtataggtaacgcattatcatttattaaagatatttttaaaatttattaaattaaattatataagatttgatatttaattgtaccaataaatgacacctaaaagtgtactagctactactaatgcttatagagcattcacacttctcaaagatattaaaaatttaactaattagtaatttttcccccgaacttggacatgtactaaatcgtgccccctgaacttttttggccgttaaaaattcctcccgaactattaagattgttaaatttaaggacttttatctaattttagtaaaaaaattctaacatggatgaaatttcaaggggcatgatttagtac

SEQ ID NO: 218772 - DNA, 2134 bp, Cannabis indica
agaaggtcgtagaccgtaatttggggtttgaagaattcgggctttgggcctgggagttgggggttcaaagaagttgggctcgcacaggtgttagacattcttgaggtttgccgcttgcaaaggagaagaatggtgcataatctctgtatttgactttctcgacgttcgtttgactttcactgtttgcaggagatgggtcgttctgcgttcaacattgcacttcgtttaccgtttgttgtttatcgttcacggaggagaaaagctttactcaaatatatatgtcctatatatgtaatataaacatgttttttaaattttatatgtttaaagtttgatttgagttgagtagcatatttggttgagagagagaatgggaacggaagggaatagtgatgcaatatcaacttcctccaggactagtttggtttttgcttagtacgtcattgctagtggctttggtgtaattaagtttttggatttttttttgtaattgataatttgtatttagtctcaaattggtactgttttgtgttagaatctaaaagtggtaattttttttttgaaaagaaatctaaaagtggtattaattatactaaattattatatttaatataataataaattataaaattctaatcaaatcaatacaacaaatgagtagtcaaccctcatttatcccaaataaaaatgtgtttttctttaatttggtatatataatttaattaaaaaaatataaaaaaatgtgctaatataatttaatttggtatgcttttcacgtccaacataattggactaaaaaggggttgcaattgtgggtcctaatattaagtccatcaatgctggactagaaacgcttttctagtctaattatgttagactagaaaaataccctttttatgttcctggataccatgtccaacactaaaacggactagaaaaatttatctagtccaactttgatagacttaaaaaggagtttttgtagtagtgagagctaacagtttcatcaagctcgaagaggtcgtcaagaaaattagaggagtttctcaactagaagcaactaattacactgcttatccatttaatgtgtctcaaatggacatttatcatgaaagtgaagaagaatcaaacacgaatgcctccactaaaatagattcctcttttgtgtcaaaatatgagctcgagcagagagatagtggtgatgaatcccctactctttctcaagatgatctcaagtaggagatcattgacgaagtatctctccctacttcgcaagacaacccgggacatgacgaagattctccttttgtttccaacgagcaccaagaacaagggagtagcagtgaagatgtgtcctgtgaattttctaaagatgttaaccaagaaaaagatagtgaagactccgtatgagagagagtgggatcctatattgacacaaaagcattagaatctaggaagaaaaagttggctcactataacatccacttgaatcatgtgtcggtactagggtactggaacaggcagcatttgagatgatattaccaataaagcaactgttcgctaaacagttcgcttcaaagtgagattcactttaccttgtgcaagtgaaaaattgccacttgagctaaaaagatccaacaaagtcatctataagccaaggagtctatcgcaatgttgtggccccctaaactattattagtcaaacagagcatcattgtatacataatttcacccctaataatccttttcctttagtgggaatgtggaagtttcttgtgcatacatttatacatatttaatgtatgacacctttagtactcaatgacctaattactaaaatgatgattttatatgagtcaatcatagaataatcatacacactaatacatatacatatgagtctatttaaaaaaatcaaataataaactctaaatattaataaaaattgaataatgagtatttttgctccctaaacttttagtactacttgattttaccccctaaagtatacgtcttgttacaattttttcctaatatataacagttacataattatactccttctattatgtttcgtttcttttaccgttaaaaattagcaattttattcgttgaactttgactaatacaaaat

SEQ ID NO: 218773 - DNA, 4908 bp, Cannabis indica
aaacacagggtccaattggtaacttttgtaaaacagagggtctaaaatagtatttacccaaaaataaaagaggacaacataaaataggtatagagtgtaatttcctccaatttcttggtagataatggcccgaagtacaaaagcccaataacacatcattaagaaacatacactaataatcatagtaatactaataataaaataaaaatatgagagcagattatgagggattggttttggtaggacatttaatgaacccttcttaaaagctttgtttgcttaaacattacataatcagaagacaacaattagataagaattgattcaacacttatttcaatgtttgatttttgttgtcttataaacatattaattattataactccttaactaatcaccactattaagtattaacatcacataatattaatggtggtcatcttcactagtcaaaacaaaaaatcatgaaaccctagaaagggctacattatatattattttatttattacccaaaaatattttcttatatattataggaatatttgtggtgaaatttcattaatatttataattattacacatacgattttaataaaaaaaagtaacaacaaaaatactttattttacgattttgttgcagtcgtactattttttggccattaagtatcaactcagaaatacgtggcgacacattattagactgtattaaataagctaaagaaatatatcatcacatgtttttgagttggtacttaacagacttaattaatacttaacaactaaaaaatagcaggtacttttgcctctatttttttattaaaattatacgtgtaataattataaatgttaaaagaattttactaaaaatatcctattatattatatataaataaatgaagcacattacatgttagccatgttacaaagattggaaccaattaatgcttaagctcttgatttacatcaccatcatgcaacaataatattattttaggcaattatatataaatataaaaataaaaataatcaacattttggattttgtcaaccctatatgtacatgtagtccataccaatttgtatgtatttggtcacaaattgtatttgtttttattatttataattttctaaacaaattattcacataacaatatatgagccctataatcaaaagaaaaatggtcaacttgatttgtaatttctataaaaaaaaaagtataattttattaaagttattaatctagtattaatttacactatttttgtaagttgggactttacaaaagtataatttaattaaagttattaataaatcaaggttaaattgtactttttccatattataattttataaattactaatttataattatttaattgcatctatttttttttaagttgggactttacaaaagtataatttaactaaagttattaataaatcaaggttatgttgtactttttccatattataattttataaataactaatttataattattaattgcattattgttattgttaatatgatcccactaatttcaaataaataaaacatgaggtaagccattaaattaggtagaaggcatctctcataccaacatatttttttttaaaaaaaaaattaataaataattatatatcaacattaaggaaagcatgtaaatgcaacaagcctcatgctaatttgtgtttcttaactactaaaacaattctaggtatagataagtgactaaaatttcttgatgtcatcctaaacttctcaaaaccaatatattttacatgatgatttaaatcttcatcatagattcatagtgagaaataaaatgaatcaactaaactcttaccacaaccaattgattttttttttcctttggtgggatattagtaatttgtgttttagattcatgaagttcaaataagtaaataataagaagttaagaatttgaaatattagggtttataagatttctccacttcaaacaagttgcaataaaaaaaaattgaagttgacaatgttgcttaataccaacaattgattccaattatagaaattaaggagtatgtcactaaaggattaagaactcacacattactttagtaacgatccaattattaaatatcactgaagattgaagtcgacacattcttctgataacgatttaataacaaacgtcaaagttactctaataaattttatctaaaatatttaaaggattaagaacatcattaaagtttgacacattactttcactttttcacacattccatatgttcccattgttatttccttagattgttttaatgtaatgaaacttagtcctttattattattattttcatagaatcaaattgctttagccattgagatctataatagtgatcccaagatatgaattaacatataaaactaaacaacttcatatatgttatattcttcatcttctcctttttttccttttcattataagcttataaagactatatatacatatgcttttcaagatcttttgggaaagaaagaagaaaaaggggaaaaggggttggctattgaaatctatacaagtgattaaattatgaattaaacaataaactaaacatgaacaacctcctatacatattcttcttcttcttttcattattataagcttaactataattatggaatattttacaacatgcatttaataaagatctttacaagaaaataaagacaaaagatgaaaagggtttggctattgaattaatctataaaacatcaaaactttaaacaatctcttacatttcttctctctttctctctctctctatatatatatagtataaagacaatttacacctttttcaaaagtcttattctttatatgaccccatttatagctaaacaaaaaaaaattcactcactcactcataaaattagagagaagagattaacaaagaattacatgagaaaacacaactatctttcataatataatcaataatacttcccttttcaatcttcaacttcttactttgtctattccacaaatgaaccacaaaactctttgtccttatatgcttcaactttcccaaaacccatttgtattgaaactcatcatttggacttgaaaacaagctttcaattctactccaatcaaccggataaaatgcaggtggacccaaaatactaaaattgaatctcttcttatcttcaccatttttaaaaacactactactatataatactcttgaaacaactcttgaaactaagtaaggaccattatgaccccatttactaccatcaaatgttgaagcaaattccttaataaattccaacactaaaggatgacctttatcaaaaaccaaaactgcattattcaatctactccattgacccgtttccaaatcaatagtttgagctccaataacatttttcaacttagaaaaactcttcacaaaaatcatatccgtatctatataaacaccaccatatttataaagaagagctaatctaagcaaattagagagattttgacccaaaggaatctcacccggattcactttacccattttcaacaaactaaaccaattttcagctggagtgtttttgaaaacgtaatcataatcaggtgaaacagcaagtacactaagacccatttttaaaaacggtttaagtactctattcaaaccctcattcgaatccatagttttcgaaactataaccaaacaagaattgggatgaaacttgaaaaggctttcaatagcaaaagattccctctcaccaaatgatttcaatgaagatatccacgtcatgaaaaaacgtggctttgaacaatttttagaatcgaaaaactccttaaccgtttttgaaaacggctctttattaccactactaattacactactcgataaagatcgaatctttcgtttcatcttcttcaatcttctggtttttttgtttgaaacttcgattttgggcaaaagggtatttgtttttatgaacaaaggagcattttcttctctaacaacataagaagaagaagaaagcttggtcaccggcggccattgatctccggcgagattttggcgggagaaattggagggaagaatgagatgatgattatgatgagatttaggaaaaggggtttttgataagaaagggatatgaatagtgaagatagagaagccattgtaggctagaagaatgagaaggagaagagctagaagagaggttggaagagagaggagaaagctaaagattgaatttttgaatgtttgtaattggtttagtgttttttggattggttttgggattttggtttgatgagtttttgaattgtctaacattgttggtttgggggaaaaagatttgatctttggttggtttggggttgttggtttctatggtgagttgatgagagttggagatgatgaagaaagcatttttatttgtaatggtggcaaatatatgtgtatgtatatatatgtgtatggttttggagaaaaatgaaaatgatgagtgttttgagttgtaattgaagagaaaagttcaagcttttgtttctttaattggggttctttaatagtttgagattgagaattaaatgtgtgtgtatatagtattggattgtgtgaggttagctcattctactaattaaagaaatatatatgaaaatattatttttgttttgtgatggaagagaaaatattattttgggaggaattgctagtgctcaactattacaaggtataaaccacttggggttagctcaagtggccataggtgggtgtgtgagtgttggaggtcctgggttcgagtcccaggtaaaacatgatgtaatatataaacgcttgaatcaaaaaaaaaaaaaaaactaattacaaggtataattaagtattttcaggtaatttaatttaataatt

SEQ ID NO: 218774 - DNA, 2740 bp, Cannabis indica
aagtgttggtcgctctgcgcggactgctgatcactttgcttcaggcatgcctataaggcatcctgtttggactgtactctccgagcagatactcgaaggttattccatgtgtcaccatgatgtgattccacgtcagagtacaaaaattgggatgacaaggaacaaggcatgaccatcaagaaggaaatttatagaaatcgctactttttttttacgacacttcatgtttggcacaaaaatcaaaaaggagcattttcatcattgattttcacctcagtttggaaagcattaattgtgaggatgcacgtagattgttggacgccccaatcgtaggatggagcttgtgtttctagagataagatcgcagtcgtccaccccttcttcacatagattgactttttgggtataaataccctttgtaacttccaattacaaatttcctttatttttcaaatttctcaacccttcaaagcccatgaatttctctacaatctctagaactacgaactgaacttgaaccaaagctctcttctttaacctaaaaaatgtcgtggattttgccttcgtctgctgctgagaatgagggcacaaaagtttccacaccttccttccctagtgatcaagacgtctacagcaggcaaaattgcaagtctagatttcaacgcaaagatcgattcgctgattaccctagcatctcgtcttcgcgaaaggtgaaatcaacttccctagccatacccagcgacgatcagcttatcatctccattgtcaatatcaagtatgttgtttctttgtccatggattgtactttttgaattcattacttccaattgtatttgtatgttctattctagaatgagattgggtgttttattatgtaatttccatcttaggtagatttaagcatcacgaaccaatttctttttaaaaaatttcatgtcgaaattcttggagttgattggttttcagtaggaatgctagaaaattctactttttgcccaaaatccttcaagttttaggtttgttcttaatttccatcatccctctctacatcgttcttcacttcctatttggaacgagtaacttctggaagttctcatttctggatagttagtctagttgggacctctccaagtagtttatggggaaggacccctagctccctttctatcctaggtagttaaggtggctaactgctttgattttgttctttatgtatagaaattatgcctaaacatacctgtcaagaagatgctgactcaaaggaggaagttatggagcgaggagacgctccaaagtttatcataaatgatagtccatggaagttggactagcatgtcaacatgttcaggaattataataacttgaggaagtacgagaccctatgagggctcaaaagtgttcgaggattgttctggaacaggctctctgtacttgaggagaggcccagcaaatgcacggaaagatgctttggtgtctgaaactgggctcacattgaaatgggggcacacatacccttaaggtgctattttgcaaagttttgtgtcgtagctgggattgcacctttccagcatattcctcaagcgtaccgcttgctatgagagtggtacatcttttgtgttaaacatgacaaatctgtgtagatgccagaggagatcttatacttctacaagatcaagtctcagcccatgaggggccacaaggagaaggtgggcttctacagattggagtggtacacaaggaatattccttggcccaccaattccataaagtatatgcacaacttacgggactaatacttcttcacttctcgcttccctctgaaaaggggtcctcccctcaatttgaattttaacactataagtaagtattgttcccttctttggactctaggattctacttttcctcctatttaatatgtaatgatttcttgttctttagcatttgctagactaccttccccaattgcctctaactccggagctggaaaatatgatagctttctacaaatgtggtaagtagagaagcttgtgaccccggagaacctctgggaagtaggtctcatcgctccacactaggatgtggctcatcttttcgttaaggatatagtccaggatgctctacgaggggacccagacgaggttaaggaaaccatcgcagttattattgttgaagaggcactaaaggcagtgaaggccgatgagcaatggttggtggattagaggagacaattcccaaaatgcctaagcgaggctgaagaactcactatctaattcaaagaggtagtgcataatgatcgaagattcccaggcctatgttgaaaaatatgacaaatgccagagattttcaaagataccgcgagctccgcccaacgagttgactcagatgcaaagtccgtggccttttgccatttggggaattgacctcatcgcacaattccccaaaggaaaaggtggagtgcattatgtagtggttgcggttgattactttattaagtggacggaagcgagctattggaaaccattacatccaaaaaagttcaagacatttttgtgaagaacataatatgtttattcggattgccatacaaaatagtttcagacaatgacaaaaagttttacagccagtcctttactgatttctgtgcgaaccatggtatcatcaaaagtttctccgcggtagcacatccccaagcaaatggtcaagttgaatcagtcaacaagacactgaaggacacactaa

SEQ ID NO: 218775 - DNA, 3870 bp, Cannabis indica
ttttttaaccatgaaagaaagatttgttgatcttgctcaatgttgaattaataactattccattcatagttaacgaattaccctttgaaggtaaaagaaagtacatttagtacttggatggcaagggtaagtattaattaattatttatttgctttctctgtcaaaattactactcatctttttcaaatggtcaaaattagaacttggatatcaactttatctaattttgacagagaaacacaaatgataaatctattcactcaaatgtccttatcttgaaatggatagggggtgtaatgtagttttcagttattaatttaaaatggttgagagtaggtgaagaatgtaataatttgattttaaaagatggtgtgatgtcaaactctctccagttggacaacaaattttatttttgggggtacaagtaacatgtttttatttgcattatagaattaagatagtattactattacattttaagctcaacatatttaagatggaataacgttggtccaccacaagcctacaaaattgttctgtttagtttccacgtgcagcctacctttgctttttatttgctaataaagtaaataggggaaaaacagtaaccaaactcattttattatgtgatacaagaacattaacacaaatgataaatatctctgatctattagccccctcccaaatgttgtgatgcaataaatcatggtcattttatcatgtgtatattatattttgagattattatcagtgactaccactaacaagtatagggagaagaaaagcttttctatttttattaacctctctagttacaaaaaggatggtcacacttctccaacttcctagagaaaaagatgagaagagaaagagaaaaggaagactaagggaaaaaaaaaaaaagattttaacccataaacaaaataacaaaataagggaactaatgaaaaagaaaatgaagcaaaagcatcaaatccctccactaaatacaaacatacatttgggcatgtagaggtcgaacctacctagtcagaaaattgaaaaccctcaagttttgaggcagctggcttatccaaaaaccacaccagcttcccttttgttggctgcaccatccttgcaggtaccactatgcaatctggtccaacatcatcaattgccaaatgtgcagcttccgctttgttttcgccagtcacaactatagccacattggatgctgagttgatgaccggtagagtgaaagtgatcctctcgggtggaggttttggggagtctgtaatgaaagttacccattcattattctcatcgagcactgaatgattagggaagagagatgcaacatgaccatccgagcccattcccagaagaacaaggtcaaacttgggacagtcactcgtatcagacacaccaattacacgagacttcaccaactgacgaataacaaactcatactcactcgcagcctcctctgctgaaacagagtcattgatagaattcacatgacttggaacaattggcacctgcaatggaaagcaggttagagtaaagatgatggtgacaccattaaacaaaatactatatgacttaagaaaaaattaatatttgttagaatttttactaatgcttatttagctctaatattatttaacacacaagccctatttctgatccttccttttaattactttatcattgcagggctcctctgattcgagaaaatgacaaacatgcaaaattaaaaatgacttgttcattgctttacaaacagaaagaagaaaacagcaattttggcatttgagttggtcggaaacggatgaacactcatcattccccttagccaaaaataatataaatcaaaggtagggtcacttgttttaacttttgatgggacacctaagaattacactctactagtgtgaagcctaataaattagctatttctgtcatgttgctgggttccacattagttcaactgctccaattcaatgggtctaaaaaaaggttatctacctgatctaaactatactggtccataaccacaaaatttaatcctcaccataatggttttatattattgcatattgacattctgctcttgtcactcaattagtttgattatgtaagaaaattgagtttataagttaagacagcagaaaaaaaaaagggtcaagcctgcaactttcaaataagtaataactaaatgattagaaactaagtcacgttgagtctattttaattctattcacttaaaaacaaattaattgcttcttcaaaagtcccaagaatgctttaatgctttgtcagcaacttcaacctatttaaatcaagcaaacggaaagtacactcactctcccatgaatcaaacccaatccatgaagtttttcaggagtggatatagtggttcataaagctcatacctaacaactttactgctatcagtctcagataaatttgtcatatcatgtagacagacattcaaccacacacatacacaactaaattcatacctcaccaaccaatttaccattataaatattgtcatctaagatgaaatgattttgtgaaaaaacagtcttattttgctaatgaaagagggtctacatgtaaaagaatcaaaagttgaaaacgaaatttacagctaacccaaagtaaattacatcacaatagaactcggtgaagtaaaatctctaaagggaagttctgaagttgctatctggtatttgttggaaagtagctatctgatttgcttaatcttgaataaatttacaggacaagagtagatatactgttgacatgattctttcctctttcacaaaaaataacaaaatttgaataccttccaaagtgaaatggtctgtaatacaatattttctagcaaaacatggttgatgagagatttggtgagaaaagcatatcttaagtcacttaacctctttatcaagaatgtagaatgggaatagagatctcagccaatttgggctagcttattgacattaccaactaaatcccatatgtaacaacacctaaaccagctagttctctttgaggagtaatgaggtcatcctctcttcttttttttataccaagttttgcacttaaagagagatggaaaactgaagaggaaaaaataagaagaagaagaagaaggaagaaaccttggagaaaagaccatccttggcaagtttataattgctatcaacatggtttttggccacaacacgctcatcagcccataatatataccatttggtccagtctacagtcttgttataaggagcttcacagagttttctgttttccatcacaaatttaaacgaaaacaccaaaatcacaaaaacaattaaatcaaagtaggaaaaggaaggcattgattgaatattgataccccattaagccaatgagagaaccaccagataaggccacagcaaagacacccctctccttcactgacgtctctgataattcagctatatagtctgccaaatcagtcccaagctcatccagattttcatgaatcctcaactccttatctttattaccccctaaaagagccatattttacacaacttcacactagtacaaacaaacaaataatcaatcaaccaattttttatagatgtaaccatcaagttttggtataaatctttcaattacaaaattgaataagatatgaagaagtaaaggagtattattggcaagtatattcacaagaaatagttgagtacaaaacatagaatggtcatgctatttcatcttgtaggcgttgaacaatattagggacctatattctggagaatttattactctcccggtgaagattacaatttcaaatcgatgaaataaaaataacttcttttttttatttatttttt

SEQ ID NO: 218776 - DNA, 4320 bp, Cannabis indica
  modified_base (14)..(14): a, c, t, g, unknown or other
taaaactaaaaaanaaaaactttagaaacaagtaaaaaaaacaaaaaagaaaaaaaaaaaacgaaaacaaaaattcacgatacaaaattaatatttatatatagaatgactattaaaatatagattattgcaatgtaagttaaagaaaaatatatatacttgctagaaaaataaatatatactagaaaaatactatttactttcatatattaaattaaatctattataatatgataattgatatagtccatttattctttttagaaaaaaaaaattgtagaatagatgaatgaaaaaatgttaatatattcttcaatataatagtgcgatcaaaattaataacttacaaagatggatcaccttaattagatcaatattataaataacaaaaaaaaaatggaaaaaagaagagaaagtgctatagaaaaaatctgcttcgtacacaaaaaaaatgcaattatgtttcggaagtgtgatcataataattaggtttgaatattagtattttgttggaaaatcatttgctacgtattagtagatgataagttgatgaatagtatttattaattgaaaagactatcatattatattatattaaaatatattcacgatttttataatagattgtttcacacttaaatgtaactcatattttatattaatttaagagtataattggaaatatcatctataaaagttggtacattttaaaaaatatgaatataaaagtaaaatcaaaataaatatacagtgcaatttatatcatttttctgcagattttccaaatgatttttctaattttttgtttataaaatatttgtcatctatttcaatacaaccgaaacttattacaatcaccaaaagtatagtagccgtagcatagtcagtactattgttattggatattagtatttactattttattttttataactgatgcaatctgattaattactaatattttttaaaaaatattttattaaattatattaaataatttaatatttaattatattagtagggatatattagatatattatagaatataactgttttttttttagcaattctcctagtaattttatgtccactgtccacatagacaaaaacccaaccgaccacttaattaatagatttttgaaaactttgaaaacaaaaataattatatatataaatatttggtagtcaatactcgcaaaacatgcttttcagtattctctttacctttcaattttttttttccttttaattatcatgtggctccacatgttgaatgaaactattccttcctctcagccccctccactcaaacctcaccttcctataaatctcactcactcgcaccaaaaccattggaagtcttgaaacccacttctctctcttcactctctctctttctctctagctctctaaaaaaggaaaacaacaacaaacaaaaacaactctcttgattgggagctataacataaaaatcatggcagctacaatccaacaaattctacatactactaaagccaataatagtagtcatcacgtcacattgtcagacaactttcggccccgtccgcattctttcgggcaggtttcgttgcccatcaaatcccacacaaaaacttcaatttcctcttcttctctaacagtcgacgctgctacttttctagcaacactacccaccacagccacaaccacaaccgtaacttcaacctccatgtgtcagccttctaagccagttactaattctaaactggccgatatttggagagagatccaaggctcaaataactgggaagaccttgtcgacccgttacaccctttactaagaagcgagataattcgctacggagaattcgtttctgcttcttataaggccttcgacctcgacccaaactccaaacgctacttgaattgcaagtacgggaagaggaacatgatgagagaggttggtttggaaaaatcaggctacgaagtcaccaaatacatttacgccacacctgatatcaacatcggcgacacatgcagtcgatggatcggttacgtggcagtgtcgacggacgaagcagctcgcaagctgggaagaagggacgtcgtcattaccttcagaggaaccgtcaccaaccccgagtgggtggcgaatttgatgagctccttaacaccggcaaggcttgatcctcatcatcctcgccccgatgttaaggtggaatcggggttcttgagtttgtacacatcggacgagagctcgagcaagttcgggcccgatagctgccgagagcagctcctttcggaaatttcgaggcttataaacaagtacaaagatgaagacatgagcataaccttggccggacacagtatggggagctcattagccgttctactagcgtacgacatcgctgagctcggtttggctaaaaacgacaacatcccagttgccgttttctcgtttggagggccgagagtgggaaactcagagttcaagaagcgttgcgaggagttgggtgtccgagttttgaggattgtcaacgtgaatgatcctatcacgaagatgcctggggttctatttaacgagaattttagggttttgggaggaaagtacgagttcccttggagttgttcgtgttacacacacgtgggagttgagttggtcttggatttcttcaacatgcaaaatctttcctgcgttcacgatttggagacttatattggtttattgaaatgccccaacaacagcagtgtagacgttgaccaaaattatagtaaaagggattcaacgactactaattttgacaacattaataatcatgttatgattatgggtggggaatttttcgacagagctaaagatttgattttgagtgctcaggatttcaacatgttgccatggttatgtgttgctggcaatatggtgagtttggtgcagtcacacggactagataatcaactagattttttttagttaattagctagatgctatatatatgtagattaatataattagagtgtagattatgaggatgatcaagagtaattaaaactcagccttatgaattttaaatagggtaatgagggaattactaaattatgtttatcgatcgagtgatgagatcagtgaattaaatatataattgtacattatgcttgattttgacagtacttttgatacaatctatatgtagatcaaggcctctgcaaatgaatcagtggttgttatgatatgtcgaaagattttgtagttgtacctaattgataaatcgatgctgatcgatattcgatattatacattcagatttcaacttctaatattctcatatatataattatctaaatataatatctacaaaatttctgatttcaaaattagctatgcgtatatcttggttcttaataatatcgtacgaaaacaatgcatacccgattacaaataatatacataccatatatatataaatatttatttgcatcaggaaccctaagaaaatacacattatatatttatcatataaatataattataagtagttggaataatttggggcatatcggaagatcgtcgatctccctctgatctcgatttcaatatgtccaaagatatatagtttgttgttttaaatcactaattaattagattaatatatgatgaatatgcagttagctagcctatattgatcaacactggatggtgaaattcaaacacatatcatgcaataatagatttccagcaggggttatggattttccttaatacttgtgcagtactattactaattatttattctaagcagtaatcccaataacccttgacgttgactgtgaaagtagcaaaggcggagactctcccaaagcgaaacacacgtaaaaattaggtcagataacaaactaatgaaaatataatatataatttaagtaattcgcatgcactacttgataagttaattgctttacggacaccacgtatttgcctaattaaaaaactctatgaccaaactcgaaatttgtgcacatatatatttttagttgtataattaattttttttattatgttattcattaaaaaaatactcaagtgatatttaaaaaaaaaacataatactattcaaaatttattgtgaatcacaatttttaactatttaaatacttttttttttgaatattttataatattttttattatttttaagatatatattatataataataatagaagaatatttttgaggtaaaataaattataatagaaatatatatatttttggtaaacaaacaaatatttactacaagaaatgtcacttttgtccgcacatttttgtgctggcaaaagttggt

SEQ ID NO: 218777 - DNA, 6350 bp, Cannabis indica
ttttgtccccgaatgttaaacggggcggggacggggatgacactcctcgccccgacggggacccgtttaatttattaattttttttattaatagtttatattttatatatgtgtttgtatttttttagtatattaatatcatttttacaaattttgaagttgtgtttttatataataattactatattgaatagtaaataatatgtaatattttatcttttatgtaatttaataattttatacatttaaatttttaaaataaaatttattttacaataggggattacccgtcccgtccccgccccgtccccgatgaggaataagcggggatggggattaaaatccttaacggggatggggacggggagagcactcttcgctaattccccgccccgtgtgcatccctaattccaactgatgagactcatttttctgggcggggttactgagcaacacctgcctgttcttcagtgtcagacatggatgggacaacaaggaagtcagagttggaggaccgagcccgtttgagcatgcttcggacggaggatccaacctgacaattaagtctagtgaaggatcgtttagttctagagttagggtcagttgtaacctcgacaagagagaccggggtgaaaaggttggagcctttagagggttcaggatacatggactccttacctttagaagtagcaatcacaacagtggtagtcatgataggagcagaagcaataggtgcatgaataagcaccgtagtagtctgagtagtaacagtagggatatggtccatttgggaggaatggtttaaggagatggggctcgggcgaataataagagaaggggcctgggcaagagtcgcattaccaatacttgggacaaggacttgataaataatttcataaaagccttggctaacatggtttgaaaaaaatggctgctcctcaaacgaaataaaggtggatagctcaaaaatactctttttgtagacaaatttaggaggtgccttaagagtatctttgtagctcagggaaggagggtaggcgtaagtatcacagtgctgcaggaaatggtcatatttggtgtaggtgtggtcaagtttaccacaatggtagcagtaattttggattccctcataaaggaatttaagccatttagtaatggctaatttcctaaatcaaacattcatacccctatgaaggggtttggtagtgtcaaggagaacacgaagtcgcataaaaggggttatggagtagtaaagggatgagagatggacctccataagatcacctatggcatcagcaatgaactgggcaagaccataagatcgattcccaaatggaataaaatgaacttgcatccagagggggatgtaacggagctgggaagggaggatagtgtcaaaaccatcaaggatggcaaagagcatgaaggatatgtcaaaatgtcagggctgaccccatcacctttgcaaccaaaccgaataaaaaaaggccagaatgataatccaaaacagtgaaaggaaaatgagttatccaagcctccttaatcgcattgctaatctaatcgggcttgatggttttagtggataaaattttgacaactaagcaactggagccggattatggaaacatgatcgaattcatgaacaagggcttcctcttcagtgatatggatggtgaggttagggttatcagaagtggcagacatgttgacaaggttgcacaaagaaataccagacagtagagaagatagcaggcagatagaggggtgtggggcgaaaaaagcaaaaagcaatatatatatatatatttaataagaaagatacttggaaaaacttggtgaagaagagagaaggcgaagagatgtcatatcaagcgtagcaacctctagatcaaatctactccagcctactgtcatgatgatttgggtctacacaaaatgaacccagggaggagagaaaccaatcgttttctgaaaacataataaatgggggtcacggtcaagttggggagtgacaagaagtaaatgcttagtgatcatgggataagggtaaaaaaggaaaaaaaaatagggaagactgtgggaggagattgcatatcgcatgcgaaatggagttgcattaattggagatctcgattgcaggtaacaatgacaaataataaatgcaaaataagcatggttgataataggagtgaaagatttaggtgattgatatttgatatatcatgcaagtatgggatgccttgtgtgaagattggaggaagcaggcagcagctccacgtgctggagcaggagagagcagcagagccaatggggggaagacaagtggcgtacacgtggagagctgaagggaaggaagaggcgccacttaggcgttgacgagacttctgataacgaatgggagagagccactaaggcgctcacgcaacaaaaaaggtccacaacttgggttggaatgggtggatgggctgatgggcttctcctcttgggcttctttgctcctttcttcttttcttttcttttaaattttgctacttgatttctcttttttttccttattttcttcaacaacaatactaattcttacaaaataacaataaattaaattcaaataaaaatttttcaatataaaaatatattctattaattccatgaaaaaattaatttaaatttttttattttaaactttaagatcaagaaatgtgcatttttcaccattaatcaggtggatcgaccatctcctcattgtactgccccaatgacgatccatctggctggatgatgatctggtctgcttctaacctgctctcatacagtgctttcccttaggtcagtgtgctttccatgaaagaagcatcccccatgtaagaaagattagctctggggttgcgtagcttgaactcgtagatgagctctaaagataagccaacatacttgtcctttatgtcctgctggccataaagggtagccttcatcttctcctcacttcttctgagttcagtctgtaacctggagttgtcaacaacgagtgaggtattctcttaattactgctgttaagcataagctctaaaccaaaagttatgtcccgaatttgttgagcaagagcctccaaatcggtcacaaccttacccctcgccaggagcttagcctctagggtctttacctactcctagagagcacttgaggaccccctagagttgccatgtgaaaagctaagcttcataaaggcctaaaaataaaacaaggcaaagattagtgccagaagactccactagccggccagcccctctacggtgctactaaggctggccagcctttcaaagatactacaatggctgaccagcttcatacaacaacccttatggccgactagcctaaaataacacaaaaagtgagtaaagttaaatgtgcaacttactgaggccaactctggaagaccgacagaagagagcctctctagctcgtcgttaccaagctcttgcaactcgttatcaacagtaggaagggctctgtccaaatgcctgcaaattgcctccatggctctatgccccatggctgaacctgctccccgactaggcttttaggcacccctacccgaagggcgatctctcctcaatggagggtcatctatcataggctgcccagctggcgcagtcccaagaggaggaaaaggaaaagatgacccaacaacgttatcaaaatgggtggtccaggccaccttggccttcgggccacctgtaggctcatttgaaggtccactagctaaacctttgaatctagaagacatatctgcaagaagaaagtaacaaagttagaataaaagttgcaaatattcaatgcaagacaagaatataaaagatagtgcaattaataatcaaataccatcatccccagaagaggaatcatttgaatctccaatggctgccttgtctttgcctctaaatgtaggcaaggggcaagtaggcccaacagaactctagcctctgggcttgatccgtaaagtagcatcccgaacggtgcccccacgagccaagaattggcagagggccctctctcttctctaagtcccaggctatttgggatagaggcacatcatcatccatgtcgggagcatgcccaccacctaggctgatctccttagcggttggggctccatctacaccacctgatgggccctcgacctccataactctagaagcaggagggtacatgccatatttttgaaagttagctacacttgccaaccttattatattcctcttctctacggggagggataggatgtggtaagctctatccctcatctgcagagtagagatagagcacgtgtagttaggcactcacttaaaataatgatgtcggacctcctagacatcccaggcaatgaagtaattctaagcatatccaccaactttcgacagaggcgtgctattggtgtcacccaaccactggtagctgacttggctgaagtaaaagtaccttgtccggtttcgctttggagcagacttcaaattaaaataatacctaatcttatacggagtaggctcaagctaacctagctccgtatagagaacaaatattgttgagaggtatttaatactttttagggtgatttgtgtgggacacatcccaaagtaagcgattatgtctctaaaatatgggtgtaaaggcagcactgccccctactggaggtggcgctccaaccatgccatccaactaaaggccattcagtgcgcttgctgatccctcaaaggcatcttacactggacgcctctcaccagtccactctccagtatcctatcgaaagcctcaacaatgataatagatggaggagagacccaccaatgtcccttgtgacatgaaatcaagaacctaaggctcagaagcctgtaccaagacatggtctaaacctatcaccgaaggttgaccaagcttgttcaatggctgcctgtcaacatcatatgagcccaagggatagttagagaagacaacacaagtcctatacatcctcctcctagcaggcgtaacctcctccacctcggacttgttgtttggactctcaataccctggtcaaccataagcatctctatttggctgactcttggatctctattatcgagaggttgtgtggcctcctccactatgccaaccctacccatcgatgccaccctgacaacatgaggatcagatggtggtgcactatcgtacgaccgcttagttctagacatagtgtatcactatcagtccagagattactcaacaagtgaaaagaggacaaattggatgttatctctcaaaagtaagactgactggacctatgacaaagcagttgtcacctccccagaccaacacttgaaatcacctacatagaagagacaagaggaggtgaacaacttgacaaagctacaagatacagacaaagttttggccaatcatacctaagggtacttgccagataaattacattgtacaagactgggtatcagcgaagtactgtctcaagtttacctacttagacaaatggtgagtcctaagttatgcattcaactataatggactcactacaaaatcttatacaaagctcccaagggagccacgcatgagattaaacttgtatatgcctaaaagggcatcacgagacccatgtcgatgttaaaagaggacaaaatacttggtcgctcgcttggaaccttggccttggttgaccagggttcccaagctaagagagggatgactaggtctcatgacccagccaagggctgaccaaggaccctatgcccagccatgaagggcgattagaaaccctatgcctaggcattggatggccagcctttgggataccccctatggccagcctgaccccatgatgaagacccatggctggccaggtcttgaacaagacccccatggccggccagggtgcatgtcaaatctaaacgtgtgtttttttaagaactcatcaaacacgttcttcatgttttaggggtgttcgcggtgcgggtggtgtagtttatgaccattttttcaaaccaaccctcagatgcggtttttctaatttcccaaaccgcacccacaccgcaaaattaaaaaactgcagaaatcgcatcgcaaaaaatagtgcgatgcaatgcagtttttgcggtttggactatcgccaataattaaactatcacaaatacaacaaagcttgagcaactgttgtgttaaaattagatacgcaagtgcacgtagtcacaaacaagtaatacagtgataagtaatgagtatcgtctccacagggactgtgaaaataaaatttctattgcaaaaattaattaccaagcaacaagcctaaaaactaaaattaaatga

SEQ ID NO: 218778 - DNA, 4006 bp, Cannabis indica
acttaactgaaaggtgaaaagggtatgaaagaaaaaaaaatatcttgggatgcctttttttctcccttttttctgggagatgttggaacattaattagtactatcaagttacaaagggagatcagcttgagcaaaaatggaccacgtcgcagactcacaatatgtacaagtgaacactctactctgccttgacaaaatgagcagttagaagctttaagactgagaagccattgaacgtgccaacatcaaggaaatcttttaatttatcatcgcatgaaattcttctcgtttcagacagatcctaaagaaaaaaacaagcataaaacacgatatgaagataaagagcagtagaacaaaattagcatactaattaaactaaaataggtaatagggttctgtttgcagttccgaactcgaaagacaagacatcaagaaatatttcataatctcattatatacatgtgcacttacacatttaggaaatgcttctgtgaattatcaatcactttacaattgttttcattacagaatagtaaatgccctaatctcagaattatgtgagttgcccttaactactaaagtataactctcgtatcactaaagctaccacaaatgccaattgacaaatcagaatctgcagcatactataatattttggtgcacctaaaagtccccaatttaagaagaccagaacctcctttctttggctatttttatttttgttcgcactcatctatatctaaaagaacaaaagttgcccgctgttccagaaacaacaataagggacctcagtcatgtcttgattagttggctatgtaagttaagccataaccaaatttatgaatgcacactcaataactaatatttttccttgacactggtccctctcttgtcaaacactacaatttctgagaggcagcaaactcgagcaatattgctaaataggagagaacagatggacttgaccactcaacctatccatgaaacatataaataccctgttaacatctacagtgcaatttggtaaagtcagatatggtatcttaccctcttcttgctcttcgtcagactgcttctccctttgtgaagagtctactggagatgctatacgtcaaacaatgtaaatgaatcaaaccaccaaaagtttgaagaaatccaccaaatgaaaaataaaataatataaaaaaagacaccaccagaattataaatgaatggcatacaaaaagaaaacaaacatgtggtaacattaacatccaaatcaccttcttcttgatcctgtctagccttatcatccctttgtgaagagtccgctggagcttctacatatcaaataatgtaattgattcaaactaccatacagcttcaaacatgcacacacaaacaaaagaatacagatataaaaagatagatgccctaaaatatgaacctgtattttgtgcttaaaaaaagggacagtctacaaatattacaccatggaaggttgatctgaaataaagcttggcagactaaacctaatatgagataaaaggataaactgcatcaaatgcagcaataaaaggataaactgcacattagacatgctttctaccatgcatattgtcaaatatgagatgtattttgatccattaccattgaaatacatatttcgtttttgtgtgagataccaaaatataaaaaatgccaaagctcattaaaaacataccatcttctatcttcaatggccatatgtgcgctgctagggctttattcatttgaaacatgttgatgatatcaacatgaaaaagggtatgcaatgacttatcacatattatgttttgcttgttctttggatcttgtagattgttctccttaatatagcgccaaagtctcctgacaacctgaacacaacagaggagaagaaacaatgggaaaataaattcaaatgcatgtcaaataacttcctctgattccaatcaagaagaaataacaaatgcagaggaaatattgtacaccgatcaaactacctctgttcttgccaatttggactctccaatgaacaattgaagttgtggagaaaggctacacactttagtaaaaccacctgctttctttttaacacctttatccacttcagcagacttacttcacgaggtaacaaatttaagaaacaaaacaaaagatgaataaaagcttaacttggatcattccttccataaaacaaacataaaaagaagagtggggtaacttaccctcgtttccttttgtttggtttactatcttttacttttacttttacttcctcttcctcttcctcttccacttcttccactgtcttactggattctacttcagactgacaatcgtcaattgcatcagctctttgcttttgtttcacaattcctgagttttcatgatgttaccaagttaaatttccactcaatcgacatgttaagaatgaatcactaaacgtagacagtaaggatcattataatataccgttaaataaaataaagcgagatgaaatgtggaagcttgttgttgcagttaagttgaaagtggagaaatataaaaactgcaactacaatatcagtatcatatggcatttcaactagtaaaatatcctaagaactctcaaaaagaaaagataaacgagaactgaatgatatgtataacacaattagaagaactgatataaagactaatatatggaatctaccaatatctttcataatgagataccatcttgttctctcccttttctatattaacctgaactaactaaaataattctgtctagaaagggttggagtaaagaggcaatcagtctaaacacggcaacatgcaaaattaaaatatgattcaacacccaggtggctatgttcagcattcaccaaattacaagagatgcagaagaagtgggtgaatccatgtttaattacataatttacttgcatttattgtgtttataatagtgttgcaattgaaatatgtatagcaccaaaagccaaacccagccaaaaactccactagtgaaaaaaagaaacaaatacagcacaactataaatggcaaagaaacccacatgaacctctgacatgcaagatcataacaagcctaatattataagtaaacacaatcataccacacattcagacacaaaaataaagatgagaagaaacataattatgtaagtaccatcttctgtgcttaatggccagatatgcttcgacagaactttattcatttgaaacatattaattgttttaacacggaaaatggcacgcattggttcatcacaaataatatttctcttattattgggatcctgcagattattttcccggatgtggcaccatactttcttcacaacctaaagacaaaacacaacgtaaacaggtctaagaatatggtttcagaaaaatgaaaagcattcaattaaaagataaagggaaagcaaactcaaatccaaattttagaaaataaaaacctctggcctggacaattctggctctccaacaacttcttgcaactgtggagaaaggctacataatttattaaagccgcctctttttttaactttctcctccttggtcgacctggatgtaaattaacaacgtagagtgtcagtcaacagtaaaaacttacatacatcacggcataaggaaatatatgaaaaaaaaaaaagtgatatagaacacaagtcttaaacattaatccattatgcactagaaactttcataactacactttaccgaatgaacaatgataatcataaagaatatacgtcattcccaataattcccatgaacgagacagctgatatatccaacagaaagaaaaatgaaattaataatctattctcgaataaaatagttcaaattcactcaaatgtaattctcaaacatctaaaatgaattgtttagatcaacttacatggtaaaaggaattataattcaaacatgaccgttgtcgatatcttcaaattccgaaagctaatataatcaaattcaattttcttttcttattaaa

SEQ ID NO: 218779 - DNA, 1963 bp, Cannabis indica
  modified_base (49)..(49): a, c, t, g, unknown or other
gcaaacctgaggtctgtgaaaacagtttgagcccttgaagcaaataaanaatgctcttgtagtctccattgacaaaataaaagcacatcatccgcaaacatgagatgattcaacttcaactctttacatctatggtgaaaaaatgaaatctgatttctgcccaattttcctcatgattcttgttagatattccatacccagtacaaatagtaagggagacatgggatctccctgtcgcagacctcttttagcttcaaaataaccatgtgaggatccatttatcatcaaagaaaatctgggggttcgaatgcataacatcacaagttgaatgaactgagtaggaaatttcaatccttgcaacatttcttcaatgaactcccattctattgtgtcataagccttttgtaaatcaaatcatagtactaattggtataatcaaatcaaatcttctgcactttgattcgatcaagtaataacctacttcagcctaattcaattctaattaataatttagtatcgtccaatccaatctaatcaaatttgcaaaatgagcttacactattataaccatcttaatatggtgttgattttgaaaagttattagtttagggccttgctaattaactagttgggctttcatattttttcctaatgcatccttactaatttcacttaggttattatgtttctgagcaataaagctttaatttttaaataaatatcaactttcattaactagaacagatgtgaaatgtaattcagaagacacattcatttattattatttgaagaaaaaaacacaagaataacacacaaaatagtgaacgcctttattaattgcagatcgtttaacaaaatacattatcagaaaatcaattaaacaactttgataatcttgtacacatacccgtctattggttttaagaaccaactcaaagtctctttgatgccaattattttagcaatctcaagtttgaccatacccaattttcccacggtataagctttccaacaacttcacatcccggtccggtgccaaacaagcaacccattccgaatctgcctttttgctcaaaactagccctatcaatatcaataaagctcttaattgaattggttaatttttttagggtacttccatttctaattaattaaacttatattcttacaaattgtcaaactgagtaagatcttccttttgtactctcttagaaagaatttgtaaaattctccccttaacatccattttgattttatacaaagtgatggacaaaagagtaagatattgcgatcaaaaaacttaattttgacatttctccataaggggtatatcactgccgccatggcagtagaaaaaatttgtcccttaaactttgaaatctttaactcaggacagccaccttaaattagattaaagaagtacgcctaagtgttgccagtccagtcaatgttttatctcagtgatacatacactataaaaaattttacttgacaaaatttgtgatataaagtgaaaaaagttgtgattaattataaattatcattcatatgttgtgactaaaaatttcgtggctaaaagtggtagtcacaaaaattaaactttgttgtgactaaatatgtttttagtcccaatacttgatgtgactaaaactaaattagtgacaacttgtatttaaaaactatgtttcagtcataaatatttttttgttgtgactaaaagttatctttactcataaaaaaatttatgttgtaattaaaaagttatcactaaaaatatttttttttgtagtgacactgctaatatcactcaaaaaataagtattggcgactcccactagtcgagctagccaaatagcaaacataatgaacctgtacaaacattgaattttaaaagtctttatttagtttgcaatcgatcataaaagttttttccttagtttccattttataattttagttactt

SEQ ID NO: 218780 - DNA, 8802 bp, Cannabis indica
cattgttcttgaaaattttcagtctctacacttgtgatatgtatcgctcttgaatttggcaagacatgcatatataaatatttctatatctgaaaattttctgttttagtaatttgattgatgctaaaggtgtactctttctttgttgcagaagtacatcaaacagtgttatgatgttgagctctctgctcttggcaccggtacatgttcttgactctctctctctctctctctctatatatatatatatatatatatcttatccaatttaagtagtgtatatataataagctgttgattgttcggatcaaaatgtgtatcggatcaaaatgtgtatataaagcttttccttttcatcatcaacatctcctttctaacagcaattcccaccgtgatcttaattactgagattctgaaacgcaatggattggcagttcaaaagggtaagtagtactcacttcttttaaatatctttctcttaatagttttcaatggtcgaatacagtaatgattgaatttgggaaatgagcagatataaggacatctaccattactatcggagtcagagaggagaagaaaggcagggtgatggtgaaggctcaggttgtttatctcttaacttcactacgattgtctttttctttttcttcttcttcttttttttttttttttgattaatgatatgcccttttatgttattaatgaaaccttttactaattctctttgtttctttccgattcttttagattgagattttgctgagaatggctgataagatagatgggagcactgtggtttccgtatctagttaagaaggcaagcttctgctgctgctgctgcggaataacaagtgtgccattttggagttttggttgtttcttttttgttcatttcccttgtaaatgattagattagacttctgctgatggaatcaaggtccttcttaggtcctactgctgttcacttttacaattttccttagtaatgttctgaacaaaccttctgctgccatttcttactggcatgtatgttacttactgcatgaataaagatcaagtttttccacatctctctttctctctctggttattttatatgtatatactaatatataaatgcggttgcaaaaagaagtgcacaaaatgaggttgcaatgaaactttttcaaatttccatgttcacataaactgattcttactcactcaccccactttatttgaagtattaacaagtgagctgctatggcccacaaacgctatgaagacatcggctttgaacagtggttatcatagtcaataatgggtcattctagagataacttggccaaagtaagtgctaaaaaccttgacgccattagacatggcatccatggatgaaaattcttctggtttgtggctgtaacctgcaaaaccaaatgaatcataaatgttataaatggtttgtgccatagtttgtttgatgcattatctctgctcgaaaatacaaatgggaacactttttcttttcatctacatgtaattgcatataggagatgctccgatcatataagaactcttgatagattgaattataatttaagcaaaacaattatcaatttactgaggaagaaatataaaatacagtcttagattgttgactgttgaaagagaaacaaattctgacctttgtaacatggaatgaagatcatacccatcggagatactctgtaatgagtgaaaaatgaatgatcaaaaggcaataagcagtaataattaaactcatgaattggcattgttttacttaaaaaaaaaaaaatagataaatcatgacaggacagttacataactggggtaatcatgaatggattaatattctttcttaccttgccataaacagtgaatcatggtatgctcggctaatcatgaacttgtgtgaaagatttaactcttttgatgcttcttccattgccttaattatcgatttctcagaaagtgctggtggatcttgattaatgattttgaattcagttagcttaacttgacgctttttggcaattgcactcgcagattgatgaattttctcaatgatgatgttccttcgctcttcattaatgtctcttgtatcttcacaagaagttatttaattatcattagtttataatcccttggtaggggaccaagtacattttagatgactacataactttgaataataccaatgatccaaataagataatacatacctatttcaagatgtgatctactcgggatactgttgattgctccaggatgaagctccaatatacctttaagtaaaggatcagtttatactttatacaatgcatcactggaggttctttcatgttgaaggaaaataataaattaacttaccaacagtaccaacactatcgatggatccagattccaagacatgtctttcaacagctagtgctaattctgcacccgccagtccagcatcatttctgctccaaattacacatgcagaaataagttatattgttgaagtaacaagaataagatttggtaggtaaaatgacaatgatgagcaagggcatccataaaagatgtctaattgaaacattgaaatagatattggtaaccagaaaggtgcctcagttgagaggttaaaatagcacttgcagtgataataaagaaacattcacctatttggcattaagacaacacctgcatggccgccgttgccttcaaattcaactttaatactcgcaggtgctgcaatggctgttactattccaattgatatacctgaataagaaaagggcatgaactgatccaattaaaatattgagcccattggtagcaacaagaatgtcaaaatcaaaaccctaccttcatcctccaaaatggggccctgttcaatgtgcaactctacgaatgcagagtaggttcctttctttagaaacacactagataagtcgtcttgatctttggcatagccggcagatcttgcagcatcaaagaaggatatgttttgaccatcaaatgtcgtcttcagagcttttgcaagtgcctcgctccctgccaataagcggctgaaaatatacaagaacacataagaagatctgtagcgcatagacctaatgaatcaatgattgatgtaattcattgtaatcttatagttaaacatgttggatctagtaatgaaaattttcagaagagtaacggcaaaaacaatgggactgacatctatttagtacaagaaaagaaagaagtgatgtttaatactaaccttcccaagcagctgattccaaagcgtgtaggttcttctgaagtgaataagataacttcaagagaccttttaggtttgaacccggacctacaatactcccagtcccatagcataaacaaaaagagctacgactacatatatgtagtaaattgtgaagaacataatatccacacaaggattaaaagataaagagtggtgatactcgaatgaacaataatttcatacagtgtcaaaccttttcagtacatttatggcttctattgcacctaagacaccaaccactccatcatactttccagagtatggaatagcatcagtgtgagaaccagtagctactgcagcaagctctggctcatcgccttccctgtgtaagaaaaactcacttgataagtaagacataagattaatggactttaatatgaaattcaataaacaagaagacagttgtaagaaagtagagtatctagaatgaaagctcaaccatcgtgtgataatattcttccaagctaagagggctactacaaaaatcaacaaaaacacactattttctctagcaaatcaattgttttgctagatattatcaatattctctagcaaaaacacaatattttctcgagcaaatagggtactagaatgaatgctcaagcatcctgcgataatattcttcaaagctaagaggactactacataaatcaaacaaaaacaatattttctcaagcaaatcaattgatttcagaatttaatatatttaagcaaaacagtgttaaatcagtaagaaggatcatgattcaaggatcctaagatactccactgaccatcgaccaaagatgttaccgacagcatcttctctaacagatagaccagagagtcccatcaagtttttaatatatctgcatttacacaaacacaaaaagaatcagtatgtgcagtcaaggaatagtcttgtgcagtcatcaatataggaagttggataaacatttcaagctagtatctcaatggattgtttaagcttgtactttcaacaagttgccagctaagacttacagtttaagatacaactttcattagacattccaaatcatcctatcacttcctaaattataaagcttaaagatcctccatcgatagtgacaggcaacagatgaaataggcctttcatgtgttccaagttagtctatcttctttttattgactaatttacagtccctttagccacttcccaaaagaaaaaaagtttctatattaaattttaaataaggcatctctgtttacactttaataaggctcaaaataagtctatctatgtggctaattcgacaatatttgaggaacagaaagccataacacaagtggccagagcaaaccacatgaggtacccctttgggtcacttaaagccacatactaaaataacaatcaacaaaaatgaattcccatttttatatcaatccaaacacatcttataagggtttaagcaataagcatagtgaagtcttaaccacttaccttcgggccaatacatccttctcagtgtacaaaaccctggttactgatggggcaggtgtatccgaaagccttgaaagttcatcaatctaatgaccaaaaaggaatttacaaaattccatcagctttcaattaaaaggatatgcctttatacaaaaaataaataacccagtagccatcattgagaaaagttggtcttgtgtacctgattctgcaaattttgagcatccgcatatagtggagaagaaagagtgttcgagatgaaagagtgagattcatgaattgggtacccagaaaaatcctccattgttctaatagtggggtcttcattgttaaaggctgctgttaaggttgaaaatggacataggaataagatttggaggagcgcggacagagacatgtttttctgcatttggttgagtaagagtagctcagttcatcggacaaaatatatatgtagatacagatactagatagacagaaacaaagaaagaaagaaagaagaaggtggcattgattgaactgattaaaatatagaaaaatgtgtgtgccaaaaagagtaaccaaaccaattatgttagccttacaaataaaataaaataaaccaattatgttaggggcactaacaagtgagtgcaaatgtgacgttagttttggtttaggtagttgatatattttagggaaattttaagggttgcactactacgtattattttatatatattttttattaaaaaatatcaacttcattaatttaacattctgaatacaaaatagtttggagttcaggggaaataaaagtcccgagaatgctacaaccagataaggatcaagtgtgcctactgcctagcaacaaagtgggcaacttaatttgttgattgtctaacaaatcgtaaatgaacattagagagaaaggataataaatttttacaatcattaacaactaagccaaacacagaagtcattgactgagtagaatgaatggcttgaacggcaagcatactgttactctcgatcataacatctttctaactcttctttttgatccaactgagtgcttctttactgcccattgcctcaatggtatcaattggaaagtggtctccgtggtacacggcttgaatatggattggagaagcatgctgatcacgggccaccataccgaacatgtaggaattttcctgttcaaatgaggcggcatcaacatttatcttgatggtttccaaatccagtttagtccaaagctcatcatgattacctatattatcaaagaatagctcatcatgattacctatattatcaaagagtatagatgaaagggaagtaatatcctaagcttttctccagtgatcaagagaagtagttgctaataccataacatcattcatagagggggtttggtttttccaaacttttttattgcgagctttccacagtgactagcagaccattgcaattgtgcacacatcttcagtggaagttgtcgagaagacttgttctaaccaagaggcaaaagtggttgttgggtttggacaaggaatgccaagtcgattccaacacgcaacagtaagagtacactctaagagagcatgtgatgtattttaaggttgagaaagacacatagggtagagcatagatatgttcacatgcttagtaacaaggttaaggcaagtaggaagacaatttgtcaaggctcgccacaacatgttcttgactttaggcggtatctacaagtgccataaatttttccaaaaacttaagttgttggctgcaggttgaggttccttgttttgttgcagcagcatgtaggcattgctaacagtgaaactgctgttagtttcaccagtccaggaccaacattcatcttcatcagtaatgctcaatggaaggtcgaggatgaggctagcatctcgaaaattaaacatgtctcgaaccaggtcatgatcccagttgcctgactcaatagaaaaaagggagaaaacttgttggtttattaggccaagattgtgagttgtgacataaggctggttcttgttagggagccacggttggtttaaaatgttggtagttgtacctaaatgaaataggtctttcatcttttaaaatttaaaattggtgttgaattatcactaaagagcatatttttgtatgaaactaaaaattacactaaaatatatattttttattattatattatttattcattatttttttagaaaaattgtcaatagataagaaaattaaacttcatggctattacacataatgtcttccgaaatagtagatatctctaccataccaattaagttatgagcaaaagcccaattagccacattgtaggccgcaagattacacagtcttggaacgaaagaaaaattataaccgacaaacaaagaagagcgcctattacaatggtgtatgtaattatcaattctccaatcagagaaagtctcttttgggaattaataataatctcagagtcgctctcaataatcataaaatgatatttcaaaaggtctgccatcttcagggcaagtaagcatgttgtaacttcaccgataaggggatcagtgaattccagaatatcagtagcaatccacaaaacttttcccaaaaagtctttaaccaaagccaccacacacatagttccagtccctactttaatatcacagttaatctttatccagtctttacgaggagtagaccaagcgagtgtaaccgtagcaaatggggaagggaataaacaagagccataatctgcataacagtgaataatagagtcattttaatgtgtaatgctattcaaattattgttatgtactttatcatttctggcctgccaaatcgtatccaccactaccaaggcatagaggaaaatcgcatccacattaacacccttttattttagaccccatagaaagttaacccaattccacatacgaccaccagaaccaggtatcggccaaatcccccacggggaagatctccacaaatgaaaagctaagttgcaatggagaaagagatgtttcaaggattcttcttccatcccacaaatcggacaagaagtatcattgatgtgcattctcttctataaaagagcgcgaatagaaagtgcatccgagaggatacaccaccacaaaaacttatggcgctccagcactttactattccacaatctattctaaagggaaggagccacgaccgatggagaagcacgatacacagggcttggacttggtatggagacttactttagaacttgttggattgctctttggtccaaatccaccgatctttcccctgactactcggttttcctcctttcaaaatattacgaactatttcagagtcgtaaagggaatataatattaatgtcccaatcaccatcacctaacaatagatcagaaaccttttgcacatcattagggtgattggtagctggtcttggaatgaattcttttctatgggatacccacgggtcttcccaaatatttgtgtctttctcatcgtttttaagcttgcaggcacctttctttaaaatatcttgagctttgacaacattcttccaaaactaagagtctaaattcttataggagcacttcaaaaagtgattacctttcatatatttcgctctaagagccctacaacaaagcgattgattctcattgatcgtagccaaccccacttagatataaaaactctattcatctccaccactttctggaaacctagcccacctctagatttgggaaggcataatttatcccaagccttcagatataagcccctattacctttatcacctccccaccagaaatctctgatcatcccatcgaccttggacgccattcttttcgaaagttttgtcgtttgcatagtatatattgggagagcgagaccaagtgtagaacaaatatatcataattttcgttttgaatttaataattgtggttcaaaccgtaccatactatatattataaacttaccaatttttacaatatgatttttattatttttttatataagaacaaatatatgtaatatatgtata

SEQ ID NO: 218781 - DNA, 5487 bp, Cannabis indica
agaacagggaaagtggggatcaaaaaaactgtaaataactgaaaactgcctcagagcatgaacatgggcagacactctttctcttctcatcaataaactttcacgagatttactatagctacaatgtgaactgtcataatataaatatatatataaatattggaaaagaaaaaaaaaactcttacgtttttgtgtggagaagagtgtcgtagtaatttagaaacgtccaacaaattttacgtcaacagataaacctgacagggaaaaaaaagcatggtaatacaacaattcgcatcacatttttccgaccaaacaactaacgatgataagtttgccgctatagattataactttacaagagaatcatagttcattcatcaccataattatcatcatttgggggaaccgtagaatttctaacaaaaagtcacagtgacacaaaccgaaaactaaacaagtctggttctgttctttctaacattagtacatagtaatctagatagttaaaaactaaaccacgttttggttttcaaaacaacacatcataacaatgtcttttcaatgagttgcactagaagcacagatttagactatgtcctctggcttgtcggtactggagtcagtatcatccgtggcatcggcaatgtaacaatcactgcggaaacacgctccttgattcatccgtaggtatctgtatcacaaaatacatacatatatatatatatttataggtattagtaaagtgtaatgaggaaatccaaataaacagaagaaacatagattatcccaaatatagattacaagttgcacaaccactgcctagactagactatagagggtcacaatgaacaaggaaaataaacacaatgtaaagttgtttaaactacatcacctaaaaatgaatttgtcaaaaattaatcacaatttatttctcatggctagagaaaaataataatagtaatagaattcttattcaaagaaaatagataagattcaaaaatcattcgattcaattgttgtcatttagaatattgtgtataggacttataaaaaaaaagaaataattagatataaatccagtcaggatgataaatatatacttgagaaaatcattaaaattttcaatcaactccaccaatgcctcctcttccatattagcatgatacagtagctcgggcatcaatactgcaacattaccaaaataatcaattaaatgtgtaaaaatatagagaacaaaagcatcatctcatgtaacagataataaattaaataagcatcacacaactagctaagctaacagaaaaagaaaaagaacatctacatgcccaattatccaggtacaataagcatatgttaggacttgggatattaaataaagagagtaattggctaattgtagtaactagtaaggggaaggttgtacggtttgggtagagtatattggagaaagaattgaatggagaggggtatattgagctttggccacctggtttcattaattgttcttatcactattactatatcagtagtattcaaacataatgtgttcaaagtcatcaaacaattgattaataaaataatgcacgttgtagggtgaattagattcacagcatcccaaaacttgcagacttcatacgtcaaagaaaaacataatcagaactttgcaaaccacaaatataacttctcaaaaatcttggaagactgcaaaatttgatagcgaacactgatgtaggctaagctattttgtgaccttttgaagctcaaggcaacacacgcgtgtaataaaatattgtaccaacaacccagccatttgaaccaacacttgccagtcaaagttcacaagtgaaacattaaaaactgcactgcagataaacaaggctaaattgttgtaaacaagaaatcctgcttttgtacgggcaggtcaaggcaggccatttttcctttcattgagcctttaaatcctacatatcctagaaatgtcaatatcatcaagacacaaatattatctgatctgtcagagaaacacaaaacattttagaagcataccaaaaagacgtaataaatgttcagctccatatacatgtgacggagtgaggtcatatgctgccattgctctctcatattgttgccgctcttcgctgtatagaagcctcaatggcaatgctttatcaaagtaacattgcaatcctttcataatttcgtgaactgaatcggctgatctgaatccacaagacaacatatgaaatgttctttccagagaaaaaataacttggcgaaaactatgtacaagaacattcattttaaatcagatggcttacagcacaaaaattgatgccaaagtgttgtagaaaattaccaatatgaagaataataaatgggcaacaaaatgatttaaaacaggcatcgaaagaaaaaggatatgcaaatctacaaactactatcactcaaaatatcaaggaccctttgctaccaaagcagcaaaaaatactaaatatttctgctcaatacccattgcttgttgctctctgcagtttggagagaagatatcatggttttatatatcaaagcaagtaatgaagtggggctgctggatgttgttagaacttgatcactctgtacctaaaccataaaaagcagtaaaataaaggtgtccatgaatggcaaaacatttctaaaaactacacccacgtgattccacaatctcgaccatagctttagattaacaacatttttatctgatactcttctttatgtggataaaagcaaatttgttaacaacatcaaataatttgtcttatttttcttctgtgttttaaattattcctttgccctttaataatctacatgtccattatttgctaggccaaattggtatcacagttggtttacagctactgctatggcaggtaatgatggactctgctggtgatcaaggtttggcaaaaaccctcgaactgtagggactgacaaagaaaaggatgagtctgtagggcaagaaaaggatgattgaagcaaaaaaagcttgtacacgacaaagtcattcaccaatcaactacattagaaaacgaaattgtacactctacaaatgcaggaaggtaagccaaataaagagctcttggatgaatttaacaaaattattcttcatctgagaaatagatgtcaaaattaatgaagattaaataataatttgtggcctttcttcgcaagattcaacaagcacttcagcaacatcatgacgtacgatggtggtactcttacgcaaaggaggtcgagacaccactaaaccccaagaagttgaagaaaagagcgtcgacaaacaaatttcaagactcatcaaaaagtctagatgcaagaggaaactcaacgtcagtagggaaggaaaattactttgatttggagaagcagctatatggctgtgatagtactagtgttctaacagtgtgatgcaagcgatgaatgagtccttgatttgggctgttcagaccataggatttgtttgatacacactagaacaggtacagagatggagaagaaagaattattgagctttattgaatttcagctagtttccaggaaattcgagaagcctgggatcaccctgagttcaagactgcacaaaataattgttttccccctcccccaattacagttcccactattatttatagacacccttaacaaaaaccattaactaataactaatattttgacagctcatttataatacggtcacttcagctaatctttttattctttatgctattatttactaatattatttagagcttgtttcttaggtctccttgaatgaaagaaatagcaggattttcgaagggctggagagatcagcagactttgtttgcgagagaattaaattttggacaaccacatgggtctttaaaaccaaacactttgaggctctttcttttctagacttaagtaaggattggagtggtttgttgtaaaactcgggatttctttctttttgtttgattggtcactcaaagtgctaattcaatgtattgttttacatttctatgtaccacggttttcttccgccacaagtgaggcattaataatttcgggggacgcctgtcaagtggtctccttctctcttttccaaaaaaaataagtgaacctaattggtggtgtatcaataccccgggggtgcactttcaccttgtcctcaaggtgaaattcaggaaagttagtgttgatcttctacttgatgaggacctctaagtcttccaagccatgtgtagcttgctaccgcacttgaagaactgcttctggtccaacttgcagctctaactcaagtgtcaaaggaggcaaagtcggggatgaaagggtcgagccatgtgctttttttagttgcaagatgtggaagaccgtgtgaatagatgaggaagctggtaactcaagtcaataggctattgtgcctaccttttttgtcaccttaaaagggccataaaactttgcagcaagcttctcgaagagatgcttggctaaagactgctatcggtagagacgaggcttgagataaaccaagtcaccaacttgaaactcttcatggtgcctgtgctaattagcattatgcttcattcggtgttgggctagaaggagatgcatacgtagatcatcaatggtggcatcacgatcagccaacaaggtatcaattgccgacacatgggaaggtctagcaggatagcgaatcaaaagtagggtatctctaccatacaaggcttggaatggagtaagcttggtgctcgaatggggggaagtattataccaatattcagcccaaaccaaccatttagcccattgcttgggtttctcattagcaaaacaacgaaagtatgtctcaagagtccgattcaccacttctgtttggtcgtcgatttgtgggtggtaagcggtgctgcgctcgagggttgtaccttgccatttatgtaactcactccaaaaatggctagtaaagatccgatcacggtctgaaataatggacaagggtaaaccgtgtaggcggactatctttttaaggaacacttgagcaactgttgtggctgtaaatggatgtttcagggtgacaaaataggcgtacttgctcaatctatccaccaccaccacgatggtatctcaaccttccgatctaggcaaatcttcgatgaaatctatggaaaaatcatcccaaacttgagctagcaaggcaatgggctgtaaaaaccagctggagtagtagctacataaaatacttatgttgttgacaaatggtgcactcctatacaaatttcagcacatctttccgtattcctacccaaaaaacctcaggttttaaccattggtatgttttcatttcccccgaatgccccccataggaatggtgtaaaattccgctaggatgataggactcgaggaagaatttttgagaaccacaatcctactattacacaacaaacatcatcgtgttagtttgggtcctcgagtcaa

SEQ ID NO: 218782 - DNA, 2870 bp, Cannabis indica
tgtgaactcatcttcatctagtgaagacctttcaaatttctagttttgagattggaaagtcagcagtgatcattcagaatcatcctcggctaggtgcgaacttatcttcatctagtaaaagacctttcaaattatagttttacaactaaaaaaaatttaattttttagaaagaacacaaaaaagtttaattgtaatttaaataagtaaccagataccataaggaggataaccaattaacttatactaatatgaaaaaatcaataaccgggtaccataaggagggtaaccaattaacttaatactgttttccctatattttcttaactctttctaaaattttcatacaaaataacttttttgaataaaaaccatatttttgcaaactcataaaaatgaaaattcacctgactcgtaagatttaagaaaaaagagtagtagattctcaaaaaagaaaaaagaaaaaagagtagtatacataaagatgaagaaaaagtagttaggcgtaggcccattagtttaaaagcccaaagaagaaagagcagcccagcccagcccagcccagcccagctatagcatgaaaggaaaaccaaaccctagctagggttttgtttggtgggatataaaggcgagagactgtctctgccctatatttctttggtccctgcaaggaggaggagaggtttcattcatctgaatcgtaaacaccaatcgtaagtcacctattatcttctgtgttaattgatctctttatggcttctgctctaattttcagagtttcctggataattgctgttcaaatatttccttgtatttataggatttatttcattttcagaagcaaaatcgtattatgttctatgataagctgaaatgaattgataggagctgttagtaatcttagtttgattgattttattgatccaggtaatggctcctaaacagcctaatacggggctttttgtgggtttgaacaaaggtcatattgtgaccaagaaggaattagctccaaggccttctgaccgcaaaggagtaagtttattttgtgttgtttcatagtttgtataatttctggattgttaatgttttgaggcctgtaagcaagaatcttgatttttttttttttcacattttgtatgattctaatgttgtgatgtgaaaagagtgtttttttttttgaaatgggttttgtttgttttctggtgtagaaaaccagtaagagggtacattttgtcagaaacttgattagggaagttgctggatttgcaccatatgagaagaggattactgagcttttgaaagttggtaaggacaagcgtgcattgaaagtagcaaagaggaagctcggaacccacaagagggcgaagaagaagcgtgaggagatgtccaatgttctccgcaagatgaggtaatttcgaaagaacttgattattagaataatgctctgagcctgaggttttttttcaagtgtttcttcaattgagttggtttttagccttttaacattgaatttgttttaatcatgcatttcttgttgtttttggctccctgaaattgaatttataacatggttcaattatgcattatgtagtgtaaagattgatttgtggtaatttcgaaagaacttgagtattagaataatgttctgagcctgaggttttttttcaagtttttcttcaattgagttggtttttagccttataacattaaatttgttttaatcgtgctattgttgttgtttttggctccccgaaatagaatttataaagattgattcgttcagtttttaattttctttttttgtctgctcgcagatctggtggagctactgagaagaagaaatgataattctttttcaagttgtatttgggttagccttagaatccaagttcctttgagattttgatctgagacaagacttcatttaaaatatttgtttgttaaagcgacattaattctggaaattatgaaattcggcctttatttctggttttatgatagttatttgacaattatgtgtggccaagtttggttacagttttgaatttagataatgtctttataattatcaattgtgttgtggattataagttcattacataattcaacttcaaatgagccaatattaaacttttattgagtaatgcttaatagtttctactatgatactataatgcggcttcaccaaactcaattttggagacttgaaaattgttacaacaagttcattcgaactaaaatcctcaaccagatcaagatggctccttgacaataggataatcataaatggatattgtttagtgaaagctcttatgttatgtttgagattgagactaggcaagggggttgaaaggtgcaagttaaaataagcttagaaaatatttacaaaaattgaaaccattaagcttaacatgaacttacaatttcatctaattgatctttttagtcatagggagttaagacaatgatgaccatgattcacccacttagaaatctctactaatcttattcatgccgagcttgaatatcttcatctatctaagttgttggccatggaagaaagttcgaataacatcataactaattggtctctaaaaatatgcattatttgtaatagttgtaaagttatttctaacttttttttagttcattaaaatgtttatataattcacaatttttttgttagaaatatataattcacaattgaaagtcatggctgatttaaaacgtccatgatatatttttttcatttttttttttaaattaaaaatagtagtttgtaatactaataaatttaaaagttactgaaatgtattttaaaaataactaaaatatattcaaaataatatgatatataataattttttttttt

SEQ ID NO: 218783 - DNA, 3077 bp, Cannabis indica
taattaagctaaaaagccaattgaaacctgggcaacggcaaagtgaagttgagattgtgtcccatgccacaattaaataaggttgcctgttctggtattcgcctgtgatgagattgaaccgaagggacttggtattggcaaactgaacctgccgccacactacgattttcctccttatgaatcgatggtggtcgccgcttcaagccgattacctataaaataatatttgtattaattgatccatttacattatcatcatatatataattgcatttatattaatatagtggaaaaatttttgtatacatgtaccttttcttgtggcttgattatctgatagttttggtagaatatattttggtttgaagggggttctatttggtgacataatccaccataagatgatgaggcagagccggaaagttgattattcatctgacactgaaattataataagattcagcataaaatgaaataaatatataaattgtattatatatataaaggatcttactattgaagctgattgtttcttttgccttattaatggatgatattgagaagataagtaaggtgatgagtgtgaatattgatcattgggaataactgcccaggaaatattcccatagtccgatttcccttcatcaatactatttgatttaatggggtttgtccaaggagcttgaaaatatgtactttccggtaaaacaacttgtgaacctccaacaccaacattatgatcaataatgcacctctctaaaagggcattattgtcaacatatttagtagtgaaagtcttgctaatagtagtagtaccactattattggtggtgccattactataaatagaagcaggagatgtcagtagtgacacttgatcaagatggcgatgatgatgagtggaggtggtgattggaatcaacggctgaaaatcatccttggtatgaaaaccaggtttgagtagttgttggtcattattattattctcagtattctcttgttctctcaagatcttctcaagttcagcaactccaggacctctcttgggaactctttgtcgtttattggcgtgcgactgtgactgccttgtaataggggtcggattccaaccacccccatcgccacggcctacgccgaagctgaagtctccgtcgcctcctcttgtgctttcagtgttgctacacatttcaaataccttaagaatagatcttctactaacttacaataataatgccctgcgatagtttttaaaacagtagaacactcagccatttcaaacacttggatatcatatacgtatatataatataatgtatatgccaaatttaggggtacaaagcttggaagaaagataactagaatccgaattttcgcggtcacagcaaatctaagaagtaatcaaaattattcaaaaataaaaaccgcaatatttgggtagacgcaaatttcggtgaacgatatagatggggaatctgggctatatttacatgtatatatatataataatgataaagtccacgttcacattcacgtccactaagcgaccttggtttcagctcatgaaagatttttagtaaatgtaggccaagctagagaataagaaaggcaaccaaataagcataagagaatttatttcttacctttaaaatcagcataagagaaaaaataaatcacatccttagattagtacttgaatgatcgtatatatgttttttagttttctcgattatcacgccaaactcttctctcccttctccaagtacgacgagtgcgtagagtttatatatatttatacttttataatgatttttattgactaattatctatttaaacagttggcatagagtcattaacaggtgcattaaatccctactatgagtttggtttagttggctcatgcatgatctgttgaatccttattattagaaatgtaaaagatatattatggtacaaaatccaaatttgtataaagtaatattaaatccaaccaagcaaccatatattaaatgactcaccatatcatgtaaggtaccgtagatatatatacttataaatatatttatatttgtcttgtctataaagcaactaatctacatgctttattaacattgtaaaatctaaatatgagagggaaattttcaaaaaatattcatgtcgcaaatttacagccgaatatttcttttaagtacatataatgagaaaagatatgttatgcatcgtaagtgatattatatttatgtaaattatagtgacgcgtcgctagcacacacactaagaatacattatatgggatttatctggatagaaatagtaatacagttcatgacgtaattacgcgaaaacaaccaaaaaaaaattaaaaattaaaagtacatagtgtaaaatatgaaatacggtttctcaaaaaaaaaaaaaatgaaatacgaaataagttaattaacttatatgatatgtttattcatttcatttaatacagtgatttatatttatataataatatttgattgctttttttttttttattgtatatataattagcttatatcttgaatattacatagcttaattttgtaactcatttatgtgaataggtatggtataggtgtgatatgaaggttaaaaatgatttattttaaataggaggggtcctcaaatccaatttgtactattttcctcataatttttttttaatctgtactaattgttgatttcaaatttttgattcaattcaatgtgcacaagagttcaaatataatccaatttaatatctaatagtataggcttgatgaattattttaaataagttactttttaattttaaattatttaatatttcttaaaatataaaatttttacataactaacaacaaaataaaacaagttattattatgttcccaacaaaaaaataaaatagacaaacaaaaaaatctaaaaaagatggaaaaattggatgtagaaaaaaaaaataagttcactttgtatcattgtttccctatgtatataaataagggtaactattcaatagttacatttttatttgtaacctatcatggttacatttttctttgtacctgt

SEQ ID NO: 218784 - DNA, 4171 bp, Cannabis indica
atatatatacatataaatataaaataagaactaattacacttaccagagacataaagagaaacaatgagagaaagaagagcatcttggaaagtgtatcaggacttccactgatggaggtccaagtgaaactggccaagcttggtgcagctgagaacaagaaaaatgaagggcgcatcatagcaggaaacctactcctcccagctaacctctgataaagagttacaaagagcacaaaataatgtgccatacccaatgagaacatgaaaagtgcagtctctttccaccccatctgggctgcagccaaggctccagctaagttgcccatcacagaaatctggcttgttgggttagccaccatggacaagaaccttttctctgtggtgaaccactgtccatagattttaaggtccaaaacaattatagggatagtgaatagccaccagaggacttggtataaaaggcttgttggaagtataacaggggcggattgaagcagaagaagccatgaaatccatggtgcgtacaagtagttgactcctatgtggtgcaagaactctgctttaaccatgttgaaatggaagaaacatctaagaaggtagagaaaagatagtgaaagtaatgtgaaaagtgagagtgtccaaagcaagagaaaggcaaaagatggaaacattcgaaatatgtgataaataggttggtaagagtattcctctgtagaggtagtaagtctaagactctcaaatagcagagcttgggccccaagagagagagttattctgaaataacctgcatggatgatagtcaagatggatgaatatggttgttgcacattaccactactctctttgctctcatctacttgagagaattcgcagtttttagctactacttggctcgatgtgatatcgatggttacatcagatttttcagctgatttggtttctgtgttgtctcccaatcccatgctcttcatttctaaaataatagttataataataatatgtaacaacaattcgaatttctttcgattgatattatagcttatccgtgaaagatgatatgtgtttcagctgatttttgcatggtttgtgtggttatataaaggtaaaaaaaaggtatacattaatagtcaatataatataaaatgaatattatttaatctgagttggtgtattgtgtatacataacatacatctacaatataataatcaacagtttacattatcactaacgtactacacataatagaataattgctagaggttaatctttttctataattgttttatatatgatctaatttccttggttataagagctgattgggctagaaaacactttaaatagttgaataacacccagctttttatccaataataatgtctgtcgttatcgtagttaacatgttcctgcctagttatttaattagtacttatgtcagtatatccaaatgaggattaatcacatcaatttatttttcccaaagaaatcaccagtatctgctttatatataaccatattgaaacaagaaggagaaaaaaatgtaccaagtgtttctaatatctacaggtttttacattgggatgatcaaatgcaatattaattattcaagtacagagacttttctaacaaaggaaattatttatatatatatgagaaatgctaaagggcaccactggttgcctagcaccctcctacgtgtcaatatcgctattggtgcaattaagtatcgggtctcatatagtttaatataataatttttataaagtatcgctagcccaatagcaatgctctatatatattataatataagtgattcaaaacaaaccgttagcaaaaaaaacccatataactaaagtgaattgatagcgaggagtatatgtacgtacttgtagttatttagtaatataattaattaaattatcaaaagcatgaaaggataatgcaatattaattaagaaaataagtgaatgttaatggagtgactaggaaaaaagtagtcgaattttatgcttttcctaattattatgagatcgatgagacgttaaaatataatttttcatttttgtggagtccactttcgtgcacatacacaccattacacccttttgggcctttggccgagggactcactcactcactcactctctatcaaaagttgtattgtttttattccaacttttaaataaacgatctttccggttgtgagaggccgttcttaattttgaagagcaattaaaactacttgtattaattccatcaattttgctaaatgacttttgagaaaattacaattaaattgtagaactaaatcaactaaaaacttaatcaacaaacaattagaataacaagattaacaatttgcaagtaatcaggaaaaaacaaaaatgagcagtatttaaaatcaaaaacaataaagcaataaaattaccactaagatatatacaggttcaagtctgatagatcgatgtaatctatactccaattctgaaataccactgaattcttcttgattgattgagcaagaacaacaatcgagattgattctctgttggaaatgttaatctctcacactcttataagaatcttcttcaaaagattcttcatacaaaattcaaactcaaactctcttctctgtacctctcaatctctctttttctctctctctctctgtacctctcaatctcaaaattttctcttaaaacttgatttattcattatgctcaaaatgataagagttggtatatataggttcaggatatagattctataaagttacttgatgcaagtgctaagttattgttaagttagttagttaagacttaacaaacttaacaaattcctctgagcgagatctccatcatgtcagcataagtcaaagttcttccggatgagatatacgctttcgggactaaggatcgaagtgcacgctgaaggatttctcggatagaaaaggtgtcagctggagtcgactatccgagaatcctttccaagagggaacaattggccatccagaactcctttccagaggaaggctagctttccctggagacactaatttttttttaattttagtcacaaaaaaactttggctaaaagtaaaatagttgtgactaattataaattatcattcttatgttgtgactaaaagtccgtggctagaagtattagtcacaaaaatcactaattgttgtgactaaaattaaattagtgataacttgtgtctaaatactatgttttagtcacaagtaacttttggttgcgactaaaaatcacatttaggcacaaaaaaattatgtgtgactaaaaaagttatcactaaaagtagttgttttctgtagtgagacttcttgacggacaagataatcttcggagaaagctctttcaggagacaactaatttttcaagaagacaaaaacctttcagatacctttttatttgaaggaatacaccacaagactaattaatactgtgtttaatatagcttaattaataattcagtcatatacatttttgattggtgatttgtgatatattacaaattagaaaatgatgttgggcgccaccaatactataatttcactaaatgcactattaacgttattctaattatataagagaatttatagtcttattactttaagcaatcttaagaattattattttgtgatagataagatgtactatataaaaaaaaaaaaaattaaattataatttattcacacgtcaatgtggaaatggccacacaaataagggcaaagtacctcatattagaattttgcctatatatagtagtaatagtttttaatcactagttcactacctataaatattattggtattttcgatatatgaattaaattgtaacgcaatgatttaaaaacctactatacaaatgcccttataaatatcgaaacaagcatgcatgtaataattttttttttacatagagttgctattaataatagtgattaaaagtaattatccaacaatttgtcatatctatatatacacataacacatgcgcaataacattaatttatgtttaattatttgtcaacgtacgtgtattacacatactttataattcttgtcgtatttatatatatgatttctatgttattttgatgaaaacattaattaaaaattacagtaatattgtaatttaatatt

SEQ ID NO: 218785 - DNA, 3303 bp, Cannabis indica
ttttctatttaattaagtgtcatgaaaaatgagtttatttaagaataaatagtaagtgcccgtgtagggtttgttgcagttttttctgttttttctttttaactgtctttccctcttttttcaaattgttctatcatggtgacagttttcccttcttatctatcgtgtttaactgcctgttcttgaatggttttcctgggtttgtctatatctttttctgcttctgcactttaatcttcactaatggatccactaatgcattccctgaactcgacactatccctcactaatgaagagagtgatgtttttattctgcctgaatctgttccaacttcaaccaaaacatcctctgtccatgttcttcttgcccgtgtcttaaccactacaccggtctataaacctcgtttttatgatcaaatgtcgggactatggaagggtcgttttcctgtcaccatctctactataatggtgaaatttttcatgtctcgtttgcttgtgctggggacaagattcgggtccttcgaaaggaaccttggcatttccagaacaacctcattgttttgcacactccagatgcttcgaaaaatgcctcagtggaggatctggttttcactccattctgggtccaaatttacaggttcctttcttaagtaaatcagctatgttggcggaagctttgggaaatcttattggtgaattcctaaaggtttttgatgactcaaccaatgaggggtggggtcctttcttgagaatcagagttaaactctgtgtcacaaaacctttgccaagaggacgtatgattaagcttccaaacattcgagatgaattttggatagactttcgttatgaaagactacctgtgttttgttttgagtgtggccggcttggtcacccttttgaacaatgtgtttcatttatggaaaggatggataacggaaatgatgatgatctcccttttggcccgtggatgaaaggagcaagtttgcctactgataattaagaccgatatcgcactgatttctcaaaaggaaatgcatggccgctgcttactcgcctggcacgcaacaccatcacagcatcaatacctggttcctatgctcgactccaaccacaaccacgacatcttttagcgggtgaatcttcatcaactccggttattaacaacttaagcatgactacaaatattacttcctctgtttcaactctgtctgttgatgttcacaatgacatgttaatgaccaaattatcctctccacaacattccctttccactcaccataatcccgcccatgccagtcctaaattgaaaggtatacttaccaccccgactaccaccatttcatcgccatcctctaattcacatactacggcgtctccaaaaaataaactaccatcttcacctgcacctgttactttgccaacatcttcccatgatgtcactgatctatcccacatatttactcctgatgtgggccactttccttcccacccatttgccacctacccccatagcaccactctgttacagcctcccattaactccctcaaaaaaatttctattcaatcccctgggcatcaaatttttactcctgctactcccacattacatataacccccaccattggaaaagaaaacattggcccccattctgtctacaaacgcccaaatgactctttgtctttgaggaagactctaaaacgctgtcgtggtaatgcttctactaccccttctctttcgtcaattgaacagggttctgattcagtagtttcttcgccatttgatgattctactgatgcttttgactgctcagcagaggttgctttgcaaccccgctcctcgccatgaaaattattagttggaatgctcggggtttggggaacccgagttcattcaggcatcttaggttgcttgttcaacagcaatctccccatgttttgtttctaatggaaacaaaactctgtacaaattcaatctctcgtttacaacaatcacttaaattctctcatggtctcgaagctcctcgatctggtcttaagggaggcattatgttattatggcatgacactgttgatgttactttgctccactatggaccgacttattttgattgttatatgtcttttaataatgagccagtgtttcacttcactgggttttatggtgctcctgaagtcggaaaccgtcaaaattcatggttgcttttaaaaaggcttgctgattcagcccctcttctaccatggcttgcaataggagatttcaatgaaattgtccaatgcaaataaggtaggtggttctctaagaaatgattctcaaatggatgcctttagacaagctttggaccactgccacttaacgaatttgccatgtcatggagatgatttcacttggataaaaaatagacatggtgtgaatactctaaaagaaagacttgattggtgctttgttaatcaccattgggaaaattctcttactttgccacgtattcagcacctagactattacagctccgaccacagagcaatttcagccactttcgaacttccaacattgacttctcaaccaaaacatcagcgtagccgatttcgatttgaaaagctttggttatttgattcggacagcaaagaaattatatccaatgcttgggctcctactttatcctccactgatgctatcactcaattaaagaacaatcttgatgcttgtgcaaaccaattacaacagtggcatattaagaagtatggtaagatgaagaatgcaataaaagaagctcaacaaaaggtgtctgacctcaataacatctcttccaccaacttgaatcattcggctgaaattaaaaaatcagaatcaattcttgatgagttgttagagcaagaggaagtctattggcaacaacgctcccgtgtggaatggctaagtcttggagatcgaaacaaaaaatttttccatgcaaaagcttctgcaagaaaggctaataacaaaatcaaatttttaattgactctgcaggagcgaagataacctcaacagacggcatggctgctgtggttcagtcctactttgctgatatttttcaaacttctgctattgatgatgaagctcttcatgcaaccttgcaggctattccacccatggtaacatcggctatgaatgatgaacttctcatgcctttcactagcgcagaagtagaaggtgctttgcgtgctatgggtccggataaaagtcccggcatagatggtatgtccgccatgttactaccaaaataattgggaaattgttggtgagatggttaccaagtagtcctaca

SEQ ID NO: 218786 - DNA, 7271 bp, Cannabis indica
aagactcagcaagaaaagcaatagtaataatcatatagtttcttattcaaatattatcgtttatacacaatcagaatcaaaccattacgcattgttcataagatgaaatccaaatcactactggcatctgccatgaataagcatcagtatacggatatctggtaatacaaaactataataccaataataagaattatattcatttgaaaatataatttatatatatgttacctcataaagtaaccatcttcattacatcacattgcctaatcaggcaagtcgatgctttaatctaataatcttgtactgcgttgcctaatcaggcaagctcgtgccatagcctgacaccatatatcgcatcgcctaatcagatgagcccgtacctatcccgatacttatcatgtgtatacctccactgactaatcgtcagtcatctagaatttgaggtagcggctgacagtgtacttcttagttccagcctcctcagtgtcgtatttcttttgaagtgcattccatatttccttggcagtttttgtcaaaattatagtagtcatataaatcgtgagataaaccattgagaatataatttttgcacagaaaatcattctcgacccaacttgttaaatcaacagttttcttatgcttttcatcatcctttgcagtattagaaacaacaggtttatcaatcgtcagaacataagcaaccttttttgtagtgaggaaaaataaaattttctatttccatcttataaaataatttccctttaaaacgaaaaggtttgtttatattaataagacaagaattctcatcggcagtcatgctagaaactcaacgtcttaaaattgttataaaatagttgttgtagaaaataaaaggaaaaaagttaccgaattagaatatgggttgagttgcagactaggtctctctctttaagacattcgcagcattgcccagatttgtgcaagcagactatcagcctcgtcgtcctcagggtaaaatagtccagtcgaacacactgtatcagaactttattgcacgataaagtaccgtcgaaatactacacccataaactgagtactgctcgaaatataaatatgtaatataatcgtatgtatatatcgtatatgtttttcagagtgaaaaaaaagatgtatttctcttgttggttcaaacacattacataggcaatgcactgagggtagtaacgggaataaagacgttacttgaagggaacgttagaatatgtgatcgtgggaacgatactaaaaatcaggaagcctctgtttaccaattaatcaaacacatttttaaaagaaactgttttaaataaacaaataaataaattttctctaaaaaaataaagtgacaacacacccgccaacccagctcgagacggtcgaacgacggcgcacatattgttgtccgatgtgtgagtcctcgcccatgcgcacaaaattgggtacctcttggggccatacccatatatcaaacttgcactatttatacacttctaataaagtgtttctatcccgtacgtaggactccaattactcacaacttcaatatttatttttgtaagatttcataaagttccaacaagtctaaatcatatctgccctcttggacacttgtactcatgtgacttggcttaattatatcttattctaccatatggcccactgctacatgtaaggttacaaaaaggccaagaaaacatttattttatacagtaaatgtgggttgaatttattgcaacttttttctttttaaaaaaaggaatttattgcaccttaatatatacattttaagagagttttctagtaaatagaatttaagggaaacagtactaaaccagtgtgatatttgtgattagaaagaaaagcctgtttattattattgatttagaaaagaaaaaacttgtttgttgctaaattgctagctagattagccaagttattctcacaaaaataagcacgtgcaagacacgtgattccatacatatcacctaataatacaattcaaatgatcaaatatatgttacaatatactttctgatgtttatgttatctctttaacttagcctttctatttggtttgattcgggtcaagtgtcaccaatggtctttacctggattgattggaatattgggactggagtagtgagtgtaggaatgacatctgagacaaccaaaacagtatctttttctttcaataatccttgagattttataagacttattgtagatgagatgttagcttccatgtcatctgacaactcaacaagtaaagaagtcactccccattgcaaattcaaagccctacgagtgctttcattgttcgtgaacgcgaatatgggagggttcggccgatttcttgacagcaaagatgccatatgcccatggcttgtgtagacaaagatggcatccacagcaaggttgttggctgcaaacaaagcacatccagttgttataatgtgatagtcactgactccctttactacaaagatatcatatttcacatttaagttttacaaatgtgacattgtgacagagactcccttcattagtatgaaactattctagtaaaggctgctatgttttcacaaataaacagtacacagataataaagaaatagtttgttcttgtttttgtttccgagtgttgtttgaagtaccaatttcagcagcagaattgcatatttgctcagcaaagcgatcaggcaatgagacaccgagttggtgaagcttgatgggaggttgctggttttcagtacgactccatagctccattctgttgcaggtcatcttcaggacagaaagagccttgttaccatacattccaattgctgattcgctagacaacattagtgcatcgacatactgtctcacagcttcagaaacatctgcaacctttgcattaacaaaagaaagacaggtataaaagacagtgaaatgcctaaacagatatgagctaggtgtgtatgataatagagagtttgttgtatggtacctcagcacgagtgggagtaggatattcgaccatggattcaagaagttgagctgctattattactggcttgtttagttgcctacaaacatacacaatctgttcttgaactgttggaatctgttcgagtggtatttcatctccgagatcaccccggccaattatgacaccatcagaactctctacaatctcttcaagtttctgaagacattcccatctctcaattttggccaaaacgcttatggatctgttgaaataactacttagattagatgttatattatatgtagtactcttccccattctaaaatgcaaatattgcttattatggcacaagtaaatataacacgtttgccttacttggatgatttggctgagagatattgttttaaatgcctaacagattcagcatcattcacataagacatggcaacaaaatcaatcccttcagaaataccaaaatctatgttttcccaatccttcagattaagaaaatgtcagtcttaaactacaaactagacaatattacagaacctgaaaaagagaatgggaaaaaataaaaaacctttgctgatagagttgggagcttatgattcttctccacaagctttccatttctccaaaagctaattctggctcttggaagaattaagccagggtctgagcacctgcaactaaggtcatttccaatcttttcaatgacttcaaagcatgccattccaccatcaattacaaggtcatcacccacattgatacctatcattcaaaatatattcaaaatgaaaaaaaaaaaaaaaaaaagacataactatatatttatattcatatcatcatatgtatgtatgtatgaatttcttgatttgttggaggcattaatggctaccttcagagaaaccttcatagtttgtttgaactgtaaatggacgagacccattgaacttttcagcagtaaaaagccagagtgaatcttcctggtgattcggaaaagagtattacatatcattattagcaaacataaaatggttttctaattattactttcgtttacctctgctttaacagacgaaggaggtccatggtcaactacatgaatctgaaagccttcagtgtcaatcatgatcgaaacacagaaccccttttcctcattcagccacttgatatttctaatgacttcatggcgccactctctggtgttatgacacatattgagcctagcaatgttcattcctcccaatgccaaattctccaactcctccaaagaacaactagcaggtccaatagtacaaaccaacttagtcttcctcaaacccagaaaacccttctctctcaactccttctctgaaacaacatcaagctccatacgactcccatctaatacctttggctttgtaacttttgttacatgactttccaaactcacatcaaatatggtctggactacaccacacacagcattctgcttcaagtttcttccactgcatgaaatcccaaaaagcctactctcaatattaacacttgtgggggtcttggccacaaggtgactgagaaaacgagttgaggagttggtgcaggaaaaagccatggattttataagaggacagaattttgtttttaatcaaattctaaagatgggtttccttaagctttgggcctgtagctagaaaatcttgtgaagatactcaagagcaagtttttcttcagtggaggtactgaggttcaaggtactttatatatatagtttataaagtatattgtattctatatattagacaaagtaccccttatcaaaagttaatgcaacagtctatcaaacaagtttagcacaaaaaaagacagaaaaaacagtgtagcaaacacaaaagatattaataagtagtaacacttcatatacagttgtaggtctggagatggtgcatacagatacagtagaacgtaattgaataataatgaatggggtagtggagtgatgaaagaaactctccaataattgctcttatttaatttttttatattttaaaattattattaacaattaatggagtacacatgcattctgttgagagggagggtgaactgtatctctcaaaaccactttataaaacatatatttttattgtgaacgtgttttatgcgaatttatcattcatttgacagtaactactttctttcgtttttttatatttttattttatttttcattactacaaaaataagtttgtcccattttattcacgttttcgttaaaatagagatcggaatatatgtcagtaggataatttttttttataaaatctggaataaaaatgtacatttaatcctaattctttcataaaaatggagataaaaagatacccttttatctcgattttcataagaaaaccgaaattaaaacttttacccgtaagtatcccgttagtttcggttctctgaaacctcctgggaagaaaaagtcccttcatgggaagggttgatttcgtgcttttcatcattgtgtatctggtttgcgatttgattctcattgttaggaacatggatctggaattggtgaataggcttgctgaagtcttgattcttgatgatggagatgggcctgttcttcatctgaataaagccggggttgaagaaggtaagaagaggttggatttatgtttgattgggaaagttattggccctagaccagccaataaagatgggattgagagagcaatgaaaggggtttggaagattaatcataggttccaggttgaagaattgagttccaagaatatctttcgtttcttttttggctgtcgtgaggataggcagagagtttttggtggtggtccttggactattgataaacaattaatctgctttgttaaaccaatggggttgggggaaatttctaagatgaattttgattttacttctttttggatctctattaataatgtgcctttggcttgtatgactgaactatttgctagagaatggggggagagaattggtaagttagaggatattaagattgttaatggtaccatgaaagtgagggtgagaatgaacattatagagcctcttaaaaggggtttgagggtggctattgatgatcaaggtaatgaggtttctctcatttttcaatatgaccacctacctgatttttgctatgactgtggcatcattggccacaaggctttagattgtcctctcaaagattttgccggagataatccacaatttgatagtgggaggttcggatcctggttgtgtgctccttcatcacctcctcgagatagttttcgtttcaacaaaaggcggccagaatctccaacgaacaggccgatcatgaccatgggtgaagcgtcaaaaattatttctgccgtggagaggtctcggccacgtttctcaggccttactccggaacagttagctccaacctcagtgctggaaggaagagaacgtgatgaagatgggctgactggtaatggtattgaccgtggaagtggtggcgagccggaggtaccgtcggagtcccgtgttcggtcagctggtgatggccatgacgatcgttcttctgaaggttttcaaggaaatatagaaaggaaagggaaagccacgactgtgatatgtgaaggtgaggatgtaaatggtcttgctgagttgttgaagtcgaaggaagtgcatccatgtgaggcatgggatgcttcctcggttggcgtgactgtggagaattgtgaagagattaatggtggggggcccagcaaggatcggtcaaaagaaattaataagggaaaaggcattttgcttccctcatctcaagaagagctatccttttcccatgcttttcaacatacttttgaaccaattctcaaagcacaaaagtctaaaacatggaagcgggccaattcctctacgggccgaagctcaaaaggtaagcctaagtctagttcttttccaattagccctaagttatcccatgttattgtggctaatgctttgaataaacttagtccgcggtctgggtgtgatagtaaaaggaagatggatgtggagtacaataatgaaagtgtgaagaagggaagacaagatggatgttcggatatgaattctgacgatatgtattctgtattggcgatgtctgcagagcagactcgccaggagccatgagtttgttatgttggaacgcccggggcttggggaaccctggtgcgttgactgccttgcgagctgtggttcgtaagttctccccaagtttagtttttttgtcggaaactaaactttatgg

SEQ ID NO: 218787 - DNA, 3689 bp, Cannabis indica
ccattgtgttaccatgaatgagtacaatagaagtatgcagaaaataaccaaaagctaatatgagcaaaaataaaacaaaatcaagatgagtacatgtattactttcttaaggaagtatttgttaggccttagggtattatataataagggtatatgggtaattgtaatgggagtattgagatggtataaataggagagtaatagaagggttttggggtgtgaatgattttagttaaatgagcttttagctcttgggagagagctgggtctctcgaatacccagcaacctgttattctctttttctatatcaatatacatctcactattttcctataattgctactgttatactaagttgataggaaattcctatcagtaattcagtattatggtaagagaagtgcacacctaattccaagaattccattgaattcatcctccatacttcggaccatgtatttgtgaaaatcgtatgtttgtggcaacttgtgcttctgcatatcatgaaacaaagtaaaacaatatatttttgaagatagaaatgtacaaatgataacttgcagcattaaaattccaaggaaacatgcagcttcatctagcatatggaaataatatggctgaagcctatgtggggctagtaagaaagtaactgaaaatataatagaatgtactcctaagtcctaagacatacctttcaagatttaggacaaactaaaagataaaccatggcctaacatagagaaaacccgagaaacaacttgataagttttaagcatagtagcctatgaaaacagctttttgcctaattacctaggcttgattgctcccttatgacaaacttaagtaaaattgtaaaaaatatgttattatgacactgtcctgttcatattcatatttaagctaaaatggataatagcagaacatgaaaacaaaatagatacgcactgtaatgaaacccaaacgaagtgccatgtaatctgatttctgtatggaactcttaaattgtcggaggaagcagagctgcaaaggcgaaaataaatacaatttgtctcagagacaattaagaattatcatagttatagtttaagaaaacaaaacgaatgcacaattagcgggggaaaaagactagaaatagtgcttgtgacgatgtatgaattatgagcacaacaagtagaagccttacctaattaagtaggtttggcttgactgaagttacatcaagctaatatatttgatatgtcaaaaagttgtaatcatgcaattgaaagttgcagaatcattacaatgcatattgaatcagataaaatgcatttcaaaaatgtagtttcaaatataataatatgggaaactgaatgaaactacactcacatattaactaactaatagaaacaaccattagcccaaaacagctaaattaatccttataatattatcttataagatttgcatgaaaactatatgtgagtggatttcaagaacaatttcaagaagggatgatgttgttcagtagtgtgtttaaaaagctcgaaagtgtcatataatgaataattaccatccaattcagaaccggatttctactccatggatgtgatgtgtgatgaaaaacaaaagttgattggcgtctcatgaccttgtttatttttgctgttaaacaaattaaaaatatttacacacataatatacaaagtgttccacataaaattattggttaaagtgaaaaaaaaaaatacaaaggaacataataggcagttgtcttagctaagagatggcaacattatgaaaatccactaaaataggctgtaataaactacttgatatgaacaagagattaaagtggacaaattgcattttcaattagcttaccaacatattaggattaagtatcaaaactgataacagaaattcaacttaaatttgagagagaagtactagataaaatgtgtaccttgcaaagtagcctgattttcccatttcctccaactataaatctacaagaatatgataaaataaaccatctatattctgaactacactcatttcatgcttaactcaaaccatcaagactacaaaccttgctcatggcgagaccaacagccacacaactatacaaaacatgagtgataccgagaacaaaaaggaagcggtgaagctgctcaagtccctcgtatgaaacaaatggttcgcggccctgagtgaaaccattagaagtacttaagagctagttatacaaatagactattggaactttggaaggctgaagataaagtttacctcaccacattgatgagatgaatgtgaacttattgcattttggtgagttgttgtctcgttgtgagaagagaaaggagattcaaaatgagtgtgtccactgatctcataatctttctcggaacaaatatagaaacgactagtgaaaagagatgaatctacacatatctcagaaatccatcttgcacattgtgctaaaagtaatgatataagtccaagtagcatcaactctacaaaaatacaaaaaagactcaaaagaagaaaagactcagcagcagttcacatacattgataactctttatttgacaactcaccttccttaatcttctccaaagaggcaaagagtgcttttcttctagtcttctttaaccactgtacagaagaaatataatgataacgtgtaacatttatttctcaagtaaaatactatattataagctattcacattaaatgccttcaaaaagcctatttactcataaacatatcaaatatatcccaagtatttttattctttttgtctttgacaaataaagggcatacctaccacatttaaatctcctaatttatgtgctcataaaaagtaccaaaaaaataaagcatattttatcaaatatttgctctcaaaatcctctccatttcaactaaaccgagtttttcacaaaaggaacctctcaatatatatattcagctctaaatcctctacattttcttgcattttctcaatggccaaacacagttcgtggcaattggcaactagtctttcttacatgaacttgtacaatcacaatgtactggcatgttttgcactttctgttttttctcaaccagtcagagtaataggattgaatattttccaatctctcatataagtttataaagagtgattttcatgtgggtcctaaacgtaaatcattagttgatcaacagaaggaaaagaaagaaagaaagaaagaaaataaaaagttcctttaattttctctttagtcttttcccgaccagacttacaatgctgaaagaaattcagggtgggacccaaaaaaagctctaagatcacattttttgaacttgtattactgttgagtttctcagcagcaaccaaacaaaactcattgcaacataaatctttgtctttttttttaaaccaaagaaaaagtaacaataaatactctttgagcttacccttccaaatctgtatattgacctttctaccaacaagcaaacaaaaaccatgactgtaaccactgaggccactgagtaagtgggagtctcagccaatgacctttgctgctgcatcaactcctccattgctcaaatcagcagcaacccattaactcttacaccataaactcaaaagggtacacactagaaaatcttggaactttccctagaaaatgaggagatgagagagagagagagag

SEQ ID NO: 218788 - DNA, 5629 bp, Cannabis indica
taaaaaaaaaaataaaaaatacacacaaacgatcagtttaatagtaacctaacttggctgaacattcctttttcaagttgtgtttacataatataaaaaattgcttacaaaagtttcttataatacgtgcagaaactactaatatatataacatatgataataataatcctgatcgtgataatgcctctactaaaataacattgtgacacgtaaatgatatgatgatagtgtgagaacaacatcaaaagtcaattatagtgattttgtggcttttgatattaatactattgtttttgtacaaagtccatatcactttattgagtggtttcattatcatgagaagaggaatattttcccttacccaacaaataataacgatatatatattatataatttgataatgaaaaataattcccctaactttatttagttataaatttaggtatgttttgattatgaaaatcaagagatcataaaacacaagttgatccaccccctcaccaaaagtttagagaaaagggcctgaaacgttaggtaagattgaaattttgagattcttattagttgtgccggcaaccatctttagagcaataatttatgcaagattatttgaactttattataatttaaatattttatattaaatattgtccattttttttgtgtattttgtatcatttggtttgttcaaaagcacagtcatcttttcacggtagtagatcaatttgattcacagaagaaggtgaataattaaaaataaaacaacgttatagtatgtatgactgcaaacaaaccttaatctatacatatatcattcaaaatcatatattttatttagagcaataaatctacaacatacctcccatagctactctatccatttgagccattccaaaaagtgtgtgtgaagtttaaacactatccaagatcttgacggttatgttattagttaggaaattaggttagttataactttctgttatgacagttaggttctttatcctttatttgtactgctctatttataaagaccattagtgattctatagagtaaagttgatgactaaaagaatttagatgaaattctagagagaaagagaagtgtaaaaggtttgagtttttctgatctcagttccctcaagtgagcctattgcaggagaaagactccatgtatgatgaacatccaaatctccctcctttataataatctgagcaccattgatcaataaaggcaaagcctcaagacagttccacccaaggagtagatccaagcatcttgcttgtgttcgaaccttgtaatccttgtgttaagttgctcaatttttgtcatccatttattaattgagtttactttgtttttcttgcttttgattctttaatctctaagtttgattttttcttgaagtgggattgattcacaacaaaaagcatcagagcacaagttcgtattatgaaatcaagaaccaaggtgatgagagttaaagaacacaatggaaactactagattcgaagtggattaatatacaggggttaatgactttggtccatggagaatcaagacgaaggcattgcttatgcatcagggtgctgtaagtgccataataggaactgtcgccaaggaaggagaggaagcaaagaaagtttctcaagaaaccgatatgaaagcatagtgtcattttgttgagctcaagagatgaggtactttgagaagtcgcagatgaagaaactgcagtaggattttggaacaaacttgatgaagaaactgcactaggattgtggaacaaacttggatcaatatacatgaagaaatatctggcaaacaatttttatttgaagaagaagttgtacaccatgaagatggatgaaaccaaagaactcatgaagcatctcgatgacttcaacaagctgatcttggacttgaataacattggggttcaaattgaggaagaagatcaagctattttgctattaagttctccgcctaaagcctatgaacactttgtggacacaatcctatgtgacaaatatactttaaccatgtttgaagtaaaggctgcaactaattcaaaagaaattcagaagaaggttgatgacagatcaaaaattagtggtgagggattgttgtttgcttgaggaagaactgaaaggagagattttgagaaatccaataatggacacaaatcgaattgtaaaaacataattgcaatagggaaggagtgctactactgtaagaaagatgtgcactttagagatgagtgttacttgttaaagaacaagctaaagagagacaagagtaaagaaagaggtgaagcagatgttgcatctagtggttatgattcagtagatgttgcatatatgactccaaacaagaatttatttagcagttatgaagaaaattcagttggcacaactctcctaggtagcaacaaggcatgcaagattcttggaattggttcaattgaaatgaagatgcatgatggcataactaaaagtataaaatgtgtggtatgtgcctgaactcaaaagaaacttactgtcaattggatgattgataatcgtggataccttgtgaaaattgatagtggtacccttaatgtctcaaaaggatctctagtggttgttagaagtaaacttataaatgccctttattacatgatagggattgctataacaggaacaacatcaccagttgttggcagtgtcaaaagtgacagtataagtctatggcatttgatgcttggtcatgttattgagagaggcctcactgaacttgacaaacagggactatttcgaggttgattaattgtcaaacttagtttctatgaagagtgtttttattagaaaagttgcaaggttaaattctccactggacaacataaaactaaagaaaaatttccctatatacactctgacctctgggctccttccagaattaaaactctagggggtgttagctattttattagcattatagatgatttttcaagaaaagtgtgggtgttccttttgaaaagtaaggataaagctttcaatacatttgtttcctagataaagttaattgaatatcaaaccaagtgcagaattagaaagctaagaactaataatggttggaaatatttctcaaagaaatttaataaattttgtaaggaacatgggatagctaggcacttaacagttagtgatacaccacaataaaatggtctttttgaaaggatgaatataactctcattgaaagggtaaggtgtatgctaaaaggtgatggtttgtaaaggcctttttgggatgaggttatcaagaaaacttgctacaaagtcaatagatgtccatcagtccctttgaagtttaagacaccacaagaagtttggacatgttaagtacctaagttagatcacctaagggtgtttacatgcacaatttatgctcatcataggcaagacaaacttcaagctagagctctaaaatgcatgttcctaggctatccagatggtgtgaaggattacaagttgtggtgcttggaaccaggtcataagaaatggattattagtaggtattgttcagttttctgccctaaataaaactcatttcaatataattagatttactaattaataaaagataagaaatttcttttctgttgcatggtccacatgatttatttcatgatcatgtttgatgtataaattctattaagtccaaaacatatatatttattcttgatcatagtgtcgtcagcacaatggaatataatcatgattatatgttcaaaagtttaattcccatgatttgctagttcactacatttagactgacatgataatcggggataatgtatacttaaaccttggataagtgttatgtcctttccggggcattggtaaagtttatcagtttcggatgtatggagtatatattggaagagaccgatattgattttggataagataccataaacttacagttatatctttctaagtcattatcaatggttgctagtatggttcactaatgcctattcttcggtgcaagtaatctggttcagattacgaatgtagtgatacatcaaagtgaagctactgtatataatagagattatatatgacaaggaccgatatgaataaagtttttttttaacatatcattattataaagacctaatttatatcataatgatggtcaatagtagatcgacctaaatccttagttatcatgaactcattttcatgtcattagcttctttgattaactcgttgaactttctccgagaagatgattcttacaacatctgttttgagaatctaacatggatggctgaaacatgatgtacaattatggaatcctatcttttctaacggatcgactgttggttccctttaagtgttaattttggaactggaatgttgtgcacaaatttagatgtgatcttgaattatacttccactagtaaattaatagaactaaaggtaaagaagtaattagaaagttaaaatggtattttgaccaaaactaattacgaaccaacacatggagggctaatcacttgaattgattatattaatggtcactgcagttaaattctgtaaatataattctataattactaagagtgaaattccatatttataatggagtaatcgtagaattaataaataagggattattttgttgatgagactcaataaataatctatttattgaagcttagaattataagtccatggtccctgaatcgttaacttgaaactatgtcaagggtgaagataaagtgttgtataaagatgttcaaagaaaatctaatttcaattagcaaaatagtaattatttatttttgtaataaataaataattatttttctaattaattaaatagggaaaaagaccaaaattgttaagacaaaatttgttgagacaagatttgtcagaacaaaagacaccaaccttgtcctaaaaacagtggttggcgcctagcttctccctatccttattggatttatctttttaggttaattaattatataattaatttaattaagtaaatatttaatttaaaaagtggttatagatacttcaagattgttgagatattctctcaagtagttgagagatttcctcataaacatcactaactcaatttggttatagatttttattcatataaacaattaaataataattgaataaaagggatttaactactataaatagagtctgatttgagaaatcaaaacattattttactacagtaaatttaaaatctatctagaagaaaaggaaaattgttttttctctcaattgttctggactcatgtgttgagacctcaacaagaacagtgttatacactttgccctaatagccaacactattccttgtgtgtggtggatcgatttggaagacacttgcgtgaagtccaaattgttaattcctcatcaacttgattaagggatacaacatacgagaagttttgaggataccctaataggtttcaagaggtattctaaaattatatcttttattgttttgatttaatgtacacacatatagagatcctagggactatggtatgatgataattgttaggttatatttagcctatgtttacaggtctttaaagttagcattatctcgtcta

SEQ ID NO: 218789 - DNA, 4545 bp, Cannabis indica
aaacaaaaaaaaaaagtaaaaaatcattaaattaataactaaggagtaaacttcttttgatcaaacattgaaacctctaagaagtaagtactaagtaatctctttattcccctttaaactgaaaaataaccctagtgtcatgtatgaaaagattattctctgattaaaccttaacaagtatcatctaaatgttcattgtaatcaaagtaaactaatttgtcctagttattttattttaaactgtcaaaagaaactgcatgaaatgataccaaaagttcaatactttttcatcacacaaacatgaataaacttacatggctaaccataaatacaaataactattgttagtaaacaaatataaaataattacctattatccttgaaacattcaaaaccataaatgtccagaactccaatttgtacttgagaattcaaatcttgcccaacagacttattaattttatcaaccaacctgaaacagaaatttagattgtcatcaacatctcccaataaagagaacactacaagagaatgattctttctttaagaagcaacaaaatttaccagtcaaataatcgtgcataaacagtttttgccagagcatctctaccagcaacagcagcattacaatcaagagccttaacaatacttccttcacgggtttgaattgaacgagtacatagtgttgctagtaagagatctacatcacacctaatagaaggaataaccaatttaatcaaaacaaaattaagaacaaatcgatctatcaaaatatggtcagagtgatagttgagctttctcaatccaaattccaaattataagaattattcttcagtacttttaaaataaatctcagagatattctcctgaaaactcaatattataaattcacattattaaaacatatatctacctaacttgacgtctaaaattacaaaattaacatttagacatacagataattgctaattaaaaaaaaatacttcctataactctacttcatatgaattcctataaaataaattttcaagctatcttgttgatcacttacatgaaaagattagcaaccatctgcagatgaaaatttgatttctgatcctttagaatggaagagtcgtgctctttcccaggagaaaattcaatgttgcccagatgaagaattccagccaaggagcgaaatattgcttcctaatagaacaaaaatataatataaaaaagattattttaaagaagaaaccaaatacaccataattcttaatttctaaagttaaagtagcatgcagagttttaaaacctggtcctcatgactaatgccaacaatgtccattgctctccttgtcttaatatattcctctgcattgcttactccatccaattcataaaccttactttgatttaaataatggaaatgggttggatgatctagcttgtacttttccgcatcctggacataaaaaaacaaacccaaaaacaatgttaagaagcttaatgaatctgaaagggatggccaagtatcggaatgaggatctatttatttacatatacatctagtcccttttgttcaaagaaatgatgcaaacacaaacacatgacaggggggagagtcgagagggacagagatatacatacaaattacatataaagagagagaatggggagggggaagagagtacccttccagaagcacacaaatgataaaagcagtgataatttctttcaggatctgtaatctgtacaacacgagatctttccaataggtaagttctaatagcagcacctgatattctaccatttgcatcaaactggatctcaacaaacttgccaaagcgactgcaaaagcatgaaaatgaaagcaatagttgtttagacaaagatacctagagaataattcatgaagcagtaaagcgagcaactccagtggctaaattgcaaaccttgaattgtcatttctaacagtccttgcattaccaaacgcttccaaaagaggatttgactgggaaaaaattgaaattatgaatcaacaaaaataagaaagcaaagaatttccaatgacataaaagtaaaacaaacataaatgttcacaatacaaaaacaaagcagctcttaagttttagcaactaaaacaatccattatacaagaaagttaatccatctaagtgtccgtgttcagagcaaggctcccctccattaaattacaatctagcttgcctgtgaaaaactaatggctttctattcaaaaccttttgggtacctggcctaaatcatcttgttcaaaattgtttccctgttgagccatacaaagtgcattaatttgaggataattcttacttcaagaacttgctgctcgacagttctgtcaccacccgcagctcggcctccaacataagtaaggtactgcatgataagtttagtcgtctcggttttcccagccccactttctccactgaccagtatagactggcttcgaccatcattcatcattgccctggattatacaaaatcacaaggggctaagaaaagatcttacttgcacagttgaactaaaaatatatgaaaaaagttgcaacttatttgaaaatataaaatcattaaacctatatgaagcatcagccacggcaaagacatgggggctcaactcgccaaaaggagctcccttatacatctccatcatatggccattgtataaatgaggaagctttgtgaacggattgaccgcaatcaaaatgcttcctgtgtatgtctaacaaagacagaacaatgcaagcagaggtcactgcaaaatccatggaatttacctaacgcgataatttcaagaataaaaggaaatattcaagtttacgaggtaacggaaagtgtctcatacgacaatgactaggaaagattaagcaaatttaacgccatctaaatatcgtatattatatttattaattttaaattgcagactagttaaagtcattccatttaagcaccaacataatgaatatggaaaaataaagctactctctacctaattaatcgatcgaataaaagttagtataggacagatcaaatactaaattcgacccagttaggcgttacacttcaaaaggaaataaaaaaattttactatcttttctctaggaacaatcccaaggtttagtagacaataaacagcccatgatttaccaaaagacaaatcaaataccgaattcgacccggttaggcgttatacttcaaaaggaaatgataaaatttactctcttttcactagaaacaatcccaaggttgagtagacaataaatagccaatgattactcacataagaatccaatgattcaccacataagaacaatcaaaacaccatcaaacttttatttataggtcaactctaattacctaatcatttttatcccaagcttttgagaatataccaaaaaaaaaaacaaaaatcacttgagttcatgatttgaaaatttaaaaaagttggttggctttgtacagttaacaataatttcttgtccttctcttaaggtttgagtaaaacaaattcactccctttaaaacacactcataactaaacataattgaacaacaaccaaacctaacaaaaccctaaaatattatcaaaaagaaaacacaacattaatggcattgccaatcagtacaaatatatatattaaatgcaccactaacatatatatcattgagagcatatcttctctgaagattgtaaagaactcctggttcattcaaataagtcaatttcgtcatatcatcaacaccaccatgctcatcctcatcagcatccctaggaaaaactttctcaggagaaaccaaaatctataccaaaaacaaaaatcaaaaccacattacaatcaaaataactccaaattcaaaattcaaaaaacgaagaagcaaaagaagaccaccttcttccctgaaactgtaacagcatgaacttgctttccaccataatcgatgacctcagccgcaacccaagctaaattcttgtcctcgacccaaaccttcgagcctttccgtatactcatcgtaggttcctgtaaaagttaaaagaaaacattaacgaaatcaaaaccctaggtaaccgaaatggaatcggagaatagaagatgaaaaaccctagcgcgagagagataagagcgagttacgagcatgagtgagtcgaaccgagtcgagtcgagtccgagttgaggttgagagagagagaaatggggttcccgccctaacaggtgtgtttggacaaaaaaaaaaatatgagagaagcttcggtgtggtggtttttggtaacgtaactgacacgtcactctctgttctgtcacccacgctccaatttgatttggaatttcttgactgtgacgctacgatgtttgtgtactctagcaaaaccctcgcttacccttcttcctcacggctgaccgtgaccgtgagaccgtttggttccttaaatgaaaaatgtataaatatataaataattattataatatttcaaatgatgaaaagtaaataagacaaaaatgacttttattacaaatctagtaaaaaaa

SEQ ID NO: 218790 - DNA, 3371 bp, Cannabis indica
atacatactacttagctcatcacttgtatagctttccacttgcagggccctatataacaccactcaacatttctgagtttgttgattaatttgtgtgtttgtgtagacaaaataacaaagaaaaaaaaagaaagaaaagatatatcatctgagcatggattggaatagcaacttaagacttgtttcaagacctgaatgttcttatggcttcctttacaactacaactatgatcagtaccagggtaacatatatattagtattctacttttcttttggatgaatatatagatatccatgcatgaatctgtttcttattattattttggtttaggtatggatatgaaacatcatcaagcagctttaatggcggagacaacacaagggttagggctacttggagttccatcaatggagaagatgaatggtgggggtagtagtggtaacactggtaacagtagttatgggatgatgatgagtaatcaggacaagaagaagagactaacgacagatcagttggagtctttggagagaagcttccaagaggagattaagcttgaccctgataggaagatgaagctgtctagagatttaggccttcagcctcgccaaatagctgtttggtttcagaataggcgtgctcgttggaaagctaagcagctcgaacgcttgtatgatgctcttaaacaagaacttgatgtcatgtctaaagagaaacagaagctccaagaagaggtaatatatatacatatattcttcttatttcatgcaaccatgcataatatatatatataataaatatgcacctcgtatatatatttatattacgattattataaggttttttctttttttattttttgcttaactacaattatatgtaaggtattagattgcagtgtgttatgtgtaattatatatatacagcaaccatataaatttttccctttaatcttagctatacatatatagtactacactactacagggaaaaccacgtttgttttgtatggaatggatgttctatgttactttttcttttctttaatttctgttttaggagagaattatatatatatattaacatgtaataacaaagcataatattagattttttaaggaatacacaaatatatatagttttctttttttgaaaaacaaaacgttacaatatagttatagtcaaatacaaatgatcggttttctttcttttttgtttttacataaacaaactttattttttagttggttgaggttgaaagcttgaaataaactttgttaacatggacaagcttagtgtagtttatactattaaattttttaatggggaaaagaaaaagaaaatagtgtacatgcttaaatatttggttgatattgttgtttgttttcctatatatcttattttaaagagcttgtgttaggcgctggtgcctatatcttgcaattgattagtgttacttattacattaaattatataaaactcaatatttaattgtacgaagaagaagaaggtgatacacactttctagcatttttctattttaaataagtaattcgttaagtgattacgtatattgatatatatgtatatatttatatacacgtactacaggtaacgaaactgaaggggatgctaagagagcaaggaggtgggtggaagcaagtgtccaccacaggtggttacactgaaatttccggtgaagagacggtggaaagcacgtcggcgggaggtattcgaagcagtagcaagtcactaggaacgaaccccttgggtggtggcggcggcggtggtggtgagtgcagtcatcacattctcaatgtggaggaatacaaccctgtatcaccaccttactggctcccttcttatccttaattacttaattaattatatatataatcaaatccttagttataatagtaattcaaattaagctgttaataataattaactaattattattagtctaagtgatgatatattattatcgtaatcgtttttttataatatattattatatattaattaatcaatcattttctagctacgcagctctctcccccttgtaatatgattgattaagtaattgacttattaattattatatatataaatctatatctattgcatgtattctactataattaagcatattctactataattaagcatattgtacttttcaactcaattaacattatcgaatattagttaatataatttatgcattatattattcgatcacttttttcattatgaaataaataaataaaataccaattacgccctcacagccatgtgttttattaaatgactgttaatactttctgttttcagctcaattttgatcaaatacaaaatttaccaactttgaaatgtttggcctagatgtgaactcaccattgaaaaattaaactcagttaaaaaattataaccaaacttaaactaaggtataaaactataaatttagagcttgtttagtacgacgtcgtattgtattatttgtaacgcccctaacaataaaaacgccacaaagtgactaaacatatgttgatctcactaaaccaaaattaataaagctaagagcaaaaatttaaattttaaaacaaatacagagtaaaactataacgtgtaattatttaactttacaaacatttaaaaggtcacattttatatcgggatcccgtaaaaacttttcaaatattacaagttatcatttcatgctgacctaagcgacaaaagttgagattacaaaatatttcttctggtagaactcaaccctcgtggtcagtatggcccgaacatgtacaatacatccccaagccctcaaactcatggttgatcaataacaaatttgctctttcctgcatagtagagcacccgtgagccaagcccagcaagacagtataaataataataataatacgcataataatcaaaaatcacataattattgataccactgcatctatcgtctatttgacatagacctacgtgttacactaacacatctatttataataaggccttattagaactgtttatcttgattctaattaccgagtctaacctaattatgccttacgcgcataattctttatctcacagcattgtattgcattcaaaatcacttaaatactagagtaataaccctagactacataaccgcttattttagggtaataactctaatcccagtttctcacttaacatatgcataataacatacatgagcgccacagcccttaactcttatgtgttagcttactgtcttacctggtaatccatgtatgtggatattccaaatcctcgggtgttttcgagcaagcaccggtaattcatcacgcgttattgggatttcacaaatagggtta

SEQ ID NO: 218791 - DNA, 6246 bp, Cannabis indica
caagaagctcgcggggaatggtcaaagcacccggggggcgtccattcttcacggctgggtggtcagcaagaggacgaccttggtactctgctactgggattgaatcaatgaggaaagtagagttcccaaacctcttggggagcaaggagagattcatctcttcatcatcagaatcacccattcttagagctctgtgctcttcaagtgtggttccaactgaaacatgctttttcttacgaccaaagcagcagctgcaacaacctggatggtgttctttagcacgaggagggtcaaatccataaagggcaatcctacgaaagaggcaaccagttccgacatagactggaccctgaagcccatcaagggctcgcatgttaacatcaaagaagacagtgttgtgattggcatatctatctgacgggtcaataccctcaaacctctgagggaattggacatagcaaaggcggtcaccaccacgatccatcatgaaacacatgccttccctcattgcctgagagttgtatatgtagtgatcacagtcaagattgaggatgaatgggccattggacataatagcagaggccctaaccagggcattcatagctcctgccttcttgttgtgatcatagcctggacgtttctcacgagaaacataaacaagtagaggaaggcggatatcaacatcagtgagatcaaggaacccagaatcatcaggagttcctataagtggttcatcactgggaggtttcaacatcacctgcatcaatggggagagaaaacatattaagtttactttattttcatttccactcaaaatttgtgttaaccaaatccaaaaaggaaagtaacttgatggggccagaccatgtacatacctgtataataccagcatggtctccttttgaatgctcaggtccaggagtcaaccaagtccctggccaatgagttccatcagccatccatgttgcctttggaattttcacactttcaactggctcatcatccctgttctgcctctgaatcttcatagctttaatctcctcgcgagcatgataggcatcagaacgacggcgaatagattcaggaagtccattaatgcgaaccttgaactcgtcatactcacgctttatccttctccgatctttgacaaagtcaggctttactttgttcttgtaaggatctctctttaagttgaagtaagattcaggatttctaggctcaatgttatgtttacggcagaatgggacccaagtattagcaaagctggcagcttcagccatggcttcaaaggtcagaagggcacctccatcatcagaaacatagcaagcaagcttctcaactgggtaatcagcagctaaaatggagaggatggtgtttgaagtgacaagtggaggttctttctcaggatctgcagtagaaacaaaaatatcaatccccggaaggtctgattttccagtggggttgtttgggctcggtgtttcgaatttgtccctcaatacattgagatcagttgcacgattgattggacagagcttgggcaattgatcaaggagccacgaaaaagcaaaccaaatctcacaaacaacagacattccccatagccaaatggcatcttcattcttatgcttgaccctccaaatcagaaacaaaacaaggaccaccatacgaataagaatgagaagcctggtaacacaacacatatgcaaggcaaatgaaaacactcatcagcataaatacatatatagatacaagatctctccctacattgaatgttaagaatactagttgacatatatctaagaaaagactttttctttttacctatatggacttagaatagcagcaggtatctttaacttccgtgtaagaggtctccatggtttactcatcaattcagttggttcagaggattcatcatctttaccatttccaaaaccgccttccttaggccaaatggcattcccatatccataagttcctttagtttcaaacaaccacctgttgtgatcaaagtccccagtttgactcctcatcaacccggacttggttgatttcatcaaagacagcctcctttccattttagacatcccgttgggaggtggaagtggaagcggccgagcattattatccacagcaacctcatccaaatctgtgttcttatatgattctttgcatccaggacaaatgccaccaccggttttaacagcatcaatatagcaatcccgacatatcttgaaatcacactcacaggggagaatatcagcgccccgttcatcactcattactttggcatcacagccaggaattgcacatgatgaaccctttgcaccagccatctgaggatggtttgcttcagactcaatcaccttgtccataagatgagctcgagtaacactgttgaacccgcctgtaaatagggaattcgacacatattgctcttcaaccttctgtgagattgatggatccatgggctggttatccggggtgggaggtatgtggactgtatagttcataaagtcttggctactaagttcactatcaagatcatctcttgagtagctaacatagcggcctgaggatgttcttcgggcaaatgtcacctgtggaggcaatggaggcttcccatcaagcacatcagaactcgccgatatattagatcggctcgccttgaaggacttggatgtcatcttcaaccacctattttagatcctgaaagttgacataagacattaattcaaactccattaacaccattcaaagccatatctaagagctggtcagcactaacttttaaaagctcataattggagctgtaaaaccccaacttattaaaaacccaactttaaatttcatcaaagtctaggactaatcaaacaaacagaacatataaacataataatggctgatctaatctacaaatctgctacttgtctaagaagaaaaaaaagtactaaatttaaggagcatcatcttaatcttgaaaaataaaagtataaaagatcccaacttttttttccctttaatcgtgagaaagcataaagcttatcatttattaccaaaccaacccgcccaggtacaagttcaaaaagaaaaagaagatcttgaaaataccccacatcacattaagtgggtaagtaccaatacaaatcaaagtcccacaaaaagagtcgttttcactaacacaacagacattttttatttctcagcatccaaacaaacagagcaataagaaatcaaaatcagaatatcctggtaccatgccaagatacataaatacaaataaaaaagagaacccaaaaacaaaaaagtaagatttacctccgttttgatatataatgctgaaagtgtatagtgagatctatgagataagtaaagaaagaaggcgttttttttcttagatgggatgaagatggaaataggccaattcaaaagggtatctctttcctttgctctgcaactatgaattgttggctatccatgagattaagcatgaagatgacaaatcttagagaagagaagaaaaagagaaagaaagagataagtaaacgagtttttccagactacaaagcactaagaggccatgattcaagtctttttaatattaaagaaaaaacttagcccaaaacacaaacccccaaaactagaacaaaagtcacctttttttcttccctttaagctctacccgagtaaatattaatggtttttttttttaaattgaaacaaaaattaataaagaaggaagtgagaaggttcttctgagtgtttatgagtgttctgaagaacgtgtagaaagaaagggtgtatgtatgagttgggtattgctggctttttagtgttagtatagtgttatctaccttcctattttctctcaccattgtcttagctgagctgcattgttcttttttttttttgagtatcttatactaatattaataataattaatataccctttatattttttgaaaaattaaaatgggaaaaagggtataatgggcattgcacaactacaataaatgtaaaaaaggtaatgaaaatagaagccgaaatcaataaatatatatttggttaattggtaacacgctttccttttgtttgttggtttcaatttaaaattaataagcaaacgttacataggtttgaaatgtttgaaaacgtgttgatgtgttcaagtgcatgctagttggcaaaaatccaaaatggagagacttttttggagttttcattcatactcatttcatttcctttatttctattttttaattctaaaaacacccttccttcagatcaaatattttatttcccaaaatacccacgaatctataatgatgatataatcgactttgtttcccaattcaaatgcgcaaacaacggactaaattttagcattctatatctatttccttattactgttttctttcacaaagttctcttattagtttttttataactatacagtgtgtgctgcaccatagtaattaactgtttaaattttatttttgatactataaattatttaatttttttttaaaaattacaaataatcttaaataactacaatatacataatcataaaataaaatatactaaaaatagataagaatctttaaaaattactacaaaaatttagttgtaatagctaacacaactgtactaaccacacaaaatagtaatcctcttctaaattggagatactttagactctaaagcatttttagttaatatatgagcaatggtttctctaatagagaaattgaaaaaattacaagctattggggtttttctttttttttttttttgaaatcaagctattggtttgtctaacacagaaatttccttagtttttaaatatataatttttaaataaaagttatgatggtgtcacgcacatatatggcatctatacaaacactttatcttccacttttgttctttttataaaaaaacaataataataattagaaagaaagaattactattcttatagacctagtcattgatagtaaattagtaattgaattattctgcaaaatgctaaattccacatgctttataacgatatttttacttatcgagaaggagttgtcctccaaatgtttaatgaatacaatatgtaagaaataagaattataaaaacattcatgctcataaattcataataataataattataataatacaaaaagataaaatatattaattttgtgggaggccggttaattaaatatttactttttgggaatagaaagagagagaggttgggagtagttggcttctgatgaagtcttcaaaattaggtgtaagttcttccattgatattttcaacttataaatttggttatccaacctttaagagttgggatttgttttagtcttatacatacaatggtgtttttacctaatatttctttttgttgcaaaagtattttctttactataaaaattgttataaatatccttttccagttgcattatgttcaattttttaaataatttattgatataacattaatcacgcatagttcaaaaatttaaataaaaaataatgcataaatgacattacaataataaattatgtgaatatgtttgtaaattcttagggttactgtttgtatgtttaatgtaattagagtaaatttcaaatagcttagaattattaaataatattctacaaaggtgaaaatcatatttattccatatcgtttattgatgatttaagacatatttttatttaactagcatatgacaaaaatggatcttaattttcaatgtgttgttcatttaatttcttccccaacacaataataaattgatacaatatatatcatgatgactcataactcaatggtaccctttcttattttatcttcattaatcattattacatagcatgaaaaagcatgtacataaattgaaaaaaatccaactacacctcctaaaatctatttggtacactttttcttctgtcaacattttggaaaaaaaaaatatttgtatgttgtactctttattaaaactaacttacaaattttttgaaaatttcaaataatttggcatacttaaaatataataaaaaaattaacttttaaagaagtgttaccgtcaacctcctgttacaattttttagttattttttacgcttgaaaacatatgtcggaatatttttcttcaaattttttttcacggggttatttgttatgtttacaacatcatccctgtaaatttttgaaaattttcgaatagttta

SEQ ID NO: 218792 - DNA, 9061 bp, Cannabis indica
ccctagctctcaataccaatcattgaaaacgacatccaaaatcgagtagtcgcacctgataactaccataatactagggcttagatataattcacttcctgtacaaattctaggtctttcacctacaggtgagtgcacatttgatctacctatgatgacacagagattaggtcgtgaaacaacaatatgcataaatcatcatcaatatggctctcattagtacaaccaaaaggaataagaataacaaaagaacacatccccgttttattttagaaaatctgacagcataatggttgcattttaaataaactcaaaaatcataacctgcataaataattgtgcgaaaatatatttggcagtcagtgccctagaacagtgtagaaaaatatgtagattaagttttttttcaaacattttataattcataaaaattgggatagttattcaacacatataaaataaagtccaataattaagtccctacctctcccatatcgttaaactcttttccaaaatgatgatcctgagctcttaactcccgagctccaattgtttagtccaatcctagatatcactttaacctatgaccgtaaaatgtctaaataattattatcattgcattctacattcaaaaccgagcccaacaacatataacaaggctatattaaaagttttgagttctaaaacctcacctaagtgctccacattaactattggtggcggtagaaattggtgtactgaaaacgtcgctaaaaataggggtcgtgtatattgaaacgaccaccttgatgagtagatcagacccatgctaactatttttcaaaacaatgcccagtatcttcgaaaagtcgtcagaaagtagcagagcttcaaaattatcaccgagaaaagtagcaagttaggcgaaataagtttagtggatatttttctcttcaatgtgtgctgggttatgaggtgaaaatggattgtcaaacggaggtcgaaggtggccgaaaaatgcattcaaagtttgaatctcaaaactttgacccgcaatcttggtttaacgatgacgttttaggcgacactggtttaggtgtagggtcccaagaagtcaaaaagtgcactgctctggtgcgtgtggttggatggtgaacggaagagcttggttggtcatggtggttatggtggtttttttgatgagagagaaagaaaaggagaaagaggaagagagagagtgatctgcgtgagaatgagaaggagggaaaaagattttgataaataaaataagtggtgggtcccagcacttaatatataatatatagaaaaagataaataaatatttttttttcctactaggtattacatcgaatatttttaatggtgaatgggaaacagttcctttcaattgtgttatgctccttggtgtttggggagcacattaagataagtttcctttcacggtttgagagtatagaccttgccatcaatttgtgccaaaatatggcgcatgtcagccatgccttaaggaatgactttcttatgccactttgtactttatgttcaagttttagtccttattatgtctaactgaatctagtcctagctggtttccttgtcagattgtggtgtatagaatgaaaacccttggacggtcccgtaaaaccctcggttgggcattcttgggtgtgagtcatgactctaaatggttggttagtgttttcttgagtctcctagatgtgtcatgggtccctcaaataagataccttaactcatttggccttgctatgtctttgtaaaataccagagttgacttttttgaattctcaaaaattaagtataactcccacgtaccgatccaacagtcctagaataccaatagttgtgtttaatggaaggatcaaaatctaaggcctctaattataatgacgaatttttcctcggtaagggcactaatctattcctactactagttcactatcttaggcaccacgcactcgtgggtgtcgcgtaaccgcaacacgtcgaccgtatatcaccacatgtgtagtaacattagaatacgtaaggaccaaccagattgatatattcagattccatgttacctagatcgaggcatcaagtctctaaaactcccaaatagtgaaggcttggggtgtaaatgtccattataaaaaatttaactttgctcacaacaaaaacaatttctaactaaatgtacttttttgacacaacttatgacaattagtattttaatcaaaataaattatttgtaacaatattttaactggattagtataaaacttatgatttactaggttgaaatggagcttactgtacgaaaactgtaaaagcaaatttctcactttcaaatgtggataagttatgttttaggtagatttagctcgattggaaactatagcaatcttcactgttgatgattattgtttgatcctaaaaaaaaaaatttcgcataaacacttttttaaaaagtagtttggttcaaatactaattgtccgaagggatcaaatattggtaagtaattctaaccttcaaatcgttgtacaattatctcgttaattaatcttacttttcaattttcaaagctcacgaaaagtactttgttgctttgtttgatatatatatatatttatatatatatatatgtatatatgtccaaaagtattgtttttcttagagggttattgaattagtttatttgattttcttatttatttatgtatataatcctttcatctgctactcttcaaaatttgggaaagttggtttgattcctagtcttacttatttatgtatataatcttacttatttatttatcaatttttttatgaattttaaatttattccatttgattcctattcatattctcattcgcatttttatttttatgttttcattcctctgaactaaacgttacttaagtgtaaccatgagaggcactgtttaccaatgttaaattgttgggagtagatacttttaactttttgttttatttttatgttggtcctttcggtttccaaactcctcttgaatattgataatgataagtggggaagaaatgagtagtatatctttttctatttttattattcttttcttctttaactgagatatgaaaaagaaaatttcaagaaatatgagggcttttttttttttgaggaaaagaaatacgagggctttgtgttaggtcattgtttacatttctcttgtcatggttattttggtgctttgattttatttacatactacttggagtatatatttacttgttttttgtgtatttacttagattaggttttgagaaatgctttgatctttctgttgttttgctaagaaaaacaaactttgatatctatagattttaagaaggaattgaacaaaggtattgttcaattgttttgctttaaatatacaccaatgatcaattatgtaaggacattggttgtaacctagaaggaaaaactgggtcttggctgatcttttctctgcgtatggccacacagattagaaaaaacctaacccactgaccactgtctagtccattttttttatgaataaagatcatttgcattgcttaacaatcatataaacaacaattacaactcaataaaaacaaagctatacaactatacccctcaaatcaattattacaaatttttgtacaaatttctcagactcaattcttatcccccatagacattttactaggtaacacccctatcaccctattcaaacaatcaaactgaatttttcaaattgtgtgcttcacctgccacaaattttgattccataatacctcattcctcacctgccaaaggttaacggttgctgctaatatggacaacaacatgctttttcttattttgctcagctttttggctttagatatcttacaaagcaattcagcaatgttctcaggttttaccttccaatttagctgaattttaatttcctctaaacacttctttctgtaaggacaggcaaaaaataaatgcttggtgtcttcactatcttccccacaaaataggcaatgaagatctaaacttggatcaaacttcacaattctatcttttgttctaagcctctgcctcataacaagccacataatgaatctgtgttcgggagtacttaacctgccccaaacaaccttagcccattcttttttatccttatgatcaaacaaaatagtatgccccacttgaatacagtatttttgtgccactaaacaattttgattgatcttttctttaaatatactttagtctatctttattacaaaaagaatcctgaagccatcgagagtgaatgggcctcaactcaactggtttgtcattggttctaactgagagttgcattttcaatctagagtgaaagctcttaaactccttagaatagagagtaacatttacagaactccaactctagattgtattaaattagaaaagcatcccaagtaccacacctatgtggttagttagtccatctttggttactttcattcatttactagccattttttaaatgtaaactagcaaaacttattgttatgatgtttgctaaattcaatttttattctatatttttcaagtacttttatatctaatgtgtttatgtgttcatttattttttcctttcaagtacttatatatctatattaatgcctagtgattttttttttttttttcaagtttgaagaatttttagttttgttctcggcatgtgtgatactcattctaagcagcaaaggaaaagatcttttactaaacacaatttatttgattaatgtatgaatggataagagttggatggaaaatcaaaattcactaagtcgcgagtatgaagaaagagttaagttctttcttgattttgcattttcacataatgatttgaatgatttgatctcttgttcttgtgcgaatgcaataatatagtttgtttaagtctacaaaagatgtcgttgatgatttgattatacatggaattcaaaagacctattctacttggtgtatgcaataatggcttgtttttacttaaatttttgcttattttattacctaagctatgatacgttatttggcttctgaaattcctcttatttttcctaagtgtcgttttttttgctcatcttgatcacctctgttatttctctaatggtcttctccactaactcattggttttcatcttgccatacattggaacacaaccatttgacccaataggtcccttgtaatgggggcatcactctttcttatgttgaatgagtatgtatactttattatctcatcaccagggatcttccaggatggagctctgtgaaaaatattatatattttgatgatttgattatttagtttgatttgatattactttggttttggaatgaatttcaagagatcattaaagggtctaattgatgactgaattatttcaattagattttgagtttgtttctctaatttttatgtgacttaattttgaaaaaaagttgtagtgtacatttaattaaaaaaattactaatgacatcgttatctaatatctaccgtaaagtatatctaaatattttattttgtattaataatgagttgcgattaaaaagatattagtgacaataaaaaattgttaatcaacaagtattagtgataaatttttgttgtgactaaaaaaaattattagtaagaattttttgttttggcttaatatgtattaacaataataaatattgtggctaaaaatatctaagttgtggctaaaaaagtattagtgacaacaaaagtacttgtcactaaataaatattagtgacaagaaaagttgtcaccgaagatatataatttgtggttaaagggtagttgtgactaattgtggtgacatcgtaacaactattagtcagaaagattagttgtgactaaaagcgacttttagtcacaatattatatttattgtggctaaaatttttactcacgaactttttagtcacaatctcgtcataaaaaaaattgtgactaagacttttggtcacaacattttttatttttagtcacaactatcacaactattgttctgattaaaagtcaaattttttgtagtagttatccgcatttctgcataggatatgcatggcacctagcaaagccctaatgggttaggcccgtgacgcccatcacatggtccaagaatatcaatgtgaatcttttttaataattactttaagtatggatcatgtgtctaggttccatataagtctccagattcatgagcttactggatattgtaaagcttttcaatggcagcttgttgaatggtacataccagatggtacaaaccagaaaacagaggaaaagtaaagagaaagagagaaaataatgccaagaaagctcaactcaacagttggcttttacctctttatttatagtgtaaagtacagatcaagatacaaagaaatgcctaacaaattttataacaaactacatttaactactaactaacataaccgtgtaactaactaattagttaataggtttatatcccctctcaaacgaaacttggaagtagctaagtgaagtttgttctttaagtacaaaaatctatctgtagacaatggttttgtcaaagcatcggctacttgatctaatgaaggtacataacgaactgaacgttgtcgtgaaagtatttgatctcggactttgattatcaacccatagaacaggtggttgattaattgagatctgtagctcagacagtagggaagtgatccacttaatttcagtagcagcattagctaatgctcaaaattcactttcagtataggaacgagcaaccacttgctgctttttggcggaccaagatacaagattattgcccaagaacatgacatagcctcccgtggaacgttgatcatcagacaactcgcccaatcagtgtcactatagccatgaagagtcatcgaatctgatggtgagagccataaacaatcggttatcgtccctttgagatatcgtagcagccgcttacatgcttcccaatgcttgttgtgggtgcatgaagaaattgactaagtttattgataatgtatgcaacatcggttcttgtaaggctgagatattgtaaagcccccagggtacttctgtaaagagtgatatcttctagaggttcgccatcagtgagactaagtttggttgtagagcttgtaggattacgacatgacttggctccttccatgtgaagacgagttagaatgtctgttatgtacttgctttgagtaaggtacataccagtatgatctctatatatctccaaaccccaaaaaataatggacagaacccatgtccttgagtgaaaattccctgttgagatcagatatgagctgagaaattagggaagaattcggtcctgtgatcaatatatcatcaacgtacaccaataggtaaactaatgagttgcccgagccatagatgaataggttgttgtcagaccttgaggcttgaaaaccccacttaagtaaggtgcttttaagtcggccattccatgcccgaggggcttgtttcagtccgtataaggccttgtgaagatgacaaacgtgatttggatgttcaggatctacaaacccttgtggttgtttcataaacaatgtttcttcaaggttaccatagagaaaagcattgctgacatctagttgtttcactggccaatttgatgggacagcaatgcttaagacaatgcgaacaatggttggtttgacaaccggactaaatgtatcttcataatcaattcccggagtttgaagatatccttttgcaactaaccttgacttgtatttgtccaaagaaccatcagcattcaactttattctgtgaacccacttgttatcaatgacatgcattgatggattgtatggaactaatgtccaagtttcttgtctcttgagagcctgaaattcagatgtcatagcaacaagccatttggaatttttaagagcttcttttatgtttcttggttcagtaggtaagagtgattcgggtaggggatgtcttgttgcaaggtaagctttgggtttccgaataccactctttgatctagtctgcattgggtggatattggatcgggtaggaggttcagatgctggatttatatgggaaataggcagctctgtgggtactgagttttgtagagaggtattttctggtgggatttgtgatggttcaacttgcataccatgagagttatcagcaactgcagctgattgtacacaagtagctgaggtgttgcaccagcaacagctgtgggagttatatcagcaggctcagcagttgaagcaccaacatcaggaatagaagtaacagcaacatcagtgtgagattgtataccaatattaggaacaaaaataggtatatttgagtgagaagatacatgatttggtgaatcagagactttttctgaagaaaagtttgcaccggggaagttttcttcattagaaatggcattgcgagctatatagattcttccctctggtgcttggcaaatgtagcctttgtgatgagatgaatagcccaaaaagagacattgttgtgttctaaaatccaacttatgcttgttgtatggcctcaaatgtggaaagcatgcacatccaaatggcttgaggatagagtaatcatggcttattgtgaaatagtgtttcaagaggagatgaccaatctagaactcttgttggtaaccggttgatggtgaaaacaacacaactaaaggcatgccaccaatagttcattcccaagccagcttttgctaataatgtgagaccggtttcattaatgtgtctatgtttcctctctgcccttccattttgttcatgagtatggggacatcgatgttgaaaatgtatcccttgatcttcaagaaatcgtttaaaaggtctatattcatgtaatgaccgctttagtaatttagattagtaaaggcaattagcactaatttttattattttattattatttgtcaattaatttaattatggaccccaatatttagaaataaatattagagttataatttctcaattccggag

SEQ ID NO: 218793 - DNA, 4007 bp, Cannabis indica
aaaattttaatgttaattttatatatgcgtatatattttacgtgtaataatataaaatttaattactcatccaaactaaatgaaaatactaattagttcgattggatgttggatgtattggatttttcgacaccccatccaacatttgattcgattaaattagatattcaaaataacatatccaatctgatctgatcacaattggatgtctattgtttggcagtcaattgtaattggatcagtagattgttattggattggatgatttatgcacccctaaatatgggctgtgcaaacttattaataaataaaatatatgtataacatatagtttttcttaattattttttttattgctttaatagtatttgaatcaaatttgacacatgagtaaatttagctaaaataatataacacattttttaaattttatatacattggagaggcatcaattatcggataaaaatttgtcacaagctattactactattatatgtatatacatttgtaattatcactatttttaataaaatatattaaagcaagtatattaatttactattaggctaggtgtagttttaatttttcttttcttaattaaataaattagagtttttttttataatgaaaataaatttgagcttttttatctcatgaaaatatgcctttacgatttctttcttaattaactacatgtgcaaagtcttataataataataataaataaagaaagaaagaaaacctctaaaaaggggcaaagtgagagtggggagtagttgtcatttttccacaagttagatacccatcttttaataaattttattatttttctcccattcaaaaaaaatataaaataaacatttcttatcatcaaagtcaaaatgggaattctcataatatatagtcaaacaaaaaatgcatttagattcacaccctacacattggtcactaattgaattttagtcaccattcatttatgttctatacacataagatagtgatccactttctaatattttaaactcttttattattattgcttttaatctttatatttattaatgattaattatattttcatattcataatttttgtaagaaaatgcacttaaaataatgctccaagcttatccacatatttcctttgtttatatacatatttcattctattttaaatgattgaaacaatgagcttattataataatagtttagtaatgatgacaccttgtctttcatcatcatcacctatatattaagtgtaaaacttgattttccacactaagaaaaataatatatgtataatttttatacaatactcaacaaaataatataaaagtgcttcgctaatacactcgaaaataattcgacatcaaaaaaattaaaaatttattttatttttttttatgatcgtttacgttacatttatttaaggcatagtgtaaatttttaaaaaattcagaatatttacaatataagtagcagtgttcaaatagtactttatttcacacgagtataaaataaaatattcatgtatacaactaattgtttgaactatattttcagtgtgttaaattttaccaaattttttaaattgtataaaatattttaaataactacaattttaaaaaaaaataaaaaaaaaaattaattaaaaaattcaaatgaatatactgaaacagtttgagaacgcatatacgctatttttagggagtacttgcaccaaaaaattctctaagatgttttgtttgtgttttttgaatgaaatttgctaatttttcttactttgaatttgcaaagtatgtgttaataatgaatttaaaaggttgaagaattggtttaaaaatgagaaaatgatatgaatgagattaatgcatgatgttgaaaaataagaaacataaattagtccaaagaccaaatgatgataatgagagtttaccaaagaattaatagtagtttgtaagattataattaactaatataaaaaagaaactatactcatgaatgaaaaggatttatatacgtaaaagagattattatttatgacatactactaacaatttttgatctatttgcacaacacaaattaatttattttaaaaatcatctttaatcgattaaattttcatctaatattcacatttttagcggcttgagttcctaattcaattaattttttatttatcgcccgacattaaaagaattttttggtgtggtgtggggttcaattgggaggtcaattgtatgttattttttttattcattgtataccaaaaaaaaaatgaattgtatagaaataaaatagatattacatatttgtatactatattgttttaatataatataatattataacaatataaatagatattcttaaacctcataattagtttaagaatgaggttttgctctcaagtggattcgggtctggtcgttctatgaagaatgaccgcctgttcgccttgattacatgcagaaccaatgatttttctgttgcacgacacatcgatttcttatctctttcaaaaaaaaaataatgttctattctttaaattttgagttctcaactgtattcatgtattatatatatgtttttttctcataaaatgggggtataattaattaatttgatactcttgtctttttatatatatattcttagtggggttgtatcgaattatttataaactggaagaatattgttattatatttatgttatatatatttgtttacatttagtgtagcatgtaataaataagtgaaatattattaattttaattttagacgatcagagtcaaaagagtgtaatgtaaattgagtagagggataaagtcaagattatgagctttttcatcatctgaattctatgtatgcatcactttcacttttaatttaattttgtcaagtcaacagtcaaataatacatttagatttacacatattagtcaaaaaagaattcgttattggacgtcggtgatgtttaacactttttatagataacgtctcacgattggttgataatatttttaaaaaattattttcttaagttatataggactcgatatttaattacaccaatagcagtataacactaaaaatactagacaccaataatactttttagtacttctacaaatgcatacattaattaagacacaaactcctacacttgttccttaacaaaagaaaagaaaacctcctacacttatggaaagttaaaatattgatgttgtagaataattagcatccttcaaaaaacatttaatgaattttttatatgatcttaaagtgtacataattaactaaaattagaacacacaatatatttaatgagcagaaattatataaaaactacattgttatgaatatataactaattttattttaaaaaatatatatacatataaataatttgcactatataatttagtaatactaaatttatttttaaaaagtagaagttgcaagttcaaacccattacccaaatttgtaaataacagaagaaaaatcaaacctaataagactgcacatttattttgtttggtaaaataaccaaacattgtaggccaaacagctacacccataagtggtctgaagaacatgtttggtattatttttgtttttttgtttttaaaatattatttttagaaatgaaaacaaaaaataatttttgaagtttttaaaacacaatttacatttgcttagtgttttctaaaagtaatattgaccaaaagttaattattttttaaatagaaaacaatattttatttaaaattcttatttttataaatttattttttcaaaactattatcaaaaaacaagaccaaacaagtcttattatttttaaaaaataatttcttattttaaataaaaaataatttttaattatgatgtcaaacatgcacctattgtcctaccctgtaatgtcattgggccaaccgaaatagggttcatcatttcctagaccaaacaaccaactcaagtcaatttttttcaataataac

SEQ ID NO: 218794 - DNA, 5424 bp, Cannabis indica
gagacgaaatccttttaatggtaaaacccttgccaaagcaatccagaaaaactctatgaaagttaaaaagtaactttgttgagaatcaacaagtcaataaatttattttctttgttgaaagctttgaatgtcaactatatataaaaagaaaaaactatgtaatatcgacttgctaaagggaatgagtttataatctcatcctcacgatatacatgtaaagtaaaacccgaggactaaaattaatagcaggagaaatttaaccaaagaaaaaaaaggactaaaatttacatgaaaatatgtggtttttttgtgtataagtttgtttagtatctccaagatcctatgttggtctttaacaaagaaacatatagtaactcattccaagtatctggaacaccaggcaaacaccaatggctgcaatcttgagaatgtacagcagcaatttgctcctctactgatttatattccattcgataaatcgaagggtgaccatcttttctgtaatctgtaagcctgcttatgtttagatatgtcactggagttttcatatcttgaatcacatactctaaagccctcatctttttattgtacttagctaaataagtgttgttgaaaatcggctcggtttctttgtggcattgtcctcctgagttccatggccctcctctgccaacaagattaaagttcaacattacctttcaatagatcttatagctaaaattacaagtgtttctcattacctgaaatgggtgactgaatatcctctaaagaagacttgtgttctgttgctatcaacatttttatcaacccatttgccccaagttctaagggcccttgtataagcttcaagcacctttaatctagggtgcacataattgccttcttggtagtaatcttctctgttaaaccaccacatgtaagaatgaaaacgcatcagatatctgtgattatgattagatcacagataatcaaaaattctaaaacacataccctttagaagttttctcatgggtccaccaatggccagtgttgaagattaagatatcagcatcataatacattttagtagtctgatccatcaaatctagtcttagagtctcaaatgatccattcttgccattgaatgaagattgtctaacaagaaaaggagagctaacaaaatctacagaacaattatagtcctacaagaacacaacaaaaggtgttagaacataccatttgctgagattttggtactgaatataaattaagaggaaacttgcctcgaatctgaatgcataaaagcctttcttcttgaactctctcttccccgaaatctcataaactttcttcttgtttttgatactttggcgaagaatacaaacaagagactcccacatgtttctgttcaatgaatcaccaacaaataccaaattctttcccctaagcctctctagaaaatcagtcgcattaagactgaagaagacaacacaataaacatcccgaaacaaagtattttagaatcatatattcttactcaaaatctgtatcaataatagaaggcattttctcatatgtagaagtataatttgaagcaatgtagtggagcccatttgaacaattttgatttacttaaaataatcttaaatggtatttctaactcatgatattcctgctttttccttgtaaatcaaaatagtatatgcactaatctaataacataagtaaatgcctaataatgatcaaagtgacacataaccttatagtggtcattgccaatgattagtaataacatcaacatagatcaaaaaaggaagttgtatcagtaaatatatagatcttaccttggaatttcacacccatttggctgccatttccatttgacatatccattgtctggccttccgtttaagtggcaatcaaaatctctgtcaatatgagggcaagagcccggaggatagtaaggctttgaatcatctctaacccatttaccatcaaaaatattgcatttctctaaagaatcactctttattttctcaacttgagaagtaacattaacaataacattgcccttggtattgtttcctctgcctttattatcaccatcactgaaatttttcaatgacatcacccctgaagttgtattctcaatagtcacatcttttccagaaaagcttccattttctactttttcaaaatccgatgtaatattattgggatcattggttttctgttgaaatcttacatcatcaccattaaagcttccatttttaccctgttgggtgagattggacaactgggttgtcttcaaaaccgctcctttcccatctgaaccttcaagatttactttactaagttctgaaatggcagaggaactattaccattaccagaagaagaagagttcacgccaacactttgaaatccttgcaacatcagacccttttgaaattggccaagataaagcacagcaaaaacaatgagagaaatcccaactcccaaaccaaaccctgaaagtacttttcttctcagccatggaaactgttccccaagtgaaagtcttttcaagttcatggcttgagtaaatgcataacaattaaaggttaagaaaacagtggaaacaaaactgtgtttcgaatggtaaagacaatgagattgagatctatgaggtcgatattcgattataacaactggcagagtgcgtaataaatattcagatgttcatatgaaaataaaaataaagaaataattttgataagtgtgaatatatgagatcggtttaaaggttagaaaaagctttacacagtgcttcttttgcgtggatacacagaatctgagaagttgaaaatggtaagaactgctaagacaaagtgagttcattgaagtaccattttgcccatggtaggttattgattggtttttctatttttgaaactaatagcttcatttgatagacttaggtctttttattttaattctatttttaaaattaagagtacatgactgactaacatgtactagagaaactaaaattgcaattgttgacttttatttaaagaaaattaagtcgtgaccaatcatgatgaattaaaataattgttactattttgcattttggaaaactaaaaactatttaacagaatatcaaatgacaaaatgcatgtgggagaattcatttttaatacttagattcaactctatgatgctagagctatttaattggtaaaggataagaaggtaatttaactaggggggcaacattttcagatgaaattaatgaaagaaaaatgaaaaattaagctacaaattaactgtcaagacaacaatcggagaccactcccgccgacagtcttgggacacgtggccttttttttttataacgaacggcgatagaagtgcatgcagcacgtgttcctgtccttattggggtccacattttaccaattatatttggacacatcagcagaatccgctactcggcgctgcactgaaccattttaccgccctttagtattattttacttggatcaatttataaaggaaaggaaaggaaataatagaacctggcgagattccagaaaacggcatcgtatcaggcacgaatcgcgtgtagatatgatataggagttatatgggatgtgactgagttatgccatctaaaacacgctgagtttggagctttattaataaaagtttagggaaaagtgactaagatgaatgaaatgaacaaaaacattatgtatcagctagtatcacactaagctcgttccaccaataacataccactaataggaataacataccacaaatcatcggattccatctcaaaatcaattgataatgagtggagtagcctgtgtttttatttgtggctcaatacttttatatttaattcatgtgggacaatgttctctaataatattaactctataagtttcatcttctcctaaattaaatagaatataactgtctctttgtaaatagtcttatttattgacatgtgttgggtttttttctagtgtgtttatgtgtttcaagtgtcttgcatgctagggtttttgtgtcaagttctttcatgggaatcaaggctagagtttctgtggaagttttgtagtcacgttggtcgtgagaattcagaggagttgtaaagattttagaggtcaactatggcttctaatagcatgtctgttcgtgatatagaggaggagtgtgccaatattgtgatggaaggggaagagagcatgatttcatatgtgatttccctgagaatgaggagcaaaagattgatgagttttggtgcattgtgggtcgtttattgactcatatatctattgattttgacgtgatgaggcacttgatggcctcgttatggtagcctggcaaaggaatgtatgtgaagctgaatgttaatcgatatttattttaattttatcatgatctaaatctcaaaaaagttgtggaaggttatccataaatgttcaatagaatgcaatttgtgtttgcaagattaaagagaggggaggatccacgatctgttgtgattaataatcaagatttgtgggttcaagttcatgacttgcagtgtagattcaaatctagccatgtattatgtggggtggctaagtatattgacactcttgtggaaacggatacgaaaaatttttaagggttgtggcgtgattatttgtgtgtacatgtgactgttgatattaccgtctccttgaaagacacatgaagattaagtgtatggtaggtgagttattttggaccaacttcaagtatgagtttattcccactttttgtttcatctgtgatattattggtcattctgaacagttttgttcgaaattgtttgagttatctccagaggacgttgttaagccttatggtacatttatgagggctcaacctaaaaggaagaaccacttgattggagcacactagctaaggaacggtacccaagatgatgagcagcagtttgattctagtaatttgtcaaaactatcctctcccactaataatttgcttgaggaagggcatgaagaaggtagggttgtggtggtgagagtgggtcctcaagttattatatctcaaatggatgaggatcaaatggatgaggaaggatttgagattttggtggttgcaattctaaatgaaagcgtgttaaagggatttttagtgtagactctaatgtggatgcgaatatggtttctagtgagacagatgatgtggcagatttcttggttcaaaaaaataagttattggcagatttcactggtcagacccgccctgcatgatgagtgtccttagttggaactctagtgggcttggcaaccgacagaatgttcagttccttaaagacgtctttcgtcacaagagatcagtttttatataagaaagatagaagaagaagatgcacaaaatatattatacaatatataatacat

SEQ ID NO: 218795 - DNA, 2079 bp, Cannabis indica
ccttatgtaattattcctatattaaatgcaatcctctatttgatttcagaatgaactagactattttttttaataaaaaataaataaaagattaactaaatttaaattacattttaataataaataattataatggccaaccacatgaagagtttatgtttaggagtaataaatctgctataaacctcttcataccaggacattgtctcttgcttaggaacaagatggccatacttgtgtttgattgtgtacctgctcgacatgaattttttgatgttaatgtattaattgagaatttcattaacattagtgaggcttgataacaaattctatatatgaatgttagcaattaatgatatgcgattcgatgtaagaaagtaaagaaaagacaacgattttacatggttttgtacgagtcaatattatttttgaattttcttttgatgagtttacaatttagtaaaatttctctaagttagaaaattaacatcatagaaataaaatagcaactactttcgatctaatccatacaatggttataaaatgtgaacattctccatctttcatatatttaactaataagtgagaaacatacataactgcttgtatttaaataaaagataatcgatgtctttgacttggtcatagtgtgttatagtcgagcaagttcatataaggactcttcttcttggaaaactcatatagaaggaagtgtatattaggagtaggtttcttgaagattggcttgattcagatcactagccttccaaggtgatcaccaggaataagcttaagcgagttaagcttctcaacattactaatatcaacacttggaaagttcttgaatgtcttgacattcttagaacccctagcccatgtcatgaagtttccccaggcattcatcaggagtgagattagttgttttagactatgctttaggggagattaccaattaaactcaagaaggaggttgataaactgaacaaacttaaagaaactagtgaacttgaagttcaaaatagaacctctgaagttgagaatttgaagaaagcattgcccgaggaaaaagagaaggccaagaagggtttggaagaccatgaggtggaggtcaagaagcggatcaaggtaatggctcaaaaaatctctttatagagtttggcaaagcaataagggactgaatttcaacctcttgcagccaaacatcaagaggagcattgctatcttcatttcccaccaactcccaattgtcttgaaaaatatagctcccaaaaccatcaggccccagagccttacctctagggataggaaaatgtctctttcttcactttatctttaaaatctctgaattaatagctgattttggctatttgagagaatcaagccttgtctaattactttggatatcatagatcttctgttcattcatttttttttatcccaatagattcttgtaataagtaaggtaaacattatttgaggctgaaaaactggtgatagatgtaattacaaagactttaggacacagagagatatgtcacgatatagcaagctatctacaggcttctcaatgatgtggaaatatgataatagaaggtaaggctccatctaaacctccaacgcttagatctgctaccattaaaaagaaccttgccagctcattcgaaattgaatagaataccaaaattaaagctagcttcaaagacatagaggataaagtttcattttggactccatcaattgtatgctatgtcctaggagctaatccacctttggctattctagatgggtttgtaaggaggattgggggaataaggtggataaaagtgtatgttggtgtatgtatttttttcttaattaggtttgattctatggagacacgtgatgatatattgaatggaggttgtatatcctcttcaacaaaagacctgttataatgcaggcttggatccaaacattaactttaggaaaggagttgttagagcagtacctatctggattcatcttgatgatcttgagctagaatattggggagaaaagtcattattcaagatcattggccagattcgagaacctatcatg

SEQ ID NO: 218796 - DNA, 4715 bp, Cannabis indica
caattatcagtgacagattctagttttaaaaatctaccggccttttgtctcaatttgtcgaataccttacacgacgattttctattttcggcactcactgaataaccactctagatggtttatgctttcccttgttcttcccatcaatataaggccactgactctctctaatcaagacgatgaaacctaataaaacactctatgagaaccaagtgattcttaagagaatgacaaataatttaattgtacaacaagcaaagatacaatgaaagaccaaaattatgatttctgaaattcttattgaacttgctgaagataacaaactcccaagcttttgagacgcatggtctctccgaaattgacctagacaaaatccatcaaactatcaaaatgattgttctaaccaaacacttaccaacttagggccttcattgtaatcataagatagtgctactgctgccaatgcatccatgctgttatgaattggtaagtgtccctagaaagaacccaagagagtcaaaacattcaaatgctgctaagaatataatttcatatctgtatatagttccttaccttgacaggcattcttggtggcttgttcagaacaagtatagcagaatccttaaattccccaagaaaacaaaaacaccataatcacttaaaatgcaaataagttttagaaatatttaaataggaattcaactaataagacatgccttgtagtgaacaagcctttgcaagtaagctatctcatcagcatttgggtaaagtgttccacttggaatagtatcaaatcttctggaaatcctactctctgcaactgacacaggtacataaactctggtcccttcttccataacatcattgggctttatctgtagtttattcatatctgtagtattgtagattaattaaacccaaataggaatccatcacaccaaaagatttcataataaaataaactaaaaccaatgtgattaacttctctaccttcttcattgtgttagcttctccatctttatcactcatggagtcactaaagtttgagcactttacctgaacctaaacccaataaatttataaaaaaataaggcataattacattcaaggaggagttctaattacaacctacttctcatctgagtttaaaaactcagaaaacacatcaaaatacttttgttctattttttttttccataagtgtttcgttatagttccaatatcttacagattctgaatagattgtggtgccgaaagctggtttgaagtaaattagaatatcagaaactttattgtcaattgaataaacttgaaaattaacaggtttatattgtcactataacaaacattgtcattaaaaattccaaataaaaataagatcttcacaataaaaatgataaatttatgggttaaagatatgaaactcacaagacccttgttgaaatgggattgaacagcattatcaagtagttcatcaaagtagtacttaacccagctaatggcggtgacatgttgagatcttcccggaacggtaaccgagtttttccccggcaaagggagtccggggaacggaggcaaagacagaacttgacatggttttgggccttcttttgggccacccaatcgggctacgttattggacactcggataatgggctgagccccagccggcggcggtggacgaatccttgaatactgtctgagaccaagccagagtcgtcgattaccggcggttctccacattcttctttacgtgaaaaaacagctcaagtaaagagtttgaaagccattaactcaatttagtaagaaaagaatatttgggtcatccaaacaaggccttgttatggctttgatttgagaattttcgataggtgaagatacagtccggcggtggagccgataacggcggcggagctaggactgaacagttaataagaggtttggttggagttttatgtaaaaagaaagtgggcctaaacttgggtttgggcctgaacttgggtttgggctcttggcccaaaattaaaaaattacactctatacccttttgtactgtagggattagttcacaaatatacaaaacaaaaatatagttttatgaaattttaaatatttttacaatttttatgatttttatttatggaaaatacaatcttttaatgtatttttatcttgtacttttgttaattctttaatgataaaatagtgtaagtttgtatgcacctatttgtaaaaggttttgaaaaataccataataaaatataaaataaaattaaaataaaaaattataattaattatgcgcgtaataaaaatattaatatttatattatcttcatcctattatgatatgcatgcaaccatgcaataaatatatatttatatcatataatattaaagtaatgattgtttactctaattaattcatatcataattccaacataatagtcatatataatatagatagacaaattcataataataataatagcatatattttttataagatactatgttagaaaaatattgcatttataaatacaattaacacactcaatcttttattttatttattaatttattgatcttaaaaaaacaaacttatgaaaattgcctcctaatctcagcatgacaccaaaaaaggcattaaaggccacaaagacagttcatccatacataccaaataaaaagaaaaaagaacacctcatttaagttattttattaacccaaacccttttttagaaaattccatttacaaacacattgtacatattcactaaaaaaatcattgtactatactagtgttttacttatttatatatataaaaaaaaatacataatttttttattgagctataaatttgaaaataggtaataaaaagaattaggtaaaataattaatccaatatctaaggttgcataataatgagagtaggtcacatcacatgttatccttttttggaatataattaattaaacagttaaaaagaacataaacagagcattcataatgattagttacacatatcatagacacacttgcctcttaggttctttctgtcagaaaacaataatttattaatttattaaaattaattctattatttttaacaatggaaaaaagaaagagaccatctatggactcataattgtgttctagtaaaagaaaaattgtttaggttaatcttctacatacattttttttttccatttataatgttttttaagtgtataacttcttcttcttctttctttgtaaggtgtttatatttataactaaaaatatatgttggatgtacctatcataggattactagtggcatatacttaccttaatttttatttttatttttgagataagagttttacccttaaattttaatatttaatttgttcggtttataatttagtccttttctattttatttttatatttttattttttaaattaattttcattatgttttaatttttataattaattgtaactatatttgtatttttttatttataaattttaaattacttatagtataatattctgatttataatagagtaatttacatcgtaaatacttaagttaaactcttaattgtaaatagatacttaagtttaatttttggcagttatgatatctaacttatatttctgaaacttctgtaggtatctaaccgtcgaatgtcaagtcattatccacgtatcatttttttattggtatatctaaactattttttttaaataaaaatttaatgacctggaccaattaaggattatcacatagtaatttacttaacacttaacagttaggtacctaaaaattcaatgaactgaactaatcaagaattgtcacttgacaatttacttaacacttaacagtcaggtagctacaaaagttttgaaattaaaatttaagtattattattattgctaaaaattaaaatttgttttctgaaaattactaaagacttctcaaaaatttatcctacactatcattaaatattttttcttaaataaaaaaagaaaggtgagccatttaatttgagacaccatctaattcgaatgatactactaccactcaaaaaaacagttgtagtagttgtataattgtaaagacaacccaaaattttgtcttttttattaaaaccaaaaaaaccaactaatctcattcttttatcttattatttaatttattttaattaaattattaattaaccaaaaattaatatgctaccgacggtttaaagctccttctacacgtatacaaacttgctttaactcaataaatataatatatattttttataaattaataaaaatattcaatggttttgtaagcaaagcaacctagtcataataagtcattgttgaaatattaaatttagtcacaataattaataataataatatattttcttcttattatgattattattatatataaaaatattgaatggtctcaacaactacttttttagctgtaattttggtcaccaaaacaactcactacttcacttatattacttagtgttatcctcacatgtctacatgaccattttcattgcataaatatttaacataatattcacattaatactttaaaataacactttgatataaaaaatgacttttttatttaaaaaaactatcataatttaatttaaaagattatgtattaataatttaatatcattgttaatttgatatattatataa

SEQ ID NO: 218797 - DNA, 1734 bp, Cannabis indica
tgatgtttcccccttagcaagtgagtgtaacccttacaaaagtcttgctttggaaagattaccttcaggccgaaagtattggtctgattcacccaaaggacttggtggaaattctccaatcacacccggcccttcaaacttgtcttctccagtagatttggttagagctgggagtagcatgagcgaagacagtgtaatgtctcccagcagccaaacagatgcagataatcgaaacggtgctgtatcctttgatcagcataatgatagaaatgccggtgctgaagaaatatgtcctaataacggagaccctccatctgaaatctttagtgaaattatacaggatacagattccgtatacatgaaaatcattgtcgagaaactcgagaaactattggtgaaacaacaaaaggagctagatgaactcaagaagaagcatgaatcagcagtatcacatcttttgaaggaactttcaccgattacccgtcaaaagctttcagaaaagcttaagggaaagattccagactataaatttcaaaccaccaaaaaatttcagaacaatgcttctttttgaatagaagcgacatgtaccccacgcctccaaccaaagtgcaggacgattacaataaacttcactaggaaatggatttgttcatcttgctattgatggaatttttctagagagctcaaagagacttgtctgctcttaatgtgtggctctagtttgaaagggttctttctggatgcttattgggaccaatggttatggattcatggagccattttttgtgaaatggatcaagtttgagctcaaacaatgtaaaagatcttactactgaagtaagacactgttgtgataattcaggtgtgtattgtgtacaatataagtaaccttacctaaagatcgaaagctaagtatagtttgacacgaaacaataaaaatttatatgaatttatagagatacttgtacagataattgattcttttgtttcagttattaccagtttgcttatgattttcattatttctttatggacagcatatatgtatgttttgtattctcctgctccataaggaactaaactaataatattcttagtaacagttaaaagagcttttacatgtggtagtactctgaaataaatgattataataatgacaaataaataattctttagattataatttttcttcacgtaaaatgatgaagtttcatctttatttagaaaattggtgcattttcaagtactatattgtgtggtggtggatcttgacgaggagccatgttttcccaaaactagagtacctgaatcaaatacgtggaagaagctgaattaggcctagtgggccatccaaaaggttgaaatcacaatcagtcgatttcaatttctattagccaccaagaaattcagtgtcgttcttccaagttccaatggccctttgactctcatgatattcataattcttagagcatctccaatatttaaacttaaatatactgtcaaaacaataccaaaagaatataattttagtattaattttttttctattccaatcacaatattaaaatttacactaatttttttttattaaaaaaaaagaaaaacacttgaatagtgaaatatagtttcgtactttgcatttctaagaaaaaaaaaaaaagaaagaaacaaaaaatactctcatcttaagaagaggatgatccaacatttctcattaatttttcttcccttaaa

SEQ ID NO: 218798 - DNA, 4821 bp, Cannabis indica
aaaaaaatatataattttattgttattttgggttcaatttgttaggctatggcgtccatagctgcctctgctgatgcagattggaatgccatgaagatgaggtaccacactcctttcctctcttctatctctgtctctttttactggataaattcaagtttggatttattattgtgacttagaggtgtataaaaattctcatgctttcaaattattcaatgttgtgattaatgtatattttactttagaattgaattggagctctaaagagcttagagctactgggcaatatgagataatgcatttcatttggttttgtaaggtgaagttgttgtatcactagctttgtggcttttcttcacaagaaagttctttactttctaaatcccattaaagcaagattatgatgacagtgcttagtctatagactctacacacctcccatgttatgatggctggtgtagttatcatctactttttttgcattcttatgtgttatttactacctttggatttattttcagtcttgtggttttgattgtaattagcattttctattgtaggagttataacttaacttatctattgttattgtatatttgcttgtgtttgtatctaaacttgatatttgttttcttcacatcctccaaaataaacacaaaccatcttcatattaaatgtcactttccttggaatattagttggtttttgttacttttaattggctacattccatgtttttcctggttttttggttatattgtgtatcactgatctgatatatatatatatatttcttttagagagaaagaattggctgctgttaagatcaatgcagctgatgtggacataattgcaagtgaactagaggtgagttagtttcttcttatgtggacacaatctccatttttgtgtagatttctacttatgtaatgcttgtggtggcattttctttgggttacagatggacaaaaaggttgctgagagaaccttaagggagcacaaaggtgatgctgttgctgctattagacacttactccattagaagaaaaacatggttgctttcagctaattacaattaaaaaaaaatgatcacatcctattgtttttatctaaagattgtacgagttttgtttcatcgaactttgcatgtgttattaactcaagacatctttttgttctgatgaatgtgtatctataaatataggggatatcttcatgtagttaattgatggcaaattagaccattgtcaaatgggcttgatttcattttaatccactttaacatcattgaattatgtcaatgaacagtagtataaaattgggtaaatacaattttagtctatcatttgcaaaagttacaattaatctaaaagtgttatgatgagattgattatactttttgaatgtggtcaaaaccacttgaaattggttgtgaggaagattgagcctaaggtatatttttaccattttgaatagaaggttctatggggccaaaatagtatttgcctaataaaatttgagaagaaagtgtgtaatgtgtgaaacacagtcaaagatttgatgatgtcattgcatcattatataacaagttattatcaccataggttattatattggttgttgccaggcaatgcacatgcaaattgcctttatggtggcagaaaatggaccaggcacagcactagtcagtactcagtgccactatatagagtatatttcatctaaacaaagaagacccactaaagtgtatttcatctaaaaataaaccaagtaaaaaaaatgcagtagaagactcaattaagaactttaatctctaacaatattgactatgactccttttcttttcttcttttgtacaaaagtcgtcagcccattcttctaatacaaaatctcataataatgaagaaaaaggtggcacgtgattatacatttcgactttaatcccaaatcatagagcaccaatgacccactttgaagaatttttttaaatgatttcagtgacaaaaaacaaccatcacacaatcccaacccaagccaatcaacgttctagttagttaggtagcacacatgaatgaatgacaaccactctttcctcttcaatctttttttccctttttcccttttcttgtctgccaaatggttagccagattttgagttacgaatttcgattcaatacctaccacaaaatgtttttgtggctaaatgaatggcacccgtctcccttgaaagtctgtcaacgaaagaaagaggctgcttcagctgttgccatgttgtgaatcatttgaaagccgaggctacccttccttttgactttgagtgctctctcccgcagcattacgtgctgcttgagattgaagggcgtaatgtctctgcagttccttgaacctttccagcagttcttggaacgatggacgacgagttggatcactgatgttttgatcattttaatgggttaagattcaagccattttgccaaatagaaatcataacataatgtgattttaataaactatacatatggtttgatcaactgaattccaaactatgcattatattaattatgtattaaacaatgcaaaacaccactcttagggggttgcagttgcaaatttcattaaaatgaatgaatgaaaaaaagaggtctacacatacctatgccagcagctttcaattactgcagcccattgtggatctacatcttttggtatctccaacctttggttcataaaccccacagcaccaattacctgaaaatgtcaaatattgattgaggtttatatgggtgcgttatacgtagtacgaagtagcatcaaggctattccctttaaacagcatagagataagactaaaagtacacatttcatttaatggatcttataaacaacaaggatatttatttttaaatatgattaatagaaaactattgaatctgaattgcttcttgactatattattgcagtacatattgcaaaaacctacctgcattgagttgagattatcccaaggaatcttctcggtagcaagctcccaaagtatcacgccgaagctgtatacatcagacctaatgttttccagcaatgaaaagaaaaaacataagcttacttcatatggtctgtatatcctataaaaacgtggcagaaataacatgagcataaagattctgctacattattgtcattaatctctaactagagttaagaacatacttctcatctgagggctcattacgaagaacttctggtgccatccattgaggctataaaacagaaaaatggtaaaattgttaagcacaaatcgcttcataagtcataaaatcaaatagagaaagaagaggatatcatgtttgccgattaaagtaccgttcctttcccagtcttggtcgtgagatatgtttcatgcttcagacgtgaaagaccgaaatcaccaacctgtttcagatgaaaattaataagcttttttgcttccttaaaacctttggaaaaactaaggaagaaaatttaaatggaaagataagagatatgagtgtactttgacagtccagttcttatccacgagaagattcgatgactttaaatctcgatgaatgataggcgggttgaaatgatgaagataattcatgccccgcgcctgtgggatgaaaaatagcaataagtgtatggacatagatagcaataagtgaaaactgaaatgcataacattttaaaagtgattcaattgcgaacaaaaatatgagaaatcacactgttcaaactacaaactattacataacactcactatgtccaatgccatatgtacacgccgtctccattctaattttgatgtgttcctctgtagtaagcgaaacaagcttccactgcagtaagagcattcaaaaattattttcaaccatttacctattaagattgataaacttgaaggaaaaagatcaagaacacaccgtggaaggaactccgtcacaatgcaaagacgttcaggtgaagtcacagctcccataaaaagcagtacatttggatgtcgaagtcttttcataagagataccttagagaagaaaaaaagtgggaagatatataattatacattaagcatatcttcctgtgttaacatgtataatgagtagcaatgtaaaggtccgagaaattcactaatgtttttcactttatctaagtaaaattgcacgagattgttaagtcttacagccaagagaaccatttaagtaattctctgtattcgcttcacatgattatcttctcaaggttgcaaaacttaattagaaatttgcgtcgggacctcttgctcgtatacaggtctaagaagagcttaagccaccaaaataatgagacaaggacaagtaagaagcgtacctcttgtcgaaaagaaacaatcacatcatctgaatattcttgcttggagaataccttgatagcaacatcctgccatacaaaacaaattattcaaccaccatttactggcttccatctaatttagagaaaaactccttttttttttccaacaaattttattacttgtaacacaggtcaattaagagctgtctaattataatgtgaagttagtatctaaactgaacatagacttaaatttcaattgaaccaaggaaagagacaaggaacatactgatccgtaccacagaccatgatacacagtcccacatgaacctgcaaagagaaagcaaacataaatcacacacattaactatactaaagaaaatcagaagctgagatcagtgttggcaattacaattaacattattttctattcaaacagtttcatcaacactaccttgtccaatctgctctcc

SEQ ID NO: 218799 - DNA, 3678 bp, Cannabis indica
aaaatttcaaaaataaatctattcaatgaacttactaaaaaaaaactttctggcttatcgtcaatccttctataaataatttacaattgaagagttcaaattactgttctacccttcattgaatgatttatagttaaccatatattacttttcattttttcacaagaattaccatttttttgttttaaacctataaaataatagaaaaaaaaaaaaaaaaaaaatccaaaaaccattttctgtttaacttttcaaaacaccttttctttatataaatatatatatatatatatatatatatattcttctttgcatgttagcatgttagtagtaactttgcaagtagatactagatagtacataaagctaacataataaacgtaacctgagaattgaactgttgggtaaataatattagaatagatacagaccatctaaacatgtccaaacatggatatacttaaaaagggaatcaaccttgcactgaattattctaaagaatttcatttggagccaaatgcaaatgacaactttggcctggatttgtttttacccaacaattttatctggttcaaccgttcttgctcctcctcttgcttcttcctccgcatcgcctcttctttttgtctttgaatctcttctagctcccgatatcgttcctcctccctccgctgctgttccaaagcttccctctcctgcgcttcttctaccctccttcgattctcttcaagcatcctttctagctcttccttctctttccgtgcttgttcctgagctcaaccaaatccattgtagaaatatgaacatttatttcacttcaattaattaccacacacaccaaaccaaaacaaaaaaaaaattctgattgtaatgttcatttcagaaataaaccaaacattataatacaattcccattactattgttattacatttcaattccattactaaatcaaacaccaccttaatccatgcttgcatgaaaaccgtcttacccataattcttttagtagtgcaagacagaactgttctcttatccgtattaaatttcaaaaacactatccgtattaaatcagatgagcaagtttcatattgacaatcagattccacaaaatgtacatatgaaagagtttgaatatttttaaagtgaaacattaaactacagtgtagttcagattccaggaagaggaaaagcagactagttcacaaatatttacctccttctgtctagcttcgagaagagcagcttccttttctttctctaatagaactgcaacgtcatctagaagtttcttgcgtccttcttccaagcgcctttgtatttctaatctaatctcctcagaatttaatttctcttcaacttttctacgaattgcttcttcaactctctttgcagtttcttcctccagcaattttagttctgcttcttgttgtcgcctgagtaaaggagggatacaaaaagttaactaagatagtgaaaaatttccgcactcttctggtttttaatgcccttagtccagataacagaaagaactaacacaatcaaagcatatgatctttcctttccttctacattcttttcttctatgtcgccatgactatcaaattataaactgaccttcatggagtcaaagtcactaaatacatgcttatgcttttaaggcatacctctaactgaatcctgatccaaacaaatgaatatcaaaactggtgaacaagtagataaacgaggcatgatattgatcatcaaatacaacaagttgaactatagcagtatcttccttcagaaaagcctgtggaaaaaatatgtcaacctgttgcagttttatggctaatcaccgaaatacttgtattttgaactatatgcagattatgcatagaattggaaaagagatcatttccactatgtatggccaaaatgtcagccctaaagttaatttcattgaatattcacccaaacacaacggcaaacaaatgcccatgcgcaaaaacaaatgtcagaacaacctgattgcaattaatatcataccgagaagcagcataacagcaatttatttccagatatttcttatgtatcatctataaaatgataacatcacaaagacaaagcaaagcaatacataaatgagtttctattagttctattttttatttggtcagtgtaatgcattataatcactaacatataagtggtaacaatacagtatatgacctctatcaagtaataagtagaaatttgagaaagcatattagaattcataattcactactaccagctatggaatttatttgaaaagaaaaaaaacacatttcaaggtacatacaggcataaagtattcaatgaaaacaaattaagaggagagggggaaacttgcaaattttaactcatatttaaaagactgatcagtgttgcagcaaagttttgtctcctaactaataacttagtgcattaaacatcatagcctgaatattgtattatagcatacttcaaaaagataatctatgataatgaaccaaaatttcatcacttcaataaatttaggaaaggtgaataatattgatctgttactatttggacaaagatccaatacgtatatggtgttaaatcgaaacagtacctggcttaacttttttaattagtgagggaaatttcaaccttgattcatgtcatgaaattataatatacccatacatattcctccaacacaactttataaagtaattatcacaagttttcaacaggaacattccaagagaaaaactcttcacaaaataatttgcaaaaaaacaataattgatttaaaacatttccaaaaggttacagcaatgttattgcataggttactcatgtctaatcattaaaaaggtcataaactaccacataaattaaataaaaaatcagtaaactaaataccttttcttctcttcttcttgttttttcattttttcacttgcattcttgcgctctattgacccaagacttggactagatgatttatgaactggagatattgatgaactctgacttcttggtcgcttatgatgccttggactgcgagaacgactccgacgacgtctagcagttaatgaacgacttcgacggcgtctaggggaaacagaccgacttttccttctgtgaagttatattaaagtttgagaaaacatgaacaaatggatacataagaatgtagcattaaaactatcaatacaacccaccacattggcaccagtaatacaatacatgtgcagttacctcatacattgttaagaataacctttgagtgctccaccttttatcacatgaagaagcacacaatcgagcaacaaaaggacacccatcacctgctaacttcccatatgatggagaagaaactgaatttttttaatttctaatgaagagtatgaaattatatcccgctcttagcctcttacaatgctctttctaatattttggatttgttttaggtaaacgtagagtagtaccaatttgccaaaagactatatgcccatccttatactcccaacttgtgataaacaataaccaggtctttaagaaaaggttgccaataattacattggaatgatagtagcataccttactatgagaatcccaaacaaattataagggtagagaaaaaaggtaagttaatgatcaaagaaaaatgtcaacataccaaatg

SEQ ID NO: 218800 - DNA, 2653 bp, Cannabis indica
aaagttcaggagcacaatttaatacatgtcaaagttcgggggaaaaaattattaattagcctaatataaattatgagatctttttattagtaggagaaatattatgagatattttaaggtgccaaacatcaccaaacgtggtatatatatgtataatttaattttgaattttaatatatatattgataaataatataagaaaatattaattatcaacaatgtgttacattagtatgatgttaagtaagaggccgtatatatgttatacatgcattttagttagtacaatacatagtaatttgtaatagaagataatatttatagatacttaatattaatttttgtgtaagtaatatttatagacataatatcaatttttgtgtaagctagattgtatatataatagaggtcaatgtttaaatctaccaataatacttttttttcttttttaataagtttattctcctcactttgaattttagatctatcactgttaagtctaataacaaaaagtctaataacaaaatattttagtggaacttcatataagaaacaatgtacggactctagctagctagaagacaaaataatttatggtaattaaatgtaaaatttacatgatttcactttaaatttataataaatttttaaaaaatgttaaaagatagaaagtagatgaggggtttttttttaagtggaaatagatgagttaagatggagaggatgagaaaaataaatgcttattgtatatcacactaaattatttttatttatataccttgtatatataatttcttttttcttgtgaggaaaatatgttgaaataatttatggtcacattaattatgcagtgaatagcccaattaatggcatattatatacgggagtattgctattaggcaccaatggtgcctagtacctttgcaacatgtcgcgttgcgattagttagcgatactccttaaaagctattatattaaattatatgagactcgatactaagttggaccaatagcgatattgacacataagagggtgtcaggcaccactagtgccctttagcatttctctatatatggtgctcccattatatcatattgaaacaataaatagctttcaaaaataccagaatgttaacatttgaagaaatatcatatcactaacctaatacatttgtgaaattattaatattcctaaaaaaaaattaatagtattaaatttttttaatatgaaaaagactatagtatctcaccggggcatcctaatggagtcctctcaatggggtctcacctcctcatggcatctcaaggagacatcttagtaccacctcatgtgttcttagtacctcctcacattggactataaggagggggtcctcatgctcccatcacctcggcccaatagaggagcctcacgctcccatcacctcggtccaagagaggggtcttaccttagcggtatacgtgcctctcacaactcatcaacatgacttggaagacatatccatcttttatcattttttagatatttattttgaaatgtaattttgtattttaaatttaacctgattatagttacaggaaggtgctcttatggttagagattttactagatgaaaacctatataaagagagtgaagtcacttgtacagggaccttgaatttgatactcacgactctcattctaaaaactcacttaataattgaactcttggagaacataactctcgagaactctcctcaagtattgagataaataacactccaagtggattagtctattaccgccgaaagggggtgcaccactataaaattctcgtgttcatctttatcgaatttacttttacaaattgggttactttgattaactattgcttacattcatcttgctcatttacaatcttcttagatctattgacgaaaaatctcatcaatagtttggtactttcattaagagcagtgaacacaagtgctgattacaacttaccatcatggtgagtacgagacggacaaactatgaggaagaagaccatggtgaccccatgaaagaaaaaaatacaacggaaaactatgaagagtatcaacccactaaacccactagtaaagggacctctcaacgcccaagaaaacaacccatgcctgatgacgaaagtcaagtccgagatactagaagttcgtcatcaccatcccatggtgtacgacaaactaccaatgtctatgaggtgttcatggaagatgaggtattactctaatgcctagatggaactcttagactcaatagagagtggcaagagaggtatggtgctcaagaggccacaaggccacaatgacgaggaacccacgaacgttctaatacgataagaaggggcgaccctgtgggagtcattctacgtcctaccctatcgaaggccaagagatgtctaggtcacaaacaacccggcgccgagatactaatcgtaattccatatcacaatgaccttcttatgagaacgacacccatggcaagaggagtgagtgtcctccattacaacaacgacaacgggtaacaaccctgggttgtgaggataggaggaacaatacaccccctcctgtcgggttttatgccctaaataaaactccatttcaatgtaatctattttattcaacatcaataaag

SEQ ID NO: 218801 - DNA, 4457 bp, Cannabis indica
cttggttgaatatttattatatttttagggtgttatagttctttatttggtttttcttttaataaactttatttggtgtttcatttagtatagttttttttttaaaaaaaaaataataataataattaccaattctctctactatttcacattttgtatagttgtctttatcaaacatttatgtctttgctaaaaatgtgtacaaaaatgcagaagcaccttaagatactattttttcaaagaaaaggaataaatgttatggtactgaggttgaatattatcattattcataggagtttccaatgcctaagaatcaaacagattgaagtagtagttagttttttattttttcaaagaaaaaaatttgcccaaataaagtaattgttggtttaaaaattgagtgaatctcttctatgtaaccaaaatagataataaaataatattaattatcaactaaaagccaattaaagttgtcaatattcaataaacatgtcataatagtcaatgtcccattcagtcaattaccacatgttccaactggaatccacctactgatgcaagcaaaatacttaatccataaatttagattcttttttccttctaataaataaatttttggattccattcaaaaaaaaaactcttataattaagtaatttcatttaagtttctataatcgattatatttggtgtagtttgatgaaatgtcttattccataaaaaatggagtcaaaaatctaagggttgtatatctgctacttataagaaaacctatatggacactaaatattaaaaataatttaaattattaatttttttgttgaaagggatttaaattattaatcaaaacatagggaaatggctcataaattagtcattttcttttttaaaaaaaaaaaattaagtcattttcagtactttagttttctcactagaaatttcattttccatgcaaaccctttcttccaggtccttgtcccattaccattaatctaatctctttctatgactaatgaagatttatttaattaattttctcactctgttattttggatatatttttctcacttggttaattgatgcttggcttgctattagttagttggaaacttggaattgactttcaaatatacttttttttttttttgacaaatactatacttttaaatattaatagtctcatatcatgtctagccaactttcctgtgttatatcaaaacttctggatagttctcgtcctcactggaaaagtcttctctagggcttcaatgttgcgtcgattgcagtcgtcgtcgccgatcctcggcgtttatgtccgtccatggtcaacttacccttgtggcggtgggaaggtgtctggctcttcaacattaatggtggacttggctcttcacgatctgggcggagcatccactgcagccatctttcctaatacaggtaaacttcacttcaaccttaactctttaccttttgtcccatccgatttctcttcttttgtattatcatctctattgcatttctcttccctcattaatcaaccccatttacttctccctttagccttagataataccaaattaggaaatttgataccctctgcacctccttggacaatcatttgtcctaccaaattaggcgtcccctacttcatagtcagaacccctagatttgatttaggagccactgccacttctatttgcatcattgcctatcctgacatgaagcatttaactcttcatttcgattttccctgggagaatatagtccctgatcgtgctttctataaaaggtctattgtacatacacacaaggtacagctcaaacagtcctcttctctttttttcccttcctttgtctcaatctacaacctgcatattcccctgacttctgaacattcccctgaccctacttccgatcgacccctttcaacaatggaagaactcactaacaacttatctgccaatctgaacctgactgagattgagacaaaaatcactcttttgctgaaccatttgaattgcctgaagatgaaaacagggaagagccttctgccttccttgctgtcaaattgctaacaacacgccatttcaaccctgaggctttcaaaaagcgactaaaagaaatgtggccagaacgattctcaatcaatgtgctggaaaaagagcccaatttctttactgtggaatttggatgttttggggatcacaaaagagtactcattggacagccatggcattttgattttaaacttatcgtgatgtctcctcttgaagttggatcggttgtcacagcgaagatgctcacttcaactccgttttggatccaagtttcgggtattcccttcctcaaacgttcttgggctcttgctataaaactgggggaagttctaggccggttcataaaggttgacactgcctctctcaaagaaacctggggtccctatcttcgggtcagaattgagatcgatgttactcaaccgctgccccgtggtacaggcttccattttcaaggtatggcatccccggtctggttagaatttcgcttcgaaaatctacttgacttttgccatttctgtggtcgccttaaccatatcgtaaatcactgtcctgagtttctagcaaagtgtgactcctcttctgccccaccaccacttcagtatgatcacaccttaggagcaaaaatccgcataacttccaatcctttttacatcgctagcactaggacccgtctttgccctcatgtcactcaccctgtttctctagcccctccaagcccgcggcctcccactaaccatattatctctgaaccatcctttaatgacccatcttctgagtatggggttcaatatcttcatcaaccccgaactactccagtgggctgctacatgactcaagttccccataaaaatacattcatccatgatattaacggttcaaatgttgttccttcattctcggcttggccaacctctagcaatgttgtggaccttgatagtcctgcccaatcacgtagatccgttccaccctcggcctaccccatgttccatgaccaaaacataaacaccaacaatagcatgtctgtacctgaacaagttgcaccatccagtctgatagtggctgcccctgctatcactaatgccaacttttctgatgctactggttatactgtaccagtctcacaagcctttgctacaataatggcagatctcaatgctaaccagctacttcactttgccgtggggtcttcatcctctccagccacagcttccacttctggtcgccgctataagccaaagcgtccccccagcattaacgagattgaatttcgtaaaatgctcaagcgtactcgtgacctagctcgttctctggatgaaggatacattgacgaggcgggtgctgctcagcgcacccgccaagagccatgatcatcatcagttggaatgctcgtggattagggagtaaacgagcattctgttccctctccctattaactaagaaatataagcccacgattttgtatgtaatggagtctaaactccctgctggtgctttaagtaggtttaaatctcaacttaattttcctaatggtttagaagtccctaggattggtcttagtggtggctttttgttgttatggactcatgaagttgatgtaactctgttgtcttataatataagtcactttcattgctacctaaagcctcaccaattttctgctttttacttcactggtttttatggggcaccgaattgtcaaaataaaatccattcctggaaagttatccacagacttggacccactattcataactctccttggttgataatgggagacttcaatgattacttaaattcgagtgacaaaattgggggggacacttctcgtgctccttctacccaatttcgaaacttcattgattcgttcactcttcacaatctccaatttcatggctacccctttacctggacaaataagcaaggccaacaatcccacacccaagaacacattgattgggcaatatctaacgctgaatgggattctctgtttcctaaacattttcttcttcacgaagactattttggatctgaccatcgtcctttaatcttgaatctccatcaattacactcaacccaaagacacagcaatcggtttttctttgataaattatggatggccgaaccgaactttgaagtttgtcttactcaggcttggagctccaatcatcagagcaatacaaataaccccatagtcaacttagctgagaaacttaagcactgttcaaagcaatttactgaatggaaaaagtctcttggaccttccatttcctccaaaattaaagaaatccaacacactctcaagcaagtgcataattgtgctactcctacggattctcagcttcaacgtggacgtcagctggaactcgatcttgataacctcttatataaggaggaggaata

SEQ ID NO: 218802 - DNA, 3394 bp, Cannabis indica
tgttgttaggtaatctgccaatgatagagaccacgaagaaaaacccatcatccatggaaggagcagggtctccttcttcctcttactcacaaccacaagcttccgaccggtttagaggctccgacatggaggttgcacgcgccccgtccttacatgacgacggttccaacatttgggattggggagatctcttagacttcaccgttgacgatgccgacttggccatcaattgggcctctaaccctgccagacaacaatcccagacatccggggtggaggagcagcagcaacagttgcttgctccgccgaccaccacttccacggcggaggaggaggaggagggtcacaattcagatcctggtcgggtcaggaagcgggacccgaggatggtctgttccaattttctggcgggtttggttccgtgtgcttgccctgagatggatgagaagttgatggaaatggaggaggaggaggccggccatggcaagaagagggctagaaccgttagggcttcgtctggggttgctcggtgtcaggtcccagattgtggggttgatattaaggagcttaaagggtatcatcgcagacacagggtgtgcctccggtgcgccaacgctactacggtgactattgatggcgagaccaagcggtactgtcaacagtgtggcaagtgagttataattcttcatctctctctctctctcttcttaatacgcgtgtatgtatatgtatatcatatacatatatttatttatatgagtttgtgtagattttcagtttgaagcttcgtttgttttggttttttgattggttgcattcaatattggttcattactcgtaaaaaagtttttgactcttgagaaagattgccttcagtattatcaatgaatgttgttatactataatacttgggtaattatcataatcttagattcttagatagttttaattatctagttccatgttgcttcagttgtagtcctaacttaagttgatcagttctatcctctggagttagagttagtgggttagtgaatgtcgtgatcaaggatgtatatattgtgacattattgttctgttacaaggtttttgtatttttgttcaaacttatttctactgcatatttactggtttctatatgacatgaaatctcttgaaggttccacgtactggcagattttgacgaaggtaaacggagttgtcgaaggaagttggagaagcataacaacagaaggcggaggaaacctgctggatctaaaggtgctaatgagaaggaatctcaaggggacattcctagtgaagatgtgagtggtggtgatggtgaagcagggaaaggtataagaacccgaattatctgttctactctgtataagattcgtgcggagtactttctttcagatttggcttgcttatgttaagtgtttttgaagcagattgttcacagtttagcagccagaggattcaaacagaaacatttgtggagtctgaagatggacacatttcccctctccgctcaggtcccgattccaaggatgcaaatagtgatggctttctgtctttagtggattctggtgaaaaccaaatggagggcggaaaagataattctaagcgtggtgtatctccctcctattgggacaacaagagtacctactcttctatggtatgtgtttgaatgctgtatttaggttactgaagatatgcaatttatttgggagttgttatactgatttcatgtcacatttatagtgtccaacaggtcgtatttcattcaagctctatgattggaatccagcagaattccctagacgacttcggcaccaagtactattaaaggattattgttacagtttagtatatacaatcatataattatggctgcaagcaattttaggaattgagtaacctgtagctttcaatgtttacagatatttcaatggctgtccaatatgccagttgagttggaggggtatattcgtcccggatgtattatcttgactgtgtttgttgcgatgccaaggtttatgtggatgaaggtatttgtgatggattacttttatgaattcccgttcaggcttatgattgcatattttcatatgatatttgatagtctcctttttttgtatccctaatctaattaatgactaccaatgaaaggattgctgcatatattcagaaaatacttgtgttgaactcatgattggaaaagataaatagcttttggatggattcactagataatttctccgcttatcaactttttgatgacttgaaaatatttattggattattagcgaatttgtgatttgactgttattctacttcgtatgctacagttacttgaagatcctaaatcatacgtgcacaactttgttgctacaccaggagggatgctatctggaagaggcaatatacttgtttatttaaacaatatgatgttctatgtagttaaaggtaaattgatgctccatatactgtttcattcaaccatgtcttcgatattatttaatacagtctgttagataaaactaaatttatcttttatgttttctggcctctcttacctttatcctgtttagtaaatctgtatttctggaaactccccccccccccccccccgcggggggtggaacaaatgtggagattgagattaatttcctgatagtgttctttttttattttagtttttgataaactgacagtgttcttaaatgtcgtcatttgcaagaacttttgtgtttgtcatttaattgcaaaatttttatgatgtctatttttttttttttgtttttaaatatctttgtccattgcatccttggataaaaaattttgttaaaactttgacatgttcttacctttttcaatatgcgtagacgggacttctgtaataaaagccaaggtggatgtgcaggccccaaagctccactatgttcatcctacttgttttgaggcaggcaagcctatggagtttgttgcttgtgggagcaacttgctactacctaaacttaggtatggcttcttacatatccccgatgatttaatagttttcctccttttagttaaaaataaacttcttgcttcaatagcatttgcttatagatggataactgggtctagttatttcgattgttgcgtagctgtctcactatgagcatctccattagagatgtgaatctatgatgcattgctaaaatataacacacttcaaagaaaagcttctattctaaatttagcatgtggtaaaagttcatccaaatttggataagaatataacactatccaaatttgcatcaacaagaaatgctcttttttgcaatactttgtttgcctttacttattaatttattaatgttgatatcttatttattattaactattaaatgttcacttttttatt

SEQ ID NO: 218803 - DNA, 3913 bp, Cannabis indica
cttcttcttctttttcctttatttttaggccaaaactaaacatggtagatcatccccacctcgagagtggaagctcggggcacgtttagatcataagtggctcctctgctgtttcttctcaagaactcgtatccataatcgattacaatcctcttcgttatacctgatccgggatttgctctcatgtaagtgttccctaatatgtaagctattccggtttccttagcttccatcaactctgcgagttctgccctcatactcgtgtcaatcttgggactctccggcaaaacaaacctcaccttcttttttcgtggaatagctggtggtgatggtgatgttatctccctatgatttgatgttccaactgtacattcttgttcttcgttgtcttcccttatttgaatcccacccgccttggcagttgaccttgttccaacaactgtcattttctcatcttctttttcgataaattcgtttgaaaggctgttagtagtactgttctcgcgaatgaactcagctatactacagatgagatcattttcgaattccacatcatctttgtgaatgtcacgatacccgtatctaacaatgcacctgtataacctgtactcttttgggccgatttgccccacgagaaaccgctcctcgggtttgacatgtgggacaggtacagattttatgcagaggaaaaccaggacttggtggaaggctggaacattggttacaaagtgggaaaagattgctggaattcccgaaacaagctcagtttgtatgattccaatcccgcgaactctgacaatgcctaggctaggaccaaggctaagtaaccaattgagtgaaactttgttatgtatttcaaactcatatttttttatagtgccatagtgccaagtatacatgatgattaagaatatgaaagaaagggcaacaggtacccaagctccttcaagaaacttgataagagaagcagagaagtacagagcttcaattgcaccgaagaagactacaaaggcaattgcaaagaagacacttcggttccagcataaaacaatcactagagacattaagcacgtcgtgaccagcataaccgtaattacagccaagcctgtttcatgcagatcagtgagtaaagaaccaaacataaagaataatttttcaactaatccaatacgtcgaaaatcatcatacctgatgcatttcccaaccgcttagtgtctctaaaaccaattgtaacagccaaacatagtatcattaatatccaattgatctctggtatatagatctgaccatggaatttggatgaggtgtggactattttaacccttgggaagcaacccaaagctgaacattgtttaatgattgaaaatgttccagttataatggcctggcttcctactatggcagcaagtacagctattatgagcactggccatcttatattttctggaatataaaattcagtgcttttagtatagtattatataaaaactcaatattttaaaaagaacaaggtaaacttgttacctggtacagacacataaaacccgatttgggaaccattttcgctaaaatggtgctgagacagatatgcagcttgacccatgtatgcaagaactaaagccggataaacaatggaagtgaaagcaatctgcagagaacatggaaaccaattagaaaatgttttctcgaaaataaagtgccaacttccctaaaatgttcttagatagttcacccaacaagtgaaactttgacaaggaaagtcaaagttttttctttaatcatatacactcgtgttttttaatgaatgtatgcaactttcaatcgaaaccaaacttctttgaaaaggaattctgataatagtcaagtatatgtatcggtcaaagctcaggctactagatcatatatcgatggtgaaatgataatttctgtcaaaaatcaaaacatgtgaagctggtgaatctgccacaattaaagactggctagaaatcggggtgactttgtcaccatggatggaggcaaagagccaaccggtgagtatattctattgcaaggaaagatattcttaatctaagagatcaaatagtcaaacactacaaaaagggcatggcaagtagttaaacgagtacagtgaccccaataagaattgcaagttctgttcatcactatttgaattataccttaattgacaattgtgaaaagtgtccaagatcagcaaacatggcttctgaacctgtcaaagtcaaattgcttataagaatatattccaaggccccccttttcttgctttgtcttagataacaaaaccaatcaattttctttatccaacagtagaaaattttacctgttatacacaacaatattccacccaaggacttccaaccttcggattgagttttcctcaagaactcatacatataatacggagaaagagctcggtacacatgacgattccatttgaaaatattatagacaccaatggtactgatgcatagtagccaagtcataactataggagcaaaaaggaagccaaccctgtgagtaccgtaatgttgaagcgaaaacaagccaattagaatgatacatgcaattgggacctcaacatctgcaaaaaaaagcatgatgaaactctgttttagaacactatagcaactaaatgcactgtggagaaaggtaaagataaaagagtgttattgaatctaactgcttatgaaaacaaaaccacacgtggtgtcaaacaaagttcaactttttctttccccaccttatttcctcctctctcctgagaaagaagaagaagtttggccctctatccagtcagtatagcaagcttaaatgacaagttttagtactttggtctgggaaaaatttaaggattataattgggaaaaatacacaaaatgaaaaaaggaaagactattattaataaggaaagaaatgagattttctactgtagttaaatcaaagcaacaaatccattaaactatgaatattttgataatgatgatattagacagaaattaaagatcttacatttgtgatgctccttggacatagaaagctcaagaccagaaacagcagaaaaaactgtccaaaattcaaattaagtaagtcagttccaaatttgcatcaaacaaggaaaatcccagagaccaaaaagatttttacctgaaatagctggtgtaaggacaccatcaccaatcaccatacaagtcccaatcaaagccagaataagcagaagcctctgcagaaccctgtgcctctccaacatggacttcaaccttgacccaatacttgagtttttttgtgtgttattgtctttcttgtactcagagagctcctcatctgccacctggcaattgggcagtgagctaactcgggcgtgtctacacagtaaggagtaaagagcaaatgtccctccttcaccattatcgttggcatgaagaacaataaacacgtatttgagaagaggaacaagagtgagagtccagaacacaaaagacaacacaccataaatctcttcattggtttctgaatgagaaatatcttcagcaaatgtactcttatatacatataaaggggaagtgcttaaatctccataaacaactccaagactctgaaaagccagagtaagaatagtcttccatgatcctttctgtaatcccaaaaacaagaaaacagattacagaatgtgttgaaaaactcaagaaaagaaataaaaaaagttactttctctaaccttagcttggttatgaaaacccccagtttccagatccatagtgattggtcttagtgattcaaaaaagccattgttgctctggattgaaagggatttaacaaagacccatttgcaaaaaccacaccgttcttcttttgttgcttaggaaaaagattaattttttatttatagacttaa

SEQ ID NO: 218804 - DNA, 4984 bp, Cannabis indica
cacttttctatctgtaattctattcaagaagtatttgtactttgaatcaaaatgtgtcaattaccattttgcatgtttaactcaatttcggttagctggtttctgcattgtcttgtgctatcttcaagtttagtataacatatcaacactaaaaattggtgctatcaaattgaaccaaggctagtctttgaaagtgacttagaaatcacaaaggggtgcctctttctaaggtgggaaaagctaaaaatccaatattttttcgttttcattaatgtcatgtaaagtttctctgtcggatcttcttttgtcctcagttgcaaatgttaacctattcagttgcaaaggtgggatatctgtagtgaagacttctcctgcattgtttattagaggtattttgattggtgatggcgagagctactccaagatatcggttacttaaaacagaattgcgatttcacctaagaggggtagctcaaaaagtcaggtatgtagtttgctcccacaaagtctaagaggttcaagtctcttttgggtatttgcatagtaattgttagttctttggtccccgaataaggcgggaaacctacctcgaataggcagatacacaaaagaaacttgaaccttttagatatattaggtgtatgttacatgagcaaaaccctctagaatgttcgagatgatgttgaatctcgaacaacattcaactccttaatccacgagtcaaagaattgtggcgttgatgataaaatgggaggagggagctataaattgtggctcctcatgagagtttcaactccttccacgaatgttcgccaagatcctctaaggtgggtcacccccacctacaacaagtgcttcacatgagccccaacagaactgtaggtgcatgaatgctcttgagatgtatgtaaatgatgactaggttggtagacattgtccttccatttaagactctcaaaataatcaccttcattggataatttagtgtatgtcactttatcaggttcaatatgatccaaatttttattagaaggccacttatgctcaatcatcttctagcaaaattagaaacttttcttggttaaaatctttaagaacaatggcaatttttcctattcatctttgttcacaatttcttaattttgaagcaaataagagaaaaagggtaagcttgttatcttctgattcattgtctaaattatactcaactcaagaaatttgactattttatggtcaatttattcaatcccactcctaaaaagctcccactcctaacttattattataagagaattgctaaatacattctcttttaaaaaatgctagcattatctaaaatgtcattcacatcatacatattaaatttaataatttctataaaatattgctctattcttaaaacactttaaacaattagatagcattgagtgttaacgagagtttttatgggtttttttttttgacattaaagagagaaattcgaatttgtgacctcttctttgtgagaagtaagaatttattaaattatgaccgtgccgaattgatagtttttataattaattatctatacaaatccatatcttcattcatcaaaactagataaataagtagttttatgaagaaaaaaaatatccaaataatcgtattcattcattaaaagaaataaaaataataatttttaatatattattattttataggaaaaaaaagaaatatgaaatagagaagagaagagaagaggaagaaggagaagcacacaagcgatattgtgaggaggtctgtatgtggttactaccctcacgacacttaactacctccatagccataaatattatcaattattatttattacaaattaaatatctaaattattatttatttatttattttactggattattatcagatatatacaaatggggaaacaagtacagagacgaagaaaataatcgcggttgattgaattttggtgaacaaaacccatgagctcggtaatggtggtggttcctacggtatcatcttcaccatcaccttcttcttcttgttcttcttcaacgctacatcatccattagtttcatggcggagacttcgaaccactccctcttacttttcctcttccaagccatggcagaggagacccagagttgttagagtacgagcagctattgtcgaggctagaccttcttcgtcttcttcaccttttcctgatgaatccaactccatcaaagttgttcaggtttatcgaggaggaggaggaggaggacgtggaggagtgtataatcgagctgaggatcttcaggctgaggcgcgtgcattggaacgtgctgttgatgctactgtctacggtccagagcttctttccaacaaatatggctctcgcccaatcagggtttgttcttttttgattctctgtttcgtgaagaagaggaattgcttgtaattgaatattgataatggtggttttgtgttgttgttttctcaggttgcgcggagggctgtggaaattttggttgctttgggttcgtttggagtaaagcttttgttggaccaaagaaagggtgttttggatcagaacaaaagggctcgtggagctgagttgagaacaattttcactcgattagggcctacttttgtcaaaattggacagggtttgtctacaagacctgacctttgtcctcctgagtatcttgaggagctctctgaacttcaggttctcgctcaattatcctactcactcttttgtctggtttcattatgataatttgcattaaatcattgtgttttttgtttgtgggtgttgtgttattgaataagttctaagtgaaaatctttagtgaatatgaatttgattcataaaatgagtagctttttggtggtattttgtagtgtttttgtttgtgggtatttgtgttatgtagtgttattgagtaagttctaagtaaaaatctttagtgagtataaatttgattcataaatgagtagcttttcataaaggactgttggtggtattttgtagtgtttttgtttgtggggtattgtgttatgtagtgtttttgattaagttctaagtaaaaatctttagtgagtatgaatttgattcataaatgagtagttttttataaaggactgttgttgggtgatttgaagtgatagtagccttttaattcttgatagtgttatttgcaagttcatgttgttgttgttgttaatatgattttgaatgagcaggatgctttgcctacattcccagatgaagaagcctttgcttgtatcgaaaaggaattgggattatcacttgactctgtttactcgtccatatcgccatctccaattgcggcagccagtcttggtcaggtttacaaagcccaactaaaatattctgggcagatagttgctgtgaaggtgcaacggcctggtattgaagaagctattgggctcgatttctatctgattcgaggtctaggattcttcatcaataaatacgtggatgtaataaccagtgatgttgttgcccttattgacgaatttgcacgcagagtttatcaagagcttaactatgtgcaggtccagaatttgctgagcccaaactttttatgtatcgtttttgtttgtgatttttcttttggaagattcttcctagattgaatgttaaatttgacaggtgcctgctgcaggaggcgcaaaatgctaggagatttaagaaattgtacgcagacagagaagatatccttgttccggacatattctgggattatacaagcaacaaagtattgacaatggaatgggttgaaggggtcaagttgaacgagcaagttgcgattgagaacaagggttgaaggtgttggatctagtgaacactggtatacaatgcagcctgagacagctgcttgagtatggatatttccatgcagatcctcatcccggtaatctcctagcaacacctgatgggaagctagcctttcttgattttggaatgatgagtgagacaccagaagaagcaagatttgcaatcattggtcatgtagttcacatggtcaatcgagattatgaagctatggctcgggattactatgctctagatttcctagcccctgatgtagatgttactcctattgtacctgcattacgaaatttctttgatgatgcactcagttatacagtgagcgaactcaatttcaagaccctggttgatggtctaggcaacgtactttatcaatatccattcaatggtgcgtcactcatatccttttgcccctcttaattaaattaagcaaatattctaaaattgttttcatcgatgttggctagttgatggcttaagttaaagtgtttaacagtctccttccaatatatgttgtgtgctgcagtgcctgcatattacgcattgatattgaggtcgctgactgtgctagaaggcttggctctttatgccgatcccgatttcaaggttctagctgcttcttatccatattttgctaaaaggcttctgacagatccaaatccatatctcagagatgctcttattgaattgttgtttaaagatggaaaatttaggtatgatctttgttagctatgctatcttgtcttcataatttcaaccagtcctatcacaggcgtcacttactagttttcgtttgctgcagatggggtaggcttgaaaacttacttattcaaggaaaaaaagatagagatttctcagcaaaagatgctttgcagccagtattgaaattattattgggcacagatggtgaagtgcttagaaatttagttatcaaagaagctgttcgggttacagaagcatttgttttaggcacagttgttgatacatatagtttgatgccagatttggtgaaaggtttgatttttaatgggaacggaaactcatctggacctcttgttatgagcaaagctgaacgggaaaacgtgttagagctcagagatcaagtatctaggatatggggacttcttcaatcctctgaaagt

SEQ ID NO: 218805 - DNA, 2578 bp, Cannabis indica
gagcagtactaactctcaaaagttcatagcctgtctcaacctaggccggcccttgtaacatatggattagctctaacctgattaattaaataaatcacaaacatgtatagtgttaggttttagttttaattaaataaaaaaattactacatatttttgtatatatatatataatttataaatattaagaatataatattatataaatatttgtaccgcttgtctaacttcgggaactttgaaagcaaggtcaataatgtcgttagtgggaattattttccaagatggaatgatcttagaaagcttgctcaaaatactgatcactagtggaggtggtttcatatcatctgcaatctgtaatcaaatagatattaaaattaataaactatggattaattcataattgaatatataatctcaatctcaatctcgatgattaaaatatttaatagttagtagagagcactggccctagtggaatagttcagagaagaataaattaactataaggcacatctctaaaaaaataaaaataaaataaaaaaataaacaaaacaatcaaagattggatcccatgttaatgctatcattaaaataatgaatgggtcaactaatcccattttaaacacaaaattacagctcagaaaagtacttttcatggttgcttatacattaaacaatatccaatattttattgtttatttcaatttttttgttattattaaacatgggttaacaagtcatgaccaagtggactgcatcatttgagatattattcttcacttacaaattaaaaaaacaatcaatacataacaaaattttagttgttagacaagttgggcatgatgtcacttaattaactacaaactctattatgactttattatattagtgtattatatatgtattcatttattaatattgaattttttatgtacgttaggccgtgaaccatgacttttatttcatctttgaccataaaaataaaaattaatggtaaaaattaatggtccaaagttaataaaaaacttcaaataaaacaagctccttagaaaaatgcgcactacttagtagaaatataggagaaagaccaggacacattcttggtatgataattgaaccccaaaacaatctaaatacaatccttaattttagttaagaacaatataaccaaaatcttaattactaattgctacattacattttcttttcttttacttttatgcttagtggtagtacctaccactagtggatccaaatttgatggtccataatcaaataaaatcatgtcaaacaagaaaaatgaaaaataaatatatttaaaaattcacaaaaatgaaataaattgtaaataaactaggggagtcagctgccccacttattatgtccacattaatttttattttatttttggaaaaataaaatgaaaaaaaaaagtattattaattaccttacacataggtgcgaccaaaacgccaccgtcccaataatcaggctttctctggtgaaccataagaaccattgctcctcccatagactcacccattagatatctcaattttcctctgttttctttcttctctgaatatcataaatatttatataaataaataaataaataaataaaattgttcattataatcatcattaagacaaaaactgaccacatatggatgtgaagtgatcagaacagtctgtaacgacgtcgtcaaagctattaacaaggccttgtaagccagctgattttccatgcccttcataatctataccatatattgcaaatccctcttttgctaatcgagtcgcagtacctgaaattattatattattaattaatattttatttaattatatatttacatattgaccaaccaataaaatcaaagcttaagagctataaaatactaactgttcatggtgatactacactccatggcgtaaccatggcagatgaagattaaggctttggggtcttgattttcaggtatccatttgcacgtgaaaagcttcatcccacgtgagtttatgatatggccctaattttttatattaatttccaaaatcaattagaaataaaaaccacaaatattcttaaaactattgaaataaataaataaattattacctcttcatatgtgatattcgaaatctccgacgcctgcaggaatcaaaagaagaaaaatgggtcaatataaaatgttgaacgttaaagagatttatgaacacagagaaagagagagagactacaaaccatgataatttaaggtaattaagaaagaaattttgtttttggatcttttgttattttctcgtgtgttttctgtttggaaagcttcagtgcatgaaaatagaaacgttttactttgaattggagtaatgcttttgttcgtaacgcacttatatatatatttatatatgcgtgtgagggtgtgtatttatagtactatattaccctttgtggtttcgggtgtctttcctaatattttggcaagtctttattataatttaggaaattattatgattattattattgtttattattttaaattcaaaatacaatgcacctttggaatttatt

SEQ ID NO: 218806 - DNA, 8146 bp, Cannabis indica
acatccacataattattaatatttataacaatttatactattttgaaaaatacaaaatctattttatttgaaaagtgcaatacactataacttttacaaaacataatcaattagagtgactactacaaaccacattaaatattatttcgataaatacgtaaatctcttaaatatatataagttataaaaacattttcatcgaccttctactttatcagatcgttcatggcttcttcctctagcaaaattgaatctgatggtgaagatgaagatcatgaagaagaggttccttccttctccattaatctttttattctattttaaactcaaattcagtttgtactaaataatactgattgtttacgctgtaattgaaatctctgcaggttgagcattttgatgatttcactcttgcctcttcatgggaaaggtaagtcttcttctcacttactcacgtaatttatatatatgagcttgtttttgaggtttatgtggtcttctatattgggatttgtacatttgggtggataatttcgttttctttaataggtttatatctgatatagaggcaatttgtcggcagtggatggctgacggtcctaagaatcttttggtaggttttttttttttgaacaaatcttttggtagggtttggaaactagacaagtagaccatatgaacaaatgcattttgagtttttattgaagaagtagtactgtgttatcttacttcatacatttcattttgccccaatgtgattgttatgcactttaatttgttgtagaaaaagaatgcagttcagttggagtcctctgaagatttatttagggtcaaatctgagttgaaggatctcacgaaaagttattccatggaattctactttcattccaacaatgatggtactcattattattattattattcaacgatttgtaatttgattattggtttgtaaaggagaataatgtgttatactgcttttacagtcaaaactatgaactgggattccatgtcacatgacctacaattatgctttggggtgaaggagtttttggtatgtcttaactctgttttaacatttctctgtctctttgtctattattcatggtgccttcactgttttcacacttgatccataatcaggtaattgctcctcaaagtgcaagtggagtggttcttgatgcacccgaagctagcaagctactgagtgctgttgcaattgctttatctaattgttcaaggtatgatcctttttttcgtaactattttctgtgtaaattttaatgaagcatgggagaaagcatgcctcaactgtctatacaatgcacctgtacaatacagtgttccctaatagtgttcatttcatacactcatatttctagtaatttgtggcctctcatatgattctctatgcagtttatggccagcatttgtgcctgtgcatgctccttctcgaaaagcatatattggcatccataacatgggaactgtatttactagaagatttgaggcagatcatattggcagtcaggtcccagtaaaacttatgcatttagaaggattatacgagttgtttgtttctaaatttgtaagtttccattttatacaatcacattaacattcgtgtttatttacttcattcttggttagtacactgagtaatgtctaatgattctgttcatttttccaatgtgcctattttggtcctcttgtattaattttctcatacacaattacaattgacatggctagtaagtaagaagtaagaacttggtaatctccaactaggtttgtgtttccttacaagcctagaaatgtttaaatagttttcacaagaatattatgtcatgttatttactcgtgttgttagaagttcttttcttgccatgtatttccagcaaacatgtgaagtgttattttagaagctcccaaaacttgtgttggtttactgtccctactcctcttttccaactatagtaatttttttattttgatgttgaaggcctactccacattggacttttctgttcatcttttcaaagtccattttacgatgaagctaacatacagaacccttcccaatgatgaagatgacaatgatgttcaagaaaaggatgttgaagatactcaagatgggtttagtcctcgtggtgatactcgtagcagaacacagtgggatgataattgtccgtggagcgagtggtattctgcagaagatcccataaaaggtgatagaataaaatggaattcatttttttttccctgtgatggagattgatctacattattgctaagagtatgtaaggaatttgatcatggatcaggcttgtcatatcaatgttctttgaaataattcaaaatggtatttactcccggttgaagaaattatctcccactttccctgtaacaatcattatggagtacaatactattttattattttcaatattcatttgttttatttttatgcgaggggccagtgaattcattttcttttctttcattgttgacgtatgtaatgcttttcataattcataatatggctttttttccctcttttttggttgattacctgcaggatttgagttggttgccatgtggtcagaaaagatggttgaaaactctctggaaatggctgaactcgagaattgctcaccccatgaagctgagaagtggatcttatatccaattttgtctccaaatgtgtaagaagccactttcttagtctataaagaattaccatgatttaaaaaatagacattattctttcttggttagctcatatggttagacatatgtacaatttgccacatccttcagaaatattgcatgattttgataagttgtttcttcaaattttgatttattaaatttttgtaaactgaactataaaagttgttagtaataaatcaaactgtaaaagctgttagcaataaatcattcttgtttctagaattgagtagtatcagtaagataatgtgataatgttgtatgcttttcaaccttgcacatctgtatgaaggatgcattatatataggtcactcttaatgagtatttattcatgaatgcgtattattaggaaatttgagtttctatgcttaattttgctatctaattaaaaaaatatctcatttttaccttatggtctggggttgtttcattggttgagagatacaaaaagttgagtttgagttaaatatttttggtacaaacgtgtaaagagagaatttttaaaaaaaatttaagtagctaaattaaatatagaaactcaaaattttcttttattattggcattggtttaaaatttaatagtttaattccgacaattttttttaatggtttaatatttctaaattttatgtttatagttatttttttaataaccatcaacgagtgatatctattaagaagtgttccatatataaatattttaaaagtttgataatgtttttgctacagaaatgatggctcccaaggaaattgggttggtttttcttcgcagttgtgcctattagttgatgcattggatatgtccttcactgctcagtttatggaagattttgtctcaggtctgaattaatttatggagaactttatgtcctatctaatatgttaaactgcatttggtaggtgtatgttgtagttgaagattactcctgatttctatatttttcttttgtgctattttctacagttgaaaacccaggttctgacaatttgaggtcctcaagtgttattcctccacctacggttattgatcgtgtgctcaaagaactatttccggagggtattcttctgcctgtatatattattattattgttttgtttcctatgtttctcttttgacagaattattcagtcttttgggcatgattgtttgatattataactttagcaagtctttaaacaatatcacgtatgcttgttttataatctaaattaggtccgaaaatccttttggcactgagaaataattttgtaagtattttcacacttgcttgtgtgaaattatgtttttagacataacacaacaaaagcgattcatctgtctatgtaattgataggctcccttacttaacaactaatttagttatgttgctttgtgacttgtaattagtagtttcttaggttgtgactgtttgtgtgggattataactgattagttagttgttagggtgattagtagagtataaatagtttgttttcagattgaaaaggggtctttcggacaaggcgaggttggctatctcgaattagctactgtatagttctttgtgattgttctacacttagtctctgatttgggtactacggtttgagtaataaggagaggaatttcaaatattatttgagttctatcagtaatttcacacgtgctcttgtgaatttatgtttttagacacaatacagcacaagtaatccatctgtttgacatgtggatgctttttatggtgtccggttgtagtttttcttgctccttcattctagggtctgcttcattggataggaagcacttgaagagattttacaaattttcatgcaactttctaatcttgtactgcaaattttggcttgttgcaggtggattgctcccaaactttactgatggcgagcataagacttcacgacttattaaaggcgcacctctccaatccctttttgcacaattttgtttacattctctttggtttggcaactgcaacatacgtggtatgtaccaaagatcattgtacaacttatttccaaaatgaaatttttctagaacatgtagaattcaccttggtttcttctattaacatgtggaatgaagaatttaatgacaatatgtttttaatctatgtgaatcagctattgctgtactctgggtagaatttgttcgagaagttcggtggtgttgggaagagttacaatcattgcctcgaatgccagtcgagggttccattgacttgtctacttgtttgatcaaccagaagctacaaatggtaatgcagtgaactctatgttggagttttagagaacatgtatgattggccttagaattaattatatttaggtgtgtaaatgcacaatatacaataataataataatgcaaagttctcaattttctgctttttatttagcttgcaatatgcattgagaaaaagcgtgaattgactgaagattttcaagattgtattggaagcaatgatcaactttctcctaaggttgtggtcactatgatgctttgttttctttttctcttaattacgattttcttcatatgtcgtacttcctcttaacatcagtggcatactacatgaactaaaaatgcaggcaaacagtatagctggggaggactcatcaactatgcatacacccaccgaaaacttttatgggaaacgtgacaggtgaactatgcaagtgagatctctgtgggattcttcataaatgctaactcattctctggatttttaatttttttttaattattattattattattttgtaattaggaaagtatattcatggtttagatgttggaaatttaataatatgggtgttggaaatttaataatatggtctggtcaggatatgcgtcatctacatgttgaaagatcaattaagatgggagtgtacaagtcatgaacctcttcaatgattaatatatttaattgatttttcaattgggaatttggggtcatgaccatcatgtttattagattcccccttttgtggtgaccaaaggtggcgttgaaaagtacttatagactgttttcatcattctgcagaatttgaatgaatatagatgaggatttagaaattctgaaatatagtgtaaaactttcatgtgtgcacctacaagtgcgggacaaaacaataaatttttgcttgcaatctttgcaatttgtatgtatgttttgcattttttttttggttccacaatttcatttggtcacacataactcgtttattaaacagctcaacaacaacaaatgatttacaagatattggacgaaaattatttgacgagcctgaaagtgttgtattgtctcctgatttgaagccggaagaccatttgcggaggggttctgctggcgtggcagggtccatgaaacttttaaactcatttcagagcatgcatgtgccctacacacaggtatctataaatgtctacctctgataatgctttgccgaccttatcacattctatctctaagcagttttaaggacttgaaactcttaatcaatataggaggcaccacttatgacagaagacatgcatgaagaacgactccaggctgttgaagcttttagcgaatcatttgtaagcatatacaatttatcatacacgctgtttatctacatgctcgtggatcatagaaaagatcaatacattggggtttgacatccttggctgtttgtttctattttttttttacaaagttcaaggatataaactgatttgtgaatgtactggaacttttcatagagaactctatttttctaaaattattttgctttgaatggtatacttatgttccttcaactaggggttatcatgtgtgtttgcttgttaatttagaagaacctcattttatttttctgttgcaggacttttctgctcagttggaaaaggagatcttatcatcaggtgataagctattttctttcgattccatcagtccgtagaattgtgttgttaaacagaacaataggaacgcatgtttctatttcctataattttgtttcttttttgtcttgatattttctttgcagccaagtttataacttgaatttttcatgtttctgttcctttccatagtgcttttaaactctttttctaaacagttgatattgcattatgaaattttttaatcatactaaatacttttttctacattttttcttctcaaaattgtgtttttctgtaacattaaaagtgtgcttcctttcttaagtactagttatttcacactaacctttcttcctacaagacaactcacataatttaacaagcttttaataattgaatcagatatgtcggcatttaaagcagcaaatccagatgctgtcttcgaagattttgttcgttggcactctcctggagattgggaaaatgtagagaagggcgagtcatctaaaagttctgcagaagatgattggcctcctcgaggaagactttcaaagagaatgtctgagcaaggaaatatgtggcgaaacatatggaatgattcacctgctttaccagcttctgagcagaagccacttctggatcctaatagagaaggggaaaaggttaagttttcttttgaaacatttaaccttttattctttagtacttgacatgtggtttagttctcattgacacattaaaattcttgcagatacttcattaccttgaaactgtacgacctcaccagttactcgagcaaatgatctgtactgcattcagagcatcagcagacacattaaaccagaccagttatggaggcttgaaggagatggaaaccaaaatggatcaactttacctcaccattgcgtcagttttgaagtctttacaaggttttgtttgtcttttcgtgtttgccttttgcttctcatgtagttggtaataaataataatggtggttgccaattttattgttttcagtgaattgatttatctcctggaagcgagacatttgaggaccttagacgactctctggtgtttttcaacatgttgagaagttactcacccttgcagcctctcttcatcgcaagttcttgcaagcaccacgactttctgaagccatctttcgggactactacaattattatcttccaagaatgggaacgagctccacttcagacaatgttccaaaggtaatatttctctatggttaattaagaattttgtctcttgaacttttaagttcgttaaaaattatcccttgaactattgagattattggatttaaggatctttgtctaattttaataaagaaagtctaacattgatgaaagtttagggagtgtagaaaatagtgattcgaattgtatgtagatttcatagaataatacatatttatatacagagttaggagactaaatatctactaaatatctactaaatatctaactttcttacagctaatatacatctaatatctaacactccccctca

SEQ ID NO: 218807 - DNA, 7109 bp, Cannabis indica
aaactacccacaaggtcagagcttctctctctagaatttggagttcctgatacttattctattactgtaattaccatctcgtgagaaataaaaacttgaagtagatgtagtcccattactatcgcgatatagggcgtgaacgactataaattagttgtatcgctctaaattacttaactacttttattcatcctcgccaatctagcgagtggatgtggcttagaagtctagtccagatttcttagtcaataataataataataaaataataataataataaaaggttattttattatttcttagccactaaaaaatttctaacactagggtatttggtcaactacgagtaccccaaaatactctggtaattctataatcaacttatctcaataattctatcaaaatttccaactaaatccgttgtgacatttttggcctccaaccgagtctctaaggtcgccaaatctgaaaaatatttttatttcaccagtaactcatattatacctgcatattccaaataattctccgtaattaatacattatgctaatttatctacttatggaaaaattcataatttatgctgaattaggttagtaggatcataaacttactcattactctctaattaatcccataatatacaataaatcctaattattcatatttagatttttgggatattacattttcagttgacaaaaacctataaccattaactccaacttggcatcccatcagaacccactttatagacctttttctcaacttatattctacattgtgtgcgtatgcagcacatccaaaggttatgaggtgtgcaagtgatggtggcttgccattcacatttcttctggtgtcttgagttaaatgactctacttagtctgctgttgattagataacatgcattatacaaggcttcttgccaatatttcttgggcaaaccagattcaattaacaagcatctcatcttattcaagagggttcttttcatcctctcagcaacaccattttacgtaagggttttaataacagttctatgtcttttcacaccataatgcacacataattcattaaatccatcacatgcaaactcaagtctgttatctgctctaagggctttgattttaaattttatttgggtttcaacatacattttcctatttttaaacttagacaattattcttcttttcaacaagaaacccaaaattttctactaaaatcatcgataatggataaaaaaatactggttatctctaggagttttgattcttctagcaccccacagatcagtatgtaggtactctagtacttgtttggccctaaattgactcatggagaattttatcctgtgtggctttccatgcacataagtgtcacggaaaggaaggtcaaaatgtttgtaattcaaaagcaaatttgtttagagagttctaccaaactttgttcactgatatggcccattctagcatgccaaaatgtggaatctatgttgcatttggtgactactgcagcttgtgcaagaatcttagtcttgccatccaagaagtacaaaccatggttcttgatacctttcattataaatagtgatcgttgttgttcctttactagttttgtgctcatatctctcatcatctagagtacctaaggagatcaaacttctcttcaaatctggaatgtgtctcaccttggcaagtttcctaattgtgccatcatagcttctaatggcaattgtaccaatgccaacaacctgacatttatcttcaaatttggaatgtgtctcaccttgccatcatccacaactgtattggagtcatttcctttgtcttcttcttccttcttattctttttcttgtctctttattcctaacagtttctgattaatgacctacttttccacaatggtgataattcctgctctcaattggtcttgatttggatcttgaatttcctctatgtcttgaattgtctctagatcttgaattaactcttccttttgatcttagattacctcttctacgttgtctttctcaagccattaaagcttcattagacctagattcttgctttgcttcatttttccaatttaattcagcatcacttgatctcggagtgctcattatatcttccaaagtgagagtgtccctgctatacattataacaattatcatttctttaaattggtcatgtaaaccattaagaacaatcacaactattcttctttaatggtttcccttgtgttagtaagatataagaaaattatattcaaatcatctaaattctattctaaggaaacagtagcattcattttgaaaccataaagcttccctttcaagaagatctttgtagcagtgaacttggccatgtagagttgatcaagcttgctccaaattcccaaagcagtattcgctccaataacttatatcaagacatggtctgcaaggttcattattattatagatcgagcttgtttcatcataatattgatttcattcttcttgaatgcatcaacttccttctcaaatttctaaacactttcttcaagtgctaaatcaagtttctagtatatcaatatggccatcatcttctccttccatagactaaagtctctcgatccatcaaacttctcaagatcaatcttgcagaagaggaagctatgtttgaaaggttcttgaatgttaatagcttgtcaagattgagttctcctcctcaaaattcctagctttgatactactgttgtaatcatacaacacagaaatcaaaccaaagaacattcaaacaagtcaaaaccaatcacaacaagattaaaaaacaagcaatccaaatcaaaaatcaaaatagagattaaaaatgcagaaaataaaataatgagacacaagaaattttgtacaggtttggccaaacaaaggacctacttcctattactccgctgagatcttctccattaatgtgatgaattacaagcttgagttattgagtgcgccctagagaaaaaatctagaaagaatcccctaaaaatcaactcgggttttagctccaagataattggtcttggtccagatttcccgtctctcttctctctgtttttttctctttctgtatctttctctcactcaatctcactctctctctcagttcattatgaattttttcttacattacaagaatgactaaatcctttaaatatggaataaaagattcaacctaactaccaggtgcacttaactaactaaatagaatgctacaacatttcaaaaaacattattgaactgatgatgcagcatttgactaaaattagttaaggttgttaaattcagatttgcttgttttacgaattaccaaacaacaccttctcttctccttctagcttctttggctgagacacacacacacatacacaattttatcctcttctctcactttctttatgctttggagttaaataggccatagagttgggacagtatgaaataatctttcaatcccgtacagccttagcaaactttgtagtggaatgtacaggcaaagaggaagataatacaaaggacaaccctgagccagtacaagagtccctaccagaagagaacaaagacaaacttacctggaaagtacatgtggacggatcagctactgaccaactttctggtgcagaaattgctctcatcacacctaggggcaacccctacacggagcaatcaaatttggatttaaagcctccaacaacgaagcaaagtatggagcactcatagttgggctaaaacttgctccggaggtacacactgaatacattgaagtctgtagtgattcacatctagtagtaaattaagtctcaggagagtacatggctcgtggagaaaagatgatggcttatctaagtaatatccaagacctgctcgcacaattcaagggttacaccctcaagcaagtcccaagggaagaaaatacaactattgatgccttggcacagcttgtaagtagcacgatgaccgataagtacaacttagtaccaatccaattcatggaagaacccagcatcaactgtgtagaagaagtcgaaatgatagatacatcgctgaactggatgacacccacagcagcttatctcaacacgagaacttccaaacaatggaaacgaggcttggaaaatgatgagaaaagttgcatggtatatcatagttgaaggtgtgatgtatagaagaggcttctccataccattgcttagatgtgtaacaaaagaagaggctgcacagctcttgtccgaagtacatgaaggattctacagtaatcatgcagcaagatagagtttatcaaagaaaatactaagaaaaatgatatttctggtcgaccatgataaaagattgaaaggcctatgtaaagaaatgtgataaatgccaaagatttttaaagatccctcgtgaaccccccaacaagctaatataaacgcaaaatccatggccctttgtcacatagggaatagacatgatcagacagttgtccaaatgtaagggcggggtgcaatatgtaatggttgtagtggattacttcacaaagtggacagaagccgagcccctagcaacaataacatctaagaaagtgttggattttgtagcaaaaaacattatatgtcagtttggactttcgcagaagattgtctcggacattggcaagcagtttgatagctagatgttaactgatttctatacggcacatggaatcatcaagagtttctctgcagtggcacaccctcaaacaaatgggtaggttgaggtagtcaacaagacactcaaagacaccatgaaaaagaagcttgaagaaactaaaggaaattggctagaggaactactggaagtattctaatcatactaaacaacagaaaggacagcaaccggacagacagcattcaccatgacttatggttatgaagcaatgctacccattgagtcagaacctccatcccacaagagactgacctataatcaagaaaccaatcacgccctcctagcggaatcacttgataaaattgaagaaaaaagagcctcgacagacctaaagctagtagctcatcagcaaaaggtggttcgatacttcaacaagcaagtgagggcaaggaaattcttcgtgggagatatggtccttagaagagtgttcttaaataccaaagatagcgtagctggcgtacttaggcctaactcggaaggaccataagtaatagaagtcatagattctggagcatacaaacttggtcggtataatgaaaacatggaacttgttctggtaccaaggtattagaacagggaacatttaagaaaatactacaaatatgtgtgaaaggtttgatgaccccccttaaggtacacaattctcggacatctactcttaagtagatggccttctaagcggacctcgctcgagggtttggataaaacgactgacactcaggttggatgacgatctctaaaatacagtctagaaaaaacaattattttatgttttaattagctaaagatcagttagatcatgtcatagcttttataattcaataaatttaagttactacgataacaaaattattcagaccaataaattcataaagatattaattatcattctaattgtgtctattatttttctttctatagcaagctatgaaattaccgttaaaaatgtgtacaaagggtctgctcgaacccaacaatcaaacagacaaaaacaaacttgtgcaatgcaagtgaccaaaagtcataagtctgctcggtcacttgggggcaactatacccgtacaaagcataggtaaataacaagctcaaaagaaacattttcatgtgcaattacttaagcttaagggaaaatattcatttcaaaagataacaaagcatgataattctgggattaaaagctgcccggctagctagttatcttaaaacaaaatgaagtattaccaagtttaaaagtttcatggtcagccatcttgaactgaaaaaaggcccataggacgaattgaaataaaaaaatgggaaaggaaaaacttcacatggctggagtccttggctctctgtacaggtcggcgatacccttagtggctggggtgtcagtactttggctggtcggagcttcgaggtaggctgcctcggattcctctttgtctttttgggcctcataaaagctaagataggcctctttattttcattgaggtaatcaaagtttgcttctgggtttgccttccaaagctcatagaaaatatctagggggaccgtctctaggttgtctgcctccttttgaagcgcctcccgctctacctacctgaacttgagactctcctctaaaaccttcttttccttggttaagttggaaagtaaggtctgaacgctttccctctcatctttcatagcattgacatctttggtcagagcctcattgtctgcttcaagctaagtagtggacggcatatccttgatctcctgcagcagttcttcaacataattgttggcaaccagaagttgcttattaacctcgcccagcttcagactcttctccttggcctccttcttggcttcttccacctcctttttcaagttggtggtggtcgttgtggctttcaaggctggggacttggctcggaagtaagtataagccatcttcaagttgagttacgcaaagaagaaaagttaaaatctacatggataaaagcatgagaaaaagaccaaaggaaaagtacttactcgggtcgtctccttcagtattctgcccatgagcagctccatagacatgtcctgccccttgagcagttgatcgtttacctcaggaagcacccagtcttagtaaaactagagcatctccttacccttcttagtctcagggttcagcatgacaggagtggcttggggcttaggtagcctaggcccatctatactccctcctttggcacttttggacaatacagccatcgcctgagacttcgaattcctattggccagtgggttcacatccaacactgtctcctcacaaacctcagttataggcgtggttaaaccctgttatagtgagatttctctcacctagaaactcgataccagactcttatttagaggacacgtgtactcagattt

SEQ ID NO: 218808 - DNA, 2676 bp, Cannabis indica
aagaagattaacctaatagaatagaaattaacatggtcattgagatgcttttatcactaataattttaagcaatttacagtgtaaatatttaagtttaattttgagttataaataaatacaatttttaacggcaataatacctaaattatagttttaagtgcctgaccgttaagtgtcaaacagtatccacatatcattttttttattcgtatatttaaattaacttttaattaaaaataaaaatttcataacctaatcaatcagaggctgacacagtaatttatttgacatttaagggtcaggtacatataaaatataaaattataacttaaatattattaccataaaaaattaaacttaaagtatttatttgcaaccaaaagttaaatttaatatttatactaaaaattactctaataatcttctaaaattataactatttgtaaaccaaaaataataatactttgttcaactcttttgattgcacagccaggtttctagcatttatttacattttataaaaaaagcaatatatttattcctaaagattttctgcatcgcttgaaccaggacgagcatcaagatccaattcgtcggccacatcctcgtctatcctccatctgacatattttagatatagacactttaaaaattacaaattccgagaaaagagaaaagagatataatattaaaccaatcataaaataacacaggcacctctcaagcacgaatttcccttccttgtatttttggttcttgtcatgtgcaacaacctattgagattccaaacatagatcaggtttcggtaataaagtaaccaacagaattttgtagcatcttgcaaataagtgatctaaagctataataatataactcatttaccaaaatttatactctaatattgtctcaaaaagtgatgcaaatttgtcacaaacaaatatatagtgccaaatttgacacaacatatgttatgatgcaaatttgtatatcacttttaatattttattattataatgaactataacattaactattaattatatatattataaatttttattctcttacataataaaattaatgatatcccctgtttatactttttaaaaaatattaaattttgcatcaaaattttgtaattatacattagagcacaatactaaaaattaatgtaaatatatcacaaaatctttttttaaggccaaatataacacaatttttgggaatgggagatgctctaagatcagcttatatcccacaacatatttcaatttgataaattataagtccaacaattatgaaatgaaaaactaaagattgagatcgaaaggcagcgcaaacttacatatttccagccaagaatttggccacaacagcagcagaaaatatcttctacagtgtgcaaaccagaaagcatcaatctctcctcctcattcccaagtgtaacattaaccctgtatcgaaattctactaaatcagaatcaaaccaagaaaagttaatcataatcatagtaatctagcactgacatacaatatattcattccaaaactaatgagcaacgaatcattctgcatgctttgttaaaaagagtagtattttggaaagacgagaatgacaaaaatttgaaaaacatcatttatgaaccaagtaggatgattctttcactcatagattcataagtttcaaattacaaatttctactatccctttcataacagaataagcaatgcaattattccttctaaatcgaagtctgaaattgaaaatgaaatacacccaaatcaagtttctaagagatcttacacgttgctgaatagatatgctctccctttacggcaattgaatgtctaaagcacaattaaacataactagttagagtaaaaccaccatacattatagaatagaattgttaaaacataaactatacatgcataaaaaacaaaaacagaaaaaggacaccaaaagggctgagaggcaaaagaaagtgcataacttctagtagcctaagctaggtttgcaaatacatatataaagccagaaatattttgattataagattctaaagtagcaatcaggtctcaaaaaaataaaaataaaaggctacatttgccaccatttggtcttcttacaacccacaattcaaaccttgtgaataagaacagtaaaatgagtcatacacaatagcacaatttgaaacctggatgaaataaatggatttagattattttcgaattaacactcctaacttgattgttaaataaaaaatttgctggtttatctgcataactcgaaaatgaccaaacatctacttaaaactgtacagaattatattcattataactattatataaagtacattaaattagtttaataagttaaaaacatgataattgagtcaattgactggtaaacatatagtgtataaacataaaaaacttgtcttaaacagagttgataacttgtccaaactatgcatgatctttttacaaacgagtaggttgggtttgaattgtagtttttaagagattaataaatgactcaggttttaatttggcgtttgcttctattacttgagtctccacactacacgaaacacaaattgcacaccactcctgtttgtgaatattattagtcaaacagtaagagcccacataagatgctttaaaataaaaaa

SEQ ID NO: 218809 - DNA, 2105 bp, Cannabis indica
ttatccttttatctcatatgtatgacaaaaaaaacctaagcaaatataatattaatatatatataatatacactactaatttatattattcattatgtatatatataataaaataaaggtgaataatggagaggatgatgatgatgagaaggcaaaagacctaaagagtagagggctgtgtctggttccagtgtctttcaccgaacacgttggaagtgataatggagctgattattgggctccggacggcttacggaagtgggttctgatcactgcattatatgaccttaattaattaataaacctatctataccactaataatattattaattattaattaatagggcattatattgcttattattatattattattaattagtcatctcatattgttataacatcatgagcggtcactctgttgtaatttaaggttgagtgctcatgatgctatatgcatgcatttatatatatatttcttgatcaaatatcatatatatatatataattaatgtaagatcttaagtgcttatatatatagtattaattgatcgtatttttcttattaagtccaagcaagtcccgcttattaattaaatgatgaatcatgatgcctgcctttattttgattattcgattcttccatttttatttttattttgaatggtgtatagtaaacgcgaagaaataaaatataatggacttatcttttagaatattgtgttagcattcttattaggccctatatatatgtagaactatttttatagatgatgatatatatggtagctagggtgaaatattgtgtaattaattaacattttcagcatagtactataatatatagcacatattaaaataaaaataaaaaaaaatctccgcactcatcatcatagtgatgctggcagagctaagttctatatagctttctcagtatgaccccattctttgtttcttaaccgtggtcccctacgctccccatataaatatttgtacataatatattatacacacattacacgagcacagggataatgcacacaaacgttatcgtgacgtttgtaattgcgtcataaataattttccatacataaataaaaaagagaattatataaataaaacaaggaaaatttaattaatatttatgcatttggataaaattagtatattaagtgtatcaatattaaacctaagaccctagcaaccactgttatcaactatcgcgcctccaattgaggatcaccaatcgaccaaagactacaaatccaacacttaggatctccgaaccacagttttctatttcattttattatattttgtgtaatttaaggttaaaatgtatagttttatttatagatttattgatttatgaataaattgtataattaatatctgttaatagtgaattgatataattagatttagggtaaaaaaacagtcagatctcagctttgggcaaaaaattgatttttttactaggcctgatcgatggtagtctgacggtggcttgatgccttcttgttgtgaaaatgagtaaaaattaaagacgaaagtctgatggtggcccgatgccacctataaaagtaagatatgatccaatggtagtctgatagtggtccgatagtagcccaatgccttcttgacgagtttaatgaatgaagcttaatatctataaatgtaaaatatagtctggtgatggcttgatgctaccatttttaatgtacaaaaacataaaaagaaaaagtgtattaggccaccatcggactttatggatatgtatcaatggaagataaagttaggaaagaagagaagagagaaaaatataaatgcatatttatataaaatgtgcttcttattttttaattttaataaacttgtatttaaaaaatttaatatacaccataaaaatatatttatgtatataaattcaaattaccttaaaacaacccatataaattaacatttaatcattcataaataataataataataaatttgggatatagtgcatgctatataacgataatgcgaagtaaaactaaaagcataataatgattaattagcttataaaccataatttgatttggataattataatgaaa

SEQ ID NO: 218810 - DNA, 4892 bp, Cannabis indica
cttcagtggcagtgtggcacacacagacacaagcatccaaacacacaaggcaggcatacaatcaaaacagtaataaaagcccaaaaaaaaaaaagatgaatcacaacaattaaagtcatatttgctttaatacctgtcatcttcacatcgaaacaaactttcttcatattggtttttgcgcatgtgcttaaaagagtaatcctcacttcctgaagtgactgaaacccaatggtcatttaatacttcagcacccagctctgatctttggctaacagaaggtatcggatactgcatacaacaaaataggtaaaaaataaaacatccgtaatgaatgcttaaacaaagaaatgaatacatcatcagaaatgtacagcatacattttttggcagaagacgatagctgggggtgcaacgctcgcagttagaaaggtcaagttcattaataggtttcccaatatacttatccttgctggagaacaaagacatcttctggcttccaacatctttatttgcataggatgaagccttatcactcctttccctttctctgctttcccggctttcacgttctcgatcttttatgccatcatctttatcacgctctcgatctctatccttttcctctaacttcaccgatttgggtaaatgtccttcattccacaaggattctgtaatgaattcatagtaaagaaaaaattcataaaaccataaacaaatttcataaaatcacacttaaaaatattctaaatatgatttcaggatcttgtaatatatatatataaatatatatatatatatatatttttgaaggcagaaagagaaagttcttcatctcctatcacaagaacttttaaaataaactaagaaaacatcttgcattagatggaaagggaacaaatcactttacgtacttttactcatgacaccagcaaggaacccatctgcagcacaggactcaattagatacaagttccacatacagtatccagttcacataaaatttgagattagacaattaccattcttctcacaacgtgacaaaaattcattgaacccatccataagatctggatattttccaagtagatcacccacctggacaataaaaaatcagaatatttactgccccaaaaataactaaattttaatccaaggagaaaaagtaattctgaaaaaacacgcttactccatgacataccaaagattgcaattccgaccgagttataatttccttgctatagatatgaaggcacttcaaaaactcttggtaatcatcagcatttcgtaatttctccttcactttctcacagaaagcaaattcttggccatatatacctgccacaccacaccatgcaataaattaaagaactgacctataaacttaaattaattaggttctaatgtatggaacactgtatactcactttttgcagaacttttatcatcataaggagatgaaatgggacgcaatccaaaatgttcatcaccatctccaccttgatgaatttgttcagcagctgagtcttcgatcttacgtccagatttccttttatgaggataacgctgcacattgaagtccctattgccatcatgctcaaaatccctgtcatccctttcacgctctcttctttctctatcctctctcctttccttttccttttccccccgcctgcgctgatctttgtctactttcattagggatctatcatggtcttgatcaggacggtcaacactaaggtcccgatctcccatgttcctctctttctgtcaacattgtaagaacaccaaatgtactacactcgatcaaaaaactttttttaaaaaaacataataacaaataagaaaaacaaaataagcaagttgagcaatataaaccttatcaaggtgtatttgacgcattgtgggcatggcagagctcctatcacgaagcagagaggtcctaacagacaggggataatgagttgaggcagctcctgatgtgtcgggtaggaaatgtgtaaactccacaagcaggtctgggtgctcttgaaacaatgttgcaacctgaaaaaattaagacattacaatcatgaaatacatttacagaccatcataactccacgcaccagaccaaaggagtgttaaacacacctcttcgtagacttctgtaatagacttgttttcctttctgtacatgttcaaaatgtctaaaaatgatttataaacatgatcatcgccttgaaaccgagtctgcagggaggaaatttattggattagacaataaagttttttctttttgaaactaggatgccagcctaacccaacaatattttgggatagcatttggggattaagaaactatagcaattgctatgtaggtacccaagagggactcaaacctcagaccttgtgggagcaaacctgaccatttgagcccccctctttaatcaatgagaccataatagtctctaataataatactaaatgataaataatcttaaaacaaatcatttaacaagagatagatccaccttaatcttgttcacaaagttgatagcttcttcaaattcaacaggcttcttttgcagaggctggtcatcctcaagaggtagggtaatctcatatccttttggcaagaaggtattgaaacccaaaatcaggtctcgatgtcctttgaataaatccttgaccctctctatcacacccgcagtgtcaattctacaaccaatgtcgtcaaagattttaatcaacaagaagtttaaaaataaaaggactgcaaagaccaccatttgagaacattaatagaaaaatgacgcaaatttaatggcctgattatcaaacctttgagccttaaaatccttcatcacttcaagaaagtcttcatacttatcccttttgtcctgaaatatgtccttcacggccttgagatatgctagtgcgtcatttgttgtaagtttctgggcgccacctcctcctatcatctggggttgccccgagcttcatttttcccaaaaataaaataaatgataaaaatgttaaacaattgattgattaactagtagcaggattccactaatcatagagtatatcagggaaaaccaaagattacaactttcacgttaactgcaacataatatcaactacccataacagataagtcaataacaaagctctaattcgttttctattccgagcacggaataataacgaaaaatccagacggaattacagtcggagcgtttcccgacatcaaaaattccgatcttttctaaccaggtcaaattactcggcaatttttcttaaaataaaataaatttaagatttattaaatggaaaattttagttcaaaaaataaaatcaatgacctcgaactcaaagaacttttataacaataaactcaatttcatcatcggaaaaaataaattatggtaccaagcagaaaaactaagaatagtagatagccagaaaaaaaaaaatagtggaacaaagagttagaggagattgaacttacggttcaccacgagaagagaccataggccgtttgagttgagagcccatgtaaacgtcgtctctggacctcttcatctctctaaaacaaaattttctatctcttcagtgaaaaaccatgcttcgaattccgattcaaagccaaaaaaaagcctacaaatcatctacttcattaaaaccaaagcaaaaaccacaaagcagatctaagccaaacaagaaatttgaagaaaaaaaaaatatatattacaataataataaaaaaaaaactaaattacacaaacaagcgaagaattctaatccacacctctcaaacagatcaccacaaacaaaaacagcaaattacatttcttgaagccaaagcaccgctaagaaaagttgcagagaaaatacgccaaacgaaacagaaaccaaaatttagagagcgagatcgttgagtcttccaatattagccaccaagtcttgttcagcacacaacatatacaaagctcgaatatgatgattatgcgattcttcctcaacaatctccgatggagggaatgcgataattaaaaaacggaaaattacaaaatttaaattttgttcttctttcttcaacttattcttattctcttcttcttcttcttcttattttctctttttctcggaaatcaaacagaaagttagaggacacaacagaaggtgaaaatgagggtaatcgagttaagattgtgatatataaataaatataaataataatgtatattataaagttgaaactggagacggagaaaataggggtgtccagacagtaatattgacgctctgtttcactacccaggtttttctttagcgatgtgtttaccggtttacagcttatagccggtcccgaatttgacaaaaaattaggacattacttttgaggggtttgctgttacctgatgacaaaccacgtagtggcaaattttagtaattttggtcttacttagggatatagaggtcaattacaactagtttatggcttttacttggtgtgccaagtggtggtggatttacacataattggggaattagggttagggcaaatgtgtacatttcatatttgtttattctttttctctttttctttttttctttttttggtgagaaaagagtctcaaccatcaccactaaagggacgtttgtataaggtgttcaaaataatttggttataagaaatattatgaaggagaatatgattatagagaaatgtgtaaattgtgtttggctgtgtagagtaatatgtaatcatattcccgttaattgaattatactgtttggttgagtacaggaatcttatatattattttaaaaaattaaaattaaaatatttttttattgtgtttatataatgttaattatacataaaaataaaataaattaattctatt

SEQ ID NO: 218811 - DNA, 5077 bp, Cannabis indica
ttggcatcttcaaaagaagacccagatttagtctatacaatacaatgtaattacaacttccttttgtattatatattacaattcacgactgcaactctaaacagaaaaaaaaatcagttggcttcagctgctatagagcaacagacagcagtagctgcttctaaaccagtcggcatcagcagaaagagaagaaaacagctgctatgccaactggtttgtgtttctttgtccaattacacaacactctattctttacatcttcctttatagcacggacaacaacatcttgtgctattctccttgaattccatatcaaatcattgcgatttttccaaacattgtacaccagagcagccactgcagcagtgattactgccttccgaaacttgctcattttcgctctttccagccacctgcacaatctgctcaagtctattctttcaactctccaacctagccaagctttaacttgagagagacaaatagtagagaaaggacaagaaaagaaaaggtgctctgtagtctcaggatgatccatacagaacaagcaatagtcttctgcaatgatgttgtgtttgtacaacctctctctagttttaagtctatcttggattgtaatccacaagcaaaagctatgcctagggatgtttagtctattccatacctcatgactccaattcactttgctttgtgaggggcagagatttgtagccatttgatatgttgtatttggcgcttacgaattgctgaatgtccataacacatttgatttgtgtttaaccgaattcaatttcctccattaccagctagcctgaggtggagcttgataagtccaccaatcctctcccttaatgtatacacagtgtatccatttaatccacaagttatcttctttatttgaaattgcccacacatattttgtcgttgcagcaatgttccattctgctattcttttcaaacctatccccagctgcttttggttggcacacatgatcccaagcaattggacccgacccttgagaaacctgatttcctttccataagtatgctcgacagatggcttcaatatcccttatagttcgctttggaagcaccataacttggctccaatatgaatgaattgacatgagaactgagttaaccagaactgctctccctgccaaagacaagtttctagtactccatattttgattctggctgtcatcttatctgctagaaccatacattcctttcctgaaattcgtttcgcacaaatagggatacctaagtatttgaaaggtacctcttttttgctgaaacccgagcaatcaagaatgcgttgcatttcagagtcttccataccacagcagtatatagcagatttattaggattcggctgcaggccagatgaacacgaaaacagtttaagcccctgtaacagatagtaaataatcttataatcgccatggcaaaatagtataacatcatctgcaaacatcaggtgattcagtttgagttcagcgcatctatcatggaacttgaactcttgtttagctccaatcttcagcattattcttgatagatattccataccaagaacaaaaagcagaggtgacattggatctccctgtctcaaaccccttttcccttcaaaatatacatgtaaagaaccattgaacatgagtgaaaatttgggtgtacgaacacatatcatgatcagcttgatgaatttctcagggaattgaaatgcataaagaatttcttgcaaaaagtcccaatcaagagtgtcatacgccttctgaagatcaagtttaatcatatagttggccttagcatttttccttccatagtgtctgatcaagtcctgacaaatcatgatgttatgtgctataaaccttccagaaattaatccaccttgcttttacgcaatcagatcaggaagaattgctttcaaccttgaacaaatgagtttagtggcagttttataaatgacattacaacacgtaataagacggaagtcacttactgtatgaggaaatttttgtcttaaggtgatagacctcaagaagttgttccacaggggagtagagccaagtggttgcaaggtgtaacgtgccagataagatgcatgatacaatttaggtgatgtctatgaggtggtcaagtagtggcaatgttgtggtgcaagttggggtgcatgttggtggcatgcatgatgatgcctagtttgtacgatagtgatatttttataattatcttaaaaaaaattcgaatcgggatgagacttggtattcacaatttatttggatctaggaatacaatggtgcaatcgagttttataaactctaagaattggtatatggtgcaatcgagtttgataaactctgagaattggtatatcgtgatgaccatatgtctacagagcaaaaataatatatgttcctcgtagaaggctaaaagtttttaatgctgcttatgggggaaagcttggtttcaactctcccccaccctttaaaactttggtgcaagtgagctattactagtcagtgagacttgtagggcggtcataaaaggactacgaggagactcatatgtctcaatgagttggaatactcattgacattatcgtaccgactcgacaatgcgcttggacatgccaccagaggttagctggtacattttcattgacttactgatatgcttcttgcatggagtgtggcctaaatctccaggatgtgaagtgcgccttggccaccagttttagcacgaaataacacgggtagtcatttgtggactagcctacatatgtgcgtgggacgaatgtcaatgctagaaaaatacagaggcctatataacttatgcttttagtatagtggcttgtcttgaggacttactgacatgtatgagagtccttaggtcatgagggagactgctcggatagtatcgaatgggacatgactagaggtattggcatttggccacacatgctacctactttagtcacgagtaactaggtgagcagcgatgttagaatttttccttaccgtaatgagaacctatggaaagtgggaatattttggctagagagcctcgatgtgtggatgcactcataaattcttgcaagcatgactcggcaggagttgttcacagaagtatgcacgaggcacacaatcccactaaaaatgaactcattgttacttggatagctggaaggctaacattggcttagagaaatcaaggtgtcgcgcgagtatatcgctgtttgaaaatgtgagcttgtgacacgaggctaggtagtgagacccctcactgggaccacaaggtgttcgagctgagaaaaaaaagagacccttatcaatgccgtcacgtggtgcgctagctaaatggagaccccttgatgggaatagcaaggtgtgcgagggaagagagaccgcgggatgaggaggttgccacagggtcctaccttgtgtactaaccattaggggatccgtcaagaatttcttttaagttattgccttctcattcggaataacttaccaattaaatttgttaaattcgaggtgaacaataaaatcattattaagtttttttatagttcacactttttgatttatgatgtcccacataaaatttttttgtgaatattagtgataccatacaagcaagtcactcaaccaccaattagctctcagatagaatcacaaaatttttaacaataattatgactgccatcaagatatatagagagagtctctaatgaatttgactatagtcaaaaacataaggtatatgtttatatgtttaccatccacgttatcttttaggtaatttcacatacatcataacagcttaattttttttgaaaaaaaataattcattaaatagaaatatctgctattacaatagattgaagagcagaaggaacattgctctcagtaaaaagacaattagaccaaaaacaagcactgcgagcaacacaatgtgcggctttgttagcagatcgtttcacatgacaaatagaaacattatgtaaagaagaaaaaatcaattgacactcttgaacaaacaaacaaaaaaccgatggaagagaaaccgagctattaagagcttgaacaacagcaatacaatctgtctcaactaacacaattgagaaattcttcaacttcaaccaactaagggcctccttgacgcttaatatctcagccacagccagctgacaaatcctagaatgcaaagaggaactagcttcgattaacttcccatgacaatctctaatgaccatgcccgcaccatattgagttgttgcttcaaaaatcgccccatcagtgttgatcttcagcttcccagcaggcggcttcacccaacaaacactgctaccaacaacagtagcatcaaacaacagcggttcaaacctgttctcttgagccaatagccaactagaatgacacgaccttgccacttgaaccacatccgcatcctgagaagaacgaccctgccaaagaagctcatttcgagctgtccaaataccccatgccatcaagagctcatccaccaaagccactctaccccctgttagaaacgccttaaaccaatgggcaaaagtagcttttgcagaaaaatgtaatcccacacccgacctatgccaacatgattgcgcaaaatgacagccaaccaaaacatgaataatagtttcttcatcagcattgcaaacacgcagcgaggatcaacaggaacatgttttgtacacaatagggtacgagttgggagacaccccgagatagctttccaagcaaagtgaagaaccttgggagggactttaactttccagagaaccctccacaattcagactcaaattgaatgccccattctcctttcagttcttggagatagcggtaggagctcttaactgagtaaaacccattcggctctttaccccaataccaagaatcaatacgaacattatcactcaaaggaacttgcattatcaactcaacatcgcttgcctcaaacaaatcatgtaagacctcaagatcgacttgcttactgaaaaaccgtgtttttgcaaatgtcagttgtatataagaaaatataaaaac

SEQ ID NO: 218812 - DNA, 2520 bp, Cannabis indica
aaaatctaatcggattggatcggttgttggatggaacatctgatccaatggataactggccaaaccgatccaattatcatctaatggtcatccaattatatttatatatttttaaaatacatttataatttaatatattttatttaaaatatatattgattgatttaatatacatttagcacatgagattaatgaaaaaaaatcttaaatctaaaatattaattctcatctttctaaactctaataaaattgtcaatgcgtattgaataaatttattatttagtggttatattatgagatcatgaaaattaattaggttggattaaattaatatttattaagttttaaattatatttatatatatattttttttttaacgaaatcaacataaatggtagttaaagtagattagatgcatctattttaatccaatagaaaactaatcaaaggcaatatctaatggttggaaccgatccaatccaatacatccattggatcggatcgaatcggatgacttaattcaattggattgaatcagatgacaaaatttaatatctaatattagattggatcgattgggtctaaatccatgaacacctctactatttttaatatataaactagatatatatacttctaaatgtaaatgttacgtgtttgatatgtacatgcactcaattattatatggagaaaaaaatcttttcttcacttcaaacccgaggatattaatggttgcattaatcaagagataattgtcttttgcatctctaattctgtatattttgaaataatgggaataattaatttgaaactattgagatgcataaacaaacaaaaataaataaattgatagtaacatgatttaaagccaacaagatgagaatatatggataacacccaaaacgtaataatatatattcttacaatatttgttataataagtttacttagaaataggattaaggttgggtttgatttaaacatactcaataacacatgcctccatgttggttgttgccagaaatttatacatatcaccatataagcttgtcctgtaccatatacaacctttatatttatatataaatttatagaattattgccgaccataaatcaacacattataaaaattaattgtaaaaatatatactcatttggctgtaaataattcttatttaaaatcaaaggcaaatactttcaaatcaagatcttcatctctgcacatggcttgcccacataaagatttgtatcattactctttttttttttattatttatatacatattatataaatcaaaataaaaaaaaataaagtgaagggttgagaatgtgcattttggttgatctgatgttcctctgttgttcccacgagctacatattaattaaattaaaggattaattgtctctcattaggatgtgattgaattagaccatgaacaaggcatcttattatttatttatttatttaatttggatatatatacatatttttcaattgcattctgtccaatatatatgtagtccaacttcccatagatctctaagaaaacagcttatgattattcatccaaacccatgtgcctatgtactctctaataaggttgtttttgtcatttttcatatagtttctgtccaaatacttgagtttaattatgaaataattgatgaaactctgaattcggccatcatcttattttcaaaaggacaataatacccctaataccgaccttgttttatcatttataggaagtacatgtgactatgaattggttgtctttagccttccccagaaaaatatatcctaaactttccaacaattatttctttatttactcaaattttgtgaagccatttattatctatttcgaatcaataaatgagactttttttttaaaagaaaaataaaatgagacttacacgtgtcattttcaataaatccaagaaattccatatgtttttggattagactttcattgcaggaaaaaggtcatcttatatgctacgattaaaaaaaaacgataaatggaaatgctattgaaaaatgaattgatactttagactttggtatttcaatttagagtaaattttgtgtatttatttaattagttgttcaaattttaacataaataaattaagaaaatcggtcaattgagatccgtgaaggaatgaaaattacagcagtgttgaccaagtcaaattgtaacatttttttttcttctatttgcagacattaaattgacttaaaaattaagaagagtatatatgccaccaaagaaaataaaaaattgtcacgattgcataataataataataatattaataataataataacattacatatcttccaggaaagtggcactatgagtatgaagaggcatataggcctttaagagaatatagtggtagaattgtaatttgatcgaaaatgaggggcattttcataaacggaaagacataaaacccagtgtcaccctttgtgatctcaacgccaactccaaactctctctctctctct

SEQ ID NO: 218813 - DNA, 5603 bp, Cannabis indica
cacaaaactaaaatttagtgtaaatttaccacaaaactacattttgtgctaaatataacacaatttttacatctcttatgggagatgtattattatacatattcataaatgctaaagggcatcagtattgtctagcaccttcttatgtgtcaatatcgctattggtctaactaagtaacagatctcatatagtttaatataataatttttaaaaaatatcattaaccaatcgcaacgcgacatgtcaagaaagtgttaaataccacttgtgtttaatagcaatactcatacatattttaaatcctaacaactaacaagagacaaaaatatacatttctcacaattttttttcttataaacatttcttacatttattgtctggcatgcacttgcactacaatctatatatttatttgaaagacttctgagaatcagtacatagttcttttacattatacatatataatcacagtacataatatttgggataattttctgatcacttttgacttttgagtcacaaataatagaattttgatatacaacacttaatacttgtttattttacaaaacatatttttttaaatgtcaaggctaataacctgtttcttctttcttcatgttatgatatatatggaagaagataacgataaaatatgtataaactaattattacaaaacatagtagtgttcctaatttgtttcacaagcaaaagtaaaaagaaatagaatcacatgcacatcccaggtataggggtcacatgcaaatacgtacacacatcacttgaattgtactacacgtaataataatatatatgcatcgatcaacattgaacacttgtacacaaaatggacaaataacgattcagattaaactttgtgtttcctcaaaaattagaaagaaaggaaaaaaagatgtactgaaaatgagatcagaggaaacacatatattagtctatagaaaacaaaaagtgccgtacatgaccagcactacttgtttagttggaacaagacaacaattaaaatgactctcgcttatttaatatattatcataagactattaggtgttcaaaataaaaagaatttattaatatgaaaggctaacacttttatgtataatatatataataatattattgatttccttttgagattgagtacatatacttaaattttggaatcggaatatcatgaatcagatccatctcaatttgcatgtgattgataggatcatctaaggtgatgaattgatgataagtttatttaaaaaaaaatatatatatatatatatatatattataagcatgtgaaaactacgatttgatatttatttatcaaactaattatgcacaaagattaaaaaagaaaatatgagttttcaaaaagaaatataaatatgaagagggaaggaactcgtacacatagattcactagctatattattttatttatattatacataacacgtactttttatatattatatatgattaaaataacatggggatttctaaaaaactggccatgtttattggaggcgatttcacacgtgagaataattggacacacatcgttacatatattttttttaagaagatgcactcggcacattattacatactagtataatcattgaggtcgcacatttaagaaagaaaaaaaattatactatttgtcggagaaatttagacaacactaaaatacgtgtaaacaataaataaaacaaacgaaaaaagcacgaacactcactcagagtagcgagtattcaacattaatgaacatgctggaaaaaaataaggacaaaagaaaatatagtagttcagtcagatcacggtctccttagtccactgttgcaaataatttctgtcatttctcatttaatttggattactcttttatacaaaaagcaagtgtccttttagttttacataattatcgattgtagaaccattttacaataaataatagtattaaatctaaatgaagaacagtttaatctgttctaataataagtgcaacaacatatgcaacctatcgggtacgagttgtctgttcatattctcgcacaagctcgcaggctttaggtgcgttctatattcgctaaatggctaataggcctatcactcgaatgtttgcgttcacttcgaatcatattggcagtctcgtgtgttgacaacatgggacacgcgattccttatcgagtcgtcgaacacgtttcgtcattcggaccaattgttatgtaaagaagcaatctttacttagtcgcaggagaaggctacttagtcatcgcatgcatatatttcgatatatgggcaatttgtgtaagtcctctgagtcttacttatcttacactacgcaagacatagtatgcgactaaaccctatcaagctcacatcatctcgcgagttcagatcaagcgaggttcactctttgagagtcattaataattaacagctcatccattcctcggggattggatctacgtgtcaattttataggagactgctctcgagtttttaggcaaaaaattcacactataacacatgctcctagtttcgcaattgatagttgtatcattagggaaactattagaaagaggcgggcgagttattgtcacgagatggtgacctttgattgtcttgtcgatggttttaaaaagacagttgtaattattatttttattatttcaagatgccacgttgttgaatctcttcgccattgatgaacacttaagcaaacaaataaccagaaagcagaagaaaaacagagacgaagagaagatgaagaaaaagagagaaaggtaaagaaagagaagattgagacaaagggcaatcttattgaatgaacatgagtgttggcattatataaccaacgattacatgaaggagaagaagctagtagttaacagaaattagttagagcaaacagtagcaactaacggatttaacagactaaatgtaacagaactaactaattcccctaacacggcccctcaaggttacaatttgaagtatctgcagaatctttgatgtcttcaattgtaagcttggaatgaaaaatagagaaccggtttgtagagattgcctttgttagaccatcagcaagttggtcttgaattggtacatgtttaacttgaaccagtttctgaagtatcttctcaagcacaaaataaagatcgagttcaatgtgcttggttcttgtgtgaagaactggatttgctgtgagaagaacagtgctgagattatcacaccatatcacaggaggatgtatagtcttcagtctcagttcagtaaataatgagtgaatccaagtgagttcagcaactgtacttgcaaggcttctaaactctgcttcggtgctcgattgtgatatggtgtgttgctttttgcattgcaaagcaacaaggttatctccatagaagatggtgaaaccagaggttgagtgtcgaccatcaatatcagtggcccaatctgcatcacaaaacgcaacaacttcttgtaacgaagactttttgagatgcaaaccatgattgatggtaccactgagatatcgtaaaatcctcttcacggctagccagtggcttaattgggatccttcatgaactgacaaactttgttgacactgaaagaaattccaggtcttgtgatgaggaggtattgaagagcaccaacaatagaccgatatagttgagcatcaggagctggttcactaccatatgctgataatctgagactgctaaccattggtgtaagggatggttttgcatcatgcatttgagccttaaagagaagatcccaaatgtattttgcttgggagaggtgtagtccagaaggtgtagattgcacttcaatgcccaaaaagtagtgtaaatcccctagatctttgagagagaaccgactgttaagagcaataactagaccatgaattgctttattgttgctgccagtgacaagtatgtcatcgacatacactaacactaaggtagtgtaagtggatgagtgttgtatgaaaagggaatgatctgatttagatggaacaaatccaagttgtaggagacaatgatgaagcttgtcaaaccaagcacggggtgcttgttttaagccatataaggctttatgcaatttgcggcatacaaggttgggaggagaggttatctcaaaacccaggggttgtagcatgtagacttcttattcaatgtgccatttaaaaaggcattattgatgtcaagttatttgatttgccaaccattggaaatagcaagagtaaggacaattcttattgttacaggtttgacaaccgagctaaaggtttcagtaaagtcaaaccccagttgttgatgaaagcccttggcaacaagacgagctttgtacctgttatgtgttccatttgagttctctttctcccttaaaacccatttgcagcctatgggagttctgtcctcgggtagtggaaccagagagtaagtttcatttctggttaaagccaacatttcatctgtcatggcttggttccattgttcttgatacagagcctctttgacagttcgtggaattttagagatgagatatgctttaggcttgtgaatgcctgactttccccttgtttgcatagcatgtttgttggtagttacttgttgtgatgctattgatactggtactggtgcagtgacaacagcagtggtacatggtgcaactggttcagtagcaactaatggtgaagtctcaggtatatcagcagttggagggagtggaatcagagcagaactgatgttgttgctgtgtaaagaagtagtctccagagtattagtttcctgttgagtactagcagcagcagtatccctaatatcagcagcaggtcttgattcctgtataaggaatgaaaagtttgccagagatggcacaacattagtagtaacagcagtaggagcatcaagacaagatgagttgaatgtattagacaaaggaatttgtgcaggtgtggcaaagtcagaatacatgtaagaatcattagccatttggggaatgggagaaaagggaaaagatctttcatcaaagatgacatctcttgagatgtataatcggcctgaggagtttaaacacttatatcctttgtggtttaagttgtaccctaagaaagtgcatggagaggacctaaactcaagtttgtgtttgttatatggtcttatattaggaaagcatttgcaaccaaatgtttttagggtagtgtaatcaggagaaatatggaacagcttttctattggagattggtcttggagaacaggtgtgggaagtctatttgagagatagacagaggttctaaaggcctcatcccaatatttaagacgcatagacgcttgagcaagtaaggttggaccattttcaacaacatgtctatgctttctttcaactaaaccattttgttcatgtgtagtaggacatggatgcctatgagtgatgccaaattattttaaatgatcagtaaaagatctgaattcccctccccaatctgtttgaatgcatttgatctttttgccaagttgtaactcagcctcggttttgaattgcaaaaaagttttcaatgcctcaaacttgtttttgagcat

SEQ ID NO: 218814 - DNA, 1308 bp, Cannabis indica
aggtgtaatataggacataccaaacaaatctttagtttccaactctagctagggtaaatttcgtggcgttatttggggtgacatgagatgtacgtaatatgaaacaatttttccggaaagaaagccgtaagagaaagactaaagagagacattgcattgcagcggttaaggttttaaaaaggttcacgtggtttggctctatccttattttttctttaaaaattaattaattaaacatgtgtgatgaatacttttatccacgtgtcatttatcaaatgggtggctataacttttccattattggattggaagcatgggcttcgcctttcatggtcaaagctgttcctcatgtcaaatctcttacaagttttaaaagataagtcaggtcagcagactcaggatatggtacaactcgaaatttgaaaaaaaaaaattcaatttattttgctgaattttaccacattttattttgttggtttttttttttttttttttttttttttttttttttttatgccaaatgtaataattaatgagtggtagattgaaataaagattgaattgtgttgtaggcccattgatcacttcaattgattaagtgagaagctgagtatttatatatacggatattccttgtgaaaaatatgaggcaggaccagtaatggagtatagaaacgacaaaagaggttccataaacacttgtagttggataggaaaaggatacaaggatgcatacacatgcttaattaaatatatgtataaaaaatgtatatatttattggaccctatattgtacctttctcttttctcctcctttttaggcctgcttttttcttaatcattaattttttgggagtataataataatgcaaccttaactttttatgataataataaggtactattcactcatttgaattgtgcctccaaaatttttggtatttgagactagaaatacggagttttgttcattttcttaaagagaatttataaccaactctactaattgtaacatctactcgtttttctttttcctttttattgttttaccaacttttttcttctccaattaaatgacgagttaatattttttttggttagttgtgccatatttttttaattaatttgtgttattttgtttagctagtttgtactaaattatttgactaatttgaagtatgttgttactagttttacttatagatacaagctcaaagagtgttattacagattttcactaataaattttaaattttgcttttaattatattttaataattttggaagaattttctttctattatttta

SEQ ID NO: 218815 - DNA, 3848 bp, Cannabis indica
taataattttttttattttgggcccccggaaagtgtgagccctaggtacgggcctagcccgcctatgcctagagccggccctgggtatgattaagtaaacaacaaagtacaaagcttcttaggtaaaccagcaaacgcgtcatgatttattataatggtaatcgtaatagaatcatgattaccattacaatgtttggtttgcttttaaaaatgatgtaaatcattattacataagaaaatctcaattacaataaaaaaaattaggtaatgagaattacatcacaaatgaccaaataaagtaaactaatatgactctactaccttctctttatataaattttaaaaataaagtggggacaattttgtcaattcatcacttattctaatattcattccaataacaaattaaatatcgtaatcaattctcatttccattcttattctattacattactattaccattacattccaccaaactaacatcacttaagtgtatagaacatgtttcttcaaaattgctttctaaatgcacaaaattgagattttcccccaacattggcctagtttcaatacacccaacaaccgagatttcgacaaggatattactagtttactttctagtttttaccagacgttaattcatgttcggtgtttcgttaataagactgttcatgacttagttttgcacgcactcaaagtagacaagtaagaatgaagaaaaacagctaagatttcagatagcaccttataagtgacaaaacaacttaggaagaaataaacaaacaaggaagaaagatgagacatgatatactttaaagagatcatcaacatattaatacatctacatcaacaccacaaaacaaacatctctttaatatttacagacaagagttcacatgtcctctaaaatatttcttttctattgctttttaacaactgatatgattctgcactatatgcacataaaaggttccatctttagcctcttttagcaaaaaaccgaaatcagcaatacaaacacaaaattaaaaccaagagcatatgtaagtcattcacaaaattagagagataaaaagttacccatctctggtggtattgttgctgctcccaagcatgagctcagtaccctgatgcatagagtcggggcttcacgacgagcaatgttagttgctacttatcgatcgagtagtctcattttacttttgtctgaatttcatctaacaaattccataattgcatcatcttctcatcagagaccactgctaagtcagcaacttcatcaaatttctttcgtagcttgtcatatcgttgtgcctcgagattgctagtccaatcatcataataaccaaccttgacccttgtatgacatcttttcaaatccttcctccatcgttgtaggatatacttttctggtacatttataacttccattttcaagagaaccgaaatcgcatgtttgcataggatccctctaaattgaaacaaaccgcaactacaatgagcttcacaattctctgtgttgaactgaacattgaaatgaacttgtttacgtttatctccaacaaacataacctcagaaacatcaaaatttccatctttactgtcaatacaagagacttcacaataaagcttcccagtcaactccttttgaaattctttgaacttggtattggtgtaagccacctgaaattgtttttcaatctcgaaaagggttacacatgggatccaagtactaaaacactggaaatctgcaaggtgttctttctcaaccttgttccttaacgccttgtcatattgttcgacaaattgttttatggttgtttttgagttaacacgcccatcaaagaaaggaacagagttttcatcacgttgtgtggttgacattcccgcccaaaaggaatcctttagaaaggctggaacccaacgattcctctcattgtataagctacttagccataaattatcacaaagattcaaatctttaacaattctttcccagctttcttcgaattctttcttcgtgaaagaatcataaatagcatcttgtagtgacattttcacttggtcatacaatttgtgaccctccaacttcactagtagcttcttcattacctgccacaaacaccaacgatgtctagtattggggaaaaccgcatcaattgcttttgtcattgagttgtgctcgtctgtaattataacatttggagcgcgtccagacatacaggcaagccaagtcttaaacaaccatgtgaatgtagccgtattctcatctgatagcaatgcacatccgaacaagatgggctgaccatgatgattcactcctgtgaaaggtgcaaggggcatatcatacttatttcttaagtatgttgtgtcaaatgtaactacatcaccaaactcttcgtacaatgccctactgcgtgcatcggcccaaaatatattcttgattctcgcatcatcatccatatccatcatataaaagaaatttgaattcttaatttgcatacgaacaaaatattcctggattgctttagcatctcccgcaaatagttgtagtcgacttcctttctcaaaataactcgtgcagtcgttttctagcatcgtgacattatcaaaggccccggtgtccactgattgataattgtttattacaccattcgatgtttgatcactcggggcaagctttcgacgcacaccaataactttttctcgattgcataagtaaaactgcgatttacttggactcaattcatgattatgctcaagtgcaacagaattaaccttacactttccatcttcaagtattgtagcattgatcctagccttgcattcaattcttgtaagcggatttggtgttaggtaattctgtttatgagatatcgacttccctgcacgagaacatgaaaggcacacgaatttcgatctcccatccattgaagcacgcgatgttttcttcttaactccaaaaccttcttgtctaccaaattgtctgtagtactcataaagggaatctgctgagtcaaaagtcatgccagtttcaggcggtttcactatctcataaagtccaaatcttttatccatttcattctcatccaaagcttccttgctatttacatcttcaaatgaagacacaacctctttcattctaaatacctcagtcactggatcacaaaactaagataaatttagataaaaacaatctaaagatgagtactaggaagctataagaatataacacaagaccaactctagcccttagtaaaggttagaacatcaagatgagtaccttaaaagctatggcaaactaacttttatttgtttgaaaaacaattccatccaaaataaagcaaaactccataagttttcagtatagataaattatatcccatgaccaagagactgatcataactccaaaaaccacttacttttctcaaaaatcacacctttaatataaaacaggaaaacaaaccaaataacctaatcaatggcatcactaaaatccagtactgaacctaaaaaagggttacatgatgcatttagagtactaaaatcaaaacacaaaattcaattaaaactacccattagtctaatacctcctaaaaaaaaaaaaatacttcattttcaagataacccaaaagataaaaaccatagctttgaaaaaaaaaaaactttaccatttccaatatgggtatgatctcaaatgaaaaatgcaagctcataaagaaagaaagttcaagaaatactcagaaaaaacacgacataccaataaaaacagctcctttggtccgagttcagctatatacctgaaattaaacctcaatcgcgataaagaaggttgattttgagggg

SEQ ID NO: 218816 - DNA, 10276 bp, Cannabis indica
tcatttgtctacattcataggttgcatgtctatgttctctgtgaaaagtagaatatcagatcttatccctttttttcggtgtcaatggtcattttctagggccaccttgtttccttcatccctctcaagctttgcatcaattccatcagtgtgataatcatctaagggagttccttttcattttattgattctcggcttgcctgacttgcaccatgtttgttgcaattgcccctattgtgcttctgttgcagaacttccaggctttgtttcttctttatggatgtgctgtcattattctttcctttgtctcaaagagaaatgaatcttccaaggtcgtcgtttcctttgacacttactctgcatgttgtttttctttaacttctagtgctacatacccccatgccatagtaagagccctcgttaaggacaatcctagctctactattaatgctttctttaactccaatccatataccaatccttgcattagtgtttttgttgtgaccgaatctgtgaattttttgatactcagatactccccactaaaactgtttatgaacttttctaaaggttcatcatgtccttcatggaataatattaggtctgtgttaactttttctgatctaaaacttatcgcgaagtttgtttgaaattttagaattagatcgtgatatgaatttatcgtgcctaaagcgagtttatggaaccatcgtagggcggggcctctcaatccctgagtaaaggttttgcatttaatggcctatagatcttctaatggaaccgacactgtaagcatcttttgctcaaactagcatatgtactctgatggatctccaactccatcgcactctcggagttttggtgcgacatatttatgtggtgcttctacacgtaggacatggttttcgaacggaaattgcatggacccttccattgttccccattcactacttattcccatgtgacttttgctttcagggccaataatttgttctacatcatctcttacaatttctctgcttctttattttgaatcaggaaggtctctggtgtcattggtgccgtagtacgtctttttgggttgtacaaagtgcttctgcttctatgatttcttctacttcttgcctagttctcctcaattgttcttggggcgatgggttcctcgagcaaggttgtttttgtttccaacacctttcatgcatggggttgttgtgatttgaattttcattggtttttttttctgctgtttctgccggttgatggttatttgactcttccattggtggtgggtgttgatatcattgaagaactaccttcatctggctattttcactttcaagtttttcaacgtgttccttctgctaggctatttctatttcctatgttgctaatttttcatccttgttttttaacctctttaagatttcatgccctggtgggtttgtaggtggtgtttcgttatgctcattctgggtgtttgaggtggtctccttttcttgacttgaattttttgtttgtggagtcataacattttcttgttcattcgccatttttttaaaattttttggagaaaaaagtaggaaaatttccttgaaattttaattcttttttatgtaaaaatcttttggaaggaagagtaaggttcccacagacggcgccaaactgttttgaccaaaaaatagaaagatttctttataaagaaaataagtagagactttttttagtgggttccttttcttccatttcttaatccatgccccatctacctgaggctagttcccccttttattgtattacattcttcgcatgcatggctgatctgtctctttttaatgcgtgcgaatgacacatgtctttagttttcttttgttaactttagtcgacacgcgtccttgctagttgttttccatattctgaatttattgtttctatttctttaaatttcgtttattttgttgtaggtcgtgtcttgtcttattcaattttcattttgtatctttgcatggtattgtatttaaattttcttgacattgatccgtctgaggtcgtgtttatttttgaattgtttcttgtttacttcggcataaggtcatatttgaccttcctcgatcttagatcaatcttggcctgccctaacgtatggtcgcgtccagcttatattggtgctaagctatgctgatcttacctcggttcgagatttttcctgggataagggtctcgtcttgggcctgtcttataatttcttcgtcgaaaatcttatttgggctatccttggttgaaaatggccatggcttaacttagaataaggttatttttgggcctatctcggaatgtgccgttttaagtctatctcggcataaaaagtcctaggcttcccttggcacacacagctgcctcgggcctatctcggcatttgctgtctcgggacatatctcagcaagagtattcggtttggtttttattagtgttctggattttatttcagctttaatattatatttctcttttgtctttttcttttttttgccaatagacttgtccaacctgatgggtcgttttattgcgtccaatccaatagattttttattgggttttataatttttaaactggatttaagtgttttattttcttgtcttttttttcccccaaacaatcctcatatagaaaatgattttgttctagtcgtcgtagttaaaacaagaacgattaccgcacaatctagactctaatagtgacccttggttgaattcaactctcaccaaaacatttgaatattctttagtatttttcaaattccatgctatatatacataaatattattaatttctctattcacatcgtgaaaggttgaacacggtacgtacaatccgctcctgtaaactatacaataactaattacctatacacgtatctatatctagtaatataaaacagtgtcatcattattcaataattgggcaaacctctaaataaaaaataaaaaattgagcagaccttatatatattgaacaagtttcacttgtactatattaattaacatatcttatgaataaaataacaaacttttaaatgtacttaatatctttcgacaatgaaggatatataataacaacaaataattaattataaatttgtatattccaaaccatgtaggtgtgataattataataatgttgcagtagctactctccctgataattaatgtcaatattaatacaatatactatggtattaatttaaaaaaccctaactacaaatacataattaatttgagaaaaacattgtgaacgagagttgctaaatatatacttactgacttcagattcatacgtttccctattacattggaccttcaaatataataaaaactgaagaatatatcagtaattaaaatacttttatggaatcacgtaacatatatgcagtcgtaagatcaataattaagacttataatagagggagattcatgagtcttcaattattaaagttggtacgttgtcttgtattcttgtgctaatatgttatattatatttttacaagttgtagctaatcttaaaaattaaataaatatttatattccaattttcaaagggtctgactggagagggacaccacatatttgaaatgcacgtgaagtggactttagggcaccagaaacccaagtttcaactccaatgaacacgtggacccctgttagggcaaaggtttcttctcaagcacaaatgtcttatcaataccaagaacagaaagctaaggtttcaaatccatactctgctcgatcttacttcaactgaaatttcctccagtgtgaatggcctacaatactcattaaccaccacaaaccgctagaaaatgatatatttacatatatatctaaattaaaagaaaatatttatcattcggtcatggtttaataattgtaatgagtcacttgaaagacaaaagttgctgtcctctttagcatttgaaggttgggtaaacgacagcgaaaaaggctgtaaggacaaaaatgtttctggcaagacatagcctgtttcttgcccctaacttttatttttaatagtataaacttctctaggatagagttgggggatgaggtttagtgatccgttcaaaaacactacaattttattgttagtgtcctacaatttagaagactaaaaataggatagagatacaaaataattttaaagaaaaaagttagcaattgtcttttttaaaaaaaaaaataataaatagcaaaataattaaatatataataaattagttaataaaaattatattacatttattacatattattttttaaaaatatatataataattaaattaagttatataattcatttagtattgcatattattacgaaatgaaagagaaagtaatagaaatcgatcaaagaacaaagatgacggacatgactatatatagcactcacaactaacactcagctaataagaagcagttagttaagaaaataactctaactaactctgttataaactaacagagtacaagaaaagaaagaaagtgtaacggtaataactacttcctatataactgtctattcctaatacccccatcaagatggagcatatatattgtagatggacatcttggagatatgagtagttaggatgggagaagacagaggtttagtaaatgtatctgttagttggagtgaactcgagataggtacgagttgtatggtggagtttttgattttgtctcgaacaaagtggcagtccaattctatgtgctttgttctttcatgagaggtcgaattgtttgcaatgtgaattgcagactggttgtcgcagtaaatgaaggcaggatgtggctggagtatctgaaaatcctgtagaatatattgcagccatgttactccacttgttgtagcagccaatgctcgatattctacttttgcatagcttttggaaattgttggctgcttctttattttctaggagatgagactgtctccaatgaagatacaataccatattgttgagcgtcgagtaacgggccaagatgcccagccagagtcagaaagccatagagtgtcaatgctgaagtagatgaatagaggagtccttcaccaagatttcctttcaggtatcggagtaagtgataaacttcttggaggtgagttgtccttggtgtggccataaattgggtaaggtagttgatagcaaaggtgatatctagcctagacaaggtgagatacagcatcttgccaatgagttggtgatagtgtgagaggttgtcaagtgcttcactgagttcattatcgagtttgagctttggatccataggagtcttgctaggtgttacacaaattttcgttaactaaatttgagcctcacaatagtgatttcgcatagaaaaaataaaagctatagaaataaaagtatgaacacagggttatttatgtggttttgcagtcaaaattctacatagtccacgagtcaatcttattcagatttctgattgtttttttttaggaactctcctgtatgagttttttttgtccctcttttgatcttctttgtcactatttataattacatagtggacctactgtccaaacagacataaaaaaagatagtaaaaagaatgcaattaaacagcgggagccccagcctctttgtacgggtcagctggatctaaaggagtcggaggataagctaggtctgaagaggctggaggatcatcagtctgggcagtaggagcctcgacattctgttcggtcggagaggtggaagtggtcgccttaggattctcattagccgtctgagcagtgcagtagtcgagaaacatgtcttttgaagtgccgaggtattcaaagtttgccttaggattggccttccaaaagtcataaaaaatctcaagaccaactgtctctaaggcatccactttcttcccgagcttctccacctcagacttctcgctcttaacctcagtctatagttccttttccctagtatttttgtccttaagctcatcttccaacctacaaagaagagtttggagaccctctctttcgtcttggagactggcaatgtcccgagacaaagaagcattatctgcctcgagttgctcggttgacggcatctcctgtagttccctagtcagctcggcaactctggccttagcagcaagaagtttcttatagacctctccaagtttcgtccggacagtctgaagttaggtcacatcttcagcatcctttttggccaagtccacttcccttcgcattgtattggacattgcaaggttcttgacagcagtcgacttagctcgggagtaggcgtaggccatcttcacgcctgtctgtgcgggaatagcattaaaatctgaactagtcaaagagaaatgaaagaaaggtgttagaaaggacttactcgtgaaagctccttcagaactcctcccaagaccagttccaaggacaaatcagtgtccgccccagccaactattcgttcacctctgggagcgaccgggtcacatagtggttaagcatgtctttgcctctcttggtctccgggcataataccaaaggtgcggcaagggccctaacttgttcagattcgcccctgacgagctcggatccagtcctagcctgcttaggtccatccgaactgcctccctgggaacctttggatttgacgacctttaaggtagaagggtccacagtaggttgttcctcaaagagatcaatgacctctttaactggtgccttctccttggacgaagtctcaccacctttagacttcttagctggaggggacaagcctcagctccccctactctcttcttcagagcctcaatcatcttctaagacattttttgcacggaaaaaataatatagtaagaagaagacataaaatatatgaaggcataaaaatcaagtaaaataagtgtaagttgaagtactctgcacactggcaggagcgtttccccgaacaagcacagatggagtgtcatcatccgaagattcttctcgctcctctaggacggcttttccttttccctctacaggggtagatggtcgagcaggcaagccaggctccctgatctggatagcatgttctatcggcctctgctcggccgggaggattttcttcttcttcaacggcctctcctgctctgaatattcttgagcctccttctcctgctcagaatattcctaagcatactgcttggctccagcatcacccttcaacttagcctcacgcttaagttgaataagctccttctcttgctcaactcccttagcccggccagacctggacttcttcttcctccccttcacacacaggggtataaagtctgcccaataaagcttgtacttcacaaagttgtcatctcagttcaatgaagtgatattctgagcagcatccgacaactagagaattttttgggccctttccctaagtcccaatgcgaagggtggacggcaaaacacagggatctgttgaatataggtggcctccatgccctccacgaagtagtactcatcaacaaaacccccaatcttgctaacctccgtgtccattgtactcgtcagccacttgtagtccggctgagagaagtagaagtaccccgacctgctctgcttaggggtagacttcaaatcaataagccagttgatgtcgtgcggggatggcacaccccatccttgagtggcgtagaggacgaacaaggtagataagtactttatgcccttgggtgtgaactgggtcggacagaggcagaaataatccgcaaccttcttgaagtacgagtgcaaaggcagcaccgccccttgcttagtgtgggcacccgactaggcacaataccctttctttgggttagttgcccagtgattcagagaaggaatataacactcaagtccgcccaagtacccagccttatccaaatccctcaaacgaccctcggttatgttggagggagggcacaccaatttggccccaaaggcactttgcctcatatgggggaccgcctcggtaaactcctcggtgatattgtcttccccctcaaccaagacgtcaccttgctcagatactggctcctcgacctcattatatcctccaaagcgtggaggcccggccacttcttcctcctcagcctcgaaaaggctatcaagacggacatcgtcctgctcgtctatctcctggacctcaatgtccccctcataatcctcttcctccacagcgggcagatcttgcttggcacttggcagcgtggcatgctgggccacgtgagggtcagatgcattaactttccgcatcgtctgctttttgcgggccatcatccttctcttggatggatattggtgtgtatgctgaaaaacattaacagcagggacagctattgaaataccaaagttaccagaacttggacggcctacgggaagggtatcagcaataccaggtcagacaatatatgtctagctagacggaagataacgtctccaacccttctttagttcccaaacaaagcgcctgtaaccttctcctgcaatcttctcggagtaagagtggtgttgcacttcaggttatggagtaggagaacgctcgctactcacatcccaatcctcgaaactcgagttagaaagtccgccactcgaagaggatggactggcgcagagacgagattggtcctcgtactgaagttgaagtagatcccggtcaatacagtgttcaccttcttaaaactcaccagggttcatctacaaaagacaatacacgagatgagtatttggccgggatattaaacaacaaataggcaaatatgccgaccaggactactcagtagattaaaaagatgaagaacacgtaaagatcaattcttaacccaggagtttgaaagttttgggttaaaggataaatttcacgaagcttcgaatgagcaaggtgagaatcaaacatagcgagattaaatccaaaatttcgtaagtaacgaagccgtacgaaccattacagggaaaattacaaaatttcaagcctagattttctacatatctcctacaacaagtcaagaacagtcatattttctacaatggaaacccagatgattgaagatactcactatttaaagcctaagcgttgtccagacgaagttgtttggatacttctgctagaaatcccacgacaaacttaaaagaaaactccttttttgctctaaggttatttcgtacagaaaatggtaaaagtaacttatgaaaagtttcagccctatttataagctaacttgcgaaaggggtaatcaactaaaatccttaaacgcttcgatttccctccaaaagtgaatattgggaaattaaaagcaatcaagtgcctcaggagaataactgtcaaaaagcgtgcaaaagaaaacatgtctcgaggtattaattagtcaaaaaaatgaagggatgcctggtcagattcacatcaaatcacgaatagactcacccgacacgtgtcacccattcaaatgtaaagtcagctcggatgaagtctacacgcaaattcggaagtcccgtacagacttgggtggtaaatgttatcccaatttttgcactatgacgtggcatcacattctggtgacacgtggacttgattctccatacctgcctgaaagagatgttccgagcagaacctacacggacgaggtcctcctagtcgagtagtggacaatccgagcagcatatcaacacttagcaattccaaaatttgtatcgtgaaacacaagagcaatccctataaatttgggatcgtaccacaaagatatggcaagctatccaaatcccacaatttgtgtattctaaatatgtaatatgtattcttaccaatcatagacattgtaagcaaaagggaaaccttccctcaaacatgtagccctataaatagtgatccattctcactggtaaaggggtcgagagaattacttgatagagatctaagagagcatactcagagatttcattgtaagagctttaagagaggaaatattgtgttcttcgttcttaagtcactacaaatcaaggagattaggctattaccgaactgttcgaggtcgaacttctttaaaaaccttgtattctttatttatcttttcatatcatatatgaattatatccttgattgcttatcatttagactcactgtcgttggctaaaagcgaggtcaacatttacattagttaagtatttaaccaatagtttccgatgtttgaattttgtaaaagcatcatttttattgttaagtagatatatccatacttttct

SEQ ID NO: 218817 - DNA, 7688 bp, Cannabis indica
cataactcttaacaaaaataattaacaaaaaaaaaaaaaaaagctaatcatcatcaaccatgtctttggcaggttcactcaacccagcagatccagaaaaactcttcaaaaaatcattccataagaggaatgactccggggagctcgacgtgttcgaggcggcgaggtacttctccggatacaacgaatcatgtggcaccacgtcattcaaccagaagatatgtagcagtagtagtagcagtagtaaggatcaagatcatcacagcagagcttattggagtaccaatagtagcagtactagaggatcctcatcaggaggaagaataagcctagacatgcctagaagaagcctacttaatcttaacaatcaccatgatcatcatgatcaccatgctcttcatcatcaccatcatcatggggtggtaatgatggagaagcaaatgatcaaagagaagaagtataagcagccaagctccccaggtgggagactggccagcttcttgaactccctttttaaccaatcctcatcgaagaagaaaataaaatccaaatctaatgctttgtcctcgaaagattacgatcaggatgatcaaagcggaggcggaggaagaagaaaaagaaggagtagcataagccactttgggagcactacaactactactacgactacagattcaaaagcttcttctttgtattcttataactcttcaagctcgggttttagaacacctcctccttatattgcccaatcaactcccaccaagaatttcagaagcttttcggataatcacaagcaactactttcaactttgtccaagttcagcaacaacaacaacagcaataaagctcatcaccaaaatgatagtgatcatcatcaagctgtaaaggacttgttgtcgtctcagcaagatcatgatcatgatcagaaggagaacatggtcaagaataatggtaagggatcaaacgcattgtcatcatcatcctcgtctattcagaaagataatttagttagtaacatcaagtttcatcagtctgagaaaaaagtaattgctgtattgagaaaatttgatgatgatataaacgaggaagatgatgatggtggagatagtgactccagttctgatctgtttgagttgcagaactatgacctgggttgctattccagtggtctaccagtttatgaaactaccaacatggataccatcaagagaggttcaatatcatccgcaccaatttccaatatataattatataataatatagtaattgaaattattgctgtataaaacaatataatatatatatatgatgttaatttgatgatggtttaaattgtcatcttactgattattattattaattcctgttttaggaagctagagctaggttgagagatcgagaaggatcatttttttgttttaaatttattctgatcatctttgatcatttgtttcttttttctgtggagagtacttttattttttgctttatttatattttgtgttttctctgtacgtatatgtaatgtgtacagtttggagtgtttgtttgtctctcttttttcttctcttttggaaatatgtcatggaggatatgatggaatatgagaagtaccattagtataaatcattaatattcagaagtactataatatataccactccttgtactgttttatatatatttttatatttctctgccagagatataagattttcccactagctatctagatatatacttgttatttcggtagtggagaaacaaattatgcattgtctcacacaccatgagagatggcgataagtaataatcaatcatttcatgggacattattaattaatttaatgctagttcataaataaatagataatacatataattaaacatgtgtttgcatggagttctagcatctaataaattagttaaaccatcaatgtaaagcacataatcaataagtcatgtctccttgtattaaagtgacaaaccagcaaaagaaatttatgatgacttacacaagtttatatctattatcaaaatattaaatcactagtgtgggcctctcatgatattgatgaatatacgagttatcaacaatccttcaacttataatcataccgaaagtataagtaattagctcaaaatatacaaaatcattagcactattgttgggttcgaccttgacacactaatcttctaaaccagatatgattgccagaacaacacaattaagtcacaaacatacaagaacacaacttagaaagaatatgattcctttattgattgtttgttaataaatacaaatcactgttaacagaggacttttagcaatatacaatcttggacaaaccctgatccagatttaactatatgaattaacagtctaacacttacaaatctccacttagacagttaatgtagccaataacaatgagtattcagcatagaaatcatatattattgtgatctgtagcaaagccaaacagtgcttgaactttgctgttggaagagctttagtaaacatgtcagctggattttaatcagctgacatcttatcaatgtgtttggtcctttcatgaaatatttaattcttgctgaggtatagtgcgttgtggctgtcgcagaatactatgatagtcttcttgttgatgcttagttctctcaccgtgtcttaagcaagatggccctttaattgcttcagtacatgccatatatgctgcctcggttgtagacattgctactgtagtttgaatatttattttccagctacaccacaaagttgaaaaacaaaacctgtttgagatcttgtttgagatcttcttgaatctagatctctagcaaaatctgagtccacataaccaattgtgtaaagaccgcttaattttaatatggaaattagcaaataattaggatttaattcataaattagatttctaatcatgatttatgaatttatgtagatatatttgaattctaggtgtattatttatgttatatatgaaatttcatgtttttcatattttatgttccgcaacattggaacacgacgttcggctgataaaatcacattttcataaagtttagtattttagtaatagcggggcaaattagatagacatttcgaatgtcgggattttagttttaaactattttacccctatgtcattttaccctttagttgtgtgtagggggaattttggtcattttgaccttgtcattaagtggctttttcttgtgttggcagctggctggccaatgttgagttaattaaattaagttttgtattagatttacttagacaattaagtgagaaagatgaaaaaataaaaaaaataaaataataaaaaaacgaccttcttcctttctctttctctttccctattttcagccttagaagaatcatcaagaaaccacagttcaagcatgcaatttgttgtgatagttgctctttaggttggatggactttagtgtagctttctaagtttttttaaggttgtgtatgcttgcttgatgtgaatttgaggcttgtgtgtggtgtcgaccatgtttgagtttatgacttcaaacttggttcaacaattgtgatttataaatttttatgtattatgaagttttagtacttgcaaaagtttggtattgcgctggtaaaatagaatttacttttgatgtgttggcaaaaggggttggcaaattaacgttggtattagaacttttgccagcgcataatgaaaagctctggcaaaaatgatttttcccagcgcctaaatgcgctggtaaaagattttagccactacaaatgtacgctggtaaaactttgacctttttgccaatgcagtttgcgaaatgcgccggtaaaagttacttttaccagtgcagtagcgaactgtgctggtaaaagttacatttcttgtagtgttggaaatgattcattatggcttgtataggtgttctggaagtttttgcgcaaattggggtcgaattggtgttggtggtgtttttagtatttcttgcactgaaccggtcgaccatttcaatgggacatgtaggaatcggaatcccggttagtccccaagacaccccatagaatcggtcttccagttggagaacttgtctaccggttgggacattttagggaaccctagttttttccaattttgtgatatttagagtatttccatgttatccatcgatagaaaaacttttagtttcgatttgaagtccctgaaatatgatcttgcgcgtcactcatcagtttacgaatattgtgatttacgggcctataaatcgtcgagcagctgttccactcaggttgaccggcacacctgaatttggaaacaaggtaagattagtataatgatatgcatatgcgtttacatgtttagcgtacatgtttcttaagcctgttagattacattagaatagcaatatcagtatatatttagaattatattagatatcgatgaatgtatgtttgacttaagtactattagacactatcagatcggtacgactagagtatgactagcatattgagtataggctgatattgtgatcaatagtgttgccatttgaactttcttgacttagtaccgccttgggtgtggggagtactgccgagggtgcggggatttgattacaattgggaatatgagtgcctaattgcaatctggttatatttatggttattattatgcttttcttactgagtctctcgactcacagttattgtttacatgtgtaggtaagggcagagctatggctgagcagccgtgagagcgagtagataaagattgtacatgtcggggcggttaaacatggagcatacgatcattgggagagcaagctatattttaaatggtcgctaggaaatcaaatattttgtattacatttgtaaataatttaaatatgggatctcagtcatgtaaaagatatttattttcatttaaagagtaataaaataaaagttttaataaatcacgattttcaataaaccagctgattagcaacagattgcacagtttatataaaatcacgataacacgcctaagctagtagggtgttacaatttggtatcaaaaccgccaagttgtcttctgaagattgtcacaacatgtacaatcatcattagagataagctcgactcacggttcagtaagcttttattgctttagtagtttattttattagtatgttataagaaaaacttgatgttatacccaaaatttggcttcacttcagaaggtgacatgtgtcataaagtggaatatgaaccacctgatatactgaaattatatcatttaatgcgaagaaaaataataactcgttaaataaaggattaatagaaaatattcataactcgttgactatgcagtcttaagcgagataagatagaggactattaaaacttatactgacgagacacatgcctgtctcagagtacacagactcaagaagataattcatttattcgaaggaatgagtacagttatgcaaagcagactcagattacaaatagtgagacaaccgtctcgctattctaaagaaacttgacaaggtgaatcagctattaacacttagcgttttttccacattatactagacaaggataataactcagggataagcgagatacaattgtctaaatcatcattgaccatctataaggataagaataacaagcagttaagcacttattctatattatcccacatgtgtttaaaatgaaacgtgggaattgtccacatttcatgaacggttacatttcaaatatattcatgtaaataattgtcaacctatatttctataaatagggtcgaattccaaagaaaaagggacagagaattctagagagaaagatatatacaatcatcgtatattgtatctgatactcaaaaactatcttgaataagatagtctcgtggagtatgcagatttaactgtaaaaccacgtaaaaatatctgctgttatttatactttatttgtttcttattatttctgtgttaaatttattacgaaaaggcttattattggttaataaaaatctacgttaacagtttagtgctctcattaagagtctgcgtgataaaactcagaaaaatctctccttacaaataaaaatctatccatggccgatcattatcaaaatgatggaagtcgtcctaaagaaactacacatcgtcctgggaaagaaccaatgggttctcaaagaccccatatttctggaacaacacgtttaaggaatttatagtggtgataatcaaaagccaaaaggaaggaacgaagaaactaatacttttgtagggtatgtgcctaaaagtgaggatgcttataatccaactaggtatgtaccatattctctacactacaagaaatgtcacttttgccagcacaaaaagtttggtattgcgctggtaaaatggaatttacttctgatgtgttggcaaaagaagttagaaaatcaacgttggtattagaacttttgtcagcacaaaatgaaaagtgctggcaaaaatgacttttcccagcgcgtaaatgcgctggtaaaagtcactgcgaatgtgcgctggtaaaactttgacctttttgccagcgcagtttgtgaaatgcgctggtaaaggtagtagcgaactgtgttggtaaaagtgacatttcttgtagtgctaatatttctcggcataaacaaagcagctcgcgacacatggcatcataattggtccccactcatacaaacaaccgttatctcatgaattaggcctcacccagttggcacaaagtcaatatatattatattttaccccatcagtgggcctagttgacacctctaaaccttactgggtttgacttcatccatacttagctctaccctataaataggacatggtcccttcgtgcaaagggatcggttaagaaatgacttttctgctactaagagctcaaaattaagattcttcaactacggaaaaaatatttgtgtaacgataatttgaagcttttctagctcaataatgtaaacttgtggactaagactcattaacacctgaaccacgtaaaatcttagttttcttagttattactttcttaagattaattattttataaccaattttcaaaaatcctggcaaataacaactaattcatccaaatacaaactcataacacaactctgttactcacataaacaactaaaactaatttttataaattgtgattttaactattacaaactcaaaaaggaaaaagaagaaaaaaaaaattaaaagtatgaagtaacaacaaatttcatgaaaaagataatatagtagtacgaaaagataaataaagttgtcaaaagtaagttataaaaagtcgttatacaaaaatatattgatgagttaatattattttccatgttgcaattagatcaatgttttgttatttttatataattttgtagttatctttttaattatttttatattatgtgatacgttgttttagagttactttttagttttcttagttttttaagtttttttttttttactaaaacacaatattaagtacctatttttgagaagtttctttaccgaattcttcgaataatagtaggaaaatttacatggtatactaacttttgccaattttttacaaaaatactgcctgacggtattttttacttttttactgtgtttttttataagtttcat

SEQ ID NO: 218818 - DNA, 3617 bp, Cannabis indica
gtcttgatattgattgtatggtaaaatttgacaccattgaccaactgttgctttttttagaactcgtaattgtttgatttccaaatgactagtggattcattctagagatctgattgtgtaggaacttattcatgttgaagtacaatgacggcaagttcatggcattttgcaaccagtgttttcgaaggtatctggtgcatctgtgattgatcttcttgaaccactgaaatatttatttagacaacaaaagagatggttcttgagtgcttttataaaaccactgtagttggtgttaacacatagagtgattgtcatctcaagcagctctctttatttccccagctgttactttctaatatagaatagttttaacaatccaactatgaagttcgaagatcagcctgatttccctattttcctcactacctgtattttattttactttatgaatagcattgttggataaaaggagtcttttttagtaattaccatttatgtcgattactgtatgtaaatcagtaaatgtagtcgatgtggggtctatcatggttaatacgtaatacacatttttcttattaattgatgttcagcagaatggatataaagagatagattctcaccctttttctatttttcgtttgtttgtgtttaagtctttcatttcttgaattagagaaggaatttgcgcagcattctgagttgagaactatggagaaagctttaaaaggcatgcatattaggttcaggtagaaaaaattggccttaggttacatgtgctgttcaatgtttcttatattgtatatgtttacctaacctgctcggttatatatgcatgcacatatgaatattttaaagtgaccttaattagtttattatagaacaaaatattctcgttgtattttctttcagatttggattcgatgtgttaacagagatatgtcatataagccaaaatgtatgaagctcctctcaaatacttaaagcaaatgatgctatctttcttgtctctaattattattgattatttattgttatgatgtctttaactttcattcaaatgaatgcttctcaattctgctaggtgaggttgtacctgttactatgattgttttactaacttataaaccttttggaggttgcacttatttggctttaaattatagtcatcattgtgccaaatgggttcaatagataggtttttaagaaactcatgataccctgcaatttttttttcttgtatttgatgactatagtggtggtggttctgtttagattgataagacggactttgatggccataataatgtgtacgagttaatagagagagaggcgcataatgggttatgtagtagtagtagtgttttgccttatgggatcgatccgcagatgatgatgatgctgctggtgtttgacaatttcacatggctgacgaaaatgctaaagtggatttgagccatagaaatggaacataaaaggttcccatgtctctatcaagatcctattcgagctttaatgtggagggttaattatttaattaatttattttgaatgtgaaagggagggttggtgacctgttagttttcgtagcgttctcaactagaccatcattcaatgaaccaaatccacgagtggatccaatggtataaacgggaaataaaggcatttatctaacaggataaaagtgggtcccattttgggcagtgattggaaatttttatttatttattttgaccaaatgtgcagagagaaagaggagtgttgtggcaattactctcgaggaggcattaaattctccacaccaaaaatctgagagttgtatgtaaacccctttctctggaattgtttctttcttctttttttacagacaaaaagaggaaaagttaataaggggtcctaaaaaacattaattgctggatagagaaactccaaccctcacacaatcgaatcatgactctcaatgaaatcaatgcacattccttcaacacatcaaaaacaaagatataggacaaaggagcggtcagaagaaattaattataagaaacccacatttactatacttgttatctatctttatttacataaccccaaaccccacattgctctctactctctagtagtatacccctccattacttttccaaaaaaagtaatataaaaaaaaaataaaaataactagccactcccagagctggattaatcagcatcagcatttgggtaatgtatatataaaagcaaaaaaaaaaaaagaaataaatctttaattcggatcagacccaaaaaaaaaatattaccaccaccggtcagcaggaaaagtacatataccagtagttaatggggttttgcatatctgaactgaactacataactataccaaccattaatatattatagaatgataagtagtatatagctaattgattatgaagctggtagactagttactattacttctagctagtttgttctcatattggaggggacaatatcttgaagaaggccatggtctgtgatcaaagctggagctggtgaagggttgcaaaagcgcctctcatgtagaaaagcaactgctgatgagtttgttgttatgccattattattattattattagcaaaactattactattattattattattattattattattattatggttagagggcaaagagagtgatgatgatgataacaaatgatgatgatcagtcatgaagtgatactgttgaggcaactggccgtggtgtctaaattgaaatggcatattggtgaaggctgcggctgccaccggaggaactgcggcggtggtgtggtggtggtgagtaggacgagaaatgagtgggcttggatgtgtgtgttggccttcataagtagtgaccaccacacttgggtctgtaaacgatctctcaactcgtttcttcacattacatgaggcactggtgcaacgatagtaactcctatatttatatcaacaaacaaattagtataattactattaataatgttattgaatattgttcttttcatatgtatacagtatatatatatatatatacctgggaaatgggctgtttttgacagctttttgaccgtacttcctccatctgtagccatcttccaaatgatcaacctcactcttagtcatgaacgcaaatctgggttctctctgtttcttttgatttgttttcttcgctttcaaccttaattatatatattcaacgaacattaatcaatactcaatactattaacttttcaattgatcatataaagttttaaaattaaaattaaatccccctaaaaaaggaagataagagctagaaacccacttttattttgatctaatttaatatgaaagcttcaaaaaagaaaaaaaaaatactgataaaaactataaatatatatatatatactgactgtttattggtggtggtctttggtggttggtcttctccttcttcttcgtcatcatcttcttcttcctcttcttgatattctgggtctgcagctttattattattagtctgttcttcattgagagcatcggtacttgaagccgaagaaatggaggaagtgtttggcgttgcaggttgattattaatgttattattaatattactag

SEQ ID NO: 218819 - DNA, 2392 bp, Cannabis indica
actaagcgggctttacacctttggcaacaaggcgagcttttaacctgtcaacatccccatgttggttgtattttactttctaaacccgtttacagccaatgactttgtggccagggggagtttagtgataacccaagttttattttttttctaaggcttgggttttattatccatagcttgtagccagtgctggaatagggaagcttcagcataattttttagttcaatttgtgagtatgctgctaaaaaacagctcaaaattggggatttaatttgatataagataagaatggttcgattggatgagtggtagatgttgtgtggcagatataatcttgtagataggttgattttttttactggtgcacccagtggttgaaggtgcagcaggtagctgctggtcttgagattcagtaacaggaacttgtgtagcctcagtggaaactgatgttgtagtatttggattaggtgcatcaggtgtagtagtttgctggtttgaaacaaaaccaactatgacagattttgatgctggtgtggcaaaaaattggtggctacaaatgtgttattgtgctgcatcggcctaacagtgggaagcactatgtgagggaacaagttgttgaccttagatggggatgttgaggaaaaaagagggaaactatgttcataaaacacaacatccctagagttttgaatctgtttagtctcaatatccataagtacataagccttcatgtcatgtggatagccaatgaagatagaggatctacctcttggtgtgaatttgtgccttttggaaatgagagtggagccataagctaaacagccaaagctttgcaagtggtcataatgaggagatgtattatgtaatagttcataagaggtgaggcctttgaacaactttgagggagtcctattgataagataagtagcattctgaactagaagtggccaatataccagggctaaattggattgaaatcctagtgctcgagccacatttaaaatgtgttggtgttttctttcaacagccaaattttgttgtggtctttccacacatgaatggtaatgtatgatgcctttggaggaatcaaaagcttgtagattcaattctttagcattgtctgatcgaattaatattggttaagaattgagtgcaaaccatgttgaaaaaattaggtattaaagtttgaacatcaaacttgttttgaagcatatatatccaagtaaaaggagttttgtcgtctactatagtgagaaagtacttgtaaccttctatattaattatgtggaaaggaccaaaaatgtccatatacactaaattataaatgtttttggtaaaattacggttagaaatgaaggaaaatctcctttgtttagccaattgacaaatgtgacaatgcttattggtgaaatgaagagagttatcactctttttattaaaaaaattgaaaatatacatagaggggtgaccaaggcaattgtgccaaacatgtttattatcaagttaaaaggaaatagcattggctgttggtgtatcttattgcagcaagtatagctttccatattttttagtagtctcaatcaccacattccgagaaagatctcgaattacacaagagttttgatgaaaaataatggaattagaaatgttgttaacatattcagatatggatataagattgatcttgaatcttgatacatataacacattatgaagggttatgggaggattaatgtggactgtaccagaattatgaacaaggattttgtggccatttgacagggtaacatactgagggaaattatgatgtgagaaagatgtaaaacatgttatgttggaacacatgtggtgagtggcaccactatctaaaatccatgtgaattgagatgagaaatgatttttacctgcaagattggaagcaccaggggccatagcagcaatatcaacatgaggagtactgttgttgagttgttggctgaggagggagatcaagtgttcacattgtgttgatagatcagatgaaattgagtgtccatctgcatcattcttggatgtgctggcatgatttgcctttgctttccctttgtattatctccttttgtccccatagccagaaggaaaaccatgtaggaagtagcatttttcaaccaaatgtcctggtttgccacaattgaagcatgagggaagaggtttcttggctcgtggagggttagtaggtagtgagctagtagcaacagccaagggaattgtgtcagtagagccaagagagcactgacgttcttcttgtatgatcacggcaaagacacgagatagattggggattggttcattgagcaatatttgtgcttgaatagaagcaaaagatgttgggaattattttaccaggatct

SEQ ID NO: 218820 - DNA, 3209 bp, Cannabis indica
tacagcatagattttggatggggccatcccaagaaggtatctttcatatctatagaaaatggttccatttcaatggcggactctgaaaatggagacggcggtgttgaagttggtttgtatttgaagaaacaacaaatggatgttcttacttctgttttcctcaccggtcttagtctttagcaatattatttaaggttgttacttttctatgctgaaaacatagatctttctatatttatctatatatatttatggaaaatttttgtaaaaataaaaaaagttaataataataatttaaagtataaaaataaataaaccccatatatgtatggatggaaattgttgtgctatttaaggaatttgttgtacatctaacagattctttactttccccgtttgttgtaaaagaaactctgtgaagaaacttgggagaaataaagtcaaaattacctaaaatactgtatatggaatataaatgatttttacattgacaacctttataaaaatttatttattttttattgattatcaatactactatagttttgatccttaaaaagaagaaagctattgagattaaagattataagcctattataatttatcttctatactttataaagttgtcagctaaaattatttctaataggctgaatatttcaagaataatgattttattcagttcattgttcctctttaacttgaagaagtcttttatggggaagagacttgcttttgaaagggttgatttagaaagtagaaaatggtaagtttatctcaacaaatagttctccttgggtccctgctgttggttctcttcagtataagcataatgcccttccccttgttcattcagtttcttatttcattgatgatagtgattattgggatgtaaagaaacttacttcttatttctccaatgatactgtaagtgctattcttcatgtcctagttgatccctctatggatgattgtctcttttgggggtgacatccttctggcatttttactgtgattgacttaccacctggccaaatcttcatccttttctccctatccctccccatctaaccctattttctttgaaaaatggtggagcacgagttggactctgaaaattccatcaagaattaagtattttgtttggaaagctttcaatcatgttctcctatcttctttaaatcttcataagaagaatgttattgacaaccctatgtgttcattatgttctgccaaaattgaatcggtcactcatgccctcttagagtgttctagaaccaaatttgtgtggagggatacttcttttgttcagcttcataatttaaataagcattgtgatatcaaagaatttcttttgagaggatttgataatattaaaaaaggaagaagagagaaggacgaagagagaaggacgaagagagagagtgagaagagtaagagttagggagggaaaattaaaataaaagggtattttgggtagttttggaaaataatggaattaatttatacaaataagtggagggtataaattttaaaatgtggtattttattagggtcaattaatgaaatttccctttatatattcattatatattcacgtaaataaaaaggtgaaccaagtgattgataagttaaaatttgatttttaaactttagtgaaataatattaaattgaatttaagttttatttagaccataaattctaacaaaaacacccagatactatgggagatttgagacgatatccctatgtaatgtgctttacaaagttatatcgaaggtgatggctaatcatttgaaatgcattctctacttatggttgcaggatctgatgtgtaccagagggacaaacatgcttgaggagactattatgatttgctggtcaatttggaagtccggaatgatattatttagaaacaaaaattgtgtactgcgactgatgtagtgttctttgcacgtttaattcttactcaatggaaacatgctcactctcaaaaatttgaaacctcttcatgttcctgctgaaacttttgatggtggcgagcattggacgaaattgttgcttacatgtttaagattaatgtggatggtgatgtctttcaagctacaaatggatatggtgctggtgttattgtttgggactatcaaggtcgtttggttgaagctttctcggtgtataaaatgggtggtactcaatctaaggtggctaaaatcatttgcattaaaaaggctttaagatggcatgaagggaagaatgtgcaaggtgttgtggtagaaactaattatttagtggctttccaagctctaaacaacaatgtccgcatgccctctatgtttggattgctggtttatgattgttaattgttgatatcttcttttgttattgtatataaacatttgttttgttaccgatctgctaacagaattgtctattgtaagctcttgttattagtcagattgtaattttgcatgagggtacaactcctgctgctcttcaaattattattttagctaatttgagtgattaatgaaagtttgtactcattttaaaaaataaaaaaaaaataagtaacccgaaattagtatgtactttatattatttggataactattttttttttttatgttcagtagataaatataataaattttattttcaaaaacaaaaaacaaaaaaatcattacaaactagtgagttaaaattaatttaaaaaacaataaattttagaataattctatagtacactttttaaacggtattttagtagatcctttatttgttttgacatgcattcaggagagctttttcaatctaatgtttattttttatgaatcatgatattacacctgtaaatttttaaatttttttaaataatttacaatatcgaaaataagatttaaatattttgtttcacggacgattattttttcttatacgcatggtaagtgattgtttaaactttattttcagtaacataatatattcaaaaaaaaattgaaaaatttactgataatcctaaataagtataacatacccgatcatgaaaaaaaatcgactaaaaaattattgtaaatactaaaacagataagagtctaccaaaaaatcgctataagggttcgtttggaaggtcgtattaggtcgctaccaaaatatattatatatttaggtgcccataaaaataataccacatatagttttacataaaaat

SEQ ID NO: 218821 - DNA, 4170 bp, Cannabis indica
ggtgcagtttttgaactagggtgcttaacaaaatttacaaaccgtacaactcaaataaaccgtacaaaccaaaccgaataaatcgacaaaaaatacaactcgaaataatacaatgaaaatctaaactgcccaattaatccaaataaactaaattaaaccgatttatatacttttttaagaaatgtgtatataatgtattacataaattgcatttattagtaaaactattttgtacttaaagtttgaacattttagtgtttaacttaaaatttaaagtttatagtttataatttttattatatttggatattgaagttggaattcaaactcgcaaaccataaactgattccacttctcgatcaaatcctcaaacttctcaagtttctcttctagcaagtgactcacacttaaccccccagctcaatgtcaacaattaatcttcatgcttagtcaacaaacagcctacaactgatgtttccacatcaaaaacccttacaataaacaactttattggtaatcttgatcattttttattcaattcttgaattatagatagtggtgctactcaccatgtttattgtcatgctcaatgcttttctttatttacttaaactttaactcacaaacatgtcacattgtctaatggcaccacagttagaattgaacaaattgccactgtcatcttaaatcctcacattactttgcataatgttctgtgtgtacctaacttttgattcaacctattatttgttagtgctctcttacaagacagtttcaatattttggattttcatctaacatctgttatattccggaccctttacagacattgaaaattaagacagctagaagatttggacacctatactccatcaagcaaaataaaccaactataccagtttgtaattcaagttcatcttatgtacattttattcaaaactaatgacacacacgccttggtcatccatctgtactaattacaaacaaaatcaataaagagatgaattttacaaatcttgatagtgttcttaactgtcctacttgtcatttgtcaaagaaaaaaaaactactatttgtttcccacaacaatttttctaaaacaattttcgatcccattcatttagatatttagaggtcataccccctatcttccatagaaggatacaaatattttcttattattgtggatgatcattcccaatatattttgctatacttacttcgggccaaatcagatgccccactaatcataattttttttttacctttgttaatatttaatacaaaaccaacataaaatccatcagaatagataatgccaaggaactgaccttgactgcattttatgctagcaaaggagtaaacaactattattcatgtgtaggcagaccctagcaaaatgccgaggtagaaagaaagcatcaaaacattttatatattgcgagagctttagctttttaatcccaccttccactctcttattggagttatatggtcaaaacatatttactcaactgaacaccttctgttacattaaaagataagacctcatatgatctgctccaatagaccaccacaatatgatcacctatggaattttgattgtttagcttatgcatcacatgtcaaaaacccccacaaattttctcctcgagctcgagcatgtataaaagcatatttcaatctaggaatgtaatttttcatgaatcagtttatcccttctataacgaacaccaaaataatcttagcaacatagatagattcttccctcaacaatcaaatattaatgatcatcttccatactaatttccttcagtaacacctgttgcaactcctatagcagttccccttgcataatccattacaccacctgttgtaccatctacaacaacccctgctgtaataacaaccgcaacacctgctgcaacaactcaagcaacacttgatgcaacaactcaagcaacacttgatgcaacaactcaagtagcacctactgcaactaatcccactgccaaatcccctacagtccctacagctcaagcagctcctactacttttacaaaatatggcagaccaatttagaaacctgcatatttgaaagattatagttgcaacaaaagtagagctcacccaataaaaaaatatctctcttatcacaagctttcacctaagtttcaagtagccattcttgctgcccagttaatcgaacctatttcctgtaaacaagcttatagagaaaaggtttagaatcgagccacggatactgaaatagatgctatagaagcaaacaatacttggattattgttgcattacctcctggacaacatgttatcaataacaaatgggtgtataaaatcaaatacaaccctgatggatctgtaaaaagcgatgcaaagctcaactagtagcctcctcaaagctcaactagtagccaaagactacacacaacaacaaggtgttgattatttcgacacatgctcctctggccaaattcaacacttgaaaattattatttgcacttgttgcaataaaatagtggcacttacaccacatggacatcaataatgccttccttgaagactacaaaatagggtgtttttcattaaagatgacctcgggaactggtgtgatataccagaaatagtttagcaagcttttttgagtttttatcagcaggtgcttggttcttctatgtccaacaagcttgggtaaacaaagaaattgttaatcttggtcccaagcttaatgctatacattctagcatcctaacaatagcttatacaacccaggaggtaaaagaagcaatattctccattcctgcattgaagtctccacgtcctgatgggttcgggagcaatttttatcaagacaattagggcttagtcagatctgaagttgaaccggtagtactttccttcttgaattcaaacaagattcttaagaaaattaatacaaccactattacacttgtccccaaaagctcctatccacaaagtgtgagtgatttttgtcctatttcttgctgcaatgtgatttataaggctagatctaaagtaatttgttcaagattgaggaaaataattcctgattaagattgatctaagaaaatcatatgatgcaatagaatgaggtttcattggagagatgctcaaggcgtttgactttccatagaaatttattgagttggtcttaacttgtattacaactctcaaattctcgttgcttcttaatggttcattgcatggattttttgtttcaaaaatagggcttagacaaggggatccaatatctcctttgttatttgtcctagggaaagaatacttgtcttgaatcatgattaaggtgggaacatggcctggcttcaagtttcatgatcaatgtgctactctgaaattgaatcatttatgctttgcggatggtctcttgcttttctgtaatggtgattatatttcaataattcttatgttgaggggtttgatgttattctcatcaacttcagggctgaatcctaatgctacaaagactgcaatgtattgtcatggaatgtctaaatcagaagtggatcgggtgcttgatgtttctagttatgctcacagctatctcccatttaggtacattggtattcccatttgttcaaagaaaatatctattattgaatgtaaaagtattgtggataaaataacaagtaagatttgaatttggagtacaaggaacctttcttacatgggaagagtgacattaatcaacttagtatcattgctatacattcgtattgggctcggatcatgatcttgcccaaaagacttctgaaggatgttgaagccatttgtagagtctttctttgaaaaggtgcatcaaactcttatagtccaagattagttgcttgagataatatttgcttatcgaagtcagcaagtggcttgggttttaggaaaatacttgattggaatctggctgcgatgggaaagtatgtttgggatattgagaagaagaaagacaatctgtttatcaagtggattaacaatgtttacttgatgaataaatattggtggaattataaatctcccaacgattgcatctggtattgaaaacgtatagtctccatgaaggatagtgtaatatcccgaaaaatataacaatatttaattgggtatattttattaaatatg

SEQ ID NO: 218822 - DNA, 4176 bp, Cannabis indica
tatagatttggatccaactgttaacactatcagaattaacactataggagaactaatattcgacccgttaggaaagcttagattccactattatataacatgttctcaaccactcatgtcattaagctcccaaaacaaaagttgtaagaattatcttctctgagaaattttaacgagtgaatcaaagaacttaataatcacaaatgggagttcatatatacttaggattcaggctgatctactaatgatcattattgtgatagataaactcttttcatggtgaacgacaagttagatgaaatatgtttattacatatcggtccagtcatacataatctaattatacacagtacctttactacatgtctatgtacatatgtgatccgaatcaaaatcacacatactagaagtatagtgtatagtaaaccgtacttagtagttccatattaaagatttccaatactttaatacactactaacttattttattcatatcatataatcttaatccttttgtacatccttacaaaattataccttctccatatgaatatcgaattttctgatttttaataattatactcttataattaatatatcatttatcttataattgtatttcatatattcttctaatatattatccattaattacttgcttgtagggcataaatctcaacacctttgcctttttcatctcaggggaaataggggtaggctccttgtctattgatctcgtactcggtggggcacgaggaggtcaagaattcttcttggctgggactggaggagtcgctgtaggacaggtagcatcaatcatcaccatattttcttcactagctggaggagttggaggttgaatttggggaagattcttgctagaagaagtttttatctcatccttcctctgcactttggccgaactttcttgcctgaaagaacttctagccttcctcttcagcatgacctctagcttggaagacatggttgtacatacaaaaacacttggtataatatttataaaaaatataaagaaaggcaagtattatcaaaattctactctggatctccagagaagcaccttcttggatcaagaatgatgcagcatcgtcgtccgaagagccagcttctaacccttctttggcgcgcgatccccttacctttcccaacagtgacctacacgactagacatacaacctcctcaacaacttcccttatcaagagataggtcattcagtcagactttatttttttctccccgatcttctttccctcctctggcacttctagttcaagaatagggaccttagccgaaggaacgtcttcctcaacctcttcagaagggtacattccgtaccgagtaaggttccttgttgaggttaataaaaaaaatatttcaagccctgttttaaagctaaagaatggcctaaggccttgattgtgcttataaccggtgaggatgtgatatcattgctaatgaagtatataatttttataaataaaaagaaataaagaaaatcaaatttcttaaaaattagaacatatattatttctataatttttaatttgttgtaaaaaaacctttcatccacacatagttttctatatatatatatgtcccttgataattagggaaaaccaaccaactatattttataagaaaaaaacttctatatataagcattttcaattcttattacacaaattacttgtaatatatcaaatgaagcagaagttgagttgtgaaggcataataggtgttgatattttccaattgccaacttttttatgttgatgaagagaaagttcattcatgatcacaaaacatttagtgggttgactaaatttattcatgttcatcgaacattttgtggtcgttgatttgactcgagtaagatcaatcatcggtgactttggaggccttaagagattcttttcgagtccttcatgatcaattgatttcaaaggaacatagattgctttgctaatgtcttcaagcatttcagtgtctgaatcatatcgattcgaagagttgaagaacatttgaaatacttttaagcaagagaggtgtagatgcctacactcttttgaaagattggtaaagccatcaatcataacatgttcgagtaactctttcttcttcttgtttaatatctctttcacgtactttactgcttcttccatttctacctcagaattgttcttcatgtacacagtaattgagtttggtttgccttcttctttttccttctgtaataattaagtacaaaagttgcaactcattacgactaaatatgttcaattacaagtttacaacaaaatttatcgaaatattaattttttagtaacaacaaaatttgtacatgggtaacatttgttttgatagtatttgctaaatgtactcaattaaaaccctatcttaaatttagagaatgtaattttcactaattacttacctcataactttgtaagtcatttaacaaacgacaaatagtcatgacgagttttgtaacactctcacattgaattggtcgtaattgagagtagaccggtaaagttgaatttattacaaaacaagaagctggaagaagcaaggtgtgagttgctatggaagtcattccaactttaagatattcatccatggttggtacaatcccatttttactccactccgattcagtaagccatgaacaaatcgtttcataccactatacacattatcgaacataagaaatattaaataaataaatatataacatcatttaaaacatctaaataaataacaaatttatttgttatcaaactataacttacaatttttcttagccaattggttatgtcatgattactattttcttgttgttcaaggtacatagttgccatttcacttacaagattatctagggcatcaaatattttcttactaacaccactcaactctttaccatcccacctggccaaattagttagaaattattagatttatttattactataaatcatttatatattttttgaataataaattaaaaaataatacctttgaaaggccttagtaaaagtttttaactcagtgattagagattctttcatatcaaaaaaatcatctgtaattgttattattatagcaccctttgcaaccatcaatcgaattggagaatcataaggcaaagaacaacaagctgaagctactgcaaaataacagtatgtacttttttctctaccaaatcccatttcattaagtccccaatatttacaccacctatatatatacacatataatattagtttttcaaacaacatatagcaataaataaatattgtatacaataatgtttattatctgtgttgtttttttttctaaaataataataattaatgaagtaatgtaccttgttaattgttcaagttcggtcttgtaaatagattgtttgaactcataatttaaggtggctagacgaactagcttgtcgttgtgaaacctcgacaacctgtttgattaaatataatatttaaaatttatgataaatatatgaagtacaagtgtatatattggccctttcaaaattgaaattaataattttgtaaacttatttcttgatagatatatttatatagattacctttggaaagaagtctttcccatccataaagatgattgagcttcattagtttgttcaataaaaagtctatgttccaagtgatctagtcgagccatccatggaagacttaactcattctcaatctaaatatataaatatgattaatattagaattactaatgttattattatgtatatatataaagatattgtgcatgtgttcaatttaatttctagctagctaaaacatacatgatttgtgtaaataattaattaattgattgattaagaaaatgaggggatagcaataacaaagtgaataatcctatatacacatatgaaattaattatacaagttagatttatatttttctttagaaaataatatcaattaatatttgacaatatatattaataaaaaatcaaaagttaattttttatataaatttaattataattaatattttttaaatgttaattaatactacatatatatttggtttcaatatttaatttaattttctttaaatatatttatttgaaatatattttattttttataagtatttttttt

SEQ ID NO: 218823 - DNA, 3807 bp, Cannabis indica
agagagagagagagcggcaaaaagacaagactatataaatttatgccaatcaatttaaccatattaaattattaatgactcaaaacattagacaataacctcacttgaaaatcatcaaaataccatccattgaaggagtacaaagacaaaaaccaccctacttttcaagcaccaaacatttttttgttccatatgagttctctatgacttttaatatttgtaacatatttcactgcaacctatccaagaataagaagcagatcagcagatacaatgtgtgtatggaaccttggggactcgcataaatatgacaaaacaagccaattagagaccctgctcaacgagatagtctccaagcctctcaacaatcatgttgcattgccctggcgtcattggctcatcatacacaccaatgatcaaagcctggctagtctttttaacagtaacaccaccagcaccctgaaaaaaaaaacaacaacaacagaagaaaggtgatacagtgagaaagccaatcacactacacaaaatcataaacactccccccaccatttttccaataaaatacaaaaagaagaatctccaccaataccatgaaagatgaataacaaaaaaaaatgtaattcaatttccatactcagaactacaaagaaacaatgacatgtattcatgtttattctttcagttgaagaaaaagttagatggagattttgaagaattattcattgctctttatgtgacagctgactattgaaaagcctaaataaacatgtcttaagatatagagtcagcttcgaattacaagatattgtcattcagctttgaagttaagcttatctgaatgtgcaacaaattcactgttgcagtgccaacattttaagagtgtgcaaaccatctaaaaggaaacaaaaatttgaacaaatacataaaatgatcatatccaagtttctcaccttctttcctctgataacagcacctggctccccttggatcaccatatattttgtgccaccaagatacaagccagtaggtgcaagtgttccaggttcttcaaagtcattcatgatgccagttatttcttcgggcttgaactaatcaacattaacatcaagactataagcaataaataataataaaaaatacagcaaataagagacagttgaatcaagaataccaatgagagtgtgtgttcatatttctgaaccaaaacataggctttagaaaataaaacatagaaattgactaacaatgtaaacatttaatgaggaacaatgatggttattggatgtgaggcttagttggggatagctttcactcataaaatagaaaagatgtcattatattgtttggaaagtacagtttataaaaacttaacagtatataaagggcatctttattaacattaaagatctaagggtagtcacgtgagctagcctcaaatggttagaaggtcaagagcagtgcgacgatttagttctcataaatgtctggtatcaaaaaagtaagaatgttttaatgtaaaagatttagggtggttacatgtcagctagcctcaagtagttggatgagtgagtgtggacggtggtttggcaggtggtagcagttatgttctcataaatgtatcatataaaaataagtaataatgttttaatgtaaaaaatttaacggttgttgtctagagcggttggatgggtgcgcgtgtggatggtggttcggtcaagcacgtgggagcggtaaccataaatgtatcttatcataataagtaatgatgttatgatctaagagcacctattgaattaagaaatttgaatcgcaagcacaataaaaatctcttgtagttattcaatttaataaaactcttccagaagaagcagtgctttaattgaaactcttcaaatcatgttatagttaaaggcttgaagcttttctgatgaagccaccccatggggacagcttccttcaaaaaggtgtcgcaaagcacaaaaaaactttaatttcatttaaacaagactagccccttataaaagccacctcaaacagacctaactctttgtaaaagccatgtcaaacaggccctaaaacatcataattaagacccgaggcaatataacatattctagtgttccaataaccaggcagcatttgcaagtttatgataatagattcctttataatactatgcctttaatcccagctcaaaaaagcactcccaatttaactgaaaagctttctaagctaaacattcactgggtggttgtactaaactatcaatacatataccattacctaaacctatcgaaacatcgttcagaaaatacatacttgaaaattaaaataatttgactgaacacagaaatgatgtaaaaatacttatagcaaaaaccctaaatcccaaatcagatcacaactacaccatgaatcctgatcaacaaaagaatcctaaaactacccgacaacaaatattgacagaaacaaataaacaataacgaataaatatttaaagaagcaaataaaaaacatgcagtgaaacaaacaaaggtgaacaatcagatctctcttcaaaaaataacaaaagaacaaaaaccaatcagatctcaaaattgtatcgagtaaacgaaggcagagcagtgaaataataaaaagaaaatagacctgagggaaattagcgctctgagcccaaacgctaccatcatgaccgatgatagccgcagcagtgagatgattgccatcgatttcgcacatcagatggtcatctacgtaagcttgccacgacatcttcttcttcttcttctagtagtagctactacaaagattttcctgtgaatttctgctgtttggatggtgagaaaatagctgtgttctactcttatttctagcacaagcggtagcgttgaatccacggagaaataaataatgaaaatattccacttccagctaattctttttttcctttaaggaaagattgattttacaataatacccccactctaaaacttctgttcttcacaatgttctgtctcctcccgtaaatttcgcaatgccatacgtcagttacgtgcactttttttttgtctttattttttattgtaattttgtcctgattttttttttcttggttcggattttgtttatatgtttttttttttttttaaaaaaagagaataattgtttatatgtttttatttctttttttttttttgtaaaaggatatatgtttttatatcacaaacaattattttcatattttatttgagttacttatgacaaaattttattttaaaaattaaaataatatttttttgaatatttcaaaatacataaataatttttaataaaataaaataaatggcattaattttgttattaaaattaattttaattaaattgtcttttgaaataaaattgatcaaattgtattttgttctttttagtaaaaatttatatgtatagtccgtatcgaaaccctaatatgatcaattatttgaatatagtatttaaaatttgaaattttaccgcgtgatatcttattttagtttaattatcaatgatcaaagtttatgttaagtaaattaggtaagttaaaatgttctttcctaaacgatgctaacaaagttgctcatcattttacttgaacattttaattcatggtgatggtattattagagagagttatgttccttctacgttgataaataattaatattatccatttgtatttaaatttatgatcgaatctattaattaaatcaactacctaatttattaagataatcgattttataattatgtttactatacgacctaaaacta

SEQ ID NO: 218824 - DNA, 3800 bp, Cannabis indica
ggacttccttcgtactctgggagggataaaaaagtcctatttggggagattaaagagaagttatggaatcatctttcggcatggcaagaaactgttttcaattggcagtaaggaagttctacttaaagcggtagctcaatctatacccacatatgcgatgagttgttttcacctatccaagtctctaatccaccaaattgaagtaatgatgaataaattttggtggggatccaattcctcatcttctgggattaattggaaaacttggaatgctctttgtcaagaaaaagttgaaggaggcatgggatttatgagttttgttcattataaccaagcattattggccaaacaagcatggttgatcttctccaatccttcatctctcgttcacaagatactcaaggcccgatactttaactttaacgcctttttggaagctgaattgggctcttacccatctctcatgtggagaagtattctttgggggaaagaattactgtgcaaaggtttgcgatggaaagtaggtaatggaaatcatatcttatgtgcttcaggtccatggctacctgacataacctctttcaagcctttgatgtttaaggactcagacactttgataagagtttctgatttgattaccagtaatagacaatggaatcatactcttcttgagcaattgttcctggtttcagatgtcaataaatcaggttccacattggctaccaaacttgaagaacaacagcctactgtcagttcaaacaaatctctcatttggtggaaaaagttctagtctttgtcattaccttcaaaaatcaagatttttctatggcgtgcaatgcgcgagtgtctcccagttgctggaatccttcataccagacatataagtgattcagcaacctgctcttcatgtcaccgtggcaatgagtccatcactcatgctctatttttttgcaagagaccacaaaaagtctagcaactttcctcctttccaataaatgaattcatgtctcataatatatctcttatggatctaatgcagaatatatcttccatatggtcttccaaagaaatcgagcagtttgctaccatcctttggaccatttggaatgagagcaacaaagaaagacatggttcaaaaacaaagccactgaaattgctttgtattttgcaatagattatttggaagaataccaagctgctcggcctaaaccagctaatgctactacttctgcagcttctgtttctgcagattctccttggatgaatcctccctcaggccggctgaagttaaacactgatgcagcagttagcacaatggaaaataaatctggtttcggggctgtccttcgcaacaacacaggagacatcgtagctgtcatggctatgccttttcaaggacgttttaaaccagaaattatggaagctatggctttgatttacagcttgcaatggctcaaagtccttcaaataccagtctactatatagaaactgattctttattagtggttaaaggagtgcaagcatctcaaagacatacttcggattttcattgtctgttaaataatatttctcttttagtgtccaattttcctagggctcagatctcacacatttataaatctgttaataatgcggctcatctgttagccaaatatgccctctcggtgaattctaattgtatatggtgggaggaattacctcctccaattgtgccttttgtattataactcaataaattgtaattttatctaaaaaaaaaaaaacccgccttaattaaattattatttatttatttatttctctgatattattattattattttgataaaaaaaaaaaaaaaaaaaaaaaaattagccccaatacagtgtgaatatccagcagtgatcgtctccctccgaccgccactcacacgctactccgtttgatattttctttctctctaattggttctcactgttaaacgacaaagttgtctccacatacgacgtcgtttcaatcttctcttgggattttctcgcccacataattggagttcaacactctctgagcagttcgatttgcctccccaaactagggtttttacttcaaccactgtttagttcttctatacagttcgagctggctatggactacgagccctacgatagcagtggtgagttcactctttcgattgttgatttgcgtcttttcagtttggtactcttttttttctttcccttaagttgaattagggttaaggttttgtttcgcttttcccttctttgattctgtgattggcgccgaagagagaaagtattagtttttatatgattcagaatttaatgatgacattgagttttttggttgaatctaaacaaaacctctaaaaaattcaaagcctgaatttcctttatggaatatcagcaactcggccaatttacactcttgtttcttttggccatactggtacccttattttttcttcaaaatgttcttcaactttctgtaaagtaaacgaaaagcgataaatttatacttttatcaaagacattgaatctattgaagaaccctttttctatggcaggaaacttaaagaaaagaaagtaaaattctctgattagttagaaaccatcatgccatttggatggaaaagtcctaatttttttcctcttttatggtgtgcttgactgtgtggaacttagattttaagaggcaagtataagaagtagtaaaagaagttgaaaagaatttatcttctcctactttggatttgaacagaagagaattgaagtgtttctaggagaaacataaggcataaactgaataaaacgtttattgcattgtttggaggacatataagtattaaacaaaaataagaatatttgtgaatttgctcatctttttcccttggttagattttcatattttctcttctgctaaagtaaattccatttactaattacttcgcaaaaatctatgatgggtacagaagcttactatttcaattaaaactactagagtgaaaaattcagaatacttcgttataagcgtgatgttttactgggaagatgataatctttggacatgaatattttttatctattttccttattcttttttttttggataagaaacaaagatcgtgttatagttgcatatgaaaatatgtacatgtataaactataacgttgctaagaagtcctctctagaaaatagaaatccattatatatttgtagtttcccaaggtgtatcttttggagtgacttgggattcaggtgcttttcttttgtttcatatgtttttgaatactagagaggaactttaatgtattcagagggcttatttatttttcttttattcacataagtataatgattaatacactctcaattgacacattctaattacactatgatgtatatttattcttcactgtgagtatttttaagtgagaaccacttgagatgaaatgcacatcgtagtgtgtaagttaatattgacactctcacattacatgtatgtaagtatgttgtttttcttttaaagaaggaagtttgtgaataagtcagtgtattggcagggcagctagttatcttagttatgcttttgtttcaagctgttttgttttgtaatatgtaaacataagtgaactgggatttttttgatgatagggagaatgttttgatgatttagtcagaagtaggactgtagttattcattttaaatttcgataaagttcaaaagtgcttgaaaattaaatttttctttacatgtatatttggcttaattatttggcatttcattgctatttttttttt

SEQ ID NO: 218825 - DNA, 10724 bp, Cannabis indica
gatgggctcgtctgacttgcatattggacttctcaaaaatatcataaatattaagcaaatttttacctctacaatgctaatctgtctagtcgagcaacacttaggtcaacttatcccgaccagctccttaatcagttaattggacatcacgtgtcacttgagcaatttttaggataccacaagagtacaacataaaaaagaatataaaaaggtatattttgtaaataaaatttttaaaatgtataaaattttgtaaaatcatattattgtaattttttattgttttgtgtatttctagaataatctcatttaaaatatattttcatatcctctacatacaaaaatggggacaaaatcccttaaaatgaatttatgtcaaaatttcatataaatcaatcttgacattctcatatatgactgtgtgtgaaaaagagaagaaatgaaaatatatttatttaagaactatatcacaacgactctgtggcccaatggataaggcgctggtctacggaaccagagattctgggttcgatccccagcagagtcgatgatttggttttgtgtacttttattttaattttgagagataaatgtcataaaccacatgtgtgtgtgtgtgtgtaatttatctgtgcaggtaacattactcaaaatagtcctttgtcttcacccatatctactctaactttgtgaacctaaaacaaacgataaggctctttctatggtctgttacttccactaaatcatctggcattaacatttaatagctcctccgttaacacatatattttcattttgtgaagaaaactaaggaaaagtgcacgaagtatgataagatggggatgaacccgaaatttactagaatttaaaaaagcagtttgcttaatcctaaatacatttttaatctacaattctcatctgtacaatcctctaaacttgaacagcaccaatcaggaggcaaacccttatgtaagtttcagaaaatagaaactaaaaaacgaggaaaaacactgacttgaggacatgctaaatggactcatcagcaacaattgccatatttgcagcaagaacttcttgctttgcagaatcattcattgggccaggaaaattgctgggtcatttgctgccgaagaagttttcaattagacactgcttttgttctgtttgacacattttgggccaatgaggttgaaagtgtggaaaataagagattacacttggtacccaaaatagtattaagctttctggaatgagcgggaagaaaccccgtgtaaaagtctgacaaaaccaagaaagctaagcttcccgtccgaatgtttaatccagtcttggagaactacgtgaacgggtactgatggactaagtccaagttcctgataggaagaaagaacagaagaaacagattataaatagaaatcagtaccaaagatctacttctggtaagaaaaaattcttgttaattataagattcaaaatggatgtttaattctgtgttttgacatttttgatgagaagttgatagaagttaaaatgaggtattcaagaaagctaagcatttattaaccaaaaagctctttaattatgtcaactttatattctaatattgttcttttttgtacaagagtgaggggagactttgacacataccgatgcgagttcttcaatcataattggtctgtttccatctttctcaaatagttcataggctcgccttgcatgttgctcccacgtttccattccttccagctgatgtacacttatggaagcagcacagaattcttcaaaatctaattttctatattgaatggagctaatctgtacaatatgtaatatatgatcagctaaatgttgaaaatctctacttgtctgggaatatcaattaaaataacgatgagttacgacgaacaaaaacatgatcatatgtcaatattaccatgtgaatgtaatctgtggaccgtgaatccttcatggcatcagtggagcactttagtaaaccctggcaaatttctgatgttaatatgaatggatatagataatatcagaaacacagatgcaagcaagtctaaagcttactgtcttaaagttctgcatagagatgaatccacttttgtttggccctaaaagcataaattggtccctcaaataagctgtatgagatactgacaatgtctttgaaagagcctgtcacatatcaaggaggcaaaagaataaatgattacttcatatatctattgttttgttaaaatatagtttactgttaaggcaaaccatatgaaaagcaaagttagatcttattattagaaagctttactatatttgtcgcagttaacagtatttaataattcaaggcagagttatttctattctgcacaaataagttaaatcatttctattaagtctgctcaagctagtgtataggatttggaccattcaaactggagcaactttccacaataagtgacaagataaggggaaaaagaaaagaacaaagaagcaaaataactaagtaaaatatctttcccaagcaaattaaggactatgccttcgggggaattcagagagctttgggtgtggtggcctcatcactatcaagataaagtcttctggggaagaaatagattacaggagccaattcaagtataaggaagaagatctagaacatagctatattatttatacgttggaaccttcagcttgaaaggtatagtcaatttttcaagggcattgagaaatggaattgatgcgattgtggaaaaaagttaaattgcggtagcttattagtcctaagacttaaaatgacttttcattttctaatttactaatggaatatctggctgcgagttgggtcgatatcctaaaatcatttttaattttctagcacacacaatattactttgtctttataaatcatatattactcacccctaatgctgatttccgcagagaagaagagcatatataagcttttaccatcttcaaaactatcatgtctgttggcacctttagatcttgacaatcagctaaccatggatgacctaaacaaagatattagttgtcaaattctaggtcaataaaatttctttaagcatccaatttcaactacaaccaagtacatcacccattctaactgatatgacaaaaagagaaatcatcagcattccctatttcttgattcattggatttcttttcaattttcttgatcagcaataaccatggatgaacacaaagcagtaattaattgaaaaagctagttgcatacccatagcttaagtaacaagaatccacaatgatgggtgaaatcaggactctattatgtttagatcacttcagtgacttacttagagcttgagcagccgttagcctcttccggtaatccttgttcaacaatctctttacaaaatctcttgcatcagaagacaatgtcggccatggagcttcatcaaagctgggatctgccttaaggacagttcggaagatgccagattcagtccgggcccaaaagggtcgacttccacataaaagaatgtaggcaattacaccaatactccacatgtctgcttctgtcccgtatgacctatgtagaacttcaggagctacataatatgcgcttccaacaatatcgtttaatctctcatctgcaacatattttattgtcaggcccaatctattcaaaattaagcaaaaggatatatctgaggcaatgccctcacctggctttacatagtcagagagtccaaaatcaattgccttcaacgtggaattctcatccttcgttacgaaaagaaaattctaaagcagaaaacaattaaatcaacataagaaaaagggagaagactgtaagacaactggattatgcaatcacatactgaaataagtacattagacattaatcagtattacgtgcactttccagataacagaaatcacacaaaagaaagcagaatctatatctgtagattataaatctcttcttcccatcttctaaaaggaaaaatacctctggcttgaggtcccgatgaacaacaccttgaagatgacagaaagcaacaacacttaaaatctgcaccataactgcctttgcatcttcttcggaatactttccacccctaagaacgtagcaaaaaataaaattactgagatagagaaggccagtaacaaatggtaaaaggagtgtgtatgtcttatttaaagcaagaaagaaaaaaggccttcataagaaaactaacctcgagagtattcgatccagcagttcacctcctttacacagcctgaaaaacatagcaagtggcataataagtttatcatgttaaactaagagcatcaaagaacttgggcaagacacgtattaaatacccatcaatgagtaaaatttacaaaaccttgggggaaaaaatccagcagaatgttaaaataaaagaaaaaggatttccatatctggtactcgatacaagaccattccactattccagtacatatgtttatcttagaaggtttcgaaaggataagattactcagcctgctagtctatatttcaaaaacatttctacacatataagtgagagatactggctccataattgagcaagaggctagcatggattccatgaagataacttgacaactctaaaactagttttcacatgaacaaatgaaaaattatcttattttgagctcatttatctatggtgcatttcttgtggggaaaattgaacacattagattgtaatgttataaaatgaatatttaaaagaagaaagaaaacagtggacatactccatcactacataaacattttcatcatcttcgtaggaatcgtagaattgcactaagttcttatgtcccgacagagcacgaagtatcttcacttctctccttacatcctctatggcaattgctgtcgtcatctgcaaaaatcatttctcatgagaacagaacaaagcacttccaatgaatttccggcccatggtcaaatagaaagttaaacaaaatattgctaatttaacttttaactctcatacttgaatttctgtgacttggaggagaataagtgttctagttataaagacccttgaaaggatgatattagcaatgtatagatgattactatgaaatttgtctgttttaaagttaggaggcaatgaaacggccattactatattaaacaaaatcaacgaacacccaccaattttgatcctacatacatttacagatttttttttttatgaaattaaacttatataacatgataatcatggtgatcatgcatatgctcgagcaaatataatcataaattaacactaatctttccttagagctctacaacatgatatgcaaactacacaattaagtagaccaagtcaattcagagtctacaatacaaaactactaggaaaatgcagcaagtattatttttaaaatttaaggatattaatgtcaaattttctttactcaatcctaatcaaacttccataagaactacaaataacatgcaaataaccaaaacaactccattcacaaaagaaaagtaataaaaaaaagaaacataccttcgattttggaataactttaacagccacatcttggcccttcatactccctttctttgcttgagctgagcaagtatacccaaaatgccctcgtcccacttcttccccaatctcataattggttacaaaatgcttcgagaagccaaaatttttatccaatccaacctcacactcactcccttctgggattgaggcctcgttgggcttgatcgagccatggcggcgggctaaaagggcgcgaatgtgcttcgccggagacggtggcggaaatggccgcttgaagatcctcaaaggagtagagctaacgcttgagttggccggagagttcttaaagagactgggaagaggacttgggctgtaaaagggaaaattggaggactttctggtctgagaattagacgcagcctcatttccatcgtgaactattgaggtttcagattgagtttggcgattttcaatgggttttccatgacagagtcccatgggatcaaaaaacccagataggaatttcaacaattacaaagataaaaaatgaagatcagaagaaggggggaaaagaaaaagtagatgaattcagaccataaagggagaaacagcaaaagtgaaagtgaaagaaaaaaaacttgaagattattatatggtgatagaaaattctaaattttgaaggatcaaacaaaaccaaacacagctgagatcagaacaagaataccaggaaaaacaaatttttccaactgaattctaataaaaatttaagcttggacgctaaaacaaaaagcaaccaaactttttctgattaaacaaacaatggcagagaggaagaagaagaagaagaggaagaagagaattaaaacccatcaaagtttaacaaaacaagaagcaaattataggtgaggtagcaaagccagagccagtaaaaaaaaagaaattccaagaagaaggaaggaatgagtagtgaaatataataataataataataattataatgaaaaagaacaagtttttagagtaggaaaaagtgaagaaaagaaaaagatgcttagcagaggctgcaagaaaagaaaacccaacctctcttctttttattttttatttttattttttcttgctttaatgtaagcttttcttttttcctttccttttaatttattttaaatttgcagtttgttggtttatgtaatatgtagcaaatttcacttttattttaggacaagggtctgttaactctgtttcttcttcttcttcttctactactactcttctttcttctctttcactttcataacaataatagttattattattataataataagaataataatagaagtggggttgggtttcggttcccttacagcctgtacttttttttaatcacaatatttataagatttattgggtttgttttctttttctatcttttggtttattatttttttggtttttgttcagcaaattagtttagttaaacttaaacaaaaacaagctgagctaacattgtctatgtttttgtgtgtttatttgagctttgacctgcttttgtttgctttgaatggccctgactttttctcttttgaatatttattttcctttccctaaaattaaaattattgacggcttgtgtcattgtttgtttgttatgttagagaaaatttcataaattcataatcaataaacatcgtattaaattctgagtatattatagaagtttcataaatattgactgccatagactcatagagtaacattaattatctctaagacttggtcaaactacatctacattgaattatagaaatagattttcccatagtacaaatcgtttaagaccaaaagagaaaacaaaaaaagccatttgataatactaaactgttacaattcggttaccccaaatttattatagctcaacaagttattaatttgttgaataaatgtcatatgctttaaatagaaatatatataaaaaaattaaaaaattaacattccaatttttctggatggtgaaacagagttgctttttcttgctagtgtttttgctttagggaattggttaagcagtgggaatatattccacatcttaatatatttcaattcgtgatgataagatttgattgtaaatgttgatatggtgctacatatgcctttaaaactttaacagaataacaacttttctttcacaaaacaaaaaatttactatcaataattattggagtaagtattagaaagaagaagaaaaaatgcttgaagttaatttatcaaggtttaattaattaaacatagttaaaaatgctcacaaaatttgtcctatatactaatataccctttagtttgaaggtacaatattgcccattatcgctttgatctttttgctcaaaagcaggtacagctattttcatgtcccaaaataggtgtcatttacaagcattaagaatcatttttattcttcaaatgcacaacgatatctatatttatataatataattactatataaaagaaattggcaccaagtggagaaatatggcacaagaaaacggcagaaatttaattaaatataattaaataaaacgatttagaggttaattgatgtgaacaaagagtgtgttgaatcaaaaacaaaatactaataataataatagagtgttttatcaagatatgaaaacgatcccataacaataaaaataaaagtttatacctataaaccctgcaatctcagttattcaaaaatctatttttattttatttaagtttacaattaaacatataaagctgaaaatcaaacctaaccctatccattgcttgagtccaagtcaagcctccctaaccatatatttaagagactcataatggcgttcatactttcataaacccaaagcaactactaataataatagtatcgaggttgggggttagaagactatcggtttaacaaacccctcaaaatccatactttaggaaaatttataattttattatatatataataattacttatttatatttaattatacatttcaatatatacctaaccataattttaattatctatactatttccttaattttttatatttaatttagtataaaacataattgaagtgtttattataattattgctaataaataataaatattaattattttatattttatattaatttatttaatataaacaaatttaattattactatttgaatacataatattattgattttgtggaactaaatcaaagggacagtagaactattttaatatttagagtaatttaccgcataaatatctaagtttaactctcaatagtaaataaatatctaagttatttatcctacgtataattttaaaatttttgtaggtacataactgctaaatgttagtaaattgtcacatgacaatacctaattagtctaaatcattaaatttttattttttttaaaaaaaaataatttaaatatactagtagaaaaatgacacgtggattatgacttattatttaacagtcaggtacctacagagtttcgaaaatataatttaagtattattaccgctaaaaattaaacttaggtatttatttgcatctaaaatttaaacttaagtatttatatcgcaaattactctaattattattgtaccacctcaagaatccccatatgtaatatatatatgttaaatcataaacaaaaaagatgactaagaaagttacatcttaatgatctattaaagtatcattgtaatttttccgtatgttgtatcttatggaggtaatgaaactcaccaaatttttcaaccactacacacaaagatcagtttggtctgataggatccacaaaataatattattggattcaatctcaactcatgagcaataacagtttttactgaagagaaatagaaaaagatttcataaatacatggtatatatagatttaaaattataccaatataataattataacaaataaactaatattaaatgtttaattaaataaaatatttatttatataaaatattaaataatcatattatatgttgacacagttttttgaatctaagaagattgtaaacaagtaagatgaacataagtatttgtcaatcaaagtaaattgatttatcaaaaataaatttaacaaagatgaacacgagattttatagtggttcaccccctctcggtggtaataggctagtccacttgggttgttattggtgtcaatgcttgaggagatttctctagagttatgttctctaagagttcagtcctcaaatgatgagtttttaagaatgagagaaccctaataattagtcctaactctatcgtcccccatggttaaattgagtgtccggtgaaccgtatatcagtgatgcataggatttgagatccctaagaccaaaccccatctccctcagggcggtgaagtataggatatttactaaactcctgttatcaaccaatgtttgttgtaccttggtgttagccttttgaactgtaagcactagtggatcattgtgtgggaaatgtactcctcttgcatcttcctctgtaaaggtgactggggtgttttccccttcaaatttctttggaggtcttcgctccaagctccaggagtgaggttcttgccatgcctcttaggcatacttgtctctcgctcttcaagttttgcctcctgcgcaaaaccctcctatgatcattatgatgccttccaccacttcaaggactttgccgggcactctttgctggtgttcctcatccatttgtgccctgttgatgctcgcacctcctctcctaacgacggatggtgatacgtcttgcttcggtgcaatcaacccgtcttcgtcaaggtgagttttcgcgtattgacaacgacgaaagcatctagtcattttgtaacaattgtgtgcaaaggaactacctggcttgagcttgtcaatcccacagacagtgccaaattgttaatagtgagaattcgtcaactaatctagtggccggacaatacaaagcaacctagaaattaaatgacgatagagatgaaatatgaagatgaaaagatgtgtgaaagttattttctctctattgcattcaaggcctgagttacaccaagtgtttttccaaccccctttcacatatgagatgggggtatttatgttggaaattattttaccaggatctatttactatcatgtatg

SEQ ID NO: 218826 - DNA, 3517 bp, Cannabis indica
taattaattaattaattattttggtattgggtttctttgtttgtaaatatatatgatttgcagagtaacgaatttaaaagtaaatgatattctttggttgaatcttgaaattacaaatggaacacaacctatttttggatggattaattcaattaatttaataagtaaattggataattctcatttgtacagtacggatttcaatggaatggataaaaggagatatatctctaatagagagatttacatcttttgtttacaaatatatgaatatgatacgtttactgcttacaaccacatgattggtgcaccagctggtctgtcccagccaatcaacacacaaaagacaaatctttaacgttgctatgctgtcaaacacacacatttttggtgaacacccaactatgatttggaatttggataatatgaatgtaagactcttgagttttaaactctttcgacctttcaatacaaatagaggtccagaaaccagcttagatttactgcgtcaccattgatgtggggtaccatactgcgggtcccatctaacatgggaaagtagaaacaggacagacccatgaatgatctggttcaatctcttcagaggcttctttttactataaataagctcataatgtccttgtggatcttttgtcttatcctccatttgtggtcaaccacttgtcaatcagagcgttattataactgttgttatatccataacttcgtactctggtatcattttttttcccaatcttctattagttttaatcgccagctaccctacttgcaggcatcaaaggaaatttcacatgctgggattggtttacaccattctcaataaataaaatctcgtttttgcagaagaattcttcctccaggagagattctggaggaagaactgctcaaatgtcgacaatttcgattcacaggcttcagttattgagtttctcccatggcagaatcaaatcacatagaagatttcacagaacctatgccattaccatgtgagtctctagtttatgttatttctgatatggattgtctttgtttctgttaattttgttgtgtgttttcttttgtattttcattttcttatctacatatatatcctgggtgaattaacaggacaatggatgccaaattttctgaaaaaaagaagattgaagaaatttctgtacagattccatcattatcgtcacctattactcaacgtgaattattaaaatcatctgatctgcaatttaaccggctgcaaccatcagaaagagatttaattcaagaaaaaaaacttgaatttggacattttgttgcaagagacgccattcttgatgaagaattctgggtaggaaatgatatagcagagggataaatagtttgccagtgaatatttgggtgtgggttatttttgttcataatttaatttgaggtgcttgtttggttttaaacttgtggtagactgcagcatggcttcgtgcagaaagtcactgggaggatagatcaagtgacaggtgcgccctctttctccataatattaatttaaagtttggatttcatcacttatatctgtacatggccttggtttttcagtattctttgactaaagattgtatgaattcctgtcatagttatttggtagacccatttaggttgttctaaaaaaaaaggagaggggatagattcaaactcttattagtttcaggttcgactagttttaggaaacctgtggctggacctttcaaatgtttggttgcattccattacttgtatatcaccaagctaattctagcctacacttggttaacacagatatgtcgataaccacaaaaggaaatttgcagagcaggtaggattcttcatttcttttcattattaagtataattcaatcacttggtaaatataacagtattgttgaataatgtttcatgttttaggagtttaatgccattaaaaagcgaaacaaatggcagcataggccaaatgaaagatgtgcatgcattgttgcggtatgacatctatacatgagtaaaaaaattataaagcacaactaagtttctcactcatttacatggcaaggaagttttgatgaccgattgtaatccgtatgagaccttactcagtattttgtctaacttaacaggtaaaaaaggaaacgaagaatgtgaaacgcacagtactgaaaagtgtggttggaactctcgatttgagcattcggtacttgttgcatggagaaacctttccaggggtataaaagcattctatatttgtttcattgtccatctcttggaattaaaagtgtactttaaaactaaaactaatgacactcaggaacgggtgaaagctcctctcttctgcagcataaaccgtacatcccaaaatagatatggttatattgcaaacttgtgtgttgccaaatcagcacgtcgccagggtattgcaagtaatatgctgtattttgctgttgaatcagctatttcagatggtaagatgaaagtttaaacaagaattttgttcatctttttctatactagaagggttcatctgattaacattttgcgtgacaggtgttgaacaggtttatgtgcatgtgtatagagataacaaagctgcgcaggagctgtaccgcaagatgggtttcgaggtaaaatattcaaattgtcattgttaattgatttgtgctcgtctaagtattcaaattgtcattgttaattgatttgtgctcgtcttcaatcatggtcttgaattcatctcaagagaactgaactaatgctcagttcttaactctcttatcagttggttcaaatggcaagctctcaattattagaggagggaacgttcttgctttgcttcaaatcctgaaaaccattcgactcaaaatttatctcttggtgtaaagaaacatattctaggtgacttgtagaatatctataggctgctatccaaagcgagaaggaatgtttttggtcattaccttcaatttgtaatatcttgttcaataggctttgaacaatattcttctatattttaatttttttcttttatgtaatttctgcaagttgaaatggaaaacaggaagaaaagaaaaatagagaagctgtcatttatatcctttccatctctcgagcaattgtccttagcatttacaagatcatatttgatgcaaaagtcatataacaaagtggcttctttttattatgccaacaaatcataacaataagacttaaaatttttgttttatttttcaactttgtaaaaaatcaaatgtaatcttgtttaatcaactgtcctagatctacaaatgccaatgtccactcacaacacaagctaaactacactttgtatatagatcaagctaggtttggttactatgtttatcgggataaattgaaaaatatttctttttttgtatttattaataaaaatactttcgtattatatttcattaaaatcaactcatttttgtgaataggttgcctaatatactcttgctttttacttaagtgtagcacatgattt

SEQ ID NO: 218827 - DNA, 2407 bp, Cannabis indica
ctcgacgtgctcgagttcttggcctcagttctggcactgggtctacttcaagtcctgctaatctttttgaagcacgtcgtggcagctcaggcactttctctttcttggatttgcatagaccatgttcagccttctcattttcagggtttatcaactgatctttgagatatttcttagctggtgaaactgcattaccaccttctcctcttttgggctcttgcacttgggcttcttgcagatctgagttgctcatcgctacgcccgtctcacctgcagagagtttttaatttcatatagaacatgagaccataaccaacatggaatagtaaaatgtcggaatgaacattgtaacaattcggaaactgcaccttctgattcaatgataacaaggaattaagaaaggtgtgtttgcttattttcaggggattctgttagtcattactattgtttttggctagaaaatgtcattgcaaactcattttcatctcatttccaagataatttgaggaaacagaaatgagaactgaaatataagacaatgaagtcaatgcttttgagaggtaagtaaaaactttacactgatcttcatgctcagagggggctaagagttgagttgacgagtgttgttgttcctcctgctctatatcattcatgttcgagctctgactgaaattaatatgtctccttgctttgctgactgctgattgctgtatcacacttgttgactaaggaaaaaagaaaaaagacattaaaaagattccaccagagactgcacggctcgataaaagagaatcttaatcaaattgtaaaacttataactactactcgggcctaattagcatcagcttgagagaatccagaggaaaccttggtgaagatcacagcagctgatcaaaaccacatacttgtgtttcttaacaatagaacaagcagaagtgactaaatagttgtgatttgtaaagccagtagagcagaacaaggaaacattttgtcacaactattgcgaatgcacattactaactctctcgtttgcactgccttcttatcatattttgagtaggattctgatacatgttcacttagccaattacactaaaaataaatcgcattaataagtgtccataggataatcaaattgacctgatattctggtgctgttaaaggataggtttgtctacttataagttctaacctacctatgattgttcatctattattgcttaaacaattataagcagcgaagccatgaatcttaacttgcgaacacttacaaaggttctattgtcttccaagtctttttctgtactgccttttatgttctgtgcaatcattccttgttcctcagtttcaacatactgaattacagctttcattgagtggaatacatttttgctaaaaggatcagtgtactgctgtaagaaatcaaatggcattttaaggttaagcaagtattcaaatgtataagcaattaaaaacaaaaggagcagaaataacgtaggctcaaccaagaaaatcgataattgtacactcgggcacttgtgaagttaaaagtaccaaaggatagatagcaggtcatttctaattgtattattatcatctttcatgacctgaatctctttaatcaacccaagaggtaatcccttcaataaattataatcttactccaatactgaaaactatagaccattatttgaatcttacattactctcaaactctcacacccatgacccaaaactggaactcaaattcaaatatcatttaaacaaaagaggaaaaaacaaaaaacagagaaaagttcaagtaaacatacaattttttgagcttgcttggaagttgctttattcttcttttttagttggtcatggttgtttagtggagtacccagatagcgtaatgcctctaccctggaattaaatgtaggtccatttgagggagcagagtaatactgcaataagcatatactttgttcataatcataaatatatcaactaagtagtctctttttttatttcttcttctaccttttggatccctccctcccaaatcctattagatcttcttattagttattataaattagtatgaagggagtgaaaatcaaatactttagttgcatgcatactctacctaatctaacacagctcaaaacttcattaaagtcaatattaatctccatgcaaacgcatgcagttcaatatctaaataaatacttaaaacccaaagcaccccatatcctatttttgctttttttctaagaaaagaaaacacagagaactcagattcaaaaaccagaaattctaacacccatagtcaaacttataagctaaaaatctcaaaaacttactttcaaaaaggaaacagtaaaagtaaaaactcgtagagttacaaaaaaaaaaaaagtaaaaa

SEQ ID NO: 218828 - DNA, 2763 bp, Cannabis indica
tcgaggttgatctagaagtaattagggttaaaaaatagtaacgtactctgatacccatctaatgtaccacggaatacattccgtgaagtacatcacgggacaaaatcgtgtccctataaatctataacatattttatatatatagttaattaataatacaatatatatctcttgtcattacacctctctgaatgaaaaagttatatatacgtctttatgatttcatgcatacataatccttctttatgttttcttttctttttatttctgctttctccatacatagaaatatattactagttactagttaggtaatgtttactcatagtgataaattatatattagattttaatagttaaatcgatattcaataattgtaattattttaattattcttttttctaacaacagatgatcaatatatgatgatatggctacatttaaaaaaatatataatttacgccataaatacttaagtttaattttcagttgtaaataaatacttaagtttaatttttgataataataataatacttaagtgatatttttgaaactctgtaaatatttggccgttaaatgttaagttattatctacgtgtcattttcttattagtatatttaaattattttttaaaaaattaataactcatgacctagaccaatcaagaattgtcacgtaacaatttatttaacacttaacaaccagatacctacataattccaaaaatataatttagttactattactgccgccaaaaattaaatttaagtatttatttgtaaccgatagttaaatttaaatatttataccgtaaattactcaaaaaaaaattatatagtataagtagtgtaaccatcctaaactataataataagaaaaactaataatataatgtttttcttttgatgaaacatgtagtataatgttgaattgtatacgaggtataaattattacttatttccttgtttatacataataaagtaatcaattaagaaaagaaaaagaatattaataataataaaaaaaaatgagaaggtgaaatgacccatgttaattggagtgaaacaatagcaagcaaaagcatgttttgagggaaagaaagtacagcttgggatttccccaaaccatggtcttccgtctttgtctttgtgtagggtatttatgtcataatccttctaaagtttattttttgacataaaaaatatccttctaaagtatttttttttcttttacaaagaccatgtgctatccatgtgagggtcctcactcctctccctattgcatggcaacttaaattacataatttctcaccacaaaatttatgtaagagaaaattatataaaaatttatagtagactccttaaaaggggtgttgtggttagagttgtaaatatgagtgtagacccgacccgtattttgaaaagtctacctaaatacaagttgtgttgtgtcaagccaaaaaataatatgagtcgtgtcatgttgtaccgacaattttataaataggcatggcagagctcataagcctaatattttcgtattttgctcagattcatgcattatttactcaaaccagtccattatttcttaaacagactaagtcattttcttatatgagctcaaattcatgcatcataattttacagttttattacaatcaataagccaactactaaaggcgtctactgtggggatttaaaaaaaagaccagggatttaaaataaaatagattccattgcatcttgtgaatataaaggggagttcatggccactaaaatgtggtgtattgtaggagattagaattggcttttgctataagtttcactcatttaatgttatgtttgattgatataaaaaaaaacacacattttcatttttttaaaaattacacaataaattaaaacactcattttttttaaaaaaaaaaataaataaaaaaactacatttgacaatctcgtgagccttaaatgctctgtgtgtttgagtaaactcatttttcttttttaatattacagtccaacgagttactctattatcatatatcactaattatattctattaaagtaagaatagatcaagacctaattgagatttagattccaacacctaaatttaaatttattatatatgtcttgcagtttccatgcatagttgagtaaattaactaaaaaaaaaaaaaaaaaaaaaattaaagtagatacatacatcaagtccctaaacaatattgattcttattttatatcactacaaaaaactgatatttttaatgacaactttttagttacaacataatttttttaggactaaatgtgacttttagtcacaacaaaatattacttgtgactaaaacatagtctttagatacaaattgtcactaatttaatttttgtcacaaccagtattttaattaaaaatacatttagtcacgataaattgtaatttttgtgactaatatctttttttacggaccttttagtcacaacataggaatagtaatttataattagtcacaacttttttacttttagtcataagttttgttgtgactaaaagtaagattttttgtagtgtatccttgtatatatataataaaaaattaattatataggtcccaaaatatgacctcctcatcaattaattttaaaaattcagtttgattatcattattttatatccttgtgtatttaaagtaaactttgctaagtcttctgttttcttcagcaaaaatattatttggctgtgcgtgatcgtgtttgt

SEQ ID NO: 218829 - DNA, 2462 bp, Cannabis indica
gagggagatggagagttatgatttttaattgaaggggtagaagaaaataaaattaggcatatattggtatataattattgggagtctaaaatttgatatcaggtaaaattctaagcatcatttataaaatttacccccccaaaaaaagacaactggttatataactaagaatatgaatcaactattactatggagtcaagcaagaggaaagatagactatatgaatcaagctggctaatcttaaggatttcatgtggaagggttgtagaaatcaagcaaatctgcatcaatgattaacaagttaaattcaagcaccaagtaaatataatttgagaaggccattgcagcaaaagaaaataatctgatcaatgaaataacaatgttattatagctgatataatagccataaatataaaaaattctgtaatcaatacaccatcaaagttacatctgaatttgaacacatcataattcacatattgctgttttcctctgttactcccacctaagtttagaaaactgcttcaataatagcatgcttaggcttagggaaccccagaccaaaaaggtggttcaggtacactttcccgtccttaacagttgcagccgatgccattctgcgctttgggccagaaaaggtagcaacaactgaggcagtttcccatccatctgagctctcaactagtctagcagaaggtcgcccagcaacaacaagcttagttggagaaagcagctcaaggccatctccaaaagtgagtggacctccagctaccttgatcaacttcacttcctctccttttgtcaagtcaatctttaacaagtttccgctgaaggtatgaacggcaatcaaaaacccatcttggtggtaaacgattccgttcagcccaaccaagttcttgtaccactgtgtggtagtgaagagagggtttcttatgatggaaatgaactttccgtccaccccaactttccaaattttattgcctacacaatctgtaacgtatgcattcccctctgcatccactgccacatcatccgccaaggatttctcatcatctacatccatcaagggaatcaaaggaacaagcttcattaaaacccatgtacaaaacagagatgatatgacaatgactaatgaaacaatacaggagcgcaccaataatgatatgttattttttatggtgtttcacacttaaggtccctctaagtattttccgtgcaacaaatgggttcattaaatttcaactaatttaatttcatataccctacaatgctattatatatgggcatttattgaagaactaaacttttacaatgcctatacagcaaattaaaacccatactagctactttcatataagttataacctatgatgcaaattgcaatcattttcagtgtcattatctttagcttttcaacaaattaaaacccaaactgattattcctatatacatggcatttattaaagaaccaaacttttgcattatgattgtgatactaactaacaatagcttttcaacaaatcaagacccaaaaataactactttcattagtacccttttgaacctagcttttagattttcaattccccaaaccagttaatgcaacaatctatgacctaaccataccagtttgagcaggtaaagttagattggggcaaaaaatgaatgaagaaagaggcaaaaacaaatcaaataaaaaagtcgaaccccacttggaccactgagctgggtatgaaagaggcgattcaacgtagtcaaatcataggcgagcagagcagcgtagcgatttcccatgaggtcagcggcgaccacgaggaggcgattcctagggcggtcaatgacgagtccgagggtggcgttaccggccacgtcagcatctttgatcaacggaacttcgctcagaacagtctccggagagtggtcgtcgggggcagtgagctgggacacggcgccggcgaaggaggagatgaggaatcgacggtggtgatcgtcccacttggcgcactcgcggaaccagcctgggccacggtaaaagaagacgggggtggctggggtggcgagttcaagggagacgaggtaggcgatgggtatggcggagaggacgaagaagatgaagagagacttgagtgagcagattgaagaacaacaggaagccatttttctttttctttagagaaatgtaacgttcaaaaataaatattacaaatcgtttagtagtttttaagcgaaaatttttactaaactttttaattaaatattgaataaagtaaaatcgtttttagaagtttgatattagttcaccaatgtcttcatctacccatactaaaatatttatgattactaatcaatcaatatatcaatatcaatatctttatatattaaaagtgtctatttaacggtaattcttggtttaacgattcttagtttaacgattctttttttatttagccttacacgattaa

SEQ ID NO: 218830 - DNA, 2549 bp, Cannabis indica
caaccactgctccaaaatccaatatatcaattaaaaaaaataaagacctaatttttctttctttaaaaccctaatgggcaatcagattagtgtaattcgaaattaaaaaatagaaaattgaaggaaatcaaagggtgaaggggactaccttttcgaacagctgtaggagagtccatagtaatagtagccattgctgccttcaaattattatgaatctttaaaattataaacttaataaaaacaaagggacatttttaacgacaaatgtaaattaaattagtgttgctgagtttatgttatgaaagaattcaaaaacaataaagttgtaattaaattaaatgaagcttaatccaatataatatgttgctgtggtgtagtggttatcacgttagtcttacacactaaaggtctccagttcgatcctgggcagcaacattattatttttcttttttcattttttgactagaaagaaaataaaaaatgagcctcaaaatttataagaacaaatcacatacttgatctgtatataatcttgatgtaaaagcacttgaatctttccacaaaatcacaacttttaacatgataaactactcatattactaactttaacatgaaaaaagattaaagaaaatttgtgtacaaaacaaattgtgaaacaccagcaatctcaattgtcaagcatcttcattaagatatgtccatctacttttagatcaacccgagtcaaacaaatcctctcctaccccccccccccccccccctacccaaatccttttagtttgcgaaaacagtcaccctcactcgagcagtgacttcgggatgaagcttcaattctgcaacgtactctcctgtttcccgaatctctggaagagcaacgagtcgcttgtccacgtccctataaccggcaacaacaaagattgcagtgaagacaagcttgattagcttgtaatgcatacattataataaatttagatcataattctagaaacaattaagataataataataattaataatacctttgaagttgagctttgatgatatccacaagatcttgagcagtaacactgtgaaaacaggtcaatgtcatcaacaaaaacaagatattatgaagaaaaatgtaaaattattccatggattcaacttacgttccgaatatttgctttccttttccacctttgcgcttcaccttgaaagctccaacagtttcgaaaataagcgccaactgctctgcctcttcttttacctacacggatgaaaaacaacataaacagaatgatccagaagataccattcattcaaaatgagaatgataatgactttagcataagataacagttggagactagccaatgattgattcaaaagataacgcaaatgagagaaatttgagtgacatgcttgatttattacccgctttttctcagcttcgattctttcctcttccatcttcatttccctacaaaaaaaaattggaaaaaaaaaatcatctctttgtttattagaaataataaaggaatccgttataatacagattactactttttagttatttgttagagttggttacaagttactcttgtcaccaaaatatctgtatataagctaaaattgtaaactctttcattcaatcaatacacagttgatttctttcaatactattgtgaatcattacaatcttctgcatggaacttgtaaatttcagaatgaaatcacagcatattacagcacaagaatattaactccatatcacgcagtgttcgtgcttattatggataaaacagattaagtttcgctaacaatttgttgcaatttaaactcatgtaggcatataagagagagacatagagggagtctaatgctcaagttctaactaccgatgtccaaaagcaacaagcacatttttgtatatttacagattttagacatggctagtacataaccaacaacaaaaggaatcaatcatagatggaagtagcagggctaataattagactaaataatctaatctttgattgtcaaagtcctaagaagctgtaattttcttttgattttccactggatgtcgttgttaacacaattaatgactaaaaggtgggattaagtccaaacttgttgtggcatgtaaaggtgttgcggtttggaacttagacaaggtcacaacttatcaacggatataatcgcttggagatgaatagtttatcgatctgggcgtgaatattcttatttggacatcttgtttggggtattgaatttatgttcttaatctcctggcgtggatattggcaggaattgattgaaacttttgcatgggctcatgaacgaacactctcctaagtaagaagctttaatttttttttaatttccacttagaacaacattgtattgtagtatcctacaagatgccataattaattcaaataactcaactttagagcatgtttggtattattttttgttttttgttttcaaaaaattgtttttagaaatgaaaacaaaaaatagtttttgaagtttttaaaaacaagtcatgtttggttagtgtttt

SEQ ID NO: 218831 - DNA, 2203 bp, Cannabis indica
agttcaacagccatgtttggtaatcaatggagacagtcagacagagcaattatattcaagctagaacttttatttgatgaacaagagtaaagagaagccgtatgcattgatagtaggacaatagtggtcctttatttattatatgattatatattaaaagttgtgttagtgtgtttcattatggaatcagtctattatgaaaacccaatttggaattgatagtttttttgttgctttttaatataataattagggggctgttactgtgttagtggactagtcttcaatggtcctttttttcttgttttattattatggaatctgttatataaatatatatagagatgactatgccccaaaaaagttgagagtttctatggtgaatcacgtgtagtgtaatggttgttttatgatgtttaatatataattggttatataatataatcacttaaattgtttagcttttaataagcttatgattttaaattagtcagagaaaacaaatataacagatgttcaaagcaccaaagaaaagagaagtagtttacttgtatccttattccttttaacacaatagcaaaaacacatattaccaaatacaccactaattaagctcttcaaaagattatttggtcacaataaggccataaaagatccaactaagctccacaagacaagatcatataatcgaaagctggatgaaggagttcgataccagctccgatttgacataacaatttaagcagctacgcagacaactagctttactcaaactggtaagtttgttaagattgtccgactttcccttatatgacacatgacgaatatttgttgaaaagccaagtaaatcatggctctagtctaatctggaacaaaaatcacctgatacaagtatggctagatcatgtacgaggtcatgcatttggagaagggattcattcttacttgaattttgaaagaaggaccttgataagagatcttcaaggtattcctttccaaattcctccatctttttacttttcgtatccattggcaaaaatccttctgccatccataacaaaatcaatttttctctttcaaattcataatctttaggaaagatggaacaatacgcaaaacattgcttgagatgtgtaggcaagtgacgatagctcaaccataaagctgaaagaatggaaccctccttcttgtacaactcttcccatgtgtcactgttaagtatgtcctcccatttcctggcattaccttctgaacgtagcaatccaccaagagattttattgctaacggaagacctttgcacttgtccactattggtttgccaagtacttgcaactctttgaagttattctggtcaaaattatctccaaaggcatgtttgacaaataattgccaacaatcatcatccaacaaagtttgtagatgatgaacatgttcagtggccatagaagaggccacaattgtgcttcgggtagttacaataattttgcttccatttgctccagactcaaaagaactcttcaaactgtcccacaaagagtaagactcgttccaaacatcatcgtgaacaaacagatacttcttccccttcaatgctttcttcaatctccttctaatcagttcgtctgagctctgagtattgcatctattgctagtgactccttcatagatctcttttgttatctctgaaatattaaactcatctgatacagtaactcatacttttagctcaaaatgactttgaactctttcatcatcgtaaaccaattgtgcaagagtggtttttcccaccccacccatccctacaatcgggatcacagaaatcttattaccaccatcaacatcatctcttagcaacatatcaacaatggcttctttttcaacatccctcccatacacatcagattcttccattagaggagcaagtggccttggtgaaggtttgttgagtgcacctaattctcttaggccaagagtatccttttgatcaaccagaatcttcagctttcgaaggatctccatgatatcaagcttaacagatttatcaaatgcggacaagaaaggtgacttaatgaagttcatgagtaccttaccggcactgctgctgctagactgatgatcatcttcaagcttggatctcagagcttcatagtcaatcctatcgagcaagtcatcaacttgatagatgacatcttgaagcttgaa

SEQ ID NO: 218832 - DNA, 4124 bp, Cannabis indica
ttacacacgtgttctggtttacaaaaatcaacataaaagaatataacagaataataagattttcaaaaaatatatatataaataaatttttaaaattattttaacttgatttattttagtattggatttctaagcataaatatactgtccccaaaaggaaataaattgaccaaaattgtacaaacgttatatataattttataaacactcatggtagctgtattttatattgaaccaaatttaattgataaaattataagtagttggctgaccaagagaatatataatataaaaaatcaaatgaatgtgctctcattgataataagattgttggggtgggaatggctgaggtgaagcatcatgcctaaaaactaaacaaaaatcaatgagtttacttttttaaagaaatgtgtcatgcgtagaacaaaggaatgatatattgttattagtatattttaatagaaaaatattaacaatagatagaatattacaattggtgtttttcaatattgtatcttgtgcattttgatttattaaataatacacaactactaaccgctcacaacatgctatattgatataatatcttacatcttaaagtatctaataacaatactcgaaaattaggtctcatacattttgtttattttgatttaataaaaataaaaaaaattattaactaattataaaatataagtgtatgcattgttcctttttagctattaaaggaaatttcaaattgacattatgtccatatatgtctttctcttattttaacaactcctataaattaataagcttcaattccttatctcctccactagaaaatttattcactttggatttctcaaaagtttctagctaaaggatcgcattctgtgtgagcccttttgtcatataatatctatatctatacataaatatatacttagtttggctttttctgaggcttttgattttatagtgcatcttgtcatcataaatttttttctcaacacaattttaaaatgaatgagatgttaagaagagctgctgaaatgggagatattgagatgttatacagatcaatccataacgatccttgtatacttgaaagaattgatcagcaacagtttgttgaaactcctcttcatgttgctgtttctcataaccaaatccttttcgccatggaaataatgatgttgaagccatcatttgccaagaagctaaacttagatggcttcacccctttgcatctagctctccaaaataggcctcaaaccaccgaaatggttaatcggcttgttcgggtcgatactgatctcgttcgagttcgaggtagagagggtaaaactccactgcattgtgtggctgaagaagggaaccttgaatttttgaagatgttcttatcactttgtccactgtctattcaagatgtaacggttaacaatgaaaccgctttgtttgttgctgtgagaaatggcagacctgaagcttttgaaattctggttcagggactttgtagtgcacgtcgaagaggctataaaatctcatctaaaattttgatgaaatgcaatgatgatgaaacaaacaacgtgcttcacattgctgccctcactaaccaaccacaggtatatgttttagcaatatatatactttaatactttgattttctaactgggcaaaaaaataataataatattaatagatatataatttgttgtagtttggtttgatgatatatattaattaattatccgtataattcttgagtattgttgggtctaaatccttctagtacaagcaatttatccatataattttctataatattgctagaaaattttagattaataaagttgttttagaaatatatctgatgttctataataattacattattcgcatgtttaggatattttaaagtattcaaaacaaataaggttttttttttactagaaatttcaaactacattaaaaactataaaaatgtgtaatatataatacatataacatttattaattttgtgatttttctgcaggtacttaaaatagtattctcctatttctacggaataaagataaatgccaagaacagaaacggattaacagcattagatattgcaaatggccaaattcatgtaaacaacagacaagtcaagaatttacttcataaccgatggaaagtatttccaagaattttgaatggctttagtgattactttagaactcgttacataacagaagaaagacgaaatttactgcttgtagttgctgtactaattgtaacggtcacttatcaggctgccctaagtcctccagggggtgtttggcaaggtgacatgaatttcaacatgtccaaaatcactgataataattctgctcagattccaggcaaaacagttatgagcaatatgaagttcgtgacgttttactgggttaataccttgatcttgttcttaactataatttgtatttgtcttatactccctggttatgacttatttcttaacacatatatttatgtgttacttttttctgttgttatgtgttatgtacatgcattacagtttatagctccaccggatattgaaactgtagtgttcttaggtcatgtctatcttattttccttttgggttttctgtttaaaattaaacagttgagaggaatctattagagactttggctatatatatatatatagctagtatactacattaattagtatgttttaacttctttgtaacaaattgattaacagttactcccattaatgtcttattagtattgtatatattaatgatctcatcatttgtacgtacaaaacaatattatcaatacaaaacaaagtgtttttttaagtgatttggcttacgatcatgctcaagtgcagcagaaataaacttattgatcagtaactaaatatatcgttaattcataaatatatcgcaaaatatctctaacacacaagtaatgtgaagtttcattccaaacacaaaatcaacaaacaatgtgtagcatacgtgtagatctatttaatacaactaaatctaacaacaattaaattacatatttaatttttttttttttttgcaagaaatgtgttgctacagtgggtgtttagggtagtctaatgcacttgttgtggagtacggtggtccagctaactccgacgatggatgcttcgactgggctgacttgaatgtgtgtgtgggtgtaactttcctagagaaatatagacgagaaagagtgagagggggaaatttaaatgaataaatatgttagattttattatttgagggataaaattagaactaaatcaatacactagtatagttatcttatattttaaggggactgcatattatgaatcaatgacgggctgttcatccgatccaatccgcactttttttgatcaaacaacatccaattcgcactaagtgtggattttcattttttggatccaatccaatccgcacaatagctcaaatccaatccaatccaatccgcaaaagtgcagattggatcagttactttgggttggttactttttaatattaaattatttattatttatgagatttttttttcacataactagcacaataaaacaaattatagttccacgtcaaaaaaaaaaaacaaataacaaattatagttattttatgtctccaacaacacattacataaataaaataacaaataacaaattcaaaaaaagaaaaaattgtatatataaaaatatatttaattttattttaaattgtatgtttaaaaaatatatataagaatagaatatacattttatctataaagttttgcaatataattgtattatatgtattagacttttaaattactattttctttacattaaaatgttatttgtatatataattttttaattttgttataaatatatgtggattggattggatcggttacttttacatgtcaatcaacatccaatctgcacaactgtggattttgaattttctaatccaatctaatccgcagaagtgcggatatccgcactttgcggatgagattggattggatcgtgcagattggattggattgactattttatgaacacccctaatcaatgcttcacatttaagcatataactcaaattttggcaa

SEQ ID NO: 218833 - DNA, 2315 bp, Cannabis indica
gacaaaagtccttaaatttaacaatctcaatagttcggggagaatttttaacggccaaaaaagttcaggggatacgatttactacatgtgaaagttcaggcaaaaaaattactaatcagcctaaattctatatatcttgctcggtgtactgtgatgtgccaaatatattattggtcaaatttgatactttttcttacaatattgctacttggtacggatgttctacttggtacggatgtgatgatgtcctataattgattagagttagagactattattgactttttctcattgtcaatatatctcaaacacactctccaaacttcaatagtcgttggctgtacattttgtatgataaaatatacaggaataacaagatgatgaaacttcttttttattatacattatgagttggtacatattgcaacacatcccattttatcatgaacttcaataataggataataagagagcagaaacacacacatatagcatgaaagataattagatggtggatttagctagatcaccataaggtctctggccaatatagttgccaggaggatcatagttgcaaataacaatgattccttcaacactacaatgaaccttagcacaacctaggcgagtagagtcacgccacaccacttgagtatagtgaaggcaagcccaagggttgtcactaaggcaggtgttggagttgtaatcgtacatgctcttttcatccacccacatcctcacagcatcggccccggataattggaagccacctcttcccccggccaagttctcgccataacttccaccagagtgggtaagactgcagtctccccaagccagttggttggcatagttctgcgcataggctgctacggtgttgtcccacctcataggcccgacacccacttgggcgcgggccctgttgtgaagggcaaggtagtcttgaggagagtcttggccattacatgactctagcatgactactatgcctaagatgcaaattatgagtgacaatgaaactctatagaaagccattttttttctttgacaataggcaaatttgagatgtagtatagatataataaatgtgaggtaatttatacatagtcactactcacaaggtttttgcaatgctttattttatgttatgatccatattcttattagtttaatcaaaataataaaaaagccgccacagggtagtggatttaaactagtatatattttacctatttgccatgccttcttgcaatgctaaaaattagggagtttgtttgatgaagactttcattgagattctatttctgtgtggggtcgacggctatgaattaagataatgatgaaaattaaaaaagagtattacttttctgacggctatgaattgagataattgttcaaacaaaaacagtacacaaatggatatatagtattttgtgagggagattgaaactcaacatgtatatcctattgactcaatttgtttagggctgcttttttattataattgttattgtagaataggattttggagatcatgagtaattacggtcaggattattgagcccatgtcatattttaccaaaatacattaggactcgctagataagtagtataatacaataaaaagaaactctgtttaataaaatcttgtatttactaattattacaatcacaagttttgattcaatgaattatattatttcatatataaaaaatgatctgtgttagcttttatatattaaaaaatgtctaaggttaaggttagcggtccagagtggtgtcgggatcggggttagtgctggagtccaagaccaggggtcggggctggggtctcgattcaggttcggagtcggggtccgaggtttgaggtcggggtcaaggtcaatgaccaagttctggggtcggagtctggtacaaggtcagggttagggctagggtcgaagttcgagtctaggttggggttctgggtccggggcttaggagtcgaggctagggtcagggttcggacctaggtttgaggtcggaggttgaaggctagaatcagggattgggatcgcagtgtgaggccgaggtaggggttcacatttagggccagggtcaagggtcgagtagggttggtgtctagagtcggtgtctggggtcagggaaaggtgagtttggagtcgagtatatggtaaagatagtacaattttttacaaccaattagtacaagtttacaccaaacatagtaaataacattatacaatacaatctaacccaacatatataacacaatagtataccaaatgaaccaaaaaaatgtatatatatttatg

SEQ ID NO: 218834 - DNA, 3697 bp, Cannabis indica
tctctctcaacttcatacagctttgacccgcttgcagtttcaagcttgcatctttaatctcaccaagtgagattctttcttctttcatctgggctattatttatttggttcctaaagtgattcaattgttgtttttatttataattaattctgggtattttattaaatggtcccttagagaatgaaaagaatatgtcaaaacaataatattttgagactggattacgaggtcaaaccttgtccaccccagaagagaaattcgtatattcatcacttttatctttagattttatgatgttttaaaggttcacagaattttatattacaaaatttgttgcagttacttctggttaaagcgaaattaatcgaatgtaatattaagttaatttggggctcttgctttgtaatatttgtgtttggcaggtggttgcatagaatagatggcagcagtattggcttcccacagctactgttgccataatgcagagttggtaaatcaagagaatcttagtttcacggcttcgatttctgttcaaaagttaccaaactatggtgggagagggagatgtaatttacctcgtactgttcgaaatttaaggtttcaagtgcacatgcaacagactgaattgccacctaaatcgagtgtcaatggaagaccaactgtgaagatggtaccagcaagtgaggtaatgaaaagacaaacacaagtggagaaagtgaatggtgtgaaaaaggtgaatggtgcagttattaatggagctggtttggttaaaagcaataggatatcatcatcaactcttgttaataacaaaccaaaatcaaaaccctctaaagaacttccaccattggaggtgtcaagggttttgccaacagatgaagggttcagctgggccaatgagaactacaactcctggcaaaggaatatagatgtttggtcctttgtagtctcgtttcgtgttcgtcttctgatggacaatgcgaaatgggcatatgtaggaggcttcacagaagagaagcaggtgagtattgggcctagtttgctaacatgttcatttgctgaatgtttagctagttgcaactttgtatttcttgctctgcgttgggtgattttgggaattttttcattcagaaaaagagaaggcaaaagactgcatcatggcttcgagaacaagtgctgcagcttggacctacattcatcaaacttggacagttatcttcgacaagatcggatctattcccacgtgaattcgtggatgagcttgccaagttgcaggtaaatttagtttccattgctgtatttgaggtgacacataaagatgggagtcagtttggtacatttctacttactaatcaagtatctcttattgattttttgcaactctctttggatataattcaggatagagttccagcattctcgcccgagaaagctagacgttttattgagagtgaactgggagctcccattcatattctgttcaaggaatttgaggaccaacctattgctgctgccagtttgggtcaggtactttagaaatggttaatccacttcgtgttatgattgaattgcttgaatattcacatggataacaaattttagtttgaaaatgatgtttaaagaaacatagatggtcagtatgttctttgaatttcttaatcacaagacatgaatgtttaaatggtgaataatgaagctatgaattacctacagttctccattttctggattcacttctccagacattgattctttttttatttgacataggtccatcgcgctatcctgcataatggagagaaagtagttataaaagttcagaggcctggtctcaagaagctttttgatattgatctaagtaagcaatgtactttttattttttctggaataagggtattcagcttgccgtagttataaataagtaaccattatagttgctcgttttgctcatcaatctgactgctgctctttcagcatcttttcattctagtgtagtgtaatgtttgttgcatattttgttttatatatgatcaatctgaaacaaagaggtcctaggtttgaggctcagacttctactttatgccttcttcccctcattagttaaaacatacattctttgttggaaagagcataaacagaaatgtatataactgatgagaagtggaaataaaaaagtctcacattgtgtttagtctaattcccgtttcgttaggtagacttatttatgtgtagtaaccttcacaagagggaatagtatattgttacgaaaccagtcacagaagatacatttgtttgatcacaaaaataaaaacaacttgcaagatatatgccattttgatatgcatatgacaaaaacatatgagctaattttttgacatttagcaattttatctgcatcttatgtatttctgctccttccatccagaaaatttgaagataattgctgagtactttcagaaaagtgaaacttttggtggtccaagtagagattggattggtgtatatgaagaatgttccacgtatgtcattctggtttctaattttttttattattttttattttctagctttaatgcagaatgcaatggtaaaccaaagttagtgcatacatgcacatacgtattcttattcttttacatactgcagaattttgtaccaagaaatcgattatataaatgaaggcaaaaatgctgatagatttcgcagagattttcggaatgtaaagtgggtccgagtacctgtatgtttctttctaaaccactattagaggactgatctagcaatcattattcttctttttttttttcatttttcatatacttttactgtacgttggttttattatcttggataaagaaaagatgctgctaaactttcaaacttcaattttaaataacaaaatgtctcctacttgtagttggtcttttgggattacactgccatgaaggtgctgaccctggagtatgtaccaggtttcaccctatactgaagtatttcttttgtttcaacactatttcggtatcatgtacaagctttagcttttgttggtaactaacttatcaatgttgtgttggtaggcattaagataaatgagctgaacatgctagattcgcggggttatagtcgttccagaatttcttcacgtgcaattgaagcatatttgattcaggtaatcacttctctttctttgattcatacagattgttattattcagatttatttttatggctaatatataccaggtaatgtgtcagtatgttttgttacactttttactacactagattatcagctggcaagcaaaacttaattgagcaaatacgccattgattcacttgtcattcagatcctaaaaactggtttctttcatgctgatcctcatcctggaaatctcgctattgacatggatgaagcaataatatactatgattttggtatgatgggagagatcaaaaacattcacaagggagagattacttgaccttttttattctgtttatgaaaaaagatgcaaagaaggtattcatctgttcattggttatcactattgactaaaatgttaaactatccagtttttctttgcattgaacttaacctgactaatgtcacctaccaggttatggcaagtctaatagatcttggagcactccaggcaaccggagatctgtcaccagtatgtattttgcctgttcccatc

SEQ ID NO: 218835 - DNA, 1441 bp, Cannabis indica
aaaaaaaacttatagaagttaagccaaacataatgatagtgctagtgatattgaaatggggcgcgaacaattgccttttccgaaagtgtttagttttggaaacaggaaaacattgatatggtagttttggtgtagttttgttactgtgactagctagatagagagttttgtaaattatagattttagggttttttgaaaaattacataaggggttgtattgtattaaatacgaaaaaatattgtgtttgaataaaattttatattatattaattattacgatcataatttttgatacaatatgaattgtatcattcaacaaatgaaaaatagtttgtattaacttgtaatgtaatatttatgaacttaggttgtattgtggtaaggttggaggcgggttcgaggtctaggcaggtgttcagggagggtcagggtccaagttgtggcaagtcttggcgtcggatcgggccaggttcgtggtttgagtctgggttggggttaaggtttgaggctaaggcctaagtccaaccaagtttaggtcattactctaaggtccagggtctacagtgtagattcaggtcgggacaggggcggggcagggttcagggttcgggtcccaactcctggttaaggtgcagggtctaaatttgggcagagtcagggtgcgagtatagttatgagtttggggtctaaagtctagggtcacgtcaaggtcaggttcgaggtcaggatctagggtctgggccaggtctaagtcaaggccaagggttgggatcatggtcagagttgggttccaaggtcggggcctgaggtttgaggccgggactggggtctgagtttgggctagctcaaggtgttgggattttatgccctaaataaaacttaattttattgtaatcttatttgctttcaataaagattagaaatcatatcttgaccttgtcatatgctttgttcacaattactgtgatgtcatcacaatagaaagtaattgtgattatatgcttcaaataatttagtcccacaatttatcagtgtattgaatttacactgacgtgataatcaacgataaggtttaattacacttagatgagtggaatgtcttttccaaggtattagtaaagtaaactaggattggatgtattggctatacatcatactagaccgatattgacagtggaaaaggtatcataaacttactgctatatcttttctaagtcaatatcacgtagttgattatagatcatttgatctcaatcttgagatggttaagctctagcttaaatatattgcatgagttctttgacttgttcgttaccagcttaccgtagaaccaactcaatacttgcatcttgggaactcgatagtgcaattgagtgggagtgttaatcgtatattgacatctataatttctatgtttattagaagtgaaacgatggttc

SEQ ID NO: 218836 - DNA, 10341 bp, Cannabis indica
ttttttagatagaatcattatttatgtgatcattatttatttttaaatttttttagcttaattttatttaatttgataaacttatagatagtcttttaaaagagaatctaatgactcttcctttttgctctaatctaacttagcttttcttttaagaagttgaaattgattatttaatttttacctttttttttttttgagaaaaatacgaatttattaaacgtccactagaggcgtaactgccagcaacttggcagcagcacaatcgggcaaaacatctgtcaacaaattacaggattgagtcattcgactctaaattgctaaggcattagccacatcattacactctctatatacaaaggaaaactgtacaatattaaagtgttgctgaagcaattgaatatccagagccaccataccccagtcaaaattagggagagaagaagattgcagcgctgtgatgactcccaaacaatcagctacaacaaagaccttctttagagaccatctttgagctagcaagatccccattcgaatagctgtagcctcagccaattggacagaaagaatgcctggcaagaataaggattcaacaacaatcaagtcaccttcatgtcctcttattactgcacctaaaccacaccccaatttatcctgaattatagaagcatcggtattaattgtcacatagtctgtaggaggaggttgccaaacttttttgattcgaacaacctgctctgaccgaggccttagcacctccccaaaatgctcaaccaacagctcttgcgcccatttcacccaagcacggtcctcttgaactttgtgttggaagaggaatttatttttacgttgccaaagaagccaagaaaagcctatgaaatttatcatttctgtcttagataacttaccccataggaaaaataaaatatcaggagcagaaggaaacccttcaaaaaccagatttttgaccccaaacagtttccataacctttgaaccttagtacacgaccatagggcatgacaaatgtcatcatcttccttcttgcaccattcacaagtagtatcaacagacatacctcgctttgtgagttccactttcgttgggagccattgattgaacacgcgccaaatgaaaattttcattttaggagtaagcttagacccccaaacaaacttccaccacacgttcaaggttgatttattcgaacattcagcaagatccggatggagaaatcttagtttgtatccactagcaaccgtatattgtccatgagggttgaagctccaagtaagccagtcgggtctcgaagtgattggtataataccaagcacccaaggtatgtcatctttatgaaacctgctgcaaacctcatttaatttccaagtgcccgcctcattaagtagtttatttagggtggctccttcagggagcaagactttagaacgaagggtaaaagggatgcctctaggaagccaagcatcttcgttaattctaatagtagagccatctccaacacaccaccgagaccctttaaataagatctccctaccccaaagaatacttctccaaactatagaaccaaagtggcctatgcttgcttccaaaaagttaccgtggggaaagtagagggcttttaagactctaaccattaagcaatcaggcatagtcaacaacttccacccttgttttgccaacatagcttggttaaagtcttctagatcacgaaacccgatacctccttgttccttaagtctacaaagcttcttccaactaccccaatggagtttgtgttttttagtagtagagccccaccaaaatctagcaatcatactttcaatatccttgagaatgccttttgtaatccgaaaacaactcattatatagcaaggaatagcttgtatcactgctttaattcaatacttcgtttccggcttgagaaaataggcccatcttccatccttgaagtttagcttccaccttatccctaattctgccaaacacttgcttttatttcttcccacaaaggaaggcatacccagatatttagtgtgattttcaactaaggaaactcccaactgaacggctagcaatcatgccgagaatgaatcaattttgctcccaacacacatttttcagttttttcataattgatacattgaccagagagtagctcatacctttctaaaacctctttgatcgccttgcattcctccaagttagcattgagaaagacaaggctatcatctgcaaaaaataggtgggaaagcctttgatccaagctaccaaaccgcaaaccatgaattttgccagccctttccgcttcatgtataaggcatgtaagcccttcagaacaaaggagaaaaaggaaaggcgaaaggggatccccttgccttaatcccctttctgggcgaaagtgacctatgatagagccatttaaaaggattgagaaggagaccgatctcacacaattcattatcttcttagtccattcaccctcatatcccaagcaatccatcatagcctctaagaaatcccattcaacgagatcatacgccttggacatatcaagttttaaggccatcttgctcccattcccgaaacgcccttttctcatacaatgaagactttcaaatccaatgatggcattatcttgaataattcgaccactaataaaagcgctctgattctctgaaatggctgaattcatgcttaatttcattctgttggcgaggcactttgacagaaccttatagaccacattacaaaggctaataggacgaaactcggacatcctagtgggttgcttaacctttggaataaggcatataagagtctcatttattgtactgcagtccgaattattgttgagaatgtcaagacaggcagcagtgaaatccgagccaattaagtcccaatttttttggaaaaaaagacccggtaacccatccttccccggggcctttaaaggatggatttgaaataaggtagacttaatttcttcacaagaaaaaggctcaagtaatgcacgattctcttcagtactaatccggcaaggaataatcctctaagagcttctttagtctcagtaccaccattagatttcgagaataaatgttgaaaatagcttatggcaatatcagtcaagtctttttcagatgttcgccaatgtcctcgatcatcatacaaccccaaaatggtgttcgttttcctcctagctgaagctttaaagtggaagaattttgtattttgatctccatgtttcaaccatagtgctcggcttctttgtctccaatacatctcccttttttcttccacacaattgagatccttttccaacttttgacgagctatccaatccatcatattaggcgacttggagagccaatcaatcttctcttttaactccttggatctagcaaagttagctttcttttgtttaatgttccactcatagagtctccttccacacttagaaagtaaatgattaagattatcaagaggcctacccattactttatccccccagacttcatttataatcttaaagcattcatcattatccgcccaagcatgctcgtaatggaatctcgatccccaatttcttcgaaacagactcctcttaccactttgttgagcttccaacaacatcggcctaggatctgaattccaccattttagaagagtgaccttgttaaatttaaacatgtccaaccaaaccgagttacataacaccctgtcaagcttttcatagatcaaattagaagcacgcccattacaccaagtaaaggaattcccagccgaagaaatttcccgtaattgacaatccgagatagcttttctaaaatttttcataaggtaatctggtttttgtcatcccttttttttccttctgactaataatttcgttaaagtcgctgccacatatccaagcattggtgaacatattcttagtctattcagtaacttccaactttccacccttcctcctggatccgggcttccatagaagccagtaaatcgccaaacgaaccctaagtcattctccaccaacgcatcgatatgagagaccgtaaaagacttgatctgcaccttgaaatcatcagaccaaagaagcgccaagcctccgctctttcccctagcatccaccgtaaaacatccagcaaagctcaattgcacccgaaccaactccattccacaactagtcaactaagtttccgacagaaaaatcatctcgggatgataatctttgacatgggatttcagggaattcaatgtccaacggttcccaagacttggacattccaaaacatggcaatcatggctctcagcaacctagatcatctaggttcgccgcttccattgtagagtcaaggttcaaatccaaattagtagaaattctccttgatgaattaccccgaacttctttagccaactccattaatttgatctcggcctgaccctccttccctttgttcttgagtctttttggagtcaccctccttctttttaaaggaccttccaccttattgtgagtacccaatctatcttcataagttatgggaacatccatcaaattaatattattcataaaagaatctgaactttccttccccaagattagagaattcaagcaactatctgtatccattgctgcagagccttgaggatttgtaatgtcttctcttacaattaaaattatcagcctcacttttacccttcatcttctccctaatcccatccacttccttaccgttgagagaagttctttccgagtcattaagagccaaccccgaacttaactccaacaacgtccaaggattcgaagaggaagctgaaggaactccaagtccctggccaggatccacgacagcagggggtaaatcttctgctaaagaaatgggattattggccttctgcacagagggagaaagagaaacattccgcaagattgtctttgcttctcgtttttcttcaacttttaaccagggaccatagctcggcttccagtttccaagaccatcatcatacatcttgggcgattctgcacaaacccgagtatcatgccccaaaaaatcacaattaaaatacataaaaggaagactatcatacctgaaagggatccaaatctttctgccttccgaaggaaagagaagccctgaaaaaatcggcttggttatatcgcaccatactttgaaggtgaagaaatccttggtcacgattcgagggatatcaacattcgtaacctctataacttcaccaaccatattcgccaatctatattgccttgagtaatcaagcgagaaggcaagtgaagaacgcgcccactaatcggaaaacacagcaattccttttcccaatcacacggcagattctccattctatcaagaatcagagttccataattaagtaaccaaggactcttgttcaaaattctgttcaaatcttgagcagatttgaaagagaagaccaagaaactggatttgttattgctgaatttaatttccactctccaattcttatcagcaataccccagacgcgtcccaaaatcgtcttcagcagaggacgactcatcggtctgttagaacaaaatctggccttcgcacagtgttccccgacaacagaaccctcgactacgttgatttcccatccatcttcatccaagacggtaagatttgaagttttggcaagaagatcatccatggtgttttcaggcttttgcagcatatcgaacggaagactcttctccaagagagagcataaaaatctttggtaaggtgtattgttcaaattaatttttaccttttaatgtctattgaaaatacataaaaaataactccacacaataatttaaattagttttttttgaattaatgactttcttaaaaaaatacatttagactatgacaataaattaaattatatgattatttattgtatcatttttaatttaattagaaagtatctagaataaaactaagtatatataagtaacttgcacgtaatttttttctaatatcatgtaaatgtgtgaacatgtcattactcttagagagtttttatttgttttatttctatttcgaaaattgatttgtatatttattttttaaacgttaatttaattatttaattagttaagtaacaaataagtcattcttgcaagtcaataagatcacatacgacaacctaataataatgttgtccaatctacgcaaatgatcgatatataaaaacacaatagtattattatttatatattgaaggtaaacaatacgatttaattacacaatacattccaaattttaattaagctatactcattattattattattattattattattattattattattattatttcacacattaaacacttccaacaatggcattactatatttattctgaacatcccaaaacttgttccaaagcatcacacctccatactttttcgacttcttaatctttggaagaacccttgatttcagctcactcgccggaatgtaccctccaactttcccggctgcctttctcgccgccggcaaccccataaagatcttcttggccttagttaagtttttattccattcttcccaagacttaagaagcttcttaacagagtcagttttagaatcatactggcaaggaccattgttgtaaaactgaacccaaacatagtcaaaactcacagccttaagagcctcaccaacaaacctatcaggatatatgcactgaggagcagcacttaacaaaacaggccttttacttgtactacgacctttcaaaaacctagctagatcgtcgtagtaattagggtttccgagctcgatgtcaaaatctattccatccaaaaccgcgtcgcccaagggacgagagcttgacttgccacccaagaagttgtgccataagtagtcagctacttttctggcgtcggctttggaagttagagtgtactttccaatgccgccaccaatggaaaggaacactttgattcctttcttttgacaagcttttatacctttgctagcgaccctgcaaccacctcccacggggttgcagtggctagcaaggttaagctgcgggttttggccgttgccaaacttgttgagaaaggatatcatgacatatttgtaccttcctgacttgcaagtaagcctataagggtttcttcattacttgcttggccccagtagatggctatgccacctgcattggaggtttggactaagaaagctaaggttgaaatgataccaaggacaagaaatatgatcaattgttgagaattatctctagccattgtttttttcttttctaataaacttttttttttgtgtgtgtgatgttattaagcttaagctgatctctatttatagggttaaaaaccctcaataatctttagaaccatatacaataatgaatttgaagtcaacgttttgggttttttgattaaaagaattcgttcattataatctaaagtaaaagaagatcgattgaggtggcaggcaacctgatcaaacttcaagacaacgcatatatctattcatatataattatatgatatatggctccaataatatgctaaaaatgtggtcgaaatatatgggttttggaatttggataataattgtttcatcgaagaagacttgaaagtaaacaagagttataaaatgctactggtgcggctacatctatggaagaaaggatagatagatatataataaggagaaatttgtgtgattggtcatgtatatatgttgcttaggttataaataagtcgtgactcacggtagttggccttcttcacaagtcacaccagtcatggtagtctaatactaatataatactcatctttattgtcccatattaattatgtttataattaagagattaagtatattcaatgttagaataaaactatatagtttttgtctagtttcacacagattaagtttttgaatatattaaacatagtttttgtctagtttcacacagatttaatatagttttgtgtaattttgaaaaaaaaaagaatagattatatgtgattttatttcttttctatgtgttaataatttgtttgattttttgtggatatatataatttttgtgtatgtagaaagtgtgaatttaagatgtattttgaaatttttggagtgtttggttttaaaatttttggatagattaaaatgtagttgctatgatactgaaatttcggtagaattttgagacaattaagaaatatcatgttaatttgataatttataataagtttgtcaatccaaaaattttccttagtgatgtggacattaatgtttgacacgtggcatggaggatgacgtcacaaagttgagtagactcgagtcatagcagtcaacttgtgagaggaccctagccctacgcccaggttgactctaggatctctagaatggaagttcggactttaataattaatccaaccactatcttcagtattttgtaccatgaatacatggagcgacctaatgcaagccccagagctgaaattacatgaacctgcaacccgaaagacaacctgggcacctagggtttcactcggcgcccaagttgacatcctcaactagggtttcagtttttgggaccgtattagtgtaaattggtcaaaacttcaacggggacatcaactagacatacctcaaacatatttgaggcatcagaatcaaaattggagcatgttgattttttggcacccaaggccccgagcccccgagcatctagcgcctaggttaacaatccattaatctgagcacctttcgagtgttcaatcaaagatccaactttcgcactgaatttgtcttcattcaaaattgggaaataggtcattctggagatcaattcttgggtaaaatagctcgacccatcacctaggttaacattttgtcacctgggctacttaaaataagtttttcaggaattctttctagcatcttctccgtcttcagaaaatattgagattcaaatatttccgtggaccaaatggaattttcgaaggggaaaaactaggtcccagcgcctaggttgacacccatggaatgtcaacctgggctattttcgatctagttcagcataatgtgttctgggcattttttacatcattaaaaataataaagaatcaagtaaactcagggaaaataaaaaacccgagtccctagaaacaagacccagtgcccaagttgacctagggctgggcccagcacccaggttgacaatcaacctgggacgttgcattcaattactaaaatgctaatgcgaccattgaattcgacatggttaaaaatgggggaagagacctcctcctcaagtgcagaagcctggaagtatcaaaaatgaaatcccagaagctcgggagaaaaagggcccaacgcctaggttaacaaatggcattgtgcgctgggttctatttatacaaatattatgccgtttgaccgtctgtctagtttttcacaattacaatgatatatgaagtcagaagaattaaattcacaactttttatttctcatttccaggacactcaaaaaatgaagagttttgagtctctcattttcgcaaaataacaacatctctgagaactactgatgaacttcaccagaacatacaaatggactaagtggtgtcaaactatcacttaggcatcgtaaaggacatctcttggatatttttttacttatccaatgtccaggttgacgtcatatgtcaacctgggcgctggatgtcaacttgggcactgggacttgaattgccttcaacaaaacggtcataactcactaaatttttatccgattgatgcgattcaacttgcatttcaaaactatttaagtttagtaaaataatacaaaaaaaggactttgaggttcaggatcccccaatccactgtgcttggataaaatctcgaactaagaaaacaaaatttgtcaatgattatgacaaggaaattaccgataagataggtagtattaatcgctgataaagtaataatgagttaatatatataatcatatactaattacttgaatatgtaaactatgctcaactagaggagaaatttagtcagggacaaattaaggtcaatggccaaaatgatattctgatgcaggcgctcaggacaccagagcatcctggacgtgtcaaggcaactgggtatgctagtacttgaaaaatttcatttcattagttagacaaaataaagattcgttaactttttattaatttgcaggttccttgccaaccatctaaactttttggcaggaagaaaagagaagtttttgatgttatggctcgaaaatagagggagattgagaaatt

SEQ ID NO: 218837 - DNA, 2704 bp, Cannabis indica
atatatatatccatttcacactgctgtaatttgacaggtttcggttggttactttctcaccgacattgcgatgatcttctggttttatcctgatctaggtggtttagagtatgtaagtgtactcccttttggacataattaactgagccaagtgccaacacaaccaatttggagttcagttaatatccattgattgtttttcgtttctctaacatatcaggtggttcatcatcttctgtctattgtatcattggcctatgccatgttgactggagaggctcagctttatacatatatggttcttatatccgaaacaaccactcctgggatcaacttgagatggtaaaatctctatagtaatagtactaattatggtaatagtaatggttctttcttacttgtaatttttctcattgtgtacatgaataatgctacttttgaaggtatcttgacatagctggtatgaagaggtctagagcatatatcataaatggggttgggatattcttttcttggctggtatgtcaaaatctgtattatgaagtatttgtattcattcatgaaaggaaacttctattcttcactcacacctgtgctaattgatataatgcaggttgctagaataatcttattcatgtacctcttttatcacatctactttcactatgaccaggtaaatgatgacaatatcaactgatgagagtactgaaaatcattgaaaccattttaaacatttgatttgattaatgttttctcacacaacaggttagacagattcagacattgggagtggttttagtaacagtggtgcctttggtgttaggtgtgatgaatttgatgtggtttgctaagatttttaatggattgaagaagacattagcaaaaaggcagtgagtcatatggatatatacatacatagatcatatatatatacatacatatacgagtagtgagtgtataaaatttatgtataaaatgtagccactgaagggtatcttttagcagtgtcataactatgtgtctatatattatattcactttttttttttctttataaataacttgttgataatattgtcagagccaatttgtctttgactatatactacatgggagtgtgatatagttgatgataataggtattatgatatgtcacaagaaaaagtactgttttgattggtgagttggagaccaaatacctcctaatttgtaaaagaaaaaaaaaccagatggggcatgtttcttttcttttccatttttatgggcagcttgtgacatagtatttattaagaaaataaaacattaggattttttcgattataaattgttgagggttctctacctgaacatattattttgaaacgaaggaatatttccattaaaaggcacaaagccagcaattcaaaagatcaatacaaaattcaaaattactaagggagagatctgggcactaaactttagcagtatttaaagaaagtgcaatacgagcaagagaataggccaatccatttaataatcacttacaataatagaagaaaatattagagagaataagaaatttttaatatccttaataatagcgttaaatttagtggaatgatttttttttactcaaaataacttgtaccaaataaaattaattagagaataccgacagacttgtatacccgagacgaggacaaaaaatcaccccttgcaacaaagctaccgcctttgccacacgaggttcataggctgccatcactgacactacccctaagtagaaaacttcacttgcttgactcatcaccacaaccccaagaccaattgttccagtcattggtattaaaaccatcatcaacaaataagtttacatctcccaacactaacatctcccaacactaaccatcaagtcgggtatcattagattggcgaatcggccttgaaccatttgacattactatccgataaaagaaccctaagcatcttgatagtgccaaaggaaactgaaagaccattagctcatcatatcattcgagagtaatttatgatcatgaacaaatgtaatatccgtatatgccaaattccccaacagagaacaataaattcttccatctcatgtgttgaaagaatatccaaacaactaactaagaactcataaaaattggaggccgacttaagagcatcaaaacctttcaatacccacctttgtctaatttctttgagagaaggatataaccatagtgcatgcaaagtagtttcattattttgaaagcatatcgaacatactttggcaacattcagaccatggagttgtaaattggcataataaggcaagaaaataaggcttgcttttcaaataaattttatactttgggcggcactaaaatagaccacatgaactttcaccaacgaggttgacctgaggaagccgacacttgacccccaccctaatctggcgacagagctccaatacactcttagctatgtacatactagtatcagtaaaatgccaaatcaatgtatcttccacttaaacaacaaacaagaattgataagataactctggcttcgacttcatcaaagacctctttaataaacagaacgtttcaaagcccattctctagtttcagatcactaacatattgaagctccgaaccaccccttaatgagcaagtccgacccacatagggatccaagcatcttccttaattcgaaccattta

SEQ ID NO: 218838 - DNA, 4828 bp, Cannabis indica
tttttcctttttcctttttcctcttctttttattttctttttctttttcttcttcttcttctttcgttttctttttttctttttaaaaaaaaaattgcaataacataatcaccattccaagccgacctgataaaactacacccaaatatcaaaatgtgaacaaatattatacacaacactaattaatacaaataaaatatattaaaaaatagatatgaacaaatacaccaatcaaattaaatagaaaaataaaatatataaagcaaatatatttagatttgagaatagatatgccagagtcgggagagacgacatgctcgtcagagccaaaacctattagaggagggagcttgtaacggtggatgtttgagcgtcgtcgtcgagagaaaaagaaggtcagtcgtccttgatggtggacatctgtgatgtcgtcaatggtgggtgtacatgtgagggagagagcttgtgcaaatcaatcaaaacccacaaataaaaactccaatccaaaaaccccaaatgaaaactctaatccaaaaatcaatcaattaaatgtaaaagtattgagccatatataagaacatgggctactccacttatcaccaattggttttgagatggaaccccatgtttctcaacatagtattagagctatatccctagcgagcttttgatccacccttatgcagatgattagccaactacataagatccagatggtgcaaagacacttgagatctgaacaaaaataaagcgagcaaaatgtcacgacatgtgataaggtgattgaagattgatgagcaaaaatagctattatcttgagaaagatattgagaacattatctcacatgaattaaatgattgaatcatatataaaaatatgagctacttcacttatctccaattaattttcaaattgaaccttataattctcaatgacagagcaaaatgattctataaattaaggagttcagtcctaattatattaaacttcagagaatttacctgtaaattaccttattcgtaattatattctagttaatttattaattgcataaaatataattacaagagtgtggttaattatataatttatacacaaaagaagtgcacaaataccatcactaatttttgacttcaactttggtcacttttgtttcaaggcacaatatagagaaatgctaaagagtaccagtggtgattagcaccctcctacgtatcaatattgctattggtccaattaagtatcgattttcatgtagtttaatataatagtttttagctagggagtatcgctaaccattcgcaacgcgacatgtcgagaaggtgctagacaccatggtgcctaatgacaatgctacacaatataatatactcgagttatggtccttatggaagagtgatcagttcgatagttttttgaaaatatataatcaatagttttctgtatttatagcagatcgaagagtgatcaattcgatagagagaatcttaccatttctcatatttatggaagggtcggtcttcaaattgtaaggccctagaattataagatattaggaatgacaatttgggttattatatatataatacaaaaaataattattctttgtattatatatcagatcgaggagtgatcgattcaataaattaagagagatgcttaccatttctttatagacaaaattgcatttagaaacgtcatttacatttcatttatagaaatgttgcgaatgatttaatttttttgctaagaaaaaaaatgataaaataaatttattaagaaccaagcttgcccggttctatagaatagaacgcgaatgatttaattttttttttttgataattaatatgcattaagacagaagaaactagtgaccacaagagggggccacttcccttaaagaaccttgtaactgcttcctttgaactcgggcccagttagcaagagaattcgcaataacatttaaagatctactaatagaaataaacataacatcagtaaactgtttccttttcagcaaacattcggaaaaaaaaggataggaatgccattggatcggcattgagtttgagtttagacttgtaacagcaatcttgcaatcagattgaattgccacacggtccagaccaagctactttacagttgacagagccagagagattgcagcaagctccccctataggacattttccactctcaagtgatcaacaacaagatagtcttctgagccgattaattctcctttgtagactgctgcaattccaacagaaccgactgcaaccaaagcatctacctggaacacatgataaccttttgtatctgtggagggggtcgttataatatcttcatttatagtcccctccaaatcagttggattagaagagaactcgaaagcacgtttagtgcaatctttgaatatctcctctagagtccactgtttgttgttgtttctaatgctattgcgccagtaccaaaggacttcatagatgcaaacaacgaaaattttgaggtccatatctcccaattcagtccaccataaaccaaagtccatcacatttctccattggaaggagtctaaacgcagtccccaagcacttttgaaccataaacctctagttaagctacacttagcaaccaggtgataagcatcttcgagttcaccacataagacgcacgatctatcagcgagattgaggaagctcagttttccaagggttggcaggcaatcagccaagattttccacataaacaaagatagtcttggatgcatcttctgtttccattgttttttccagataggtgtaggggccgagaatcttttctcttggtacaaccaatacgcacttttcacagagaagttccctgatttcgtcggtttctagaataaaatatcttctccttctaatagcatcttgatactaaggattgattcagcaatttctcgatcaaaacaggctctaattagggactcattccaggaccgagttccatcattgaataggtcactcaccttattgaaagcatgtattcggttacagtggaatccatctttcaattgttgtatcgatttccaagggatccatggctttgtccaaagatcaatctcaccattagcaactacaaaaccagcaccagctacacagagttcccagtttgcagtaagttctcccaaagtcttgagtctaaatcatgtttttccacagaccaagcatccaaattagagcagtattttgccctaagggctttaatccataacttgtctttcttttggaggatttcccaaatcaactttgccagtagagcagtattcatgtctttaaatcttttaaacccaagacctccacagcatttcggttggcataagctaccccagccttttagaccgcagtatctttgtttatccgatcgaggccctatccaccagaatttcgccaaaagtttgtctaactcttcgcaaagagtctgagggaccaaagaagtagccatgaaataggtaggaatactttggagcacggcactgacaagagttgttctaccagcctgccaaaggcattttgctttccaaccttcgattctgttcaacactttctgtctcaagaattggaagtcatttcttctattggcagtaaagaagaaaggatttcccaggtacttttccttcgcattcagcttcggcatgcctataatctccatcaatagattctttgtgtttggagagaataccacaccacttttttccttgttaatcttttgacccgaccattcttcatattgtttcagaatactcataatggagcttgcatttttctctgttgcttggcagaagtagatagcatcatctgcataaaacagatgggaaataggggtggcatttctagagattttaatcccacaaaggttattatccttctcagcctttgagagcattttagtcaagacctcgctgcagagtatgaacagaaagggtgatagagggtccccttgtctcagcccttgattaggattgaagggagcaaggggtgcaccattaagaagaatcgtgaaacttacagaactaacacaagacatattaagcgagatcaccttgttactgaatctgttggcttgtagaaccttatgaataaacttccactcaagtctatcataagctttactcaaatccgtcttgattgccattacacctcttttgcctttcttgttcttcatggcatgtaaaacctcttgagccaagactgagcattctgcaatccatcgacccgggatgaaagccgattggtgaggggatatcagcctatctaggatcttcttcagcctatcagtcagaatgcgagagattattttataaccaaaattacacagactgatcgggcggaatcgatcgaaagtgtttgcattatcgctctttggaatcaagcagatgaacgtatgatttagagcaggaggaagaatgccactagagaagaattcttgaaccattttgcagacttgaccaccaaccgtaggccagtattttcgaaagaaaattcccgagaaaccatcgggtccaggagatttgagcggatgcattctgaacaccacatttttgatctcttcttcgctcgggatgctgcaaattgcttcattctcctccaaagtaacctggtctgagaaaatttaattgatacatgctatttacactatagttatattaggtacatttatgtatagtcttgttcctctttttatatgtgtcagaataattttgtttttatatttcttttaacaatttagtctttttaatgagcttttaatatatatatatatgtatttatttataaattttttaaa

SEQ ID NO: 218839 - DNA, 8427 bp, Cannabis indica
aattgggtaaacaacttgctaaaactttctcggggacctaaactcaaaactaaaaatttttctatcgataaatagcatggcaatactctaaatattgaggaaataccaaaactaaggctcccaaaactactagaatcggtaaatccaatctccaaaatagttaaccatttctagagaactggttgaccagtttcctacaaaaaacccaaaaaacttcaaaacatgctcaaaacttccccaaatatgcttatgtacttatttgttcttaatttgttagttacttcttcagctgctaatattactgctaacatgaactcaattcctatacttaatggcacaaactttaagggttgcaaggagaatattttgctggttctcgactgcatggatttagactatgcattaaggaaagaacaacccgcttctcctacagagtaaagttcactaaggtaaaagcaaacttttagaagtgggaatattctaattacttaagtctaatgctattaaagcgcaacgttctagaagcatttagggacggtatgtctgatgaggtatctgtaaaaacttttctgaagagattgaaaaatattttgcaaagaatgaaaatgttgagataagcaggcttttagttgatcttgtccagatgaggtgtaaaggaaaaggaacattagggagtacattatggagatgtctaatatcgctttcaaacttaaaacactaaagcttgatctctctgatgacttacttatgcatttggtactcatatcccatcatgtacattatggccagtttatagtgagttataatactcaaaaggataaatggactattaatgagctcatttcacattgtgtgcaagaaaaggatagattgaagtgagaaaaaactgaaagtgctcatcttgcatctacctcaaaaggcaacaagcagaagcagactctagataaggaaactacaatgggaacttcacaacccaagaaataaaagactcgggatgaaggacttaccttcctcttttgcaagaaacttgggcatgtgaagaaaatatgtcctaagcacgtctcatggagtatgaagaaaggtagacttttcacctttttttgttctaaagttaatttgacttatatacttggtaatacttggacacaagtgtttctatccagggttgcatttggagccgactacgaaatgatgctgaaagattcatccttgtaggcgagggcaaagcagtttcagttgaagcaattctcacatttaggttatcttttaagactgatcatttttttttaaattaattgagacttatgtagtactgtcatttagatgaaatttgtttttttttaatttttgttttggataactatggttagtcttgttcatttgggaataataaatttagtctcttatttaatcctacttagctgcgactggttctttacttgataatctatatatgcttaatacaattgattcatctaattatgagaccttttaaataacatttagaggttcaaatgagaattctattatcttatggcacaaaagcttaggacaaatctccaaaaagagaataggaagatttgtgtcagatgaaatacttgaaccctttgattacattaagaagttaagtgccaacgggagctctggcgtcttacaattgatacatactgatatatgtggttcattccctgcaaattcttggaatgacaaacaacattttatcacttttataaaagaatattctcgttatgggtacttatacttgatacatgaaaagtcacaatcctcagacatttattaaggccttcaaagacaaagttgaagatcaactaggtgagaagattaaaattgtcaagtctaactgtggtggtgaatactattatagatatgacagatcaagtaaacaacgtccatgaacttttgccaaattcttaaagggatgcataatcgtcttgcaatacataatgtcaaggtaaccttgcatgaacggtgttgctgagagatgaaatagattgcttaaggacatggtaagaagcatgattaatcattcttctttacctaaatcactttgggaaaaatgcacttaagactataatctacattctaaatagagtacctagtaaattggtagctaataaacccctatatgaatgaactatggatagagaaaaaagtctagaagtaaacacttacatattttgggttgtccagctgaggtaaggccttttaaaggccacatgaaaataaaatggactcaagaacaattaactactatttggtggttattccagaaaggtcgagaggtttaaagttctaagatccctcaaccaagccttttttcgagatgggaaatgcaagaattcttgaggatgttatgtttgaggagggagataaagtagggaatgttatttttttttaaaagagaaatacattattctactaaatattgttcctgacaacgatcaacctattgacattgttaaggcatgtttgaagacaaaaatgaggattcacctatggaactccctacttaatatcaagaggctactccagaagaacaaactcaacaacctcaagaggaagtaacacttaggcaatacactagagagaaaagaagagcaatttcatattattttattgtgtttcttaaagagcacgagtttaacataaggacaatgaaagatgatccaatcaaattccaacaagtcaaaaaaagtattaattgtcaaaagttaattgatgccatgaatgatgagatgaaatcaatgaaagacaatgacatttaagatcttgtcaagttgccaagagttttatacaaaagtaaggcattgattgtaaagaaattttctccctagtgtcattgaaagattcttttagaataattacgtcacttttagctcatcttgacttagagctacactagatggattttaagataattttttctcattgacaacattgaggaaactatgtatatgatacaaccagaaattttgtgtcaagtgatctgaagtctatagttgcaaactcaagatccatctatggtctcaaataagcttcccgtcaatgctatcacaattgcatcattttattgtctcatacagattgaaagtcaatgttgtaaatgattgtatatatcacaagtttagtgagagtaaattaatctaactcctattacaaaaggagacaagtttagtctcaattattgccccaagagcaaaattcaaagagtaaagatgcaagaaggttccatatgcttcgactattagaagtcttatgtatgctcaagtgtgcacacatctagtgttggagtacatagtgactatgttggacagatacttaagtgaccccaatatggataatcagaaggcagccaaatgggtcatgaagtaattataaagaataaatgattatatgctcacttatcgaaggacataaaatttatagaacgttaggtattctgacactgatgttgtgggttaccaagaaactaagagatccacttttggctgtgactacttgttgtctggaggagctatatcatgcaaagtgctaagcagacactcatagctcatcctatcatgacaacggaattcatagcttgttgtgaggcaaagaataatgcaatatggctgtgaaattttgtcacttggctgcaggttgtgtaaggaattaaaagactgctaaaaatatattgtgacaatctatcaacagttttatattcagatgacaatagaagattatcaaagtctaaacacatagacattaagtttctagttgttaaatatatagttcagagtaagatagtgtctattgagtatataggaacaaacttattgctagcagacccactaactaaagttttaacacctaagatctttcatgagcatattgcttacagaggtgttgttttatttgatgatgttcagttttagtgggagtttgttttcaatattaggtactttgttgattgacactattacactactttaagtaggttcaattctctacagaataaagttgctagttgctggttttattatctttattgctttgaatgtgttatcgttcaattgtggtttgacgcaaagtttgaaagactacggattgatctcactaaggaataaaggaccaattaaaaataggcatgattaagatcatattgtatctaattttcagttacacatccatacttgatctatgtcattgaatatatttgatatggtgatcattggtgggtccagttacgataaatgtaacaaaggccactttggtctcatattggtataggagatagaccagattgtctaaatgagatattttgagaataattagcaagtttgtgtgcacataaagttattaaatgtatttatcattgatattaatttgtagcccaagtagaagattgttggattatttttttattaattcagtacgcgacttacaaattaagagaatttatttaagctaatatttcaaaaaaaaggctaaatcagtgatctaaataaatgagtctaataaacatcttatttgatatgagttttataatgtgtaatatccaatagtaaatctagagtttatagggctctaattagtttgcagcttggtcccctcttaatcactcttctccttcattcctattaattgagtgagaactcatagagagaaaattagtctgtgaaaaatcatacatctacaattttatctcgtatccaatattatgaaatcaaatatgtcttctatttcattaattcataaaataatcttgataatataatataagtttaagatccatatgtacttttaaatctaatttcttacatatttatttaattcgattgatgatgacaatgttagtttcataaagaaagagattacacatttaatgttcctagctgttgaattatttaataaagttcgtgagtttaataaattatttgcaaggactataagatacaattgattaaaaactaataaaacttcctttaaaaaatactagtgaaagtttgataatataagtagatagaaagataattaataagtacaattggcattgaaatctaataagagttatgagataacgtgacatcagattgaattgaatattttttaaagggatttaatttaaactcgaacaatatcttattggcctcataaattggattttaaacgtttcaaaataaataaataaatggattttaaataagtgtgcttaaacataataaccattcacagccaatacttggatagtgtcttttgtttgcttattcaaactataaatttataattttaataacaattaaagtacacctgtaaggagagaaatttttgctctcatctgttcaaatattcctagttaatatgttttattaaatttaagcaaatcaaaacaaaataaaagtagggcctttgttagataaatccaaaatttgggactattttaattaagacaatttatggcactttaggtaattcttctaaatgtctcaaactcattaaaaacaaaatcgaaatagcataaattatgaaccatataaactaaaataaaatgaaacaatttaaaaaaaaaataaaaaaacactagaagagcgcgtgaagtaaaaacgcgaagagagcgtgtaatagaagagaacaaaaaaggccaaaaatgccataaaatcagtggagcagcagaggagcatccaatgaggtgaaaaagggaacacgtggtccccacgcaccacttcaatcaaaccttctgacacgtgtccattgaaagagaccacgtttcgtatgcctaaattaatcacagcgtcggctgacttttttttgaaggttaaaaaaagagaaatgctaaaggacactagtggtgcttaatactcttctattgtctatagcgctattgatacaattaagtatcgggtcccatataatttaatataataacttttaggagtatcgctaaccaatcgcaacgtgacatgtcgcaaaaatgctaggtaccactggtgcctaatagcaatacttttaacaaataatacaccacttgtttttcttatttattttaatcttttttcaagcttccaaacagtaattaaggccattattattataataaccctaaaacagtacaaaacaaaacctagaaacatcatagctataggaataggatttgatcaattttctatttcttttctaacatttatttattttttcttctaataatatctgtgttttgtttttaattaatatgcactccaacattgttttaatgtttttggttttggatgtgttttcgtccctctataactaataagacaaaaactaatggttttggcattatttatttgttatttattaaacaaactcaaaatgtataatcatcataacgaagcaggatagtgtgaatgtgtgattaaacataaatatggttttctttcattaaaatatacactacaaagtatttaaaacaattattcatattgcacttaaataattaaaaaaaacataaagtttaaagctcgctaggcttaaaaaaatcgatttacaaaatataaaattaaattaaactcatcattatatatcataagatattatataatataatatatattctgtctggaatcatgttgtaactgttttacaaaataaacgaatgcaactaaatagacatgtttgtaataatttctataatttaagggtttttaggaaaaaattttgttacataaaaaaattcagagataaaactatataattatgatctataatatagatacatattttaaaagtaaatgaattcacataatattaactaatgattttaaaagaaaatattgagggataattaaatttagcttgattcattttgagatcaacttggttcttacaagttcatgacactgtgtattatgtgtgcatcaattatatatgtatattaagattattatttttggttagttctctaattagattaaaagttacacccttagcttaagctataaatatatatacatatatatatttatagtatatttttgtattttttttaaacattaccttatctagcttccacctaaaacttatacataagctgatagggataaatatatttatatatatatatataaatatatgtatatataaaaacctatttataatcaaagaaactggtaggtgcaaataagctcatgaatgttgttcatttcacacgcacacacaagacaaaagggattgtcaattgtttatatttttattgtttatttcttttttttggtggaattatggaaaccgtggcaagcaggttttaagatttaaaaatgttaatatatatatatattttaacatagctagctagtcaaacattaacatatgcaactataacttcacacgtacacaactctattttaacataccatttgtctttttaactatatgtttatttcatccactgcactacttctaacttctctattattattattatatggataaataagaggattctttctaaaataatttaattaacttaagcattcctacgtacaatttaatatactgattaatttatgctgctatatatacatatatctgtataatcaaatctggttatggcacctggtaattcattttggaaagtttccataactaaaaacttgtgtctttcctctaggcctagctagctagcctacatattatattttaggcatataattgccatttttctcaagttggagttgaagtatgaaaagtaataagcctaataatatatataataggggacccaatgcaaattgcatcatatatatatatagttatcaaaattaatcatgcttttttgcattattgtacaagtttctacaaattgattaattaacaacacaccctttttaattcattgactatttgtaggtaatgagttcttaagcaggcaagttatgagttaacaaatgagagataaaatcaactttgtctttgtcttgaaagggctatcttagctatcaagatggcttatttttctcttctttcatttttctttctaattaattcatttttcctctaatttcgactcttttttattaataaatggaacgtgaaaatgattgaagacagtataatgtaccttgttatacttctttaataaaagttataatataaaaattagataagtaagagataataaattaatattggaaaaattagacaaaagtagtaactaatactactcatgagtcattacatattttctcctaagtttttcaatcagaaatgtgctgcattccaattgaaattaatcacctctaagccatagtggcaattagaaactaagagagatgctgtaagaaaagtgggactatgtaacttaaaaattttagtgcatgtttgacatcataactaaaagacttgttttttgtttttaaaaacagaaaatttattttttgaaaacaattt

SEQ ID NO: 218840 - DNA, 3058 bp, Cannabis indica
gaaatagtaaaaaaaaatctgtatttgtgtaaatttacgaaaacaaaaaagaaagaaaagaaaagaaaatcactagcattttgcacctaatccagcaaacttatgatttgggttctattgtgtgaacgatgcaatcctactcgatttgggcccaataaagccatgggctacagacccaaagaaagtttaaatgaactttttaatttttcttttgattatttatgttaattgttaattagttgtttatttaatgtgttcaatgatttgttctaggatactgccactgcattagctggagcacgagacacatcacaaaatcctttcttagacttacagattaccaagaaaaagacaatcaagtcaaccttataatataaaaacgtaacaagttttaaaacaaaaaacaaaatgattatctttttataaaaaaaaaaaaaaatcaaaaatgattatcttatatgttatttattattgtacattttgcttcaatttaccaaccgacattttgtaacgtttctttccaattatttctcatgccttaaatacatacactaattcgaacctacataattgctgaatgctgatgataatactatattatatttactcttgttttactggcactctatagagttttatcattacatacaagataaataataataataaagaaaaaaactaccctgagctatagatgatatgtatgtactataatataaattctaaatcatcatgcaaatgttaatagtgctacaaaaaagatggtgatattttatctgtgagaatttctaaataatattattggtgtctagtatttttttcggtatcatattattataagtataattaagtatcaagtctcaaataattttaaaaaaaaaaatttaaaagaatatcattaactaattgtaaagaaccacttatacaaaattttggataccagtacccaataacaatgcccaatggtcaccaaaagcttataatgccgcaatattgaataaatatttttgcagagcctgaatacgtacagatccccttaccatttcattctataaagagtttttcttttattattaaaaagagatgagagagagagagagaaatcaataataaagatgaataaaacagtggtcctttcatttcatttcattatttggcttattcaatatttgatcacctgttttaatcagcaatgcatcacctctcattgattttattttaatgctcatattttgtcggtggaaatgcaattaatacttaaattattattattattatttgctgtcgtatgcttcacataagaatctctgtcaagctttgtgtataaaacataaataaataactttgctgtaactattatttcttatatacatagttacattctaattacattaatttacaccttataatacggctcgcaggtcataattagatcacgtgaaaatattgtacgtaaccaagcaatttagaacatacatttcaccctcgtatcattattattattatattacttctaaaatttcaaatatatttgtatatggttcgatgcttctattttaagacagcttaatttgtatatgttgagagttttttaagtatgtatatcatttttccctaacctaacctctagagacgttttttattttaatggttagatctaatggtttaatgtttttaacattcatattaatattagttatattgaagtaaccattactagataataataccattaaaaattttgttttatataaatatataaaacaatttacattatagttataagtaaattttcttaaaatttatgaataatttatcgtattaaaaataaagttcaaaataataatacgctgacactctttatttgaatcatattttcaatattgtcaattatttaaatttttttttttttaaaaaagcaacaagctataataactattatgtacgtcatataccatctattattttatagtcgtgtatgtgtcaattaatggtgcaattaatttttgttatactcaattttcacaaaaataaaataaaatggctactcttgcacaaggatccacatgctaagagtgtcttgaagccactaaagttaattttgcgactttgaccaagacttataaaatgagttaagacatccttcttgagggcctcatgacacctatagaggactcgagaacattaaccaaccatttggtgttgggactcacacacccaagtgtgcccaaactagggtttatgggcccgcgcgagcattttcaccctagagacctcaatccgccaaggacaccaacaaggacttaactcatttgggcataaatatgactttgatttatgcataaagtcaaaatggcatcaaatcctcaagaaacaaggtatatgcgcccactaccataaggaaatgggagtactcttcatttttgaagagcactgccacaaggaaatgacagtgctcttcaaaaaggaatgtcaatggtcgctccttacaaatcatgaaggaaaaattgtctaaatgagtttcctcaacaccaaggagtgaaaaataaatatgagaaaccatttcccacctatggccaaccctagtcgaccactgccatatggaaatggcagtactcttcaattttgatggcactgccacaagagaatggcagtggtcggccacgaagaggggaagtgagatttttcgccaacaatgtattttcaccaataatatgtcaaaatcaagtgaaagaagccaccaagcagtatagaaactacttggctgaccattgccataaggaaatggcagtggtcggtcaccacacaaggaaaggattttcagtggccaagttgtattttcaacatccatgtatcaaatacaagtgagaaaagtcactcatggcttcataaagcccttaagcgaccattgccactctccggctccaactggtggaagtggcctcccgttaggatttcagacgtcgaaatgaggttgaatctcgagactcctaaaatatgacttaccatcaaaaaacaagtaaaaacacatttttaggggttcgagaacatgcatggc

SEQ ID NO: 218841 - DNA, 8462 bp, Cannabis indica
tttagggtacaaaacccaacatgaatagccattaacactgagttaatgagaacaaatctcccagcaaaagaaaggttctgagtgcttcaagttctaatccgagctaccattttcactagaatactaaaatttactgctgaaattctcttggagcatatgggaacacaaagatatttgaaaggcaactgcttcttaaatcccaaaccatccaggattctttgcacctctatatttgacatgttactataatataatgcagttttagcagggttaggaaataaacctaaagaaagtgaaaacagcttgaggtcttgtaacatgtagagaatgcttttgtggtctccattacaaaatagaagaacatcatcagcaaagcttaaatgattcaattttaaatcaccacatctctcatgaatcctgaaaccctgcttttgtcccaccttcctcataattatggataagtattccatgcccaatacaaacaggaggggggacattgtgtcaacctatctcaagcctctttttgcctcaaaaaatctatgtaatgaaccattgaacatcaatgagaatttaggagtgcaaacacaagtcattatcaaactaataaactaacttgggaacttgatggccacaagcatttcttcaatgaagtcccattcaaaggtatcataagttttttgtagatccaacttgatcatacaattagctttggtagacttccttccatagtgatggatgagatcttggcaaatcataatgatgtggccaatgaaccttccttggacaaagcccccttgattctgagccatcaagctagggagcacaagcttgagtctcgaaaaaatcatttttgtgtggctgctttgtaaagaacattgcaaaaagctatgggaggataatctttaactgtgtttgggcactttgatttaggaatcaaagtcaaaatagtagaattgagctctttgagaagttgtcctgaatgcaaaaaaagaaataattgcatcacaaatgtcttttctaatgagatcccaattgtcatggaagaaaaagctactgtacccatctggcccatgagctttgtttctaggaattgtgaaattgttgccttcacatctgcaacagaaaaattagcaaccaaaatattagtttgttcttgtgtaacagtcgggccagtgctgatgattttatcaataaccctctttctttcagccatcttgtttccaagtaatcttagatagtattagaggaaagtggcagtaagttcattaggatcatcgatcctggttccatcatcagcagtaatagaaagtattctattctatgtcctttgagctctcaagtagtagtgaaattcaacagagttcaagtctccattcttcaaccaatttcagtttggtttttgctgcataattgaatgatatgcatccagtttctcagcatacaatttccttacttcaaattcgacctgctattttttagtgttcaaaggatcctagtgcagatcccattaacagttatcaagtagctcctttgcagaagcagtagcagcaggaatatcagcaaagtgttgatgattaaaattcttgaacacacactttcgtcgcttgagtttggagacaacttgaaacatatttgtaccagtaatttgttctctccgatctgtagcaactaattcagaatacttaggatcatttgaccacatcctaaagtatctaaatggtttcttgccaccaaggttcagattgtacactgtcaaaatggcaggtgaatgatcaaaaaccccttcattttggaatactacttcagtagcagggtgtttatccagccaattttagtttgcaagcactctatcaatcttggaattgatccttttctctccttattgattattattctaagtgaaaaagttactcggaagcttaacatcttcaagttgacatacatccacacattctttgaattccttagatcctttgtgattagtttaattaccaattcgctcatcttgtcttaggatatcattgaagtcaccaagaacaatccaagcatcattggtagccaagttttcaatatccttccagagctctcttcttccatcctcatcattaaaaccgtaaataaaagtgacaaaaaactttaatattttatccatggtttcaacatgaagatgaataagttgactacagcatctaaggatattaaatgaaaaactaaaaggattccaactcacagttattctacctccatcatgccaagcactattggaagtaaaacaccatcccaagaaaattctaacatataaggctccaagataaggagccttaactctcgtctcgaggagaccaacaagcccaacattctgattaccaatcaatttcttgactgcattttgcttctattggttattgatccctcggatgttcccactcataattctatccattgacaagagagggagctcccccctctcctagtgttacctcttcaatgcttggcttcaaagagctatcatattttccaccaattttagatgaagtattcctcattaagacctagaatgaattgtttattgctgctgttacatcagaagtcatatcctttagtttccaccctttaacaactggttggaatacctcaaaatccgcagtagcttcagcctctataacaccagttttctctggtttttccattggctttttcaccaccccaagcttcctgcaatcagttgatgagtgccctaaaccagagcagtgactacaaattacagatttccactcataggaaacacacacagttgcgttataccctttctcatcttcgaattctatagtgtgaggaaatttttgcttcaaagacacctcaataagaactctaagaaagccaagcttatccctcattttagtttcttcatctaccataatcggttttctaacttggccaatgattttgaaaagggatttttctccccaatatttcagattaagatcatcaaggtgaacctaaataggcaccaccgtagcatcctccttcttgaaattaatctcaggatcccacagtttcatgacaacatgccttttattaaaaaatatgtatccccctttcaagatatcatccctgtcttcaatagaattgaacctaataagaaaaattccatatgagttatttccaacacgttcaactctttccttccacatcctctaagcaaagccttccaatattgatagtgggggagtttctcccgaaacgtaacacgcaattgaaggctttcagaattcaatttcatcttggatatcatcagtattaattttaactttactagttgatgttgactttgaaaatgaagtttccagcttgtgtttcacattaccagaacgtaaaatgggtgggttagatatgttaccttgagctaaattctcagagcaatgattactggtttcccaaaaatgcacaaaatcattcctgatatcctcctgctttttgatagattgaagagaagacctaggcaagagaggctcaaggaagaaatcatgaatctctgacagttgaacactcgaattatcttcaccttcctctgtttgcacatcctcttcttcctcctccttttgtgcatctgagaaaacgattggctcaattccaagcacaacatccatcgatttttttttccttaacatcagtgactgaattcgaacctttcttcttccttggcttagtcaaattcaacttcccctgtaccatagatcttccttttttctgatctttattggaagtaaataagattataataaaattgggttttatttagggcacaaaatcctaacaaactctcacttacactaatataaaacaaaagtgcattttattttaatctcgtatatgatgtcttgatcaaaatgtaatatttggcataaaacaatgtaatatgatctagtaggttgtaattagtattaaccttaccttctccaccatcacatttttatactcacaaaattcatgattttgtgaattccccatctatatgttttactcctcttaaggtacaagattcttcactatttggaaattgcatttatgttatcacggagtcacactagcaattattcaatgtctagaattaggcaaaaaaattgtatcgaactttctgagtctgaataactctctaattgcctttagggcaaccttattattcagttatactggtagagttagtggttttgaagtggtttttattcttctccaaaattcactactccgcccttagagtaatcactatctcttaattagactttctagcattattgcaagtctaaaaacctaatttagtgtagcctaagggttttaaaataccactcttatctactaacatatagttccgctcatctattttaggatatgtttaattatcttccaatatttcttttctggatttgaactaatacttattcaagctcccactcaacaacagatgtatgggctagtgcatgcaagagcatacatagacctcttactattgatgtttagggaatttctttcctggcctgtcttttttggagtagttagatataactcctaagataaataaactccatgtctggaagttaagtgacatccattaaagttagccatttgaaaaaatactctagcttcttactaatgaaagctacttgggacagagtaagtaagttaccagttataccacaaaccataggctttgatgttttcatcaaaaccttcatactaggaatgggaagttttcttaagcccattgaatagatcgggcatagtttcccatcttatccttgtattctgaacactctaggttgctccatgtgaatggctaaaccatagttctctaggcttcgagccttagttccttattaggactattcattgcttgttataacaaacaataaattgtcatcactagtatcatctaagtcataacacggtggattcctagaaatcctctcactatgacaaggtaccatgattatgtgtctaggaacttcagtggtatagacctcttcgtttgcatcaatacaacagaggatgtgggactatcttatataatataagataatggaacactttcatatttgaatcaaatagtatctccacttgtgtgctactttggttttgagattacatctaagtagtcaacgtctagaaaattagtatttatggaaacaaatacttactactcttgatgaccatggtatagtccacccctagtcaatttagaatagccaccaaacttgaaaaaaaaaactaagttaatagttctagctatttctaaaggacataatcagggcatccctaaatttaacaatggtgtacaataagtactttaacatgatataaactaaggttattttatgacctagatgggacgatcgtttaaaatatcgtttgctatctctaagacatatccctagaaggactttcatagcttctagtaactaatcatagacccaatcatttcatccatacgcgactccaaaattttgaggaggtaagtttgattacaatttaaagttcatttaaatgatctttgaactgcatatcaaatatttctccatccctatcagctcgcaagatcttttaatgactttcttaactgtctttgctagaaatttatgaaaattttcaaacatttcaaatttttggcataagctaaatatctatagcaatcgtctaagaatttgatgagttactcataaccactcctagaatgtgtatccctatttccaaggacacatgaatgtaccatctaagtggttatctggcacatgctctctttatatagaataatcttgttaaaactactataacacagatatagtgccatagatatttcataatcattattagtgtttgatgtaaatgattcctaggtctagttacaataaagagtttgttaatagtttaagtggatgctcagtcatagaatatcaactcaattttatacattaacaaatagtttgatccattgaaatggataataaaacttgtgaaagttaaacttagtatttagtaatctagaaattgaattactattctagctttgactgccactaatacactattataactctaagttcagcttgtaaaaaagcttgatatcgattttagaattataaccttaagcttatgttcaatcaatattttagtagcacagtaagaaggagattcaattcctgaaaattgaggatattcatcatttcttggatataatatctggaatatgttcattcgcgtcactaattttcttataagaaaatagagtaacatcataagctcatgatcattatccatcaagtcaaatgatgtatgattatggcaatttcttaatgaaaaagatttagaggaaatttaaaggacaattttgattcaaaattcttcattattcagtattgtaaatccatgtctaagttgtcatctagtggggatgggtcaactagatttcacatttataaaatacttattttacgagatctaacactataatatagtccaacagatgacaatctattggggattgtcctattagaaacaacaagctaagttagaccaacaaagaagaatcgaaattgatactacgtaatcaataatagaaaataatgatatgttcaatataagttctaatcacatatattcaaaaaattataaacacataatcaaatatggaagatatgggaaaaatactaaaaccaagtattgaccgaagttttcggcaaccaattaaatgaaagaatgagaagagttgcggaagctttaatacaggtgatttttatgtggttcgggcattaatgagccttagtccacgagtctttgttatttatgagagtgtttgtacagataatgttcttggtgaatctatctctctcttttttactcccttcgattccttaattgatcaagaccccttttccattctgtcgggtatttatagtattttttgggagaatctctagaaagagatcacttgtctttaagtgttagcctcttaggggcataaattcctagcaaatataaaataggaaatacatgacttatgttgtaggtatcttagggattaggtgaatgtaatcttttatcctaccttgattgatgtgagtcttcataatggagtcatcactagactcatcgattatcgtgtaatcgccataaaagaggcttacgccatctgtcaaatcttcttatggaggttctgatacgtttcccccatgcagcgttaaatgcgaagtgactgttcgaacgatctctttccctcccgaagatgcattgttacatttctagcttcccaaagagtaaaggtgtgttttatgctctcctccgggaggctcacaccgtgagatgcacttctctgtctatgacttacccaatttttgtgagtgggtgttctttgagatctatgtgtcgcacgcagctgctgccaagtattttggggaaaatctcaggcaacacacgaggactatgtttatttaattattcaaaaattagtatcaaaagttagaaaaatggggttttgaggtttagagtaaaatagcataaattaaaataaaaaaacaaagtaaaattgagactacgatatgagaaactagttaaaggttattcgccaccctgaacaatcattcctaattcctattaatgaatgtaatttcagtttcttatcaaactattaatcctacagataaagttgaagtagtcaattatcccaatctccctattgtatgtaatcaagatgaagcgcttaataattaactcttttacttaagcagtaaatccacaaagcatgcaatttatttaacttaaataaagctttgagatttatggcgatagattaatctaggcaacaaattaatgaagtatataattcatttaacctaggttctattattcatcacaatttaaaattgtaatctgtcacaaacacttagaatcctagactattaggtgaatagtaatcctaagatgatggtagattaaagtaaaacttaatttagcggtaatctgaataagattaaaacaagaatgtaaagaccgcttagtttaatttggaaattagaagttaattatgcttaattatgaaaattatttatagatatttaaataattatatatgctgttatttttgaattcagaatgcatttttatgtcatatagtgaaatttcataattttgcattttcggtgtccggcaacatggaactcggtgtatggctcagtagaatcacaaattagtattttagtatagtgggacggtttatttagacattgagaatgtcgggattagtcgggaatttagagttttcccaaaatacccctaagtacccttttatgccttttagggtggaaagggcaaaatggtctttttgcccatttgtatgtttgtcttttagtgaattttatgttaatgagaaatcagatttttaaagcttattttggctgaaatgatttaataaa

SEQ ID NO: 218842 - DNA, 9739 bp, Cannabis indica
acaaaaatgaaagtagaattttttttttataattttgtttttgaaaagtaaaaatgcatattgtaactatttttgtttttttgagtgtcggggactggggttggggtttggggtccaggtcgaggttcgggttggggttcggggtctggatctaggttcgggtttgggggcagggtctgacgtcggggctagagtccgggtccgaaatatttatgaaagaaaatataaataaattataattaaaaaaatatataattacaagttctttaagagtgattttcttttgtttttaaaattttgattctcatttttaaaattaaaaagcgaaaatagttttatagaacgtgatttctgaaaatatttttacttatctaattgaaaaaccaaaaaactgattaaaaagtgtgttgcagaatacacttataatttcctcaaatgcacatctgaatttgcaatgtttatgcacattttctcctgtgactcgctttgtgatcatgctaatagcagttggttaggattgtgagatatggtttagatttttcttgagccaagaggagtattttgaaaattttcccctttaacttattgacacttgtcatagctactgatgacttttcattttaaattataatggattttgttacagtacaatgggggtccgcaactgactaatgatgactactgcaaggattgccttgttgatgaggcccgcactctggtttgtgccgatagctacagagtttgcagaactttaatgaaacaagttgctgaagatgtatttgcagggaggtgtgaagatggagcttactttgtttccaaagcatggtatgactgcaaagtttatatgtttctaccctctgggatatctgctgaatatttgttgtagtgcgacttatttgatatttctttctaccctgacacctacagatagtacattatctgttgaaccattttactccttgcacatggatagaatataaagttgctatttctttttatgattggcgcactcaagtgcgtaattgagacaaagagtctcaataccaagagatccaagctctgaaatttggtctcatcccaattcccaaacccctcaccactagactaaacctagtggcttagttactcaatattattattacctctctctcctttttcctttttctttttgatgggggaggggctttgtgcctctcatcattatcatcactcttacaatatgtctttagcattcacttatagattagttcccttagattctactaatttgagagaatgggaatggaaagtgcatcccaatatcacagtttactattctgattaccacctatatataggttgcaacagtggcttaaaagaaaaatacttgatgcaccatctgaagctgatggaggaccaacagcttccatcaggtgtcctcatggtgaacttatgcctgaacaagctgtgggagctaagagattgattattcctgagaatctgtggctgtttttttatgaagatgctagtgcagtaaaacctgatgataccttgggttgctcaacattttgtttggattcaagagaatgttcccagtgtactgatgaactgtcagaagtggcttgcattgaagattctttaaggttggttgacttttgtcattattgcagaggtgacacggaatgcaacatttcatgactattcaacttactgttttttgtagagtggtgaggttcaagcagcgccagaatcatgagaagttagctatggggaaaacctttcccctttttcttgattgcaagtattatttggtaccatcttcttggctttcaaaatggagaagctacatcaatgccagtggcaagaatgtatcatcatcagtgaagcctgggactttagatggcataattaatatgctaaagtgcgaaaaggtagcttccaactgtacctgttatggatgaagaattccttattaattgataaatggttgacataggaaacagaatgtagactaaataccacgattggtgaaattgccccgatttgattactttcccaacaatttgcctatgcaataccaaagaatacactcaacaccgagtatgaaaagaacagaagtagaacacttttttttgccaaaagtttcttgcctggaaatggcatttgtaattgatttgtgttgacttcctttgggactgcttaacttctcttctggtataggctttggtattgtgtttccatagggcgttcttatatagttttacttacacacacatgtatatatgtagatatataatgtaggggaatgtgaaattctatttgtgtagagattgctcttttcctctaggtcagaggtataaagtttctcatttatttatgtgtttacgtgttaagggatactttgtgctcgaggatgatttcttgcacttgtacttttctcctttcaaatacagttattcagttattataatgaatatctggcttaaatggttatgtgtttcatgagaatttgatgtcagtcaatgaaactttggaaagaatgctcttgctccaagacatttctgttaaaagttttcagtcaaagcttgtgaggaacactggttcatgtctgttatataaaattaactttaatataaaggggatgcctgttgtgacttattcttgtttcccccctcttctttctcttctctgcttaatagtaagttgaattttttccctttgaatccttattaaattgtctttactattctatacagcattcattactcatagaaaggccaccagatcttgtttggaaacgtgattcaatattccaaaagtcttatgctgtaagtacctgagaccaatatatctctataagcttgtgaaatcccatctttcttcagggtttttaataaagaagaaaaatcttagatggtagagtgagctggtgatattattattaccacaaaaactatatccgttactagaatttttttttttgacatgtgaaatttaattacatttgtttctaagcaagctactttctgcttcaaattactctttttgtatgcaataatcttgctattgctttgagttttgactaatgtccttttttaaagggacttcagacagatgggttaactgtgattactgaacatgactggaaatgcttttgcgaagaatggggtggcattgaagggaatggcatatcagcctggatcgaatgtagtaggggtgcagaaagtaatgtcaatggttcatgtgaagagatgccgagatctgaagcagagttgagctcctacaatgaaactaattatgaaactgagactatgcaactaaatattaagactactcctgaggtatcatgaaacaatgctttgtttacattacttcggcaactttgaatatgatattcttctcaggtattcttggtccatgtgtgaatttttttaggaactagtcgctcttggttttgaaaatttatggttgctagtgtttgcataatcttcctctttcatcttaatgataatttctccaaaatgtgtggcgtgtattacaaccagagggattgcttttgtgtaaaataaatagataacttgcacccattggtgtctacaaacctccttctctgatacacacatcgtgtgcagagtgcagattagttggtgaaaatcctgcttgcttgaacttaattttgcatcgtagctttgttatacgtatgaaagactttacgaaagcatctgtgtatgtatgtatgtatgtatatatattttaaatttatgctttctatctttaatcatatgtacattaacttgcgcattaaactatgatagatatgtgagcaatgcattggagaacgacaaagcttggagctgatgcagaaacttaattattgcaatgaggatgtatatgtttatttcgttcgtggcaaagaagctcccaagtcaattttacaagcatcggagattaattttgatccatatcgccgagtttcaaagcgctctaagaagacaaactctggaaatcaaatcagtttaaaagtttctggctctacaacagtgtaccagctaaaaatgatgatatgggaatcttttggggtaagttacatgccatttcaacatatatatatttatatatgcatttttaaaaaataaattgaaggtgcctttctatggttaatactacagatcattggtactacttatcaacaaattcgattggttgatacaagtttattttctgttacaataaattgacaaaataatagctggtccaatagttgcttcagccgctgcaatggttataataaaaatagaaaaatatttccttttaattggcgatacaggcattattgttttgtagtgatcattgcttctttgatttatcgcaggtggtaaaagaaaaccagatacttcacaaaggttcacgaataattgataaagaatgtgctactcttgcagacatgagtatattccctggagataagctttgggtgattgattcagagattcatgagaatcgagatattgctggtaattattggctttgtacagtaaaatttagtataactggacaagttattttagttattacacaaatattatatgttttaaactgaaattcatggctggtgctattaaatttctagcagtgttctgagtctcctttagatttagtctttggctctctttctgtgtgctgtagacatttgtgtgttttgaaatcttgtgtagtttgaaattatgatgttttacataaacttgataaacatgtctgttgtcttatttgattttggcttcccagatgagctttctgaccaaaaaatggatgtgcaacatactgaggggggttttcgtgggacacttttgactgccaattcttctcaagttgtttaagaaccatgctacggatctttgtgaatatccagagttctgtaaattctctattgaatatttgtacgtgaagctgcatttagggtgaccggtaattttgaggtatgttattttatttctacttatcttatgtgcaatatgtacacgacctttatctgttagaaattaaatttttataaggtttgaaccttgggtcactaacatgttacctcagcatgcagtgtttacttgagtccaaattcacatgaactcttcagtttgttaccatgtattttggctcttcaacgagtcttgtgcttgtgttgagatgaaatgcaaccgtttcatgttaactagtgatcgtattgttatgtatcttttgactgcgtgttcaattcctcaatggctgcagggttatttacctgtgtgtgcgtgcactcaggcataaatttcttctgcctcctgttttccccagtttgaaatctgaatcagtttgtcgtaagaagcggtagtgacagaaccggtttaatccggcttagaatgttatgagtactaccctgaaggtcacaataatgtgttactaggccaaactctttcttcttatctgagggggcagctgtggcatgagaagagaaatgggcatttgattggtgttttcttctaagagggtcttaaaactttattcagcgtgtcattttattgttgattttattagagatacttgtctcaatttttattttttatttttatctcccactcagtgagcgagcgagtgagcaatttgtagacaaactagaactgtcgtagcgtcgatagagatagagatgtacaacattgtatcatacacgtctgtttactctcttgtttattacatatctcttttaccttgacctgtgttcatcagataagttttgagattagaaaattgaaaaatatggtgacacccaaaggatgaagttcacatgttggacctcgtttattaaggtgatcaattaacatggttgttgttctgtttggttctaaattctaacacaaacaaatgaaaaatagtaaggcatattaatagcacaactagctctctgctatttcctgtcttttaatgtagttaattgttatacatgtcatttcatttgcaagtaaatgcgattttaaaagagtagaaatagattgtgttgttcaaaaataaaataaaaatatatattggccctaaatgaattggcacccccatggcatggatgagtcaagtgtgtcctttggttacttccttttatcacatccaacgtttatggcctcgtgaggtattggctcctctgaaccaccgatcccaagtcacctctgccggtcctcttgttctgttaacatttttgtgttaataaataataataataataacaattaaaaaacagctattgttagaaaaaaaaaattatgaagaaaacaaagacacgagtgttgaattttgttgcatttacttcagattttattatgtataccatatcaaatgtattgtactttcaagaatttcttttggaaagtgggcagtatacaagggagaaactatatttggagtaaatttttgctcggtttctatatagtaagtatctcactaggttttgatcaattttgaataatttcattactaaaaatgaaatttaaaataatcaaattgcatgcatataaaaataattagatatgagtgtaattaaacggagtgtttgaactttatttttgatatgataacttattatttttttttttatatataaagaatagaatataagctatattaaattgtatatcgtcgtaataaataaattaaatacagtttaaaaatagggagttaatagattaagctgatatacagtttcattataatattatttaagctgaaattatagttaatagaatagaaacttaaatagaaggtttcaatttactatatagtacataataattgtggtttttattctttatcatataatatatagtcaatgtttgtttaatgagaaagtaaaaataataacagtgatttagaatttctatcttacgtgggaagtagcggatctgggatcgtttccaggcttgaaatgagtctgtaacaaagagatgatatgcatataaatatacatatatttatgtatttatataattttaaataatcttaattactcactctgcgcatacaattgaggattcaccaactgtttccagttcatgtagttctttctgcatcaaaatcaatcttctatatatgttaatatttcacaatttttccaagcagaataattaaacccaaatatgtacatttattatgacctgaattatgttgatttgggtattgagttgagatatagctgcattcatcctatgcctccccaagaaagtgggatttggttttagctttgttgctgctttttccttccgatcttgatgaggataagatgaagaagaagattgagccacctctacctctacctctgcctctgctctttcatcttcttctctttctccttctcctccgcctctcaccgccggcgatgatgatgaattttgttgtacttgcttttcattatccattgctaccacaatcataatattataaattcacaacaaactcagggatctaattatttttttggtgatcaaaaatcaggattgtgatatttcatgatgtattacatatatatatatagataaataaagaagtgatttatattttatttttaaaaggagagagaaaagggtgggtgatggttgagatggtggacctagtttccccaacatgattaaaagcaccaaagaagactagacctcaacctatatttatatatcactattcttcactattgctatttagttatagggtgtccaacaaatggatcgggtcagccccacccagtattattttggcctgccccgattctcaccttagacattttattatttttttgagttttttacactacatattaattttttttttattatggagtgatttttttttttcaaaagtactatatactttctatactgtgtactgtgttaagttgtcactgttgttccactgttgtttttaattattctattttgttgttttacgattattttataaaaaaataatattttcgaaaaaatttccatatggcagtatttttttttgtaaaaattaacccaaattctaatatttgtataaaaaccccttactttttgatggtaatatttaactatgtactatagtagatctaatacttgttaagaaattgttattctctggttgtgtcctcacagtaggtctctgcacctaccctaccttgtcagcattatttgctcatcattttgtgtactgtcctaatcattggtgtactgcaatttcgttatacctttttgtatttttctcaaagttgttatttcctttaatttattgccttgtaatattctaaatgattcctctgatgtaatattaaaatataaatacaaggctccttactcatgctcattgagctgagtttttctattttatcttttctttaaaactttaagttggtatcagagccactgtgaccgaagatgtcaaccagtgataaaacctcaccagcaacctcacctcatggaaatcgatcatctccatttcaatctggtagcaatgttgctaaccaatcctccactactcaaaatgcaacctttgcatcgagtgttgttgttccacactttcggagcatactaaatcagtcgtttactctcaaactggatcggaataactttaccttgtggaagaccatggtgtctgcaatcgtttagggtcatcgattgtatgggtatcttataggagctagagtcaaacctgtagagctcatatttgttccatctgttgatggacaacctggttttggcatggaagtaatccaaattatgaacaatggattgttcatgatcaacttctcatggggtgattatatggctccatgacagagggaatagccccaaaggttatggagtgtgaaagttctgcatatctgtggcgtgcttttgattgtcttggattcaagctctgttaagtgaagtgcattttcctttggctgccactcttataacttggtgtgataatatgagagctagtgctttggcttccaatccagtctatcatgctagaacaaaacacattgaactggatatacactgcgtgataaagttctcaacaagacacttgatattcgatatgtagcctcctcagattaaatagcagactgttttatcaaaagtctctccaactctcgtttcaatttcatggtcaacaaacttggagttgttgcttcatcactccagtttgagaggaggtgttaagaaatttttattctctggttgtgtcctcacagtaggtctctggacttaccctgccttgtcagtattattagctcatcattttgtgtactgtcttaatcattggtgcactgcaatttcgttatacctttttgtatttttctcaaagttgttattttcttaatttagtgccttgtaatattctagatgattcctctaatgtaatattgaaatataattaatacaaagctcctcactcatgctcaaataggggtgtggataaatcatccaatccaatgataaccgaccgatccaattataattgactgccaaacattggatatgtaattgtgattggatcggattgaatgttatttttgaatatccaattggatcggattggatgttggatggggtgtccgaaaatctaatacatccaacatccaatcgaactaattagtattttcatttagtttggatgagtaattaaattttataatgttatacgtaaaatatatatgtatatataaaaattaatattaaaattttactctttttttcttagattggatggatccaattcaatctaa

SEQ ID NO: 218843 - DNA, 3047 bp, Cannabis indica
agttcagggggcatgattttgtatatgtcaaagttcggagggaaaaattactaattagtcaataaaaaaatctccttttaaaaatacaacatattcttagaataaggctctaataatatgaaaagtgaataaatattgaagatgtgcactttgcggaaaaaaaaatagagaagatgtttgctaatgtcatgtacacatgtattaattcaagcgcgactttttttggctcactattctcaaatcataagctgttctttttggtttgtcattaaactagtttttaaatttcctcgtttaatattatatattattagctattcctagctttccaactttgactctaatacatatatgaaaagataaattacgcataaatacttagaaaaactatatatacttttggttacaaatataaatgtaagacactgctaaaagattccattaaggtttttatgtaaatgattaattagtacattcaaggaagcaggaactacagagaatagtatggagttgaaaagtatatattcaaggtgatgaagacaccaaatatgagtagtttgaattggtaaacattaacatttagcttaattttatgactgtatttgggatgtagctagatagcaattggcatatgtttagaccaaatatgagatgtagttcgaattacaagtcatactcacaagtcaagggtctcttctcgtgagttacgttttctctttttatttgaattttttagtgttgaaatttatagaagaagacttgtgcataggaaaatgagttaatatatattttaagaccaatgtttttttatttgacttttttaatgtttaaattattgtgaacaattgacgcatgtttgcatggtttgtagtaaatgagttaatattttacgagcaatatatgttagttaattgctcacttcttttgttttttagctcttattcatctttatatcaccttatctttttttttttaatatttttcactctctcacaatttttttaaaaaaaattacaaacacttattctatattttttttcttctctttattacatttttcttactactcactctcaaactagtttatattatttttctttaattaatcgcattttataaaaaaatcttaattactttcttttaacttttactaaaataagattttttttaattacatacttttcttatattcttttaatactctttctttctcttaccaaaaaattaagagcatttttcttatatatttctctctcttacatgattaattaaagtagtatttttttttttatgttttgtagtttattcaaagttaatttatgaataattcgcatattacaacgatgtcgatgtcttattattattattatgttgatttgtaacttgtttttttttttgttattttatatttattttcatgctattgtttagataaattctatagttgttttataattattaatctgttgtttttatgtatttttttattgcacaattattttttagttgattttaatttatgtacatttgttatggtgtatatatgtgtatttattttgttattttatgttgtgttttagttatttttaagtggttttcatattaattttttgttgcacaattattttttagttttttatattcgtgtgtatttttagtttatttctgacaattttttttttgttatatgtgtatttttttgtagatgtagatacatatatttaatttatttttttgacacattttttttacaatgataaattttttttcgttttttcaaaaaaaattaatacaatgtgtagtaaatattaatatattataattatattggtatgggactggaagctgaaagggtgtccaggacagtttggatagtttatggtcctggaggtaagcacgcctctgacacgatcccaagaaatcaaaaaatatgtcccctctactaaactctgaaaaggcacacgataaaaataagatcaacttttagaggggtgcacctcaattacgccattcctttttccaacaatggtgcctgaccttgcctgtcgttgttaacagtactacactccgtacggtagattgcttttaggagtagggccttacctaccagactcaatagctcaaaataatgtttcaataatttattttaccaattagtgagcttctattttattaggaaaaaaaaaaaacaaactagtacgatcaggatctgtccgatcgattaaggaagtttgcctataaataagacattatctcctccatgtaaagggttcaaaaatcacaacttgaaaatactataaagctgtaaaaagctcattgctatataatttataaaattgtctcgtggacaaagacttattaacgcctaaatcacgttaaatttatatgttattttattagcttaatcttttaaaaaattagtttctaaaaatctcaataaacaataatatataatttattataatgagagagtacatcatcattaaatttcatttcttcctttttttttaaaaaactacttttaatcttcaatgattcaatcacattaataataaaaagaaaataattactttttattaaaataatttaaaaattacgacttaacaaacaaacaaaattattgaatatttataaattaagggaagaaaaattatacattattactatttaaagataaacttaacaaattctccctaaatttaacctttactcatcctcgagtaagaattaagttaaacaaacaaaaacaaacacacaacgaacaaactataagccatcattaccaatctagactgctttgccactactcataaaatttcaattgcaatatgaaccagagttacagctcaattgccttgaagttcaacttttaaagttcacttaggaaaaataaatagtatatcttaaaaatgattacaataattggactcaatcataaatgctcaacttattccagacaattctacaaactaattttttaatatacttgcattacttgaccttctttactaatatcaataaaacgtcaaccacttgaggctagctca

SEQ ID NO: 218844 - DNA, 6393 bp, Cannabis indica
gtaattttgggttatagtctattcgtacttacgtatcgtgcctttcgtgcttctcgtgtcaggtcgtgcttaatgatatatttctcgtgttgtgtcgtgccaaatttctagcatcgtgttatgttgtgtccaaatctgtatttttttgtgtctagtcgtgctcgtgtcagttttgtggcatgtcaaattgtctaacctatatttacaacactaggaacaagtagtgccttttagcatttcttgttttctttatgaaaaatgttaaaaagtcacttatggtgcgtagcaccaccaaaaaaaaaatataagtattggtccaattaaagattaagttccacataattaatttaaataactattatggaatatcgcactaactatttgtaagacgtcatcggtgcctaagaccatctccaatgcatagtatataatttgtaataaatttggccaaaaatatgagttagcgctatatttgttataatatttgctattgtgctccatgcacaataacattttaaggtaaaaattaggacaaaatataaaatagcattaataatcattcataaattaaatattttaaatatttaaagaatacttaatagcaatattgtattaaagtgtatactaaactatatcattaatgataaattgtaaaattgtaattcaaaaaattgcttaaaaaagtatattattagccagatttgatataacttttagcattcagtaacttaatgggaattggaatatttatgttactgcagatttcaattctggagaagctttcgagtttaaaaatcctccaaaaatgaagaacttatgtggcgggatgtaagggatgccttcctactatgacacaattacggataaaaagagtagctattagtagtctgtgtctagtttgtaatattgggaaggagtatattttacatgctttagtgacccgtccttctatttctctatgttagaatcgcgaatgtatcggaacatcagtgcaactaagtgatacttttattgactagtgtgtgtcttgtttccaaatgcttgatatggataaaaaaaatatttgatggcagctatttgttgggctatttggaatgctagacatgagcgtgtttggcagcaaaaatatttgagaattgctagtattgtcgcctctgctaaggggtaccttaatcagtggagaatttctcaaaactcggatttcgagtcatcttggcctaattttcagaaaggagatggtgtggagcaatgtagttcacctcaagtcgatagtattaaagtcaatgtgaatacaactctatttgaggatttcaattgttatggcttcaatttcgtagctagggacgacaaaggtttctttgtggaaggatgcacaaagctcattcatgggttagtttcaccaactttggtagaggaaatggatatacgtgagacactcaattggattaaagatcatcaatggcaacatgtctctcctaaatctgattgcttgacggctatgcaagctttacgaagttctattaggatgatctctattattgactaagtgattaatgattgtaaaagttttaaatttgttaaacgatcaattaatatagtggctcacacatttattaaagcctctatattctattctgattgtcgtttcagattggagaatattcgatctgactggctaccttgtttggtggctgaaactttgatttaataataattttggaattttcattaaaatatatgcaatttttagcatgtgcaaaatttaacacactatgaacacaattggagaactaattttctcaagaatattaaaatataacactatgacactattttagcttttcattagaaatgatctaataccaatctaaatctacccttatgttttacttacctgtattttaaaatagaaaatattaaattattttcaaactatgataggaaaaaaaagaatagcctcagagaataccacctaagaacgaagaattcaaagaggccaataactaaaaaaaaatcattaattcatgtcatcagccaaaacaaaatttttaatacataaaggatagctaggccaccaacctgagctatccttacgatattaaatacacatcttaccaaatctatatttgataaaccccaacacaccagacagttaaacttcgtaacacataaggtagccaaatgggaattggctgtttcctccaatggttttattgatctagtttcaatacaaaatggagttcattgtaatgacacgcttggtctatttaaacgtttgatcaaataacccctttcatataaaaaatggaaataaaaggaatgaagaaaatggtgactccaaatcatttaaagctgttatgcgtctgtgagattgggaaattttgtgttttaccttactttcaagggaagattgaaaattgggagagagtaggaacaatcaaaacactttaattctattgatattcaaaaagtttccaacatcaagctgtttcaataagaaagatatacctgtcgtcttcttgcatatacattctgccagaatattaagtaacaaaaaagaaaagtaaaaggagagagaaatgcagcacctaaaatcttatatggaaatttttgacatctgaccacagcggcagcagcaacaactaaaaatggtaacaaaaagaaaacaaaaaagtctggtttatatcacttaggattatcactcatttcttgcctcttccttctctgcagattttccttcatcagcaatttggaacccctcaatttttcgagaaacctcatctacggttaccttgacttttccagctgccccgtttgctgtaacagcttcagtgtcatcatttgtcaaagggccagtctgccaaattctaatggttccatcctcagatcccgaggcatatgattcccctccaggagagaaacgcacacagtgaacaggaccatgatgacccttgttgcatgctgcataaatgtttgtgaattaaaacctgactcaaatctattttcatgtaaatctcagcacattcatctttatactgttaataagaaagaatttagatataggagcacgtactaatctcttcaccggtgtggaaatcaaatacatggatccacatatcttctcctccagcaatgaacttgttcccgtattttggttccagcgaagctgactctaccgtgcatggcatttcatagctcttgaccaacccaaaactgaatacacgtaagcaggaaaaaacacatcataaaccaagcaacagaaaaagcacatcataaaccaagcaacggtaaagacactcaagcccagcaaaaacaaaagcgagtgagtttgtggcttactaatttgcatcccagaacttaacagtagacccatcagcagttgttatgtagcgaccatcttgactaacctcagcactagtgacagatgacttggtttcaagcgtttgaactattttaccacttcttacatcccataatctgtatgatcaacagtcacaagttaaataaataaaaaaaacccaagcatgggacacagcacaggcctctaaaataatatgatagttttaactttgagtgttttcacagagatatgcatacctcacaccacccatatcagtacaagaacttaatattgtctgatcactgtggagccatgcaacagttctaattgaaccaggggatttgtccacttctctaggaggggcatctggccgattcaaatcatagatccgaagagctttctcaaatcctccagttaataaaaggtgtgtatcctgtgttgcattgcggttgtcagccattaaatatgatttacaaaatatattaatgagaataatatttattagtaaaagtacaccatcagtcttagaacaaaaggtttcaagagacgtttagtagtagcccatttcatatgataattaaaatgtatattgaaaggaaaagaaaaaccataaaactaaccattagaaataatgcaaacaatagccattacataaatctataagcaaagcaataaaaaataaacatctcagagacttccacattatgtggaagcattaaacctatcaagacaggaaggtgaaacatttacaaactatgaaggataaaggggaaaaaaggtaagcaaatggaaactagcttgaagaagaagccacctctgaaaaggcacaggctcggacaatgtgcttgtgctcaaaagagtgtagtacatccccggttaaggcatcccaaactttcctgcaagtcaggtctaatatgtcaacttttttttaccattactatcttttttcttttcaatttaccgatccggaattttagagtaatgctaaagacacataaaagttacacaatgatatgtaactactataaacaacacagttagggaattaacaacaaaaatgaattataaatcagtgtgttttgtgagtgtctttctcagggttcgtagttctccccagcttgatgttccaccaacaagcataaagaaaaagggttggaataaagaacaaaagaaggaaaagtcaaccatccttcagttactttagttcagtataaactaagcactaacaaaaatcatccatgatcagaataaatgttataattagtgtgaaatctaagagatcatcaaaatcataatgcatatcatgacctaattaatacacaagggatgttctgaatttagctaaattataaattaaagtaataataaaattgacataacaaggtacccttaagaaatcaatatgcatgcagcagagttgcagatgatacaataagtaatacaaactaagaactagagcaagtgttgtattacacaagtgcacttgctcctcattaatatttatctttcatttataagaaattgatttttgtgcgtgtcatccatgcgcaagggccatgctaatcttctctataccattcaaattttattggatgcccccatatgtatctcacattcttactgccacaattctaagaaacaaatatgtactgtctttttcattttctttcctttaaatgaaaaaaaagttgcaacggtccttagagtagggtacataatcatcacccctaaggctcaaagcttaagacttttttgtgaaagcctcactatgaggcaagccttataatcattcttaaaattgctaagaaatatcttttcctaaggacaaaataaccttcccaatacatgcaagggaagcgtagtaaaaatattgaaaacaaaagacagaaagtgaccgctttcagttcaaatatacatacagcaacacatacattccaactccaactgcagtcaatatttaacaattaggcatatttcaaatgaaatcataccactttccagatactagttcatttaaatattgtgtggctgaatctagctaagaatataaatagaaagcaacaaagagccatcgtactgaaatatgttttagaggaaaaaagaaacagacgtacgcagaaaagtcagcagaaccagttgcagcacgaagagcattagtatccaagccgcagctccacactgcccctttatgcccttcaaatgttccaatccaatcaccagtctccccatttctcagcatgggactagaatctaaatcacacgaccacccataaagacttttcattacatgaattcaatcttaactaaaacattactacaatttcattacacattttttctactgtattgcaatgcactaataaagtaagaaaatttaaagttggattaaacaattcaatatcttcctacacatcaaatagttattcacttgtctaataaactaattcattcaaaacaacattaagattataaatcaaacgcacctttgctggcactaatgaggaagaacccatcaggcgtgacgggactataaaacaaatcgaccacaggacgcgaatggccatggcaaacaagtggaacagccaccttcttcttatccatatcgctcaaaactccaaatcagataaaaacccaaataccaaaaacaaaactaatccttcttctgatctatattccaattaaacagggcaacgaaaaaaccctaaaaccaacacacataaagtttcaatttttactctcctaaacaatcaatctcaaaggcaaaatgggcaataaatagaaacaaaatgatcagctaaacagaataggaattacgttgataaatctgggattgtacaaagaaatttcagtgcaaatagaaattggcggtatatttggacacaggtgggaaaacacgagttattttgagaaattcaagaaccgatccacacctcctaacccttgacaatggctctgattatgataaaatcttaaaccaaattgcccagaataaaattaaaaagttctaaatcaagaaggaaaaagaaaagtgaaaaaaaaagaaagaagaaaaa

SEQ ID NO: 218845 - DNA, 4081 bp, Cannabis indica
aatatgtaaggctaaaatttgtctccattatattatttgcaaattaagtatttccatttttttttttttataaaactatttcaaattaagtcatgagaacaaacaaaatacaccatttgccttcacaacttcaaaaaaatactatttttttctttggatacttacatgacacacgtgtaatttatatatattatatatatatatatatatatatatatttatatagagtttgactagagtctcccatggccagaaatgtttttctacatatctgaaaattctttgagtaaaattaaggttttctttgagtaaaattctttgagtctttctatctttttttgtactctttccacatggttactaattacttagctgtatatatatacacaaacatttaatatacatatatggttaattaatttgctagtggaaggtaattaattttgttaattttgttaaaataagaggagaatgttttaatttatattttgctaaacggtcaactaatatgtcatataattttattagagtatttatttaatttgtattttgataatcttttttgggagatgtctcatgtgatttattaccaacatttagtaaaggtatttaatgattaataaaattatattttctattaaaaaaaaatgtatatgtaaaagtatatactagtgaaaacaaatatttcatgttttaagaacaaaagtttcttgtcatgaaaaatatcgtagtcttttttattttgtgggtcgaagtaaacctaatctttttcagtttattcggaggtatggtataaagtttttggttgaaaagttgaatctttttctgcgtgagggcgtgaagtgcttctaaagtttgttatccaatctattctaacatatgctatgaatttatttcggcttcttgtaaaactggttcaagaaattcatagactttgcgccaaattttattagagaggtgataatgataataggaaactgcattggtgttcttgggattgcttgtgttggcataaagcggatgagggcatgagttttcgggatcttttcatcttcaataaggccttgctagctaacaagctagcttggcgtttatattctattccacactcccttgttgctcgagttatgaagggtattcacttttaaaaagagaatattctctttactgaaaaatctaacaaagacttttatctttggaggagtattctgtgggggaaagagttgttcttagaaggtggtcgttggtttattggtggtgggtcttctgtgagtattaaacatcatgtttagatcccgaaagtttcaactgctctctcttattctttgtggctaattgattcaatttctatgattagtgatctgaaattagctaatgaagattggaataaaagtcttgctgaatctttatttttggtgaatgaagtctcacgattcctatctattccgagatctaatcaacatcaagaccgtctgatctggccctataattcttcatggagttatacgattaagaatgggtattggaatgccataaggttatttggattgggttaattcgattcctctttgggctcatcttcttggtggaagtacctttggagtcttactattcctcctagtgtaaaaatatttatttaaagagcttgtttatatcggtttcctactaattctaatcctgcctctcataaagttcccacgaatcttcttgtccagtttgtgtgctgaaaaaatgaaacttcattccatgcactttgggattgtacaagtcttgcttccataattaagattaagttaatggattttgctcttacatctaaagagttgcctcaagttaactttttctctttcctccgagaatatgaatttattcttcgtagagatgagatggagttgcttctagttcttctttggtgcatttggtatcgtggaaaccattgggttcatgaccaaaaatttcttgatatcgaaggcatattgggttgggccttttcattttctcggacttatcaagaagctcaagtgagaattggatgtggtttctagtcatacttcagctgttagtccgattggttgaccccctaaggcactgtggtctcctcaaactgaagggtggatcaaacttaatattgatgttatgttgcggccttctggctattgtatggattttggagcggtcatgcgagactttataggacatttgtgtgacatttgcagcaacaacgacagtgcgtcttttaactcctttttttttttgccgaagctatggctatactggttgggttgcaattgtgttctcgtcttggatgtcataatattgaggaggagacggattgtcaaattgttacaaaattcgtaaataaaagagaggcttgtctggcgaattatggctcgattttacaagatatttatttagtttgtaataagcttaatgtttctaagtttttattttgcaatcgttctataaattctatagctcatatataaccttgccaaactcgttctttctcttgatgaggcaagagtttggtggtcaaaattacttgagtttatgtaagttttaggacttgttttgatgttggttaatgataattttcttttattaaaaaaacacaaaagtttcttaaaattaagaaaaaaaaaacataataatagagtaaataaagacagtaacatatcccaaaattttaaaataaaaaattgaaaataagtgaaaaaagtaaaaactagtaagaagaacacaaaaatctaaaattggtaaattgaagcacccatagccatatcacaagaccaaaccgtttacattgaattgtgttgtttttgtttgtttttttttttttaaaattaaaattaagtattttttttttaactttccttatgatatatgtccatacattgaatcgaaatcaaattcctacgtactagttaccataaatataattattaaaataaaaaaaaataattatatatttaataacatatatgagtgaaataaaaaagaatctcatgataataataagcagtgtactatagatcaagctccatttccacatgcatgcaactctctatatattattattaatttttaatttattaattaattatggagaatagagtgaagtacttcttctaatatgtttcataaacattatcattgttcaataattaatttattcaatttatatatatatatatatatttatatataaattcatactcagaaacaagagcaaatctaggtgttagtgctaatatttattgactctcacataactacattgagatacagtcaaatcccaatgtaccaaaaataaattatggagtcttcccataaatataatgaaattaatatttataatatataataattattaattattaataataaataattaatatatagaatttctctccatttttgtggctcaaagaatgcatttctagggggtgatgatatattgaccttgtttctataacaaaatgatttatgtaagattaatattatttcgtagtttaagaagccaaaaacaaaaaacatcaaatttaattaattaattaatttctcatatatattgtcatgtgggtcggactatataaattaatataaatcattatattatatatatgtgtgtgacctcatctgtaatacgattatttgtcgaatcccatgtacttgtttgcttgttttttaatctatggttttcatataccattcacaatataattagcttcatcaaatcaataaaattggacaaagtccaagaaagctacatataatatatgtatattttttgtttttttccctcattgatataatccaaattatccattttctcttctatctaattaatagttatatattaattaattaattaggaatagaatttttgatttggaatttaatgagaatttctgaaattttgtatatattcttcattttaataacaatatatatattatctttttttatctaatgtgtgtggtgtggctaccactctacagttcaatgtttcagtagattttatatttgttttgctataaaaaatatttttttttattatcgtatatgttataattattta

SEQ ID NO: 218846 - DNA, 7110 bp, Cannabis indica
aaaccaaaagtggagtgcattatttgattgtctttgatagcttgtactaaaactatactatcagtttcaatttcaacttctttaatgcccatatcctcaaccacttgtatttaatactctcttgttccaaaattataatgggaactgcaaaatgttactttcatgactgattgcttatttgatcaccaatttctaacttttatgaggaaatattttgttcctatttgaagcagagtagagaaaggtttgctttgaaggtatggcagattggcagtgaatcaatctcttgccatttgtagttatctagttttgggaagattatctgggtactctctcgatttattaatttactggaacatatgaagcttttcatggtagaaattctactgctcccactacatgtgctcatctttctcattgcaataattcatgaatttgtgttagaaaacttacttttttcatgcatttgccgaaacttatacagctccaacatattctcatgtctgaattcatctactccaccatccatatggctcaggatccaattgaatattattgcaactttaactagccatctatctagttttgaattcgatgctttagttaaattttcttgtcaatcagtatgatagggacaccttcacatgcctcgtttggatgacacatggagctgcaaagttgtacttatcttcatacattcacacacataaatacacacatctactaacaatattcaaaacataaatttaccaactgggagagttgaatttataaattttctctcttggttaattactactctttagtgtttaaattcacataattatataattgtgatcacgcataaacacgaggagagtagtaccaaaccaaaccaaatatggaaatgtgtaagtatataagaacgagtttgacaaacactgctagatctaaaggctgtacataatacaataaataggagtcactaattaagcatcttgtctaggattagtactgtctctttgcaagtgcatagactcctcaggatcacgtagcccccaaactcttgtttgttgttgcactaccaaaattgaagcagcaattctgatttcagagctagctagaagctcaccgatcgccccgagatccccacggtctttccattttgctatttgagtcatcaaccacgactctgcatggcgccttccaaccatgacaagttcatatgcgccatccagagacctcagtacgtcaagcacttccttcccacttcccacctcaacctcctggaacgagactctgtcatcgcgaaaggcgctgagcctgaacttgctcaagacatcagtgtctagtgccttgctcctggcgcttccctccactatgtctgtcgaagaagagaagcagaagagagtggtcaagacgttggaatgcttagacatgcggcctgcgtacgccaatgcctctcggtcgtctgcaccaccgaagaagagcactgcaattctatacaacgaagtgtttatgcaaagagaggatagatacttcctacggttcactcggtcaactagaacccctaccgagcaaggagccttttcgagaacattcttgttgaggtggcgaagagagtgagaggtctcagcaaccgaaccgtttatccaaagcctgtgaaaagggatgataataaaggttgatcgcttttctagagccaaagaacaaacgtcgttgtgcattgtcgagtatggggaaatgcccttaaagcaatgtacagtgacatgttcgctgtaatgtttttcaaacttgtggaatgcgttgaagattctctcagattgagaagggtattgggttgaaggtggcttttctcgtggctggtgggagacgaggagagatgaggcttgcccaacaagcttgatcaagtggaggatgacaagattgatggggctctcctcggtgggattggaggctgccaagaggtccaaaatggcagatacattctcttgcctatggacacaagctagcattctcaactcttctccttgcctgtgatgtaaaatagtcctccttctatatgccaagaaacgctttgatggatcatagagaactctcacaagaggtgagataattcctgcaacaatcaccacagagataatcataatggcaaagcattcttcgtttagtacctgcacattaatttatagggtcacttatattaatcatcatcaaccaactaaaccaaattgttatgtactagaccaaaaagtataggtgtataggtgacttacttgttcggtcttccaagccagaagcaagaaaagttcaacaacgcctttggagttcatgatgagaccaagggagatagcatctaggattggcattctgcagaagaggggagggattgctgatccaataatcttcccggcaaaagcaaggaaaacaatcaattgaatagtggctacgttcttaaactgttgaatggcaaatatatccattcttaatccacacatggcgaaaaagatgggcatgagtatttgagaaacaaagcaatcaagtttctctactaaagcagctccaagagggggaccatctggaatgaccagacccaaaaggaatgatgggaaaaatgcattaagaccaattacttctccaataaaaccacataccaatacactgatcagaacggcaaagacatatgcctcttttacaggttccccttctggggtctgtcgaattgcccacaaaacagctggacggactccaaagaatagtattgcagcaaaaaggccaactgagagtaaaaacccaaatgatattcttattgacctttgtgaagctaagtgtgttagaaacttcaagacaaagataaaccagtggcatacatcacatactatagatgaagaagacgctagacgtccaatctctgaattgagaagcctaagctcatcgagaaagcaagctacagtaggaaaggctgttagggtctgtattgaaaccacaaagggaagcgcacttgaaacatcaggatccaaagacagaaaatggtctatgacaaaggcaacaaatccagccaacgcataaggaacagagaaggctaagaatccaacagcaatggctctcttacctgatcttagaagaatgtaagggtccatcttcaccccaattaagaaaacagagagcatgaaaccaaaaactgataatgtctcgaataaagctctccctttaggtgggaaaactttggttgcaaatgtaggacttcttcctataaccgagggacctaaaattataccaccctggtgacaaaacataaatcagacataattgtatgacaaattaaaaacaagttctttataataaagtattcacttacaagaatctgagaaacaattgagggctggccaaatggtttgaggatgaaatagatgaagcgggtgactattgagatgagagaaagctgcagcagcaacaatggaagagaaaatgccaaagggtcatctccgaaccatataccccgggaattgatctgatcaataatatggcaaatgtatgaggttgtaacctctcccttaagatcattcttacccataaacattgggtccgatacgggcttaccctgccagcgtcaatggctagttgaaccttgcagcataataacacagagaggtgtggacaagaacccctctaatttgttttttatggagaaagctatggagagaagaggagaggaaacgctatggctgttgcatgggagaccaactgggagaaattgagacacatatgggaaacaaaagaaccaaaaatgagaggtaattgttccttcttatacgttgagacgtttgaccaatccacttggcaaaggataatttgtcactttggcatttccatacatccttggcttagtatttatgagatgtaactcggaattttatttattttatataatttttgtatagagacaagatagacatgtagaaactgaaccccgatttggacggaatgaaattaaaattggacgttgattaattagaatcatgattaggtctaacaatataaaccttgtcttaaagataaattatcaccatttttataaacttagcaaagagaatatgtgtattgaccagaaaatcagacgatttaaaggaactgaaaaactgatataaaagaatgtgtttgattcattattccattgaaaattgtcacaattgaattgatgattataaagaagaaaaaaagaccaactttatagttttctcaatacaaagaatatacagcctatcatatacagaaaataagaaacttagcagagacagttttgtgttacccatcaccaccattgatgtacaagaactccactctttctaagcgaaatgaacaagtccaagcattgatcgtatgtcttctcatacttggaactcctcacaccagggcagcatttttgcaatctatcgtaatgacactctaaaaatagctcatcaatcaagcatattgcccctgtttcaatcaacttgggtatcagataaaactcagttccttctacatccatcttcaccaccacgaaatcgttctgagttactgtgtttttcaaccaattagcaaaatcaaatccctgaatcttatccaggtcttgcatataacttgttgaaggtcattactggctaaatcctacccatccctcctcttcgtcttctttgtttcccaattctgttgcttgtgtctctggaaatctcgaaaaatagagtctcgttcctgatccaggctgcatgaggcaaaagaattacccctttctttcttttgtagtcttcatgaaaagtattatctgcctcaattgcatatatttcaaaagtcttgttctgttttggatagtgtttaagaaaccaatttcctatgcttgaaccataattacgagctccaacatcaacgtaaacatacctctgcttgaagctaatgtccaccattgaagtcagatactttatactctttatattcctcttcaatgaaacccaaggctttaatgactctttcttgatcaatggctctgcattcccaattatatgtcgtttatacgcaggaactgagcaattattcccaatggataattcttctccatggccaagaaatgcagtctccttcctcatcacaatctcgcgaactgatgaagaatcaaagccgtcgatttgtcgagccctaatcagtctgcaacagttgaacaaatcaagaaaagaattgaagctgtacaaatctttagccattgtgtgaaccacaaaaaacccacccggtttcaaagtccgacaaacttcagaagcgaaatccccaggtcgacctgaccagtccagacgatttttccccacgaactcgaaatcgaaggtgttatcatcgaaaggttggcgataggcttcgccggagaaaagcaacggcggcgaggggttcttggagattcctacagaatcaaacacgccaatctctctaagcgccaccacgtcctcaccggcttgggtttccacacagagagccttaaaattgtacgataagaaaccttcggattccaaatcttggaatatggaagaataataatcaacagttttacggtacctcttagtggtggagaagtcagggattaaagattctccggcgagagtatctcggtgacatacgtcttcgactccgggaagaacgtcgttcttggggaagaagcagcggccggagccacagtagccgccggcgacggtgacgatgaaagcaaatctaacggctagtattaaaacactgaaggagaggagtcttaagagataatatctgaggagaacaggttttgaaggtaagaaatcccattgttaatcaggaaaatacaagggtaagatttgaagattgagaacaattctgagggctattgtggaaatttgacagtgtctttcttctacggtctttatttacccgccaatttctggctactccaaaatccaaacggcttttcaagaatttaatgtcgtttatttctttgtttgagacgacaagtctagttttttttgtttttctctcgcactaatgtcgacttgtcgtttcatcacaaataccaagtaagtttttttttatatcttatttacatttttactcgggtatatttttgttttttttacaatcatataaattttaaaatatgattttaaaattttaaaattataaaaatacttttttctcaaaaaaaataataaaaaattaatttcataacaagtgaaaatcaactataaataaactataaaataacgatatttgctggaacattatttataaataattatagcttaaatgaataatattatttgtaatattgtgtctatcctatcttaaaattaggaaaaaaaatatactttattaccgatactcattgaacaccaactggttgaagagagttattcccttcatcagtatcactagcatactaggcctaatatcattccaagtaggtaaattcacaaaaaacaacactaaattcccatcttgatgtaacgtcaactcaattcgtcctttcaaaaatacattttccgttcaacgactcaaaatccttcttcgcatcacaaactctgtccgagcaaaaacgtatcattcgggtgatcaaagctctccttaagcttctcagacccaaagatcacaaagtttcttttgccctgcataatagcgtgagaagcttctttgcttactatctccgaactccataccacttttccttgagtatcaaccaattcaagtccccagtcagctgttaagttgaccagggaccccctcagcactactgccaaggaatttgttttagtagcataccaagcaactgttttgtctagtatgtttccataccatataaagagtaagaagaaatcttttaggtttgtgtttttgaaaattaaaagcgaattcagttgaaggagagagccattgtgatgagttgtcagttaaggttattgttttgtccattgtacgtatatttagttatattgttagttttatttttgttatgagtatttttaaaattttacaaattaaaagaaattatttatttttttaaataatatttaaagatttaaaaatttgagaagaataaatataaaatttaagaatattaaaattgaacatgctctcaatattaaattt

SEQ ID NO: 218847 - DNA, 7317 bp, Cannabis indica
ctataaaaatcgttgcaattatcattctttaattatatatatccttttttttcaaaatagtacgtttgctcttgtgatcatggagtctcacgtatatatagttgcggaagggctattaaataactttaattaagctgtctaaaatgtagtttataaacaataaaaacattaactcttatcgatactcataattcattagactattatatatacttttattttctgtctaaactcttacaccaaattaataaattatttatagaaatgagcaaaattatttacagaagtactggatatatatttgtaataattcatattacaaaactcttcaatggtgatagttaaatagggatgacaaatcctatttattctttaaaaataattaatcgttttaagttaaaaatatgctatacatatctcaacatgaactatagttgagatataatattaatggcaagtataagaagagaagttattattacagtgtgccaaaaacaagaagaaaaacaaggaaaaatgctccattattttacgtactcttgactcttgagaccctattgtctttattacattgcgtacttgggctttaagtttttggtaaaagaaaggacccttaatattatatagagatatattacctgatcttatctcagtgagtggtagaagtagaacaaaggtcatttaatatatgacatatctacgtacacagtaataggcctagaccaactaggctagtaagatcagcactatataaatccaaccccctcatgaactatttcacataaactctcatcccttcctaattgagtactagctagtattatatttctctagtaaagttttgtgtactagttatatatatctcaaatggagaactcttcttcaaatcatcatattgcttcttctatactactagtactactacttgtacttgtaatgagttttgggcaacaacaagctgaggcaagagctttctttgtgtttggagattctcttgtggacaatggcaataacaattatttagccaccacagcaagagctgactctcctccttatgggattgactaccctactcatagacccactggccgtttctctaatggcctcaacatgcctgaccttatcagtaaatctctcattaattttctctttaattatctaagtatacatatatatgtatgtatctctgatttgtgtatatatctattaacttgaataaataggtgagcaaattgggtcagagcccacattgccatacttgagtccggagctcactggagaaaggctactagttggtgcaaactttgcttcagctgggataggaatactcaatgacactggatttcagtttgtgagtaattaaatatttgtttatcaaaaaaaaaaaagttattataatgttacaataatattattatattgattttaatttttgcagcttaatattatccgaatatacaaacaattggagtactttcaacaatatcaaagcagggttggtgctctgattggagctgaggaagcacaaaggcttgtgaacgatgcattggtactcattacacttggtggaaatgactttgtcaacaactattacttggtccctttctctgctagatctcgtcaatatgctctacctgactacgtagcttacatcatttttgaatatcgcaaagtcctctcggtaattaattactatctactctgatctacgtttttattataattataatatacacaaaatctatgatggggatatataataaattagtataatgtagctcatcatgtcacgagaattatacaataatagagtatatatattatatatagtgttttccattaccgttttaaggattagtatgttgtatatggtaccgaaagttgaaaccgacatagaagaaaataatactcaaatagtcacaacaaagtaagggaaaatgattcttttcaagtgagaaaagtgggtcacaaatttattgatcaatttattattgtggggttggttgtgtgtgtttttgcagtgaggcaactgaatagttatgacaatcttgcttggttggtgagaccaacaagcattatgcattttcattaatgggaccatatattatatatatggaccaatgttttgatgatattactttattcgtttagttataataaaccctagtttgttggaaaacaaaatataattcaacataaattaatgctcttttaatcattattatctctctcattttatagtgacatttttatttgagcatatagtcgcctaacaccatgacacttcatagtcggtggtttgtaggttaattttaatattatgatccgatcatgtgggacaccactaaatgcccttttagtaacattcttgtaaaaagtttaattaggcatgaaaataataattataattaatactaatgtgaactatgaagtgtatgtatacattgttaactacatgattagggtttttgatatcatgagtttgtgtgtctatgtatatatttatagaggctgtatgagttaggagccaggcgagtgttggtgacaggaactggaccactagggtgtgtgccggcagagttggctcaacgaggcagaaatggtcagtgtgcggtcgagctacaacgagctgcagccttattcaaccctcaacttgttgacatcatcaatagcctaaacagtgagattggctccaatgtctttatggctgcaaatgcatttaatatgcatatggatttcatctccaaccctcaagcatacggtatgcatatatatatatatatatgtatatgtacacatgcaaatacaaccctaattatatatattatactatatacaatatataaggttttacaaaatcgagataagtagatggatcgaggaaaattctattaataatgactcataaatgtgataggttggtcctctgttaataatgaaaagaattaatgaagttgggtccctttaataatgcataaagtagtaatatatatagaatgagataggggttatacgtctagaacttcgagctatcaaatctattcacaaatgtcaaatagtataaattttcatttattgtttgttgtcaacctaaagtttaaacaaacaatataaaattattcaatcactaacgatataatatattgtttctgatttaaaaaaaaatatcactaataccacaataataatatatataacacctcctaatagtgttcgaaaatacaatgtttcttagatttctgttataataaggaattgaggctaaatatgacttatttattttatttatgaatatatatatatatatatattaggcaggcccaataaataagaaacacctggctcaagctagactcaatttgttgcaacttcatagtttctctaaacttatattcctcaaattttcaacagaatttatatcttatacatttgttggtaatatttgtaggatttgaaacatcaaagattgcgtgctgtggacaaggaccatttaatggaataggtctttgcaccccagtctcaaacttgtgtccaaacagagatgcttatgtgttctgggatgccttccacccatcagagagggcaaacagaattattgtgcagcaaattctggagggttctaacaagtacatgcacccaatgaatctcagcactatgatggcattggactcagctaggacctagagaggagagtcttttactacttctcattattacattatatatcactttctttttctttttttattttattgttctacgtgggccagtttgtcagtgctattattttacactttaatgccatttgtaaaattttattaggatattccaataaggtaattagtttcagtttgtctctttttttaaagtattggtgcaattgtgtttagatgtgtgagagtgatccaattgtgtatgctttttattgctactttaatggaagattaatgtatttatctttctcaaataaattagcttaacagtcatttttgttgattgatttttccaatttttaaaaactttattcttgttactttttcattgtgatttgagttttaatattttaatgtatctttctttagtcatgaactcagagttagcttttttttttttaagcatccatatattcattacatgcataacttatgattccatcttaggaccctccacacatgtactcccagtaccccttatggccccttgggttttgagctagcctcgagtggttaatcagagagagtccagtccataggttaccaaaattggtgattgaatgggcgaagaaaaactacatgtcgctgagaagcaacacatcgggccgagcccgtaagttaatttgggctcaaacatctgcttcggcccaaatagttcgctaaagaaaagccttttctacctgctttcatcctcgggccttagagaatcactgactcgctgtttatatagggccttttaattgaaaactggcctcaagttatttgggctgaaataatattgggtttctaaacttttcaggatgaatttaaaatttgttttattctaataaatgagaatttaatttacagcctatcgtggaattttaaaaaaaataaataaataaaattacagcctatcgttttcaccatgatcaatgagcatgcactctcttttattacaatcaattatcagtcattttccaaaataaaaaaaataaaaaaaatcaattatcagtcattaataaaagaatttatgactaccgattattattatagaaaagagattagttttctataattttaataaaggaaaataagtaacattaattttatattaaattgcaccacaacttgagatattttatttttttaaggagaactatttagtcaccaaagccgttgtagtaaataatacccacctagttcaaaaaaaaaaaaaaaaacaagattgcagttaaaatatatggttagtaaaataataattaaattattgggaactattagctagctaggttgaactttaattaatagacaatattaaaacaaatagtactatattgctgacgtgaagtgtgaactcaactaacttatttacgtacatgcatgagctttaattagcctccaaatacgttgtgtgaatataacctaaagctaattaatcaactaatttgttgtccttcatgcatgtctttttctttctacactacagtattaatttttttattactctggtcttaaatcgattgtttaaaatttcttaattatacagtctcaaacttaatagttaaggactttttttaggggtaatttctgactctatagtcaatgttcatatatgcattagagagagctcaaaaaaatactgttttctttacgaaaagaaaaagaaaaaaggactcgaattaaaaatgcatttaaggatgtgtaactgtacatattttatttgtatttgcttagtttagtgtatactataaacgaaaataataattaattaagcctatatttataaatgtaacaagtacctacatattataagtatatattattactaaaattttagtcttttctggaaattaaataagagctccaaaaagtaggtggagaaaaatggttgaagcatattcatagctagctagccctaaagaagctttgccagttgaactgcttatacagctaagtttatttgtacaaacaataatgccctttgagtagttggtgtgataattaaataaggttctagctactttttattctatacaatatatgatataaaatatatttatttattgaggctgatctagcaacacattttgctattagtacaagtattgtattattgtttacatattactctcgtggtcctaattaaagttctaaataaaggataaacttgaactctaaaggacaaaaaaagattataagttgtgtaggacccaaatcatcaggtacttactctctacctttcactccatttctaaatatttatttatacacataaatataattatttaataaaaattattagtttaataaattttattattttttcattaaaaataacagttaaaattaacactattataaaaaaattaaattaaaaaaatataaaatatgatacaactttaaatttaaattttatatattaaaaaaaatacatgcaagaattgaattattaaataaaatctctatttaaaaatactctattaaagaattaatatataacatctatgttaactcggaaaatttttcctagtgatgtggacatcaatatttgacacgtggcaagaaagatgacgtcacgaagttgactagacccgagtcatagcagtcaacttgggaggggtccttagccttgcgcccaagttgactttgggagctcggggatggaagtttgaacttgtttcaactcaatttctatcagtattatgtaccattaagacatggagaaatcaaatctaggcctcagaagctgaaattacatgaacctgtaccccaaaagtcaacctgggcatctagggtttcacccagtgcccaagttgatatcgttaaactagactgtcttagtgaaaatggatcaaactttgtattggaacatgaactagacataccacagaatatttgaggcatcggaatcaaattcagagcatgttcttttttgagcacccggtgcctgagcacacgatgcctgagcacctagcaagttccagcgcccaggttgacattttgtcaacctgggccgattccaataatattttccaagaagtctttcgatcttctccattttaagcaaagattaagattaaactatttctggggaccaaaaggaactttcgaagggtccataaaggggacccatcgctcaggttgacatattatcaacctaggttgtttccattcaagttctcaaaaaaagtattttgggcattttttccttcatcaatagattcaagaaaactcggggagaaagtcacaaacccgaggccatggaagcagagcccagtgcccaggttgacaatcaacttggtgcgctagttttgatcattcaaatgttaaatctaattcgaccatttaatccaaaaaggtccaaaatgggataggataccttatcctcaagttcaataaccttggaagtatcaaaatgacaacgcatgagcccaaaaatggcgtacccaacgcccgggttgacaaatggctgttggattatgttttatcaggaactagatttactaacaagtatgtttcattaatatcctaatatgaatttctaaaacaatgaaaattaaacacatataaagtttcagaaaaccttacattgggtccagcaaaataatatgtctccttccac

SEQ ID NO: 218848 - DNA, 7871 bp, Cannabis indica
atttctttaaaattacccgttcataggtaatacccattaaaagtacacccatatatatgaaatatatattgaaaattttatatactaactaactagtatatatttaaaattgtataaatactttttaaaaaaaattacaaatatctttatatattaaaagtgcctatttaacgacatttcttagtttaacagaatatacttaaaaataaaataatattctgttaaatttaacgatgttaataggtttgatctcccgttaacaaataaactcaataattaaacccaaaaaattaaacaatcttttaaatattaataatctctttttaaaataaaaaaaaaaatcatcttacccacatatctctagcaaacctatcttgggatgactcattttaactctgtcattgactcccttaaaaaaataaataatatatatataaacaaaaccatatcgtaagcctaattttcccaaaaaaattccccccaaaaaaaagaaaatatatataaatacatataaaagtaaaaccaatttgcctaacttctctcaaaaaaaaatcgtaagtctcttaaaaaatttaattcccctaaaatcgtaagtttgtttatagcaatgatataattgctatttctttataaaaaaaaaataatgaaaaaatcaaggactaataaatctattaactatagagactaagtagtaagttttacattttcttttatttatagaagcttcttacatatactttaattaattaatcccataatctccacacaagcacttttaatatttctataatcacttgactagcttcaagtggttcttaagttttattttaatgccatattatctcattaagtcaattatttatttatgtttgctaaagtttctgtcaattattaggaaagggacatgtcatatctgtcttacttttcttcagcttattcatctatcatgctatcaatttttcctttttgtagttaagcaaaaaaacacttttcatttttgtagttaagcaaatacttttcttttttgtaagctgaaagaaagaatcattattatttttctttgtagacttaacattattttattattttcttaaatagagaagccaccaatgataaggaaatagcacagaagcaccatacaatttgctaaaaagactcccaatccgagaagcagcctaccatagtagacttaagatcttctaatattacatttaagtttaattcagactctaggattattaaaatatatgataaaatatattacttttaaagattattagagagctgttaaaatgtgaaatgagaagagcaactcatgaatcctacatattctactatctttccacaaattaacaaaataagactctctaatacaaatatacggagtaatctttatattgtattgcctttaaaattagtttaattgcataatggaactatttgaaatctactcctctacaaaagatttggagtaaaggaaaaaaaacaaaagtacagagaaaacaatttagtaaataacacattcaaaaaaaaacctcagtaaaccgcatgctacagttgaactcattactcatcagttcgaaagaaagacaagtcagatttttacataccattctctaaacttgttttctacaaataaatgtcctctctcagtctcaccattcaccaagatgttgatcagatcaccacattctcattccccattgatttacattgctcaaacaaaataaatacatgtgaccattcttcttggatttggtatgtgaccatcattttcatcttatgttcataagcttcttgcaatcttttcatacaagtcccgaggccaattcctactcgaattagtcgcaataaaagacgcaatctgcaaaacacaaatcaatccaagttcttaactacaatcacttctcacattttattcattttcgcataacaagaaatattagtactgcaaaaaacacaaacctttgccctcaaggcccgtagcgatccatcggaatctgtaacattgtccagacaagtaagggcaactctgagaaggtctggaacacaagcttgaacatgaggagacaagttttgaaacacatcaggcgcaatgtcgggagttcttggatccagtggaagaaaggggagtcttgcaacctctctaagagcatcgatataatgaccaagtttaaccaacttgtgaactgagagtattgcctccagttgtcttaacactgtctgctgttctgtaacgctctctctttcttgaggactgcatatgcacatttttaacatctttagcgatacagaaaatcaatcgaagtcaaatgcaacagaaactatattcagcaccgctctccaaattctttttgttgcttctttctattcttatgaattaagaatgacaagatttatcaataaacatgccttttatgtttaggattctctaaaatcctaacactgtttgacagtaacaaaaatcaaatgaagtgaaccgagatagagttgggaatgacctgacttcaagatgatatttgtacgtctccaatatctcatttccagaatgaatgaagcccgaagtccggctttcaccatccaatctaccgcgtgagatggcacatattgcttcggagagacacttgttaattgtatccaatgccattgaaaatgccccaattcttttttgaatttcaatagactgaaaggcaagagattaatgattacaatagaattccgaaaaagtctaagaatgaggtaatgagatagcactaatgctaaccacataattcaaagaagaaacataaaagaaagacaacaaataaaatgcagatggtgtaaagaatgatgacaatagagttggatcaagtatgaagttaacatttttttttatgacaatagagatatcaatatgagtttgttctacccctacaaaaaataggatggtggaccaagtatgaagttaccagaataatgataatcatggttcgtatagaataaaccccttacaatcatggaaccctttttactataaatgagtcaagcacttgggttctattttttcatagtattctaccagaataactcatgtccagatgggaggaaaatgaatatcataagaggcaaaaacagaagagaaagtataaagtaagaaaattatattgtttgtgtatatgctgctttcattcaagaaaaaagcatgtgaggattaccttgtcgtataatccagcttcctgacactggtgagcagcttcaagcaagaactgctttctagatttctcgtcattcaaaaaccgattcaattgaccttcttctcccgcacctcttgtaccaagtagcagatagattccgctatctttcaacaacagctctgttagaagttgttttagcatcaagtttttctgtcttcgttggtctacagtacctctccgggaccatgacaactgtcccccaccaactgctgcagcagcttgagcgtaatattctagtgccattggaagattaccaagacgaagatacaaagccccatactgtctaatcaagctagatgcctctgcattagcatccatcacccccattttctgtccacccccaacaccttcagaaaagatttcatggtcagccagcacaattgatatgtgtgcagcatcaatattataaccttcatctcctgcttccttagacaagtataagatagctggtatcaactgaatgcttaaaagcaaaacatatggatatactaaagggtcctttccatttttggtataatatgagggctcaaacttgtttaggtatccctgcaaatcatccagagtgtatggaaccaagttgtcacttataacaactgaagggggaccaactgggcagtctcggacagctgacaatttaaaccacaagaagtcctctatggtattgaaaagtgtgggtaaatctctcaataatctgtcaatgtgcttgcgtgacccggatatgatagcatataataacagctttttcttgtcatatgcagctcggctcattcgatcgcccattcttaacattttgtcacattcttctgaggcagcagctgcaacttctttaggcaccatacctcccgtgttgatccattccataagctgataatttttatattgaacaaaattatgaacaagaataacatagccacaattatcaggtatgataaaggagataacacaattatatgtatatataccagaggagcaaactggtgtgaagaacgggaagacgcagcaacatttctagcttcatcataatacccagttctcaggcaaaagtatatctgtctcagacaacaaacatgatttagtatgaaatgaattaataacagctaaactcaaatgttggctttatattcatttactgagtaatcaagttatgatatacaaacttgtccgacagtgagtgtacatgcacaaatctgagcagttagaaattaaaagtgtttggtaggaatgagagatgggtggatggagaggaatggagggagagtgatggaaggagagattactataaatgtttaagctctccattcatccatttctcgctccttcctaccgaacatagcctagagactcaagtattactaaaaatgtttaatgacccacacgtaagagaatttatgcctaaatagcctgttgcacaacaagaaggcggcaaggtaaagcaaaaaacaaagtcggactattggaaaatgtcttctgttttacatttcatattttcaactccaacttcaatgcaacaaagactaatatgaattaaacaagtattagatggtttgaattattagagcaattaatactgcagacctgctgccaagttgtatccacaggaggctgccttctagaatcacctgcatcaaaatctagaactccatagtccctcaaacggatctgtaaatttaagaacgaaatacattagacaagaagcaatattcagaatgacatgaaaaatgcacagagattaaaacaaatatgctaacccggaggaatgcacgaattctttgcatgtttccaacaaccccaccaagtgcagcctacaatgagagtaattgtgaacatcaaaatagaaagttccctaaatacaacaatagacacaacagcaaaagaaagaaatttgaaatgaacaatttgagtataagacatgagcaagcatggatcaataaaattacagaattactggaatttacactacaccgagcatcattagaaaaattaaaaaaaataattcccaaacattaagtaatcttacctgggcaggatgactttgtatagtatccattacatatttctcatgaccgcgctcaagatggcgccttgcaccaataattaaagacatcttttttgacacgttttttggaacagacgagtcttcaccagtcaatgcctatagaatagtcaagggaaaaaatgataacttcccctataaataagccaaagaaaatcataaacaatcggatataaactaagcacctaaacatcagatcgagtacctgaataaggtgccaaatcttctgaaaatgaacggattttccaccagatgcatcaaggcctaaactctcataagcacccttaaaagctgtagcaggctaacaacagaaacgagccattagaatcggtattttatctcagcttaaacaaaacttaacagcaatttctaaagcctcactctgtcaggatgtcttttagtaaagtgaaaatagaattttcaaagcagcaactcaatcactagtcaaaaaactgaacttcaaaattcaaagcagcaactcactcatttgttaaaatattaatatgataatccactcaagaatcaagtttaggtgctctttcatttactggcgtgaatcaattataataggattaattacagggaagaaaaaattgtttcaacttactttaaatggtaaaccacgttctcttgcttcattcagattctttacaacttcagcatagacagctgcttttttctctaggataggcttgttagcaagaggtacaagctgcatgctagatgcaccagatgaagcttgagagctagaagtcatcgacactatctgaccagagcgagcacccccactactgctaactatcatgttagttctaggtaatgtggaaattcgactcaagctttgaagactatctcgcttttctttttgccaatcctcctaccaagcattaaaatttcaaaacaatcaggattcaaagcttaattatcacttcacaacattaaatgattagtgtaatattctaatcattaaatgattagtgtaatatatatccagtgtgtcatactaacctccaacactttcaacatgtaatcattaaaacttctgaggttgtccttttgagcttcttggacagctgaaataattgccatttcatggacctggtgcataggtatgattcagaaatcattatcagtcacaaacatggccaaattatatcaagtggttagtagaaaagctattttctcagagtcaaataaagtctcttcttttcttcttttatttatttttgttcttgaaaaagagatatagacatgctaacctcctcccaagtttattaggtaacctcacttgtggcggagggaaaccaattttcaggcttgcttgcagctacattgaacgattctctcttcttaacaaaatataaatatatactacacacagagagagagagagagagagagagaaagagagagaataaccctaattcacatgacctattttagaattttgaaatatatgtgttttaagtagctaaattggttacacatccaaagttcaagccactctaacaaaagtagcatacaaaaaaagttactcctaagcaagtacagaaggcaataaagaacttttaaacaaacaaacaataacgagcgcagacgcaaacgtacctgctgcagatattcctcaacagttgttgcctctgcagggaaaacatcctcaaatgttgtcttcataaaacatacagtagaggaaaaacaaagggctaatcaatcatcaattttaaaaatactgcatagttgttaactgaaattcaacaaaaacgccgaagtacaaaagcaagaacttcaaaaaagacaactactggagaaaacaaaaagagaagtggctggcgttggatctaaatactattgcaaaaggtcactgaaatgaggggaaaaaattgaaataagggtataacaaccaaacttattttaattagctctccacacgtccaattaaatttttgacagatacaaaaaccatatgaaattaaaagtggaatggtttaaaatagagaaaatggagttttttttatttattttaaaagatagaaaatagcttatattccaatcccaacagcttatccttgaatcttataagatacatcacaaagacaccaatttctctatttttaaacccatgggaagattatatagtaaatgaaagaaaatttactttcaattcaaaagacttcaggtcccgcgcaagttgctctgcatttattccctcccttgcaagcagccttcaaaacaacaaaatacattaagaaaataaaataaattccaattttcagagaactaatacatgaaaattgtgaaatccaaatagttaaacagctgcaccaaattctacatcttctactcaagaataaaatatataagaaacacagcaacaacttctgagtaatcactaaagtaccttgtggcagcaatcgattgagatggagcctcagttcttagggtttttgacttgagcttcttagacaatgtttctaactgatccaaatttctctgaaagaaaaaaaaacaaattcataagctccattagtcacattaacatattattgaagtgaaatttaaatcttgcatcaaaataaacacacata

SEQ ID NO: 218849 - DNA, 4574 bp, Cannabis indica
aaaaaaaaaaaataaacgagtaaatggcactaccggcagcacgacatataagatccaaacagaaataggatagaaatggcacaacttgttataaggtaattcagtattggtgagcaaaaaataggcaccgtcttgaggggaaatattagaaaaccttatcccacataggttaaatgtaaaattactaagccatatataagatcatgggcaactctcctcctcaccaattggttttgagatggagccccatgattcttgatatggtattagaattaattcttacctcaagatcttcaatggtgactacttgagctactggtatgaagcctcatggaatgtctacaacttcttgcaaaactaattttctccctaaaccagatgctctttatggccttgattagaaagtggttcacctacaggtattttcttctcttgtggttccacaaaccatctacttctttctttggcttttatttcaccaagaagatttgttaaaagcttccatggctactgttagcaccaaaaaaattaagatttacattactacacatgaattgactccataacgaaaattgataaaatcacaaatgcccagaccatcgcctaaagtgcagctgcctagaatcattatgtttgaagtgctcccgtcaatgacgtccataaacaatggtgaagttgctaaaattcatctattctgactggatttttataattaacatatccaggaagacaatctttatcattccttgagtattgaagatcatcccaacataatttaaaaatccaagaacaccatttcagattgacatttttttcaagaagcttcgtcatagactcaaaggcaacaccacatttcttccgcgtagactctctcattcttgcctcacttatccattttatcgaccactgaagataactatgaatcatgctcaagctgtgcaacaatctgtcatgcctaaagagcaacccaagtctacacttcaagaaaaaaatacttttatcggtgagttttctcaccgacaaaagtatatgtatctcgctgacatagttttgccaatgacattttatgcaaacaaaggatgttggcaatggtttgttggcattatgagttttgctgaaaaatcaacgtaactcgttggtaaaagtatttataccactgaatttagttgttggcataagttcatcactggcaatttgttgtcgactgaggggtccatgatgatgttttgtcggcgagatatggcaccggcaaaaagtttgcgcctaatttacatttaaacgtgaaaattttgatggcgtattaatgcgctggtaaaacttgggcaattaaaaattagtttagtttttctggcgccttatagttcgctgagaaaattatttttttaaaatatttatatttataattaaattaaaattaaaattaagataataataaataaatataatccaaaatatattataaaattagaatttttattataattgcaaaactatataaattgtccaaaacaaaataaaagtatttttagtttacaaatattaatattatttacactacaaagtccacagcatcgtcgtcatcgtcatcatcatcactgggatgggcagtctatgaagatgacccaacttcaggaggctaaaatggtagaatcagtggaatctgaggcatctggagcttattaaatccttgaacggtaccgaccaatggcatcatttgttgctgaaatatggtcataatttgattctgagtcttcatcatttgttgttgccactcgttccattcttcctgctctttcacccttcgctttagggcctcatattcctcctgggtgactatgggtttccctaaggcacttgccctagaagtttacctctttgcccacgtcctaagtcttggcaactagcccatccctctcaagtggcgtgactactcacccagcacctgtggcataacaggcaagtctgtaggaaattcggtggaatcgagattgtactgttgtgggacattggttggcactggttgagtatcacaaatctcaaccaactttttcctacaaaaaatttgaataaaccgttagatttgaatagaaatgaaaatatagaatgagtttattaaagatataaaatcacttacatacagttattgtgtgtgtacatcgcgccatttgttatccttgcagtggaactatgcaaaagtgtccacagcacgggaaagttctcccgtctggggatcaacatatctttatataatataaaaaattagaaaaatattcttttgaaaaatatgaattttttgacaaattaatatgttgaaaacatcataccccgctcacaatgtggccaactatggtcttagatcctcatccaccttgaatcttcatctgtccttggttttttgcattttgttcggctcttgcctataatttaaagtaaatttattgttagcgaaatgagcgaaaatcataagctaatggatattcaattttgcaactttcattttatacctgctattttgggaatttccagtatgtgataacctctgcccacacctccagtgtcaccatatctagacgtgatatcctagtcccttccacctctccatatttctgaatattcttattctatgcctttttcatatccgctctccagtcatatagcccctttgacattgattcaacaacgtaattctcaaacataggattgttagttgggaactcaaacatggtctaaaaaaaaaataaacattaaagttatatatatttatttttttgtataatagttttgatctatcgtaataaaaatttgaatgttacagctattctatcccagatagtctgaatgatcgtatcctcaacgtcttcgaactcaaacttgttcaaaggaatggtattgcgaacaagaaacttgatataattgttaaacttttgccatagtggtctattgggcctccaatccccatatgaaatctaaatttcaagttctgacccgtaggctgcttagccaattcttgttcaatatttttccccttgtactctctcctaacttcctttttcttactattgcttccacctgcatcagccattctacacattcaagccacgaataattaataaatgaacctattaacaaaacaaacatgtatttgatttaattaatattacaatactttaaattctacaattcataatcatcatcatcgttaacagttacattattttcattgttagtataaatagtgtcttcatcatcactataaataatgaaaccatctaaatcttgacggttgggctgctcaaggtccctgttggtcactttaattggaccgacatcgtccagttgtgacagttgaacaattaattggattcatgaagattttctttcttgtttagtcatggtctcatgatcattttcatttgagaaattctagatattgcggcggggtgtaaacattgacaagcttccaatcgacactattcttcaagtcgcgaatgcaatataagaaattagcttgggatgcaagtatgaatggtttattttggtactattcacgggcgacacagacactagtgaaaaaactattactttttgttctattatcgtttgtgtccaccacttggacctaaaaataataacactacaattcttcaagtaagtgaacttgtatacttgtttatgtacgccagaaaatttcttaccaccttctctaggcaccaaaatacaactattttgggtgttacgattgtcatctctattctaaactaggattttaactctgttaacaatacatctaggataacaatagcatgctagattagagggatttctgatggcgtacaactcatttgatacatccacagggttatctgctaggagttgattgatctatcattgagtgaaaaatgtaaatagaaaaagaaactgtatttgaatgacaaaattagtagaaatcaatattcactcgagacttgaaccaactaggaaactcgttctcttgaattgtgtcgagattttgatcactcctaagttgtacctcattcctatgctcactacacataaatcgatttttgtaaaagaatgtcatcagtgaagagaactaaattaagaatacaaaaagtatcttagtgatatacttctccacttcattacaatttctcagaatgtaccactctgccttaagattttcttgcattgataaagatatgatggtccttgtaacaccctcacaattaggcacgttacctaaggtgattaagaaaccctaatcccttaaacaagattattagaaagataaatacgggtaatttaaactttagtcgaaaacagattgaaaatagaacttgtaataaagttaactttacaatcaaaattacatgtttcgggatcccaaaagtattttacaaaatattacaagccttttcactagcaaaactaagcggcaaaatcagtttcaaaagtaaatcactagtagaccccacctgcttggtctagcgtggcctaaacatgtacatacatcgcttagctctcgcactcatggttgataagagataaatttacatgttacactcacacgtcta

SEQ ID NO: 218850 - DNA, 7386 bp, Cannabis indica
accttctaaggttccacttggtgaagcatatcatgattgtattcaacctggaaaacgatactcgttcaaacaagtgattcatcaacagagggtgttaggaagaaaggttattttctgtcacaacatataccagacttgatttttgtaattttgtttgattaaaatttttctgatgtatattcattatttcagcttggtttagtgattgatttgaccaatacatctcgctactatcaaacaacggatctgaagaaagagggtattaagcatgttaaggtcagtagtttgacccccatattatttcatttcttttttggtgtgtttcctcacagacattttgagctaaacttttcctgtgatctagattcaatggcaggggggaggggctctgcacctgacaatcagtctgtcaaccagtttgttcatgaggtttgcttttttatcgatacatccatttgtatgcataaatgatgctttcacgcatatacaatattgatattatatttttttttaatatttcaactatcatcttattggaaccataatcttattactctattatcttattggaaccataatctattactctattagtaatttatgtatagattgttttttgtggatttcatatttgccacctctttgtgtacatcagcccggaagtgtatggcaacaaattgacaatttcttttaatgtttgattggcataattagtagttgaactgtgtgcaacaggttcatgataatatgtgcttctttatgttttagtcttgtagtatttatagattgtttctttactatttgagtgttttattgttaattgatttacagagtaagaattaatcaataatgtaaccttgtgataagaaacttccatttctgtttattttttcttttccaggtttcacaattcatttcccgtcaaaaacactcaaagaagtacatacttgttcattgcacacatgggcacaatcggacaggttatatgattgtccatttccttatgcgttcccaaccatactctgtcagtgaggtcagtgatgtgcttggttttacatgttttagtttggttaatcctcgatcagcatcttatgccttccttctttgccttccatgcaggcaatagcaacttttgctgaggcacgccctccaggcatctataaacctgactatattgatgcactttacaccttttatcatgaaaggaggcctgaaaaactcatgtgtcctccgactccagagtggaagcattcttgtgatcttgatcttaatggggaagcattggccgatgatgatgatgatgatggagtccccactgcttctgttgaggtatgcatgttttatttagttaactacgactctgtcttgtttttatgctatatgaatgtcatagtaaattagaatctaccgcacaatgtgtggtcttactcttttagatgattggactaagcgcagtccttgtgtttagtatgataggagtacgctttaagatgaaagaaaattatgcaagaagatatggttgttgcttttgtaaattgtcaaattattacatctatcattaattaccaattacaggggatagatgtcacagactcaatgactcattgggtgcatgtctaagtaaatacatttttgccttgcagttcatattaaatgaatgcagatggctaggtaatatggttagttgattttgttttttgatagtcctggttttctattctatcccaagggcaaatgtttgtcatcttgttcattattgaccatctacttaataatatattttattattttattgtattatcctcttttagattctgataaatgttttaaaataattattttggtttattctatgaaatttgagtagtattcgtatattatgacactaatttgtatcaattttgatttatatcttctgatatttcatcagcaaaaatatcattttgtcttgcgctttttttttttctgaacaggaactatttagggttgactaattataaataacgtgcaattatatttagtattgctcttctaggactaacagcaatcatgcaaataatgtaagaaccaagaatgaattttgtcaaaaaaataaaaaataaaaaacagaagacaaggaatgaatgacatagattatattttgtattgtattggcttttcaactatcttataatatacaccatgttccgatatggctattgtatctactttctttcaaattgtttgtgcagtgcttgtttatatatatgcaaaaaagttgtagtcattatagatctttatccctgcctcttgcaggagactcaggaggtagacacggtgatgtcaaatgatgatgttttaggggatgagataccttgggaccagcaagaatcactgcggcatttctgttaccaatctcttaagttgggtggtggtggggtaggaacttcatcacagttctatcttttttgctcttcatgatccttttaaaattggtgaatttaagttttatttaattaaagtctagatattatttaggctgctgtatcgttgtacccttcagctataacatctataataaattacattccattttcctccttccatattttctattggacatgtgctctctaaatttagctagatgtgtattcttttattgaactgatttaaccttatttttttttaactcatgtaatgtatgtggactttgttttcactcttgtgctattctttgctatttgttgaactgttggattttcattttctgcacgatcctagtagttggcattcagtttggttgtgtaagaatgaaaaaaaggttttaaatatagtttttcctaggttcttgatcgtgcaatttacattgactttttattttcaatttcagataagagggaactctcagtttccagggtcacatccagtgtctcttaacaggtaatacccttgttaaacctttctttgaaattgttttcttggggtttattattactgcttttctccattgtaccaacacgatagggagtatgctcaagtatgggacaattatattgcaccctgaaattacaaagtcaccctattttattatttttattctgtataaaatatatatttataatttatagtctcttttagctaattttttccctttcttctcacactataaaatggatatatattaaataattagacaaaaaaataaaacaagaaaatatatgaaatcttattagggtatacgtataaataaatatacataatttaaaaaaatatacgaaaacaagataaaaagaattattgaatattacacaacgtaatgtaaaagaaatatttaaaaaagaactaagagtaaattttaaaaattataagttgatttttatatatacttatattggactgcctatataaatgattgggggtgttattaataagacacagttggcccttagttccagctggggtttgaaccccatatcctttactcacataagtgagattgcctcaaggggagttgcttatgcatgtcaaagttatgatgaagttgattactattctctacttccttttatcctttatctatggaatatggtctgtataattgagaaggggagagaaagaatacaagactatagcagaaatagagtgaataaggaagttttgcagtctgcttgttttctttcttttagtaggagttataaggtaatgatattgtaatccatttgcgaccaggagaagtaatttacaatatccttatgattaattagaattcagtcagtttggtggagtagattatgctggctatctagtactgcatttcttgtaattttgaattttttacttattgcgccattctattttggtagcatttatttgagacttggatatttagtttttccttttcaatgactatagggataacttacagctgctaaggcaacaatattactatgcaacttggaaagccgatgggacacgatatatgatgttaataaacgttgatggatgctacttgattgatagaagtttcaactttagaagggttcagatgagatttccttgcaaatctaccagcgaagtatgctttctaatttttaagataaagttattcttggaccttattttggtgactcagagatttgtggtaatgttctctttttcttttgcaaaggcattaggtgaaaggatgccaacccaccacttcacattacttgatggggagatgattattgatactctgccagattcaaataagcaggagagaagatatcttatttatgatatgatagcgattaatcaagtgtctgtgatagaggttagatttgcattttctttcttttaccaatacaattatattattcctttgtgataccgtcttttttctttcattattttcctttaaacaagtaaatgaaaatattattcatagaataatcattattgtatcaagatttacaaggagtgtcttttctggtttatgtaattattgtttttaagaacatgaaaaaggctttgttggccttttatattttttctttataatttcacctctaatacattatgaaatgatgcagcgacctttctatgaaagatggaaaatgcttgaaaaagaaatcattgatcctcgtaatcatgaacgccaaagtatatatcagagtaggaatccttcatatagatatgacctggaaccattcagggtaagattgataatccattttttgtaatttatttcctttttttgtcttctagttttactatatgctgaaattaattgcgaatgtttgcaggttagaagaaaggatttttggttgctgtccactgttacaaagcttttacaggatttcattcctaggctatctcatgatgccgatggtcttatatttcaggtagtttaggatctgaaaaagctaacatatttaacagttatgcagtcttaaattcctacatgccagctctaacatacgatgccatttttttcagagatttgatgtttcttttgttcgatcaatggttttctttgaccaagagttgtatgcattaaaagaaatccttacaagttaatttttttattctgagattttaattgcttgttagtgtgtgattcggtgattgttgagctcctgttttcgtctttatgtctgatatattatctatggggttccattataccctgcatcagcatggtttatttatgtaaaggttaaatattgttgttgggaatgacaactgttacttcttatctttcagggttgggatgatccatatattccccgtactcatgaaggtctgttgaagtggaaatatcctgaaatgaactcagttgactttctttttgaggtttggttgtcagctccactgtgttttgtttgattttatctattactatgggtgtcttctctcttttttcttcttgctatgatatcgtttttagtctctgttgtggtgttaaccattttaacatggataggttgatggtgaaggccgacagttactttttctttacgagcgtgggaagaagaaactgatggatggaaacaaagttgcatataaaggtatcatttcctatgtttatctctttgctttcatacttgacaattattctttaacttgatgtacaaattatgtttttccttaagactggtacacaacagtgctgtagacttgtctcacatactgtttccaagttctgtttatctcatataaatgaagcatctcgtgaagaattcttaaactggttttttaagtcaattttcaattatcaaaatgttagaattgtattggagaaaggaaaaatttgcaaacatagaagatgataggacaccgtcttagattacagctaaaggtgccaaagaaaaacactaaaatacataatacatccttagttattctactgctgtgaatgtaagcaccattctagagtttctaccttcttcctgacttcggtcctatccttccgagaaatgctatagagcacccttgggcgcccgaaactctaccactattgttttaaataaacatcgggtcccacatatctatatttaaactaattgaatttgaattatgtgtaacttgttacttaattgcaccaatgactatatgccatgtcctctagggtgttgggcaccagcagccttgacagcaatgcgcttttcttccacctgatagtaagatatcttaatactaatgtggtacccactgaactccatattcaaccagggacatagaccatatcttggtagagaatgggcaacatagaaatcgatgatcctagtcgtgtttattttgcccaaagagagaatgataaaaacttttatctttgaaggaactactaactatttttgtccttgttttagagggagggagcaattattattaggtgaattttcattttcaatttcttgggtaggattctgatattaaattctggataccattggctatttggatagagtaactaactgtgtctagtctagctacaatcacttcaaaatatcttggatttatgatagtttgcatgcattctagtatgtcagcttttgacattctccatgaacttttatggcacatgcaccgtagtggtacattgattgacttgctgcggtgtttgatctcttgttttctggttacttgcattgtgttttgtcatgaaaatccatgtttctgattgtcaaacttctccacccaaaaaaatcagagggtgcagacccggcttcttactctggaaagattatagagtgttcttgggattctgaagcacaagtgtggaactgtatgcgagttagggtcgacaaaaatacgccaaatgatttcaatacttacaaaaaggttattctcacctctcttactctctcttttgtttttgtctatcttgctaaaatccgcattacttaaatctactcatcttgcctgttttaatgggggcaatgctgctgtgcaggttatgcggagtataagggacaacataacaactgaagtattgttgagcgagataaatgagatcattcgcctgcctatgtatgcagataggattcgaaatgatagtaaagctcaccagcactcaaattcagcaaggaggaggtaaagagagagagtgagcgcgagacgaaccgaattcttttcagataagaaagtgttgtattttggtgttgagttgggttttgtctccggcattgtcaatagatgactctcaagagttaatttatcgtgtaattagctacacctagctattattttgtaggggagtgtgttggctggtgaattgtacgatccagctggtacctttggttagtcctcacaatcaagagctttctcttttatttgtatgactcttctgttctctggtagctaatcttagaaatcaagctgtttagaattaggccctcgattgtatattaattattattatatatt

SEQ ID NO: 218851 - DNA, 4419 bp, Cannabis indica
gggcataaaacccaacacaccaaacactccttttaagatgggctctggagcctcgtcttcatctgtgaaaaatgataaacgcagaagaaagggatctcgtgctaagaaggcagggaggacagatactagtaatcgtggtaaaactccttttgttgaagaagaacaaactcaaagtgctcttgatggttctccgaaaaatctcattgatacacttaatttgatcgaagtgcatgttgaaagctctcaaaagtttcttacgggtgaggaggcggcccttaccaagccccccaaagccccatgaaatgcatttcttggaattgtcggggcctcgcgagagacccgacaccccaagctatctcggcttgggttagtaggtataaggtggattgtatttttttgatggagacaaaagtaagtaagagtcatatggagatattatctagaaagttgggtttctcgagtgtagtttgtgtaggtgcggttggtctggcaggaggctcatgcctgatgtggaataataatatcaatttggtagttaactatttttctgatggttttttcgatgctactgtatgggatttccaaaatcaaattcattggaaactttatgcggtctatggaaccccttatatgagtgtaaaagaggccttttggaaaagtatggaaatggaattttctaattgtcaacatccgtgggtgttgattggtgacttgaatgtatttatagccaagaggaaaacgtgggaggccgaaaagtctccaatgtggacaccaaatggttaagaagttttatggacactactggaggagttgctcttcaattcataggcaacaaatttacctgacaaaataacagattctcgggcggccttattagagagagacttgatagagctttatgttcgccggaatggttattggaatatgcatcagctggagtcaggaacttgcccattgcaatctcggatcatgctcccattatctttgattctcatttgtttgctgctaaagggttcattccttttcgtttctttgaagcttggtcttgggagaactcatgtaaggaggaaattgttaaagcctggtcctcctctggtgacaatgctactgtttcatttattcggaatattcacaactcaaagaaagctttacaagcatggaaaaagaactttaatggagtaaacgaaggcaacattaaagatatggagagaagactagaatggatccagaaacaaccttggccagatgatttcagagatgaagaattgagtattcaagctaacctgacagccgcttggtcaaagctcgagagtatgtggagacaaaagtccagggagacttggttggcgttgggagatcgaaacaccagattttttcatgctgcaacagtcataaggaagcgaagaaataatatatgggcaatgaaggacaaagatggtaaagtgtggaaggacaggaagcacattacagatgtaataaatcaatatttcctggagattttcacatcgactaggccatgtatcgatgggaatcttgaagaactctttgttaagaagattgatgacagtactaatgcaaactttgctaagattccttcggagtgtgaggttaaggaggctgtttttgaccttcatcctcttaaggccccgggaccagacgggttttcaggctgcttcttcaggaaatactgggaggtagtgggtgcaaatttggttgagacggttaaggaatttttcactagtggtattctgaatccgaaactcaataataccttcatttgcctcatccccaagatgaattttcctttgagtatggattagtttagaccgataagtctatgcattttctcttacaaggttattgcaaaaatctatccaatgactgagcctctcatgaacgagttggttctcattccaatctgcctttatcccgagtaggtggattggagaatcatccattcttacttaggagataattcacaagattcggcataaacaggacattggaggtctcatggcggtgaaacttgacatgcacaaggcatatgataaaatggaatggtgcttcctagatagagtcctgggtgcaaatggatttgatggaaaatgtaggcagctcttgatgtcttgtgtctcaagtgtttcatactctgtccttctgaatggtagcccccttaaaaagataattccccagagaggcttgcgtcaaggggacccaatctctcctttcctgtttcttctatgtcagaaggccctttcaaaactcatttgcaatgcggaagaaaaaggaatagtccatggaattaagattgcacattcagcccccccagtatctcaccttatgtttgctgatgatacgatactttttgcccgagcaaacaaaaatgaagcaaggaagctccttgagtgtatatcaacctatgaaaactggtcaggccaatcatgcagcaagcctaagtccagtgtcctattctcaagaaatatgtgcagcaaaagaaaaaagaaagtatcttaagcgctctaaacattgtccaagtgagtaggggagagacacaattgggcaaccctttcattttcaaaaggaggaaaaaagaggactatatgaggctcaaagatagtttattgaagagattggaaggatggaaaatgaaactcctttcgtatgctgggcgtttaacattaatcaaatctgtgacttcggcaatgccaatttatgccatgtccacttcaaagctccccttgtccacttgccgagaactagactctttgatgaggaaattctggtggttggggaacgttgacaagaatacatatatggcctttaaggcttgggataaaatttgtcaaccaagagttcagggggtttgggttaagaaatgtgaagaaatgaataaagcgctattatcaagcttgcttggagtcttgcaactgttgaagataaaccatgggtctcatgtttacttcgaaaattgtaagtatgagagcttttggtgtgttaagcagaagagcaatgattcctaccaatggaaatgcatcttggatactagaacaacgatcttcaaaggcactatgtctgtagcagcttcgggtctttcaattaacttttggaaccaaccttggattccttggttagagtatcccaaatttgtggcactaatgaataacattaaaggcagaggatacacaattcaaactttgggagatgtgtctcaaggaaatgagtggaatgaagaggtaattctacagatctttggtgaagaggtcggaaaccgtattatcaagattcttagaattccttctcccttcagtgatcaggttttttggaagcaaaatacaggaggcaaattttcagtgaaaactgcctatattacagaaaatatgggaagatttgcaatagaggaaaagatacggaaatggatttgggaacctggcattcatccaagaaattcagtcttcctttggagaatcctgagtgaggcaattcccactaaatcctacctccactttctgcaagacaaagtgtgtagcttatgcgacatggaggaggaaacagcctttcacctattctggaagtgcagcttctccaaagctgtctggtttggttgcagattgactttgaagatagatgatattccagcagacaatatgatcaacatgatggtaaccttaattgacatacttgatggttcagagaggaaggatctgttaacatattttggttgtatcatggatgaaatatggcatcagagaaactctttatgtctcaagtatcaagcggttaatgtccatgatgctttgctaaaaattgatcaaaaggtgttggaactcaagtcatctattcctaacacacgttgttgcactgatggagttaatgaggttcgggaagggcagagaattgatgagagtcctgggacgataatcactcgatcggttactggtatccggaattatgtcctcactgatgcatcgtgggttcaaggggctgcgggcattgctgcgattagtgttgatatgacagaaggttgctggtttgtgagctcccaaaagatacaggctcaatcggtgttggaggcggaatttttggcaatttttcttgcacttaacaaggctgttgatgttgggtggagagaagttcatatcctatcgaattcgaaagtggcagtacgtgctttaacagcaagagtaattcctgattaaagggtagcaaaattgttctatttaagtctgaacttaactaatttgtttcataggtgttgcttctcttttattaaccgtagttgtaatggtatggctgatggtgtagctaaacacgagagactttatagtgatttggcagtttttgtatcaaggggagggtattcccccggtgaaccccatcacttttattaatcaatgaacaaaagtttctttaaaaaaaaaa

SEQ ID NO: 218852 - DNA, 5565 bp, Cannabis indica
aaatcaagcattatttttcttcttttttttttttggaaagagaaaaataatatatatcagtatcaggtagtggatcgaggaagttatcagtatcttattagtccagcatcttatattcttatcagtatcaagaagttaatcgagaggtagacacccataactgaggctcaaacccaagctcctatctatctttctcactctctctctctttacagttcctctcttcaaattcaaacccaggtttgttttgctctaagcttttctttccttcctttatttcctcatatatcatttgtttggttgaccgagaaaattccggcgaagagaattactgttatcatgtatgtttttttatgtcctgctgagctgttactgtctcaaatttcttcattttaagaaaagacttacaatttaagctttgaagtaagagttaggtgttgttgtgcattgtcacttcactcttctatatcctcttcttttcatctccatcttcctcttttgcctctcatttcatcttctgaatttccgacattgggaatccaggtttggagttcctgcccttcaagaaattatctctgtatatattaggcttttaattccttacatttcttcatagaatttcgaagaagaatatgatttatttgttttttcttttattccttttatgtattcaggtcaatgttgtatgcaatttcttgcccaaattcttggttatcaaatccaagaagccctcataaccttccacttcttcagaaacgttcagttaagccagctagttttcgcatacgtgcttcgttgccaaatcaatatactggtgctaaagtggagtacacgccttggttaattgttggattgggaaacccagggaataagtactatgggactagacacaacgtaattatatacaagtctaaagtgattttttctctttggttagctacttgttcttgccttggttgatgtgatatttgtataataggttggttatgaaatgattgacgcccttgctaaggcacaaggcattcccatgaatacaatacagtcaaaggccttggttggaataggtatatcttatttgtttacttatcaaactgtttttggtttttctttatggtggattttgtcttcttttaatgtacttatttctttttgtttgattcagtacaggttctatcggtgaggtaccaattttgttggtgaagccacaagggtacatgaattttagtggggaatcggttcgttccaatctcatacttttgtgtatttcattagctttattgtttaaaaagttcacatgaaactttttgatgggttggatttttcatgttgtcgttaaattgtctttagattgtttttaacatgttattgtggtgtaaaaactataatgcttgaaggactgttcaattacttgaggcatgccaatggtctcatatatgtggtgtctatatatttaccttctaattctcaggggtatggtgcccacaatgtaaattaaagagtatcattaagaaaatagactgcaaattttatgtacttcaagagcatttatatgtaatggagaatatctgattgaatgagttgaaaatgtggattcgcaacttttctaaagactagctaattacaactggaattgacatttgcttttgttgttaaggttggaccacttgctgcacactatcaagtacctctacgccatattttactggtaggtcctttgtttcacaggcgtagattaatcaatatttgcgtgccttcggtcatcaaggtgatttactacatacttcgttcctgctgatgtaggcttatgatgagatgagcttaccaaatggtgtcctcagggttcagccaaaaggaggccatggccatcacaatgggtatgtttggataacattgtttcacatcatattaaatattcattattcactttgctgcttttttgaagatctaacctttgtcatttgtttcttgaatattgtaaattaattagttgtatggtgtaaatttaattcatcctttagaggattttaagctttgaaatgttgtttgcaccagaagactcttcaattatgaaacttagagattttacaaatgtgaaagtagcagttttttcagggaatgttaaaaacttatactgttatgtcaatattcccacaattagtaatagacatggggctttagaccaatctaggcaaggattccatgccacatgaccacatttgcagtgattgcaattgcaaatatccagaaatagttcagacagaaggaaaaaaaatacttaagttggtacaaaagtataatataaaacctttagctatgatacctttgttggaaagtaaaacttacaatatggaagattttcaagagcaacttgcaggaaattaaataactaggtgcataaacccagagactaatggataatgttctaaggattaaatttgatgtttggataacttctttaggtttgagatacatgtaatttcttaggtagcaagaagtacctcatcacggtaagaaatggatatttgaaaataatcaaatttataggcttaggttgcagagactattaaaagctaatatgtgatcaacaaggtatagtgaagaaaaacaaggtatagaggttgctagtgtgtcagcatgtaattataacaagaaatctttaaagtaattaaggttaaacaaaatttttttaggaatactagggggtaaagcaaagtatgattctggactcatgaagacaataatgtgtacatggggattgtggtgatgagtgaccagaaaggatagaattgtatgtttatctcttagctacgggcttcgagacgagaaatctctattctaggcttctaaccatcttaaatggtgggtgggaaggatcacattaaacaatttagttatgtttaactgacatcctcacattatcacatccacaagtttgattcatgcaatttaatagaacattaaactattttagtttccttctttcagatttcattttaggcaatgcaaattaatatggcatttaactgttcataattgcttgcctgaatttttactgctgcagagtaaaaagtgtaacgggtcatttggatggttgccgtgattttcctcggttatgtataggtttgtttcttgtctactatcattaagcacagggcgatcaaatttatcacacaaaataaactgttttaaggttatattgcctttgctgtcatttaacgaggaagaaatataataatttcttttgcaggtattggaaatccaccgggaaatatggacatgaaggcttatcttctgcagaagttcagtactacagaaagacatcaggtatataattgcttgaaccacatcataactccagtcaccaccccaactttaagaaaacacacaggaacacaaacacaatgccaatgaataaaagttggaaactactcaagaatgtgtaaaaccatgcctgtcgaactctttgtagtattttgttaagaaccttgcataattggtatccatctttcatggtttaaaattgatactgcttcttcttgttggtttttcaaaactccaattgattttaaaatttgtatggtgcatcaggaaagtaaacagttcattatttccattggtatcttgcacaacagctttctccaacagtgtacatgcattgaacatgtcttggcacgttctctggtgattttcaactttaaaattaattctttggtatttgcttctggacagattgatgaagcactcaaacaaggggttgaagctgtgaggtccctgttgctcaatggatttagccaatccatcactcgatttaatttggggcagaaatacaagtatcacaaagtagaactttgaacccaggcagaaattcaagtactatatccaaaaacaaaaaaaggaaaaggcatatgaatgaccaggcgattatgtagattcttaagcatcttcatcagctgaggtatagtagctaaataactaaaaaaaaattagctaaggaaacctaagttaaacaaacatcagcagaggtaaaccaaaaggtaaaatagagaatagttctgtagctacatgtagcgaaggaatacatttgaggtataattattttaatcattttatgtcaatctctcttatttattaaatatttgtgtatttattttttggcttttattatttcctttatgttatttaattactcaaaatgttttagattatttaaatgatataaagaaaaatatgaagaatttgatagatggtgtaatgtaaaagtgtgaggttgttgattttgtttttagctaacgacaaagagttttaattaaagtgattgataaataaataaataacataaagtaaattgcatagagtaaagaaaacactagatttatagaggttcagtcccttatagttggtaatggcctactcttctttaattgtattaacttgtgagcaagaatgaactattttctctccaaagttcttaccatgatctttgagcaatttaatcttagatcaagatttcactcttgagtggttttcaatttgaataatttcgtgtccctgaatagtgagatgagatcactatttataggaattaattacatcacattagttttcttaaatcaacaagaaaaaataagaaactagtttatttctataattacaatgaagaaaatggagaattaggttggttgtttttattctctgaagatacgaatttatctcacaaatgtatggatttttatgtgactgccaagcatatatctgataaattgataattcgcacctcctgattagtgcatgcgagtaacctactttagtagagctggtcagatgtctattcatgagctgctcggacattctactatctatgtatgacgttgaacatcatagttgtctgcacgacctattaggagtagaatcatctatccagactataaaatatgttacacgtgtcacttagacagatgccacgtatagtgtagaaattaagaaaatataaaagtgagttttgatgagttattttaaaaaataaacaagaagggagtattttttagcaaaattagaaatgaggatgatggataatatatatttatatataatgtataacctatgtacttttcttaactgggttccttttattcatttttatttatgcctcatttacattccattatcagatgatgtgaattggtacatacatagattagtgttggcagaatgacttgtttgataaggaaaatttgaaaaaaaatatacataaaataccctaatattttatgcctaaactaatgcttttcaacattgaaaacatatgaccactttcaaaacccgaaaaatacccttctcaaaaacctaaaccctttctctctccttccctcaaactctctctgcctcttccccttcgcccaaacccacatcgcacgaccccgcacacaacccactccgactgaacactccgattgagacccacacccaccattccgaccctcatcaccgcccttcgcccgaacccacatcacacaacccccaacacaacccactccgactgaccactccgaccgagatccacaccca

SEQ ID NO: 218853 - DNA, 5595 bp, Cannabis indica
ttttttgcatttttacgaaattcaacatagaatccctattgcaactagcgctgtaacctaaatcacaacaaaaaatcgtatagaaactcttattgcaactagcgctgcaaccactttagaaatcccatatacttttcaagccgtaaatttgaaaaaaagaaaagtatatgagataattcccctttaattaattatttgtatatattttaaggtaaaagatgtttaaagttgattggtaataggttttttttgagacatgataaatttctcaaaatgtggtaacaatctctcaaaatgtacctgtcaatctcctaatgaatcaaagttctatttttttatttcatatttattaatctctaaacaattatatatatttatatgtattaggttaaaattacgtgtatggcacattttatatttgtaagtaattattataattattaaatattataataaataatattattttgatgaaaatatgtttgatataaaaatccttaaaaaataataatttgaataaaacttaaatgaaaatactacgtaataaagttttaagagaaaaaaatgttagcaaaatttattaaaatgataaatttgatggtacttaatgattagtgtaaaccaacaagaattccaaagttgagataataatttgtcccattaacaattgagaattaaaaatgatcttcattaaaataacatgaaccaatatgaaatgaatttaagtattaagattgtttttttttttttttttttttttggttctaaatcaacaattgagaattaggatgcactctggttgcacattggtgaatttttttagatgaggcaactcgagatcttattctggaagttggtgtgattcattttgataaaaagccagttgttcttaggccattgacaattgatcttgactcggttagaatgattaattctgtaccagtttggattcagttaaatgggttgggttttgcaatattggggcaagaataatcttagtgctttagttagcgcaattggcaaacctatcatgattgacaaggtgattcaagagcgatcaatggtgaaatttacccgagtccttgtggaaattgagattttggatgctcctcccaaatctatttctttcatcaatgaaaagaaacagctggtggaacaaacaattgaatatgaatggctcccttcaaagtgttcagcttgtgctaatttaggacacacggttgcaaactgcaataaagagaagaaggttgtttggaagaagaaaccagttgttgaaaatgagacaaaggtggcaaagaaaaatgatcaacactcaggggacattccagggaaggataaagagctagaaaataggtctgttgctgatacattagctactgatctggttttgaaagatggtcagaagggaaaaatagagaggggaacagtttgtaatgctgctagtggtaatcggattacaccaaaatgtattgcttcgaggtagactgattctaatgtggctaaggaagatccaaaggtgatgaattctagtaatggctatgctgttttgcaagatacagcagctgataaggtgttgtttcctaactcagatctattgtttaatggaagcaaataacatgattggatggaatgttaaggcatgaataagatagacaaacaaaaagctactcctgatgtttgtaggttgaacaaaattggctttggtgctttgtttgagactaaagttaaacatgaaaaaaattcatgatatgatgatagataactttctgaattggaactgttattctagcattgttatttctggtagaatattgattatatggcaggctaagtttgttcaggtagatattataagtgaaaatgctcaaatggtgcattgcaaagtgaaattttgtgggcaaaaataggcctttatagtcacggcagtttatggtagtttcaatggagaatcgtaaaagtctttgggataatcttgctagcattgggatgctgaatgaaccttggattatttttggtgactttaacgctttgttcaattttcataacaaatgtggtggaagaccaattcagaacaatgacattgtggatgctcaatcttggctcgccctgggttgaggaatttaaaagctcgggttcgttctttacttggactaataagcatgaggtgggggatagaatctattccaagctagatagagtttttattaatgatatctagctgaatgattttcctaacttagatgcttgctttaaatggaaggtaatttcgtatcactgcctttgtttaattcaaaatgatgtgcatagtaatatagggataaaaccctttcgttttgggaatcattggccttcttatacagggtatgatcagactgttatggaacaatagaataaaaaggtggctagttgtggtcttgatagtttaatgcagagactttttagagttaaacatgctttaaaaatcttcaataaccatgaagtgggggatgttgcaagggactataggaaggctaaagagatttattgggaaatccaggaagaagctgccttgaatccgaatgacaacttgttacaacatgctatttcggaaaagcagcaggtatttttggcggctaaggacagatttgagcataatcttagacaataaagcaaggttaattagatcaagtttagtgatgagaatactagttattttcatgttgttatgagaaaagaagacttgaaaacaggatcaccactttcatggagggggacactattattgatgactttgaggaagtggttaaacactttgtcaagcattttttgaaaactttatgggcagtaaaagttcagctactagcttgatagatgaggcatgtataaagcacggtaattgtctagatttggagcaacaagtcaacttgattaagccttttaataaggggggtgtcaagaaagctcttttcaacattcactcttccaagagcccaaatttggattgtttcgggtctggtttttataaggatttatggagtaaaattggtaatgatgtctctacagtggtcttggatttctttgctaatggcaagttgcctaaaaccttgaacgagactgttatttctttggttcccaaagtagctaaccctacttttaactaaggattatggaaccattgcctgttgtaacacagtctacaaatgcatctcaaagatgatctgttctagactttcagaagtgctccccactattgtcagtgataaccaaggtgcgttcattaagatagattgctggcccacaacatcatgatttttcaagaccttctaaagggttacactagaaagaatgtctcagttatgtacattatgaaaattgaccttagcaaggcttacaatacggttgactgggagtttgtggaagacttacttaggatgcttttctttccttctagatttatcatgtggataatgacttgtctgaagggaaccacttaccatttgctaataaatggtagaatccaaggtagcttcaaagggaaaaatggtcttcgtcaaggagatcctatgtccccgttactctttgttttgattattgattacctcaagagactgctgagctttttattttggtaaaaaaggttatggcttccatcctttatgtaagcatcttcgcttgactaacttgtgttttgctgatgacttagttagcttttgcaaaggaactttaactcagtgaggcttactcatgaagctttcaataagttttgcaatgccacaggttagtctgctaatacctcaaagactttggaggggttagtgaagaagtcaaatccaagatccttgacttagtccaaattgaagaaggttgctttcctctcaaataccttggggttaatcttcgaccaaccaaatggaaggtttaagactgtggagttatcttggataaattaaacaagaaccttaattgctaggctagtagaaatctgtcctttggtggctgtgctcaattgattcactcggtgctgcttggaataaggaacttctagtatattcatcattccttcatagataacggctgctattgacaagagttgtcgggaatttcttcggggatcaactgggaatagtagtcagcttcatcgagcttcttgggaaaaagtttgtctccctaaaaaccttggaggaattgggttccgagaaggaaaaaaaagtggaataaggctcttttggctaaattttttgggctcttgctagtaaacaggattgcctatgggtcaaatggattaactcaatttatctgagagagaatgacatctggaactacccaaagaaagtggatgttagctggtattttaagaagattccgagccttagtgacactatggatgaatctaggctttgtcttgcggtgaaagggaacaaactcagcgccaaaaagttttataacttgcttgtggaggtggacacggctgtatatgctagtgctgtttgggacaagcttattgtgcctaaacacaggttcttgtattggcagatatctaacacccaactgctcacttgtgatttctaaactcagatcatgaccatctcgagtactttatgccatgtttgtgaggttgagttagaaactcatgatcatctgcttattaattgttcctatgctaaacaggtttttgttgcaaccaactcttggcttggagagtatcaatgccatatgtcgattgatgatatgttggaaagatgcagaaatacggcaaaggatctccaaagaatcacaaatgcagtcttggcagccacgttgtataatctttggaagaataggaatatatgcatttcttatttgtattgtactgctcctaggtgtttgagcttgaataataagaaagtgattcgttttagaatcttgaacaagggtccttttaaagattgccaaaagaacaattatttaatcaatgtaattaataggctgtagtggggtggtgtgtggctactgcctgtagcagctgccgccgttggtggcgttgtggcttgtgcctttgttagttcttgcttgtttttgaataaagtttcctcttttttttaaaaaaaaaattcaatttttagattgatgaagacaatttcaacgaggagcaaaaatagttaactaatctttaattttataattattattacattttaaattattttttattcaatttttcatttttttaaaaaataaataatttgaaccaatctaagactgacacactgatttgatacttaaaggtaatgagaaataagattaagtataaaattaactctaattagaagtcattcttactttttttttattaattaaagttatgcgtgttataattttaaactattaggagttttgttacaaatattttaattatttagttcaaaaaattaattgttcaaagatacttacttagtaacaaattatataaaattaaataataattaggctaatttgcaatttttccccttgaactttgacatgtactaaatcatgctctctaaactttttttgccgttgaaaattccccctaaactattaagattgttaaatttaaggacttttatctaattttagtaaaaaaattctaacatggat

SEQ ID NO: 218854 - DNA, 2940 bp, Cannabis indica
aagaagaggcgcgtagggtagaattaaaaaatgagaatcattgaagaagtggataagtaaggggtcactcactcacacagttgggcgttggtttgataagctaccttccagcttactaccagctcacaatacctgtagtttctaaacaaacctaaatatcaatttttatttttctataataaaatcatcattttataatatgcttctatttttttatttttattcaaataatttcacagtctagtttcaatcgaacaaattcaaactcctaacttttttttttttttaataaaataaaaatatgaaaaacggtgaatctgatgcaaaattctgtacacgatgtgggaccgaccgtctctaaattaaataaataaaaatcacaaatatacaatttctagggagttgttttcagtaggacacgtgtcaccaactcaaaccaacatttttgccttaatatggatttcatttcactactcttctctgtttttgaacaaagaaaaagaaaaatacaaaaaccaatgaccagcaagcgtttgaatttgattggttggttgtgactctctgaaagatcgaaaacgagaaaaagtttgtagcttttctaataaaaaactaatttttatttatttttctctgaaaaaagtaattttttcagagacccctataagagtagaaggggtttctggaacattttttttgaaggtctattatctagagaaagaagagaaagagaagcaagcccttcttctttattttgttttgaggttgaagaagaaaaggaaaggaggagggtctgtaaagaaatgattagattgtggataacttctttgcaattagcagaattgtttgtgagctctttggttcatcttctatatgggttttatatatttagctcagcggtggctggtgatctttctcaggctttgaatgaaatatttaagcctaatgtcaacattgagttgaatgagattgttcctcacgacagacccggaaatgttgaggatttgcctcctattgttttggttcatgggatttttggttttggtaaaggggtacgttctttatctgaaatgggtttgaatttaaaaggaaaaatatagaaaaaaaaaacaaagagagaattatgattttggtagcatttctgggttgtgataatttgtttctatttatattttcttatatgggtatggttttttcttatagagattgggaggtttatcctactttgccggtgcagagaagaaagacgaaagagtcctggtacctgatttggggtccttgacaagcatttacgataggtatgagcttaaagctagcttttctttggtgaatggtgatgattcttctgggtttaaatcttcttgttcaagcaaaagctttaatgggtttttgtcattttcaggggctagggaattgttctattatttgaaaggtgggcaagttgattatggagaagaacacagcaaagcttgtgggcactcccaatttggtcgtgtttatgaacaaggtatcttcttcttactgattttgcagccatttctttttaacattttcactttttattttgtctcattcttattaagttattattactctttgttttgtttacagggcattatcctgaatgggatgaggatcaccctattcattttgttggccattcggctggggcccaggttgttcgtgttctgcaacaaatgcttgctgataaggtttgttgaatcttacaaatcaactgtaatcatctctagatttcataaagttcgaatattttacgattgttatgttgtgtttcaggcgtttaagggatttgagaacaccaatgagaattgggtattgagcattacttccttgtctggagctttcaatggaaccacaaggacctacttagatgggatgcagtgagtttcatttgcattttttaatcattttcttttgaacttcagttattactattagcataatctaattctacattaaccaatatatgagttgatgatatcatactagaagttttcaaagaattattcaattatgtattatcttgttgagtgttgattcttcccttttcttgttactaaaaagtagttactggtttctatttgttccaggccagaagatgggaggtccatgaaagctatatgtttgctgcagctatgtcgtttaggtgttattatttatgactggtttgatattccatggctgaaagcctattacaacttcggtttcgatcacttcaacatgtcttggaagaaaaccggtatttggggtctccttgattgtctgttagggtattcaggtccatttgcttccggtgattggatcctgcccgaccttacaattcaaggatcgataagattgaatagtcacttacatacatttcccaacacctactacttcagctatgctaccaagcgtactaagaagatctttggaatcacagtcccttctgggatactcggaattcatccaatgcttttcattagagtattgcagatgagccaatggcgtcatcccccagatgtttctcctccattcaaaggatacaggtaggcttacactggtttttctttgttaacacaatcacctaatttaactctagatatcgagttttcaattcgtttattggttattttgcttatgcagggatgaggattggcaggacaatgatggagcactcaataccatatccatgacacaccctcgtcttcctatcgagcatcctaatcgctttgttgaaaatgaatcagattgccaacctatggaaccgggcatctggtcagtaatacttctatgcatataacatctagttctctactaacataagcagatgatattgttgctaattgctgtggtaactaagcattttcatcctagtatcaaaattgtcaatcactataatattgaagtgtgggacttggttgaatgcaggtactacaagat

SEQ ID NO: 218855 - DNA, 8233 bp, Cannabis indica
tcgtgggcaagtttgcatacgtgtatgggacggatggaccatacgtgtatgcaactagcttggtggcttgtctcgagggtctgccaacatgcgtggaggcatggcgccttgaggattggtccatggacgtttgggagtccttggttaacaagagagattgttcgaacagtatcgaatggggtatgatagaagcgttggcatgttgacttagtgttggcatcttaccacacatgctaccttggtcaggagtgacaaagtgagtgtcggtgttggaatttgtcttaccatggtgggaacccatggacagtgtgagtattttggttagagagtctcgacgcatggatgcactcatggatgcttgcgggcatgactcggcgagagttgtttgagagacggaagtgtgcacgaggcacatggtcgcgcgaaaaatgagcccattgttactcgaattgttggaaggctgaccttggcttagagaaatgaaggtgccgcacgggtgttccactgcctgaaaaagtgagcccgtgacactaagcaatgaaagtactaatgacagccactcactccatggttagctccattaatggaaaagcaattatttgtgagacttatgggaccaaattaagggaagaagcaaatttagaattgtatcatttacaactttaatgccccgtggtcctaaaaccacacctgactgcccaaataaaaggaagaatcaacagttggccccaaagatgcaaaccgaccaaaacgaatttttcagtttaagcatttgaattaaactaagacaaagcattaaaataatgggtaaatatgagatagcgaattaactaatttagtttatattcttatggatagaatctaaattatatgtaaaattattatatttttatgatacacatcatttgcatattaatcaaagaaataatcgctacacttcaacactataattaaaaatttagctacttattatgaatagttgaataaaactaattaaaaatatgaaataaaaagaagaaaagaattcgtaaattaaaatttagctacttattatgaatagttgaataaaactaattaaaaatatgaaataaaaagaagaagaaaagaatttgtagataaacaatggcgaatcttctcagcttctaaattcgtcttataagtgtccaaatcaatagctccaattcttttttctaatttgggtttaaaaaccttaggaatgcaatgtcgaggcctagtgcatgtcgtggctttcgcaccttgcgtcgacattgacttcccaatgttgaggcccgcttcttttccttcaaacttgatctttttgtccattttttctacaagagtgccatcgcattgaattttcaactttgagggtttggactcgatcgcaccaaattttttaaattatttcacaattcttttgacacacttgtgacaacttcaactaaatcattattttttattcaatttttattcaacttgtttaccttcatttttattaactaaacctgaaaatatgacaaactaaagctaacacaaactaaaattgaactaaaactaaataaaatattcaaaaataacataaactaaatcctaacacaaatgttatcaaacccctaggctagcttccatcttaggttaagaaccttaaacatccaaatgaatgttatgagctataatatttaaaggatgtgaaggtacaagaaacaaaatgaggcaacaagttcatatactcaataagctcttaggcgtcaagcctacccaatcctccgaataacaagtaaaaaaatcttgttttcttattgaaaacaccatacagcaacttcctactcacttggcgcaaacctgactttataggttggatgatcagctatcgattaggtcattgcagactctactattctttactactgtcaatgttcaatttaaagtttaatcaaatgttatttctcttttctgtttagttgagactctctttcacgtaggtgggtctataagccaagccttttgctcttgtgatcccgaagtggactatgaagctgggacgtagctacttttattaatgtggtggctatagcccccactaacaaaaatagaatcttttgaaaaattaaatgcaattttttttaatttgataattatagatcaaaatagtagaaaaaactctcacaaaattaaataaatctagtaagaataattataataaaggtataaatattttttaatgataaataagcctccataaagtaaaaattctaggtccgtcactgctatgaacaacactaagaaaggccaaaaaaaattaacttttcagaagtacgatggactttaacccttaagcatggaattaatcaagattgaacctatttgaaagttaattgtatcataaactggattcagtatatgtgtaatgttgttgtagaagtttccaacctcacatgctttatattgaactatggaaccgagcgaaggttactgaaaaatgaaaaagattcttcaagatagttcttcagttaggggcaagatccaggtccatcgattcgtctggatttgtatttgttactgctaggtctcgaacacgggtttttgggtcttggctgggtcaaggtttatgtcattgatgtactgttattattactattattgtaaaatataaaaacaaattttaaaaaacattaaccaaaacttgtattttagaactacaaaaattccttatttttttatcttttaaaattttgaaaaaccatgagctggtatgcaaaataaaacagcgcagccatcctcaacccgccaaaggagaaggcggagcaagccactgcaagccacttctcagatcaccattatttctttcccaacgcaacatcgaaattccacttggcttggtgtcaaagccatagtggtggtggcattaagaagcttgcttatactgcccacagaaggaaggcagagcagcagtattgactgttattcaaagtttccaaatacaaaattgctcatcaacatccattaaaggaacttcaaccagtcacaacaaaagttaacagggttcggggacagggaaagagaccagtgagatgcgaaccataagtgccaagagaagagatttcttagtagataaacagcacatgttcaattccagctagtctgtcagggactctaacctggaaacgtttagccaaaaccagtcgaaaggatatttatgaagctcatgcattctttcatttgctgattttgatttagtgcgttccaaatatgtacaatattcgatacataaaacagtaacttgtatatactctcccgctaaaaatatgtaatgtaactgcagcttatatatactttatgtattgagctaattatgaggcaataaattaagagaaacaaaatttaatcacattttcataattttgattttactttatttagcccatccacaattttagcgttttatccttgccaccagaagcaactttttccccaactgaactccaatcgatagcataaacctttcaaaataaaaatcaaaagtcaatttgaacaaacaaagaagagattaaaacctcagacatatgaagaagaatatgcactaaaactaaaattacctcatcagcatgccctgggagatcttgctttaattttcgtgtgcgcaagtcccacacctgaaattaaacaataactcattacagcactcttttcaattataaagccctttatgaaacttattattggatcaagaaaattccaagttaaaatattgaacgaaaaaaaaataatctccttaggtttgaaaattcgaagttattgaagttaacaattcttattttgaccaattgacataccttaagtgttgtatcggcactgcaacttaaaagaaaccgactgtcggcagaccaactgcaagtaaaaaatgcaataggaaaggtaacatttcaagattactaagttgctttataacaacactcgtagttagaatcaattcaaacctgatttgataaactttgccaacatgacctcttaaagtagcaacaaaatttccagtaataccgttccatatcttgacagatttgtcatatgaggcagtcgctatccattgcccgtcaggggaaaagcaaacttggtttataacctgttaaccagtaaaagaattcaactccatctgtcattacttgcaatgtttggagaacaagaaagaactaaaacaattactatatagggatctctaggtgagactatcatgaaagaatggcagttcatgatagaggatttgatgattaggaaagagctcaaaattatatatatagttctaaccaaaaaaactaaaaaagtatgaccaagacaaagcaataaagaatcttacctgttgatgaccagtaatacgagttttcggttgtttgctgacaaaaggttcccacaagaacatagtcctatcatcagatcctgaaacaagcaattcaggcttgttgcctttcattttgttgtacctctccaaagcaacctgtgcatttcaatcaatttaatacaaacattttaaccaaaaaatgaaccaaataaaagaatgcttagaagaaaaggagtccattccatcagtaacaattttccttcacaagattttatgcacaagaatgtaaagtcaagacaaaacagtaccaaataaaagaaaaatcatgctcaaaaaggagggcaccagatgttgtgtaaacaagaaattactgacatttttttctctatatatcggaacatctaaaagtacttttccaggaaaagacccacttaacattttcattaaaaatgaaaacaatccagttcagagagcaaattgttaactctattaactgataaaggccacacatttctagtgaagaaagaatttagtttagttccgatgactaaactgatatagtacaatagtaattccttaataatgttattatcttaggagtatattttagccattaatctatgaataggaattaagttagaatcctatttatcgggtttaccactaaacttgcgcatccttacaaataaggaagaaaaaaaaaacaatgcatcatttgtatggaataagtttcacaaaataattcaaattctaactaaaagataagaattcaccttcttcatttcttcagcagatgagtattgtttaccggtgtgatcgaaagccccagtgtggaggataaaatcagtgctcaaagaaatagagttgatccgatgtccatgaccctttcacaaaataaaaatacaatacaactagtataagaagaaagctaaatacataaagaatttgatttaagatattaattcatgttggtaatcttgtgatggtattggaccttacataacaatgattttttttttatatcctttctcatcatcaacacacttggttaatttagaccaagagtttccataccaagagatccaaggttcaaaccttgatctcatctcaattcccaactccctctcaccacaatcaaactagtggcggcttttataaataaatatgttttagtagcaagacaatgaatcataaaaaggtaaattccgaaatttgcaatacgaccattttagttctaatcagcaaagcagattatgttaacctgaatatagaaagaaatgctttctaattcattattatcttgtaagaataataatagtgtgttataatgcatcattaccttcaattcacgaatcagcttaccctccgaagtttcccatacttttatagtacgatccaccgagctgcaacaattataaagaaaaacaaaattaacttcctctcacggggtttgaatttcataatgacaacacaatggaatcaacagaaaccatttaaaaacaatatgaggtacctttcatgttcagctaaactaacatggtgtccatattggccaataaaccaatttatgactttgatgatagttgattaagatataaaggtttaattaaataaacaaaagctatttcccaatagaaaaaaaaaaaaaaaaacatacccagtataaatcaccccatctccactccatttcacacaagtcacagaatcagtatgtccagaaagggatatgagaggtttcctcaatactatatcccatatgcgtgcaacaccgtccttactaacactaacgaaacgtctacatggagcagttatgtgcactggttcccaagcaatggcattaacccaacttttgtgaccctaaaataaaatattgcaatatctgaaaaaaattacaaacaaaagataacaagtactaacttctagcattggataaaatttataaaataaagtttaccttgagtgtactccctaattgttttcctgttagtggatcccaactcaaaatttctccagatttacccccactcacaagatgcttaccatcaggtgaccatgaaacacaaagaacatgacttgtatgtcctaggtcaaaaatcaatacaaaagtctaatcaattaaaagttaaaggaaagaaagatataatcaatcaaataacttgcttcacggatgcaatgcaacaagtgcaaattaatgaatatatcgaaataagttagagagttcatcaatttatacatgaagaatgtagagttgaggtgagttagattccaaagtccaaacctttacatatgtacaatggtgtctgtgtattaagatcccataatcgaacagtggtatcacccgaaccacttgccaattgttggccatcaggactaaaggcaactgaaaccacagcatcttggtgacctgcaatgtcaaaccaacccaataataaatacaacagtaaattcttcctattcatcatcatcatcatatatatatatatgagctggacaaaaactcaccagtaattgtcgaagagcaccgataaattggtcgtacacgaaaaattgcttgcggttgataaactataataagggccttctccaccgaaactgtattttttgttatgaaaaaaaaatgttgtgagaaagaggtttcatacctaaaaatagaggcaataataataataataataataataaacctttgtttgattccaaataatgagagagaggtccaacaagttccatgtccgatatataaaacgagtatggtaatttctcgtgctgagagaatgaaattagcctaattaggtttcagaaaatatgataaatgaagatatatagaagaatgcatagatacatacattgttgaggagttgattaacaatatgttggagttgttgaggtgtaacagtttgaggaagaaacatatggtttcccagagcaattccctctgcatccttcaaaatgcacagcagaccaccctgatcaccttcacccgattccatagtgacgtcgtgacgaggagaagttgcaggtgaggttgcaccgccggcgtcaatactgagatttttcgtttttttttttttaacttttacttttataaatatttaaagtttaattccagttgtaaaccctaatattatttattcttaatttttaatttttttaatgttttattaaatttataaatatttatttattattaattaatagatgaaattcttttctttctttgtgagcatgtatggccttaaagagctatgtggcagttagtccctttttttctttttaactatattaactaccttattttgatcttatctccaatattccctcctcgtttgaatatctcactttcaaatgtcttcctatttctcccttattttgaattgtaactgttccctcctccttatcctttgaatttctgcattttttcttgctgtcttcatgcaaattcactaacctcttcatggatcatcttctacacgatatgaaccatactttaattctcactgaatctgaacgagaagtgcttacacttcctgctgaattccacaatggaaacctccctgaatcgaaccatgtattgtatgctcgagttgtatcttcaagagacatcaataggaaaacttttcgaataaaaatgagtgggttctggaagggtcaataccctgcaacaatcacagaccatcattctggtctttttcttgttacttttgggtgcataggtgatcttaagaaggttttgttgctggaaccatggcattttcagaatcatctcattgtgttatcctcccctactgtccttcaatcaccaacacctgaagctatgtcgctcactcctttttggattcaactacataggctgccttttctaagcaagaccaaagctatggccgaatgggctgggaacct

SEQ ID NO: 218856 - DNA, 5855 bp, Cannabis indica
tcctggagtaccttgtactccgggtgcctcctccgggacccatgctaacggcgcttccttgtggcgcacgaagacttatcaaatatttacaagttatctgatccacgtgtcccatttcgactagtccacgtattttgggcgaattcaggggaaacagaaacgaagtcttggaaacagacacaagcaaaagtactttaggaagcttgccagaaccctacagggtctactagacaataaccccaatgctcctacatccaagtaaagcctctgctatacaacccataaaaataaatatccaagatatccctctaggtaatgttcccctaagcaagaagaagttcatggtgacaggaagtttgcttttagtgtgctatcataaataaaagaaggcactcaggtgggcttccgagtcaaagtggatgatgttggacacttgggggcacaaaaaaagagagaaagggggaaatttttcaaataaacaaggacactcatggcataacgctaaaacgagagcgacacctctaaggagtaagcaaacattttccaatcaagagggtagcgaaattaagtactataagctccctcccatccaagtaaaaggatgaggaaataataagaggttgagattgctcaaagaaccgtactccctcaaatggatgattgcttaccacaacagaaaaatggcttggccaaagagggaccctagagtcgctcagccaatgctaattacgaaaatggcttggccaaagagtcaccccagagtcactcggccaacaccgttacgaaaatgtcttggccaaagagtgaccctagagtcactcagccaacgctgattacaaaaatggcttggctaaagagtgaacccagagtcgctcggccaacaccaattacaaaaatggcttggccaaaaagtgaccctagagtcgcttgaccaatgccagatatgaaaatagcttggccaaagagtgaccccagagttttttggccaatgccgattacaaaaatggcttggccaaagagagatctctagagtcgctcggccaatgccaattacgaaagttgttgggccaaagagcgatcctcagagtcgttcaaccaatgtcaagtaaaactgttgctcgatcgcatgagggatgagatcgctcgattaaaaaaggggaaaaagggccagccaagacaaggaaaattcattacaccaacatattggcacgaagtaaggttcaagcaagggaagtccctaatacaaagaagacaatgcctcaaagaaaaccaagagggtctcacactacggcaaggcaaattccccaactcactcagtcaataagaacacttaaagaattcttgtagactgggggcaagtgttaaccccaaaaatcaatagagttgattttcaagattagtctttagattccatgcttgcaagtctcggggtatatccgtgcaactcggagttcaaccccgtaacaactaatggatagagtagtaagataaccataatatgttacaattattggaggatttttatagtgatttgttcagaattagatcttgtcataaacataagattcataggactctttctcatcttttcaacacatcttgaattgttcaatttcaatatgtatcgagagagttatggccaaaatactaagactattgaattgtgaaaactttgtatgcgagcccatggctattgtgcgagcccatgggttgttgtgcgagtccatggctattgtgcgagcccattgactattgtgcgagctcatgagctggttggcgaaccatggagcatttgtgttggtcgtggagcctttatgcaagtggtggttcgatcggcggtggagcacccgtgctattctatgtttagtcccttagtgatccaatgacgagagcgcaagcaaaagaataagaggctatctctaggccattacagcctataaatacccccatctcaaatgtgaagggggttggaaaatcatgcttgtaaaactatatagaaagtaataagaatttactgcactattctctccattttaaggtcgtaatgtgggtatgtctttcatcttcttcttcattataattcttaacctaaagctcaagttaattttccagccataagttagttgacgaattcttaccgtcaataaccagcagtagctaaaaacagttataacaaactaaatatagctacaaaattacgtcaaaatatatatatatatagctacaaactaactaactcactcaaggacagctcacaattaagtaactcaactaactttacaaagctaaacttaataatactcaataaaaatgtcttagtaatttgtatttttttgtcatgtttacagttatgtgtgttttttttttttgtttctactaattataattacaggtaaattagttataatttttattgacctttttttttttttctgttttctttttctctttaggtttctcctattattctaatctcatggtgttaaaaaaatgaaaagaaattaatatattttcttctcactgtttttcagtaaactattttcatatttttttaatttatgttattattttttatttttgttctaatcagttaatacattttaattagaatatattgttattgaaaaaaaaatagtgaaaatgataaaggtgtcatggcacccaactcctaaaactagtgtgtgtatatatatttacatatatatttaggttctgtatagttggccattctgcgtccgaaccaacttccttctcctttgtcatattgatttgatatcactttttccactctgtagtgttacctctatcttcttttattaatattacgattatttgaaaaagaataaaagaaacagaatcatggcagcttcttccaaactctttctcaacaaaaatatcatacataataagccgattccgatcaccacccttagttactcttcattgaactgttacaacagccttttatcaagatacaaaaacaaatctccttctttgaacataatcacctcatgttcatcctcaccatcaccaccatcatcatcagaaaccaatttaacccctgaacaattaaagatcaaacactactatgacccccataatcaagatcgagatcaagatcaagatcgtgatcgtgatctgggtttcgacgaagacgacagggaactaagtgacatatggagagaaattcaagggtcaaaaaattgggagggtcttttagacccgctgaactctcatctccgaaaggaaataatcaggtacggtgagttctcccaagctagctacgactcctttgactttgaccctcactctaagtactgcggcacgtgtaaataccaaggagcccatttcttcgaacgcctcgaaatggctgatcgtggctaccaaatcagccgatacctttacgccacctctaatatcaacctcccaaacttctttcaaaaatcgaagatgagcagcgtttggagcacacacgccaattggatgggatacgtcgccgtttcgaccgacgataccgagattgccagactcggccgacgggacatcctcatcgcgtggagaggaaccgtcacttatctcgagtggatatgcgacctcaaggatattctccgaagggctgacttcggtactgatccgacggtcaagatagaatctggtttctacgatctctacaccaagaaagaacgcggttgcaagtactgctcgttctcggcgcgtgagcaagtactcgcggaggtgaagcgtcttttggagtattacgatggtgaagagattagcatcactgtcactggtcatagcctaggagcggctcttgccttgattagtgcgtacgacatagcagaagttggactaaacgaaatcctttgtgatggaaaaggtgataataaatcttccaaaatcccagtcactgtattctccttcgctgggccgagagttgggaatttgaagttcaaagaaaggtgtgatgagctgggagtcaaagtgctgagaatagttaacgttcacgacgtggtcccgaccgtgccggggataataacgaacgaaaagtttcagtttcagaagtacattgaggaagccatgtcgtttccatggagttacgcacacgtgggagtggagctggctttggatcacaccgaaagcccatttctgaagcccaataaggatcccggctcggcccataatctcgaggcgcttctgcacttggtggatggataccacagtaaagggcgggggttcaggttggcaacgaggagggatatagcgcttgtgaacaagaactgcgatcttctgagaagagaatatggtgtgccaccaaactggcggcaagacgagaataaagggatggtacggaactgtgatgggcgttgggtgttgccggagcggcctaggttggagggccacccaccggacatggcagagcatttgaagaaagttcttaggaatattaatgatgataatggaagtagtaatggtaaacagcagttgggtccagcttaattattcaattaattaaccttgggtgtgaactgtcattctcaactactaacaatcaaactaaactcgagttaattatcttttgtgatactccagcatttgcttgtcaattatattatattatattataaatgaaatggaatagagagtaaataattttcattccattttttgtttggttgcattttaaagtattggaatgaagttccaatagaatgatcttttcaccattttagttgaatgactattctattttaaaaaggaaggaaagactattctaattatttaacaagagaaaaatatattgatttttttattaattttttttatgcattttaaattttattccattcctaatcatattttcattgtcattactattcttatatttttattcctcctaaccaaacgtcactttagtgtgaaagccttccttacaatagcattttttttttgaaagaaaactttattatcaaaacactcgcaaactacaaagaataggagggatcagctttacaaatattagccaaagctttacaaatattagccaaccactgagaaaaaaatttgtcaaatgaatgggttaacttgtttttaagacttctcctagctaagctatgagcacattcattattagctctttttacattaaggaactttctacaagaggagaaaaccgggtgtctctttatctggtttataaccccgttagcagcactaagatgactgcctttcgccaaaaaatcgtccaccactactacaaaatgggtttttaggttccctgttttcaacccattttataaaaagggaagctaaagggtgcaaaaattctcgattattgaaaattgacctttagaggcggctttttcataaaaaccgtacgtatagaattgcattataccatttagagtcggttggggaataaaataatttgggttttatgaaattaccctatggcgtcagttcctctataagaaccgacgacatagggtacacgtttatttgacacgtgtaccatatgccgtcggttcctataaaagaaccgacgccatagggtcgtccagggtatatgtacaacttcgtcttcttcctcaatctcacttcactcagcaaacccagcaaaccagagagaaagaaccaccaaaaccctcgccgcaagcacctccgccccaccatatttcccccatttctcaacaatttgagcccatttttttaaaaaatcttctattttcgatacttaataacatacacctataaagtttttattttttaccctctttgattgtcattcgaacccaaatagaaaattttgggtttaaaatctggccaccatttttgttgagaaagcattgaatctcaac

SEQ ID NO: 218857 - DNA, 9153 bp, Cannabis indica
tgtgattatgaactaaacactcattctaaagtgttgatggaattatgttagattatgaatttaagtttttagagtattcccatatttgttcttattatttgtttatgtaattttgtgctaattataatcttcttaatgcttgatcaccatcaattagtatagaaattttaggctttacacttgagagaagtgatttaaaatcggatttagaatcgcatgacataggaaaagtgtgagattgagagattccactatttctatgagtttcattgaaagggaatcatattgttttatgagtgcttatttaattatattgaatagagatatcatgttagttaatttaagttaaatctatcatcgcttgagagaggttaataggttactttaagacttttgaaactacaaattatagaataaattgagataatcattaaatttagattcatagtttgaaatatagagaaatcaatgctctaagtttttactttatgataaaaaatcgttgtttttctatttatcttattattttttcttaattataatttaatttgtgttatctaattaaagtataaaattaaaaagtataataattagtaaaatttaataatcaatccctgtgggttcgacaaccttgttataacaacactgtacgcttgtagtaaaaaaaatagtgtttcaattatgttgaggaaaaaatattcatgattatgtataagtgatgatgagaaaaccattgagaagttgtaattcatgactatcagacaacgacctaatattttcattataataaaaaatggacaaggtacattctggatgtgtgataattgacccttaagttgcaagagtcgagccttggattgactagaaaatcgttgctcgagagctcaccaaacatcatacaaggtgcaataggtagtaactgaggcaaggacttcttcaacttcaaacatggacgacttgagccaagaaaggaaaggttgatctttgcatttccattgcgcataagcagggccagaatcacaagagaccaatttctttggaggggaaacattactgaagaggattgtgtctaggtcatgcccaatgattgtgagaacaacctgggatttctaggcaagaaaattaactcgatcaagttttattgtgagggagaaaattggagaaaatattctatgattgagtggaggtcgccgccgaagctgcaatagtagtggtctctagagcaatagtcacattagatgtcgaagaagtcattgactttagatagtctctaataccatgaaaagttttatagaagaacttcttgagtgaatctctgaagaaatatctaaggaaaaccttaatcccaaaatgagagattaagtacgcttttatacagttgcaactaatgaatgaatgtttacataaggtgcttaacagaaaataaaacataactaataaacaaatcttgttttaaatagtaaacaagattgctattggatacaccagaattttaacatagttatcaccttttaatttgttctttcacaaaccctcctttatttacttcgctttttattttgtaaataataaattaaatcgtagtttttgtgggatggacttatactataccaccatactaaagtaattggtttagtttaatattaaaaattgttaaatttattacgttatatgacaatcagcgactgatattttgcactgggataatcacgcagcacaacatattgcaacatttgactgccacttagtcaagagagaagattaaagctggaatatctacccaagatcgaatatctaccaaacaagtttaaactgctgaaatacaagatgggactacaaagtatctatttagaagtagagtagttaaagagtagtttgattaatatgttacgacagtgtaacaggttttcgctacccaatttgttaaatgctgttattagatttctttgtatataaagctggtgtaaatctttaacttcaccaataatgaaatacatggtatcattttcaatcaggtcttttgtaatacagtacatgctttatcaacaaatgaaacgcctgtgtaaactggtgccccttcatttgttattagttaaataattcatacattattctggtttatgaaattctgtaaaaaaaaaaaatctatcctatatttctttgaagaatttgaatgagaacctacgctgttttacaaggggataattacacagaatcataaatgagatttttacaaataacaatgacaaacaaatgataagaatgaatgagatggtattagtgttacatgctcatggctcttgagggaagttcagaatctgtatcttgcaaatcgccgtcacccccctctaccttttcctgcaaatatccacagccagaagttgaaagttaccagtcttcgatgtaaataccatttaaagtctactaaaggttaacaacaaaagaaccccaggaacaaatttggacaattagatgcatgtgcattattcccaccatttcttttattaaaaatcataccactgaattctttaacttgttttctgctaggtatctttctaatgcgccttcaccacaaagaatcttccctccacatccaggagcatcaactgaccctactgactcttcatcgactactacagcatctatcctttcatttcctgtcttgacatcgggaatctgacataccagtaatgtaattacgtcaagaatacagttcaattagatgtattttatttttgtttctccaaagtaaaatccatgctggagccagccaaactgtatttgcaagatatacctcgtacatcgcctcagtcagagtactttcgagtatcgctctcagacccctggcacctgtattcttagacattgccttatttgcaatcattctcattgctttctcagtaaagtgtagctttacctataatgtataaaaaaaacccattataattaaaataagcacttgaatccatgtgtgggtgtaacaatatatgtgtccaggtgaacgagagcacaattcagtttaaatgcttacattgttcatgctaaaaagtttcttgtactgcttaccaagagcatttttaggctccatgaggacctgcaggatatgaaaaaatattcaataaatgcttccaaatgtgaattcttaagcttctatttctacaacaaaaaaaaaaagaaagaaaaataaataaataaaagcaataacaaacggagaagatgtatgtcctataatcatgaaaatcaaatttggggatttcatgaaagaatttattggaccacatccaatgttttcagacttgtttagatccgatcaaattatacattgaatgttgaattttaacaaccaatccaatccaattaatttcaatcacccgaaacgaattttagattgaatcgattctatccattggttcaagtttatcaaatgtttttgatctagtattttttgcatagaatcaaatctattcaatgtttttgatccagtttctattggatatctaactggatattcaaaaattacatccaattcgatcataattacatattcagtttttaatggtcggttataattggattggatcgatttatgtataccccaactacaactataccagaaagagacgaaaaggaaaaacaatccaaatatcctgggatttttctcataaccttgtgggtgaataccaagtagacaattgttgttcatccactctcagaaaaaaaaaattaaaagagcagatatagaatggagacaaattaatgaaatacctgaacaagttgatcctcagtcaaagctgataaactaactaatattggaaaacgtccaataaactccggtatgagaccatatgcaataaggtcagaactttcaacctgaaaggtaaaattaacatgtattagttgctactctcattttttagaattttgatttctttttgttgtttgtagatattcatcattgataaaccaaaaattttcttcaatttctaactttcttcacctcgtttcttttgtgacttttgtatattaaatgcacaatgaaatggaagaatataaggccccatttgtctgttactgcaggaacacattcttaccgattcaagtaaagttgacgtgattgcggcactagttacactggtacctctcatgttagcacggacaggagcaccaaacccaatagaggaatcctgccttctgctttgtttacactatcttatgttacaattaaggtggaaaacataaacataaaaaagaacctggaaaaaactactgataatttttcaaggagtgttacctttctgaaattgttttgtcaagatcaacaaaggccccaccacatacaaaaagaatatctttcgtatctatctgcagatcattacacatttacaatataattttacaaacaacggttcctagactgtcagtgacaatcacatgaacagagaaatttaaagccagagaggaaaaacagtaaagaaagctgaaataaaagcactaaaaatcaaatgcttgaggaatgtctgcgaattctcaaactcgtgtgagggaggttggagtaattcactttagtaacttcttaaaaatatcaaataaaaccattctcagtttcatatattgtttattgtaaaccagagtaacacaattaatggataacagttggtacaaaagacatacctgtatgttatcacccctaggatgctttcttgcccccttctcaggaacattaactatctagacaggaagaagataatctcatggtaagataccagcagaatgatgagaataccataataatatatatttttttaaaatgaccatgtgatagcaaaaataaatgccacaacttaaaaatacaaaattccaatataaaaataaaaggcgcaacaatattccacttatgggaatacagcaatattaaatgaccttctatactctttattattcagtccctttcatcttaaggtgcacactcaacatcatcatatcacaagtatctcattaacctccatcatgtgtgcagtgaaaacattttgctggcagtttaggcttttaacgaaacataacaatgactttttggagtcacaaactggaaagtcaagttatctgccgaaaagctaaaacagttttgtgtgctcaagcttctatttcttaactcccagacatgcttgccctttaaattcaatagaaaattgcttattatgctggcatgacttcctaaagatgacatataaacagcattgacatacttcagattaaacttcgctctaacacactggagggagcaccctccaacctcaagaaatatcaaaataactgtactttgaactcttttacaacgaaaacgaaatgccatatctaaccaaaatatgtttctacttctggactgagacatacacacctatttaagagatatacttaccaagtaatttaatattaaatctttatttagcacagataatataataccatgtttacatcttctatgtctattgcttttctttatttcattttttgctttttatgggtttgaagggagagttcatctggtaagaattgaatttcaaatgttcttagtgatatataattagcattggaataattctttatgaaaataaaaagagcactcaatgcaatgtaacacagtagctcacagttccttcaagcattttcagtaacgcctgctgaacaccttcaccggaaacatctctgcttatatttaagctttcagcctgaaaaaatgacagcaacatacttaaaatacttcagctacgcaatacttaacaaaaaacataagaaaaaacaacgaaccttcttggttatcttgtcaacttcatcaatgtaaatcatcccttgctgtgctgcttgaacattaaattctgctgcctgttagtgaaaaaagtattttcagttcacaaatgaaccaaaagtagtgacatactcgagtctaaggttataaagaaaaactgcaagaaaatatattatatcaactacgaaacaactgacttaccgcaagtaatttatacaaaattgattcaacgtcttctccaacataaccagcctaataaaaacatattccaaccaagaagagtcaaaagctatgaagtaaaatttaagtatattaaaacagtcaaattcagcatgagactgacctgtgttaatgttgttgcatcagcaatgacaaaaggcacattcacaaaccgagctagcgtctttgcaagtaatgtcttccctataggaggatgtgtaaattaacatgacagttgagagtcattatttttccatcgaaaggctctaaattattgatgcaaggcaatgaaggaaataattttgtgatcacgaatgcagatatcaaacctgagccagttggacccatcagaagaacgttgctcttttctagctccacgttatcatcatcatcgtcatcatacgttgtcttgggaattccggtttctgttcctgacctagaataacataacaataataataaaaccaatcaacttagttcaattaattgaaataactaggggtgagcaatttaataacaaaatgagccaaccccctagtggactgggctgccaaatgcaaatttattatgtaaagctaaccctttttgtaaggaggtttggtagattcttttgtagtgattataaacagccacagaaagcacctgtagcatagatataagccattcagaggagaaggaacgagtcaaattatgtgaagcgaaacatggctagaaggcatggcatatgatgacatcgatgataagtaagaataaatggcagcatttaaattatttcagaaaaagaaagacctttttggccctttgttggccaataacgaacttatcaagacccttgcaaatctcctttggcgtgggtaaatccttccccagattggagccaccccagccttgtttgtctgcggcactagcagcagagccatttccagcggggcctgaacctgaacccgatgctcgaatcacattaacgccaggtgcgaagggcgggcctggtggagtgtgtacggtcagtccattggaacgaggaggaggagaaggaggcggtggtggtggccaattctcaggaggttcggcaccattaccatatgatctcaacgtgttccaaaacgaggttttaaacttattattgagagagcccagctcgacatcatcattggagctactatttctagaggtacccttcttgtcctggtcgtggactttggtgttagttagccttccaatctcgacgaaggtgccttggagaggggcagtacggttgggacggaagtagtaggcggttttgcaattggggcagagattaactgcctgtaaatcggacgagggggcatccgacgaagggggagaaggcatgagattggggaagcggacactggaagagaagagaaggtccatgcggttgaaggaacaccgagggcaatttgcctcggctctgatcttgcgagtgcgggtatcgtgggaaccgccatggtcccacttgtagcgctcttggactccgacgagggactcacggcgtcgatgggtggttatgtggaggtggttgaggtgagtggagatgggtgagacctgagtgaagcgatgatgaaccgcacatatttggtagagctgcttcttccatcttaggattccagacatttagttttgatggagcttgatatcaaccttatcagaaccaggaccaggaccagatgagatttgctttgattgggatctgttatgttgctgaagaaagagaggatgctgatgctgatgatataatgtttttttatttttgttttggacagcagggaggggaattgggaaagtgtgaaactattattcctataactattttttttagattgatgattaggggtgtatttttagttctatttagatcctagatgttagattttaccatctaatctattagaatttattttattagaatttaaatttattaacaagtatgttttctaaacataaatacatataaagttctaatttacctttgattagtgtaagtagaatattatggctccttccattagatttctaatctttgtttctttttgtcgcagaataataacaagtttgaaactgggtttccttcaggtattgaaattctttataatcttctacactataattgagtactgacttgatataagtgggcatgtattctatcactatttggttcaaaattaatgaagaaacaaaggacgaaatttctcagttgtcttacaaaggctatgagaatgagagtcatcttattctttatataaaatttcatctagggttaggatttaaattatatgcaataaaaaagataaaataattattgacctcacttttaaccaacggtagtgagtcaacataaagcgattagataaaaataaataataaaaagcaaaaacataaaaagaatacggaaatttctagaggttcggccctgtaataatggtagcagcctactctcctttttgttgtttatacttgagaataagaatgaaatgttcttcctctctaaagctcttacaattgatctctgagtaattctctcttggattgctcttttctctcttgagtgttcttctaaataaaattttctccccttcaatagtgaatttatgtcactatttataggagcttattacatgaagaatggtttcccttaatctataataaataaaataggaaactatattaattccataattacaatgtaaagaatgagaaaccaaggcatattacctttattctttgacctaatcccacgaacgtagggattatcttcgtgtcttggaagcaacgaggcttgttctttgaaattgccagctcacatatcatgtccggtgcatgcaagttgatcatgcgatatatccctcattcttcactgtccaaaggttttgagggtacgacaggctttgcgagttgcctttttagctcttggaaagcattttcacattcccctgtccatccaaacatcttattacctcaaaggatgttgaagaagggaacgcacttatttgttgactttgatatgaatatgctaagtgcggctatccgatcggctagctttacacttcctttatttttgctggcgaattcatatctaggagggcttgtattttctctgggttggctttaattcc

SEQ ID NO: 218858 - DNA, 3226 bp, Cannabis indica
aaggaaaagcagcagtaaagaagacaaagagagaaagaaagagagagagagagagaatgagaaaggaggtagctaattaagcaagagtagaagtagaagtagaagtagtagtaagagagagcataatattcatcctcatcatcatcatcaacaactagtactactgcactactgtcccgttctgatgaggcccctaattatttttttctctctcctctctctctctctctgctgtttactgctaccgcccacttttttttcttttaaaaaaaataaaattttttaaatgaaaatgactgtgagaaaggtacccagcgaggttggctatggcaaagagagatagaatagaaaagataaatagagatagatagagatagcagcaaagagatgatgggctgtggggaagacagagataaatgtagagagagagaaacaaaaaaatgagagatgacgattatgaggatgttgatgatgatgattaagaaagagaaaaataaataataaaataaaataaaaaaaaagaagtggagagagaaaaagagagagtggtatatatatatatatatatagatatataagtagtgttatagtaaagagtaaagagataggattgtatatattaataagatgctgtgttgtcaggggctctcactttgctgcatctaataattgccattaacctatttttagttttaccctctttcatttttatatttaatattaatgtctttttcttgtaattaaacacaacttattacggctctgtgtatcaattgcaaatgaatgtacgcaatgcatataaaaaataataaaaaatatatgtatacaacattacaacataacatataatatataacatgcaagagggatggggtgaaatgatgagtgtgagtgtgtgggggtgggccgggtacatctacaaagctctcttatttttcttattagtttccttattaactcctctaactcatattctatatattattataatctctaaactcactcccatatctttcccttaatctacttctttcttctatttttaattttctcatttcatcattataattattaccttaataataatattatacataataacaaaaaaacaccaaaaactaaaaaaactgtaatattctatattttgatatatctaattgattaattagctgtttcaattatttttttacatttaattccatatatcaattttaccatatatacaatttcttttttttttttggttttgtttttagtatgaaaagattatcatatgatcactactatatatattaagaaaaatcaatatgtacatatataaagtatgcggaaaattgtaatcaattatgacattttaatttgtagaatttattcttttttttttttttgaaggtaggtaggtagatttgaatatataatgtagaaatgtatatgtatataagtatgtattagggggaagagaagggaggggtggtgggatgctatagttgtcagatgactttagtttaacagagatgtcggcccccaactccatcgatctgacatgcttaataagtcccatgtgattggagccgtagctaccaaaaaagtaaaattcaaaaaaataaataaattattatttaattaataatcactttcacattcacatattcatgtattaattaattgacagccaacaattcctgtaccacttaattaaggtatgtatatatattataaatatatattagtaggatgaggagaagaataaggagaatgaggaggagaaggaggaggcagtgagaagtgcgatggatgggtgtctccactgtaagcggtgcccattgttattatgtttctttaaatcacatttaagcaacgtgggacaccttggactctcgaccttttatatatttgcctatctgtattctatgtactactactactactctctctttacttatatatcatatcataataataacaatatatatatatatatataatagtagtagtaatagttatatttctctctgatcatccaccataatttttcactactctttattttttttattacattcatatacgcttagctttaatgtctaccatcacattttcagacaccaacctagctactgtggcttttatacatatactcacaaacaacgtttttagattttctttcattttaaaaataaattaaaaaataatatgataattaaggagagaattgcatggtaatggtattattattattagaaaacacgtttgaaagtaaagtaacagagaagtatgcttgcttgataagttagttatgtatgtgttttatgttaccgtataaattaatatacatttacagagggagagagagagagagagagaggtgtatgaaattaatttagagcattaattgctcaaatatatatattaattactcatgatgaataactacacagtagtactagttgtctaaagcacctacttcatcttatctcgtgattattctgaatattctgatcgatcgtctatatatataatttgatattgtttgtctatggctatgactatttgatccttttgtatgtacgtttatatataaatattaattgactaaatatatatatatatatagggtgtaataagtttggaggtgatgaagatccatggtatgttgtgtgagtatatccatcatatacatattaactattgagacttgagacttatacaaaaaaactattgagactaaatatatagtaatatatatatagtgaatcatgctaaaaaaaatattagtagtgtcttgttaattggaagataacatatctagaagataattaaaaggtgacacttaaatatacgttctaagggtttatagtgaagattggaattggagggtatttcacttagttggattgatgggagttcattaagggctaatcaatgaatgaattaatgaattgggaaagaatgaatgagtgacgtggctatggctatgtctgtgtggctacagagaatggacaaagaaaagaaataacagattggtttgttacagcagtagtagctggctgtgggtcctacaacgtgcgtggccgtggagtgtccgaactcctactgggctgacggtcaccaacttaaattgggccgagcatttcctaagttgggccgagtcccagtgactgatcgattgatgccattacacattggaatttagattacgtggttaattccctttaaactttgatta

SEQ ID NO: 218859 - DNA, 6836 bp, Cannabis indica
cgttgagttggatcaaacgcaaagggtggactgaggtggtgactgagtcagatgcgctaatggtggtgcaggctgttcttggctcagtttcaatgacatctcaattcgattacttggttcaagattgtcgttctttactttcttctcttaattgtgtgtctttgaattttattaaacggtctgcaaataggactgctcattgtgttgttagagcgtcttgtttaagcccagatcgtatttttagcgagcataacgctccttctgaacttttggctattgttgatgcggaatgtttctgattaaataaatcatcttttgttcaaaaaaaaaaagtggaaaatagtataattgtaatgataataattattaacacagaataaaccatagacaaaaataatggttattcttttaataatattaatacatgtaaactctttccaaaagtggcaatgacaacttttgatatacacaccccttttatgttttctttagccataaagaggatttgagctataatatatgatcttttcctatgccaaacaaatgtttcctccacagcactacatgtttaactggctcatatttacacacacccgaggaagaaaagaaacactgagatacaacaatggacagaccaccatgtaaactcatctcatcaacaaacatgtacaatgttatggaaagcagaaaatctggatcagcaacctcttcttttactataatcttggacaaagatgataatgaaatcttgcatcccttcatatgaatctatcggatgaacgaactctataagtactcgactttattgcttcgtcgtccttggattcctccaacatagcaagaccattcagaaacttatccatcttagctgtacaaaggggcatgtctactactgtctaggtctgagttcgaatggacatcatacctatgataactttctcacatctgcaagataagatgtatcttgtatcttgttaagtacagcatgttcctcgaggagtctctatgccctctatttcccttaatattcatgtacacagaagtagactgggctgcatgataaggagaccgacagatgcatacggtgaggcgtttgaaatgaggagaaactcctgtcttgatcagttaaaaaaataagaagactgtaaaacatccttgagatcaaagtcgccgcattcaggcaacggggggaagaccaatgtagggaaagactgttgaaagccttccattaactgaaaacagaggatctgttagactaattgaaaaacatgttttcacaaggaattttgctgtctttagtttatttgacaaatgaaatttcaagaagagaagatactgtacattctccagtattggagtctcatatagttccacgaatttctctctaagtatcctgttcatctgatccacgtcgcatgcatgtgtccagtatgaatcatgaactcctgtaaatattaaaacttagaagtagaacagacaaaattgaggtagcaaacaagatagacaccgacaagaaccaacctgcaaatgttaagcctgcctttctgcaggctactgcagtcatcatcatatgtgaaccatcgagcgagtgaacaaaatttggtgggaaagctgttctctgccttctgaccatgacctaaaccattacaaaaatcacgttttcagattgatgaatatgttgctctttcctttttctcattcacagtgtttttaaaaatatatgtttatacaaaaattaatattaagtcataaatttgatacttaattgaaacacaactaaagattaaactaattaggcaaacctaagtctatgggaaataaaaaacagaatcaggcaactcaaagatcacggtggggtcgcttttgttgtggtcattttatcaattgctaaagaattagaatttagaaggggccaaacccaattctatgcctctagtgagagtgcatgtcagatcatgcctacatatttcagagaaaattatttacttaacaggtacactaccagaaatttcctaatgtaaaagaagaacagtgataaagaaaattctgatgagaagtctgtctattttatgaagtaatttctagattagactcctaccttgtagaaagaaagattttcagaaaatggtagctagatcggttggagaaagaatcttctcaaaatgataaaagtcatggaaaagaaaacacatgggtatttcagccatggttatagttattgagcaataaactcctatacaattattacactatgttggcactgaaatatgttgaacccaatagttattcagtgccatgaatgtcaaataatacaatctagggatggtcatgagtcatgagagttgactggtgagtaatgttatttaaaagtaagataaaataattctgacaaaaggaaatacagttgcacttattaccttttctgtttctcgttgtattgtcaaaatctgcagggaagtttttatctgaaatattaaacaaaaaaaaataatgagttcactgacttgacatgattatgactcctaagattaggattaagagaatttatggctttcactaatagcagaaaatctttcagcactcacaaactgccttcctaatttacgatatggttgcacaacaggaagtcccaggggagttgtccactgtactggttcattttcagatgcaatgatctgttcatttacaagttcgaaataagattctaccgtagattaaatttaacaagatatttaacatgtatacttttactactgaggaattgggtacacactttagcacaatccccaagccaactcatgataccgcgtgcagcttcaaacatctcacctaaagcagctaatgtggtctgcacataataagtaatattgtaagtaaaaatataaccttaaaaatatacaaacttctgcttgtgacaaagcatttccaacaataaacaagagaaatgaggcaagaaagatatggataccttcgcagcataacaagagtagccaaaaagctcttcatcatctgcaatggcacttcgttccttcaaccttctcaagatttgatctctggcaccaatgtatgtgacaccatatactgatgtcatcactgtctgcttcaccaactttctatccacctagatggtataatacaccatgagggtaaatgatcagttataagacggctgtcaagtgacaaggcagtggcattcattaaattctatatactaatttctcatgtaagactcttaaatgaagaactgaattttctaatagaaattaaaatgaaatcaactccaaataagaatttgttgaaaatctaaaattacctgattaattaatacttttgcccgcaatgcatctgggtaaattgcgggatccatttgtgcatctctgcgcatgatttctattaccctgcaatccaagtatgagattttcaaaaataaaattatatacttgaagcatgtttcaacactgagatggtagagaaaggctacctagctgctattcctgagtacacatctgcaggcttatctcctgcaactagattcacagcagctgctcccaactgaacagagatatttcaatcagataagaacggatgtcttaaaaggaagaatcgctactttgtgcaactaaaatttcataaaagaggagaaagaaagaaagagagggggagtagctcccaacaaaatatggcaagtccatttcagtcacaccaaatattaggatagatactgctgacaaagaatgtaagtatgtatttattccaattgatgaatgaagaatgtcatttgtatccataaatttgatcactatgtaaaaaggtgccaattaagatgcaggttttgaaaagctattaatcttatttttttctcaaacatccatctaggtttagattttcttattattttttttcttttttttgatttgaagtgtcttatatatacatttttttgagttccacaagatgggattcaatccgacgacccccccacacacacacccccaataatcccctatggccacttgagctagcctcaagtggctatctaagtttagaattttattaatgcacactactaccatctcaagtagcaacaagctaacgaaactaggcaaactgcatgaaagttcatcaagagctagacacactggaaacttcttaaaatccaccagcagtcgctcacccgccctaattgttggaagcaattatattctttcccatcataacattatgttctactataaaatgcagcataaagtgagcaactaaacattaaatgtatgctcaaaaactatagtaagttttcctaatttctttgagattaccttgtctcttccaagggcagcatagtgttgtaaaccgttgcaagaaccatcctacatgaccaaaaaaaaaagggtgaaaatataataaaacaaaggaaatttgtaatttttcatccctgtattcagctttggaacccactcaggccttgtaatttgaatattaccaaaataaattcctatatcctacaaatcagtacaaaatactaccattgaattcagttttcatcaaatttttttttcccagttttcatcaaaattaattgtaaagaaaaaaacactatttcctttttccaaaataaactctaacataaaaaaacaaactaaataaatttttaaaaaaatatatttatccacaaataatttatatagctttgaacaggtcatataaaactagttattacatgttatttgaaatgagtattggaaaaccataaaattttagcccccaagagttcagggactgtaaatcacaagctaagacattcaagcatgaacaagtgccagatctcttctagctttatgaacatgactcagacactcttagggatttgtagactgcttatcaatgttaatcaccgtctttgaagaatcaagaaaagtttctagcacaatcaacaaagagttcaaaaatatacctcctaaattactgtagacaaatacctggtgcacatggatatgtgaaataaaagtttcaggtgaagagcttctcaaagcttcagcaaggttaatgcatacagctaagcactggaaaggatcttctgcattcaaccaccattgatttccttctaatggtctatctgcagaatcaaatatttcgtccaaatgattctccgtaaatgctaatcgaccctcaagagataacttgtcgacaccgccagcatataagttagctaagtgtattttcagccagcgcaagcctgattttcccaaaggacgtccctcggcaaactccaaaatacctcggcacagatctgaaccaagatgatttaagtatgggtgcatgggatatgcacggcctcgaaagtcaacattgtgtggatagaagaaaccttcttcatccttcatttttcgtgctacctgctcaacagtaaaatgaatttcgattaattccttttaacaaattgcaattacagtctagaaaagtgaaatagctcttaccgcaagtttaagttctatgtcgcaccgctgagagtatctctctctattctcttttttgacagacctaacatcccatttccatttctttatcagtgcttcatcttcagaatctggcttctcaggtaacaaaacctgcaatgtagaatgttaaatgaaaggagagtttcatattcaacaacctgcagtaatataaaaaccttcggatgtagctgagccactaaatattagagaaacaaagaaacactgataatatagagaaaattacatcattccggtccaccaaatcagcaagacagcctccgctagtccatattctctccacaacattaagaacccttttgttaatcctccatctagtattcccgagtgtatccaaggcctaacagatagtaagaaaaagagataacactactgaatttgttcatttatttttaagggattttcagaagtgcgtgaaagcgatgcagcacttggatttacaaacctcaaaaactggttccagttgcttctttgggacccttttgacagcttcacgctgttgtctcactccatgagtacgcattatataggatggtaagaacaagtgcccacctttgtcataactgggaaagaaaaacaatcatgtctagtagaataaaaaaaaactaaagcagaagaaacaaaatacgaagttgtgatattccacaaaatattttaagctattgaaaagtcatttttaaatatttttgggcatattgcccacaacatcagacatggaaacggaagctaattttcactttctgaacttgaatgttgctgcttagaactgtaagataaaacgtcgctgaaattttatctggaatatgttatagtacctacagccagtcaaactggaatatgctaaaacagcctctgctacaattcaatttatgtgttgattattaaatacttcaaggttcaaaattttttcacaaaatgacatattgataatcaagaagaaacctacgattacagcaattaatgaaaatatgatgtttccagaaattttctgaaactaaactcaatgtactgattaaatataagtaattaaatccaatatagcttcagatcaaaaaaactaaatacaatatagctatgtggtagcagtaatatgaaataccataccctgtccatctaagtgggggtaccaacataggcatatagggcatcaccatgtgtcgtgcctgtttaaacaaatagcacttatttcagttccagaaagagagcattagcgaaaccatgatctacaagctaagagaataacaagaaggaacccaatgaatcccataagatatgttctttgccgaaacacataaattttcctatattcaagtagtttagcta

SEQ ID NO: 218860 - DNA, 4241 bp, Cannabis indica
caaaattgacattttccaccaaagtgtgctaaaactattctaaaatccttcaaacatgtgattagccttccaaaataacaaatcaaaatcaaactaatcaaatatttaaaaagttaattcgatcataataaggaaaaataacataatttaatagacaaatatgtacttattaaattcccttgcacttgaactttgctagttccttagtaaactattaaaataacaaaaactcaaaagtaaaaataatgataacacaaattagtctaaaataactaaataaaggtcttatcgaaagcttgattgtctctcagaaacaccaagtaaataatgccaacacaagtgagatttccatgttctttagaatttcaatcccacgtgaagttcactatttaatttttcaaaaatgatttaagaagcacgtaattataacaccaactcaaatatatcaagatttatctatatttgtcaaatcattctcttttaaatcagttcctatacaacagaatatatttttaagcaaaagaaattcactccataagcattaatcaaattttccactaatataagtacataatgatcaataatcaaaatatatttttagacttgatgtaaaggtaagcgtaaatgtagatgagaaagatatatttaagcttaaatcacactataacatacatcgattccattctttcaacttctcctaaatttctcatacaatttaaaaaatgcctatcttttcattcttcttctttccgacagtgattttactatttctcccacaattatattttgtaaattcttttatgcaattttattttttttctttctcttttttataataattgcaaatatgtattttttctctctttttttttttcaacatttcaaggaaaaagagatcactcacaaattacaacataaacaactaacccataagtatttttcttttttattaccatcccacaaaattaaaaatcatatatgtatataatcatggcacaatgagtcacaaaaataaaattttttaaatgaggtatagggttaagaatttttcgttatagaaaaaaattaacagttattatgactcaaaaataaaaatttaaggaatgacaattacaaaggaaggctcgaaaagtacaaatgatccaagaaattacattaatcatttttttaatcatgtatacttattatttcgcctcaaaaaaataattaataacttttaaagtggtcgggacatcaataactctaattagtttttctttttaacaatcatgaatcttttctaaaatattttagtggtgaattcaatcgtgcatagagtgaaacatacacataaatcaaaatagtgatttacatagaaatcaaacacacaaatcacataaaatacctcattgtctaacatcacttcaagcacaattcaaaattgtattatcaaccaatgctttcaacaagatattattaaaactcataaaaataaattcaaactaaaaaaataggatatataaacacgacagttattttccccacacttaatataaacattgttcttaagactcgatcaaataaaattaatgcaaaataaaaagataaagagtaagaaaaattctcgtaagttatcaaagatttgttctttgtgtacttatcaatggaattgaagaccgttaggtcttttttttagcaatttaattgttaaaatattttttaattaatgtgtatttttattgagtatttaaattatttttattatatcgattttgtgcatttaattactcttttcttctaagaaaatattaattctcagctgatctgttttttaggaaacttcttgtaagagaatgaattctcttatagaaatttgtttaactttgggaaacttgactttccctttttctaatggatgatttcagttttgcctttattagaacaaatcaaaaaaaactttatttggcatgtttgaagtccaaattcgtgatcttggttcaatttagaaaatttattttctggtcctgatttgctgccgcaaaacccacttctgatgctacaaatcagaaattttttaagaaagttttgtacagctcagaaatcatttttgtggctgtctctagggctgctgtgttctataaataggacctagagagtagccaaacatttttatctcttcttttctcatattttcatatctttttttgtgagaagaatgtttcatttgtaaaaacctagagtgttcaattaggttttgattttcttattatgatatcatactatttatagaataggttgaagagaagcttttaacaagtgcgagtctttgggagaagaatttttcaagtctcattttcgggaggaagtgagcatatatctttgggagaagatttgtttaagccttacttcggaaggaagtaagcacacatcaatagctgaagggagttcactacttggtgtgtttcagagatcaaattagcaaggtggattacaaagggttgcgacaaatcactaaagggagtctaaatttgtttaagtcaattgcttttgaaaactttgatacattattaattgatttcattttctaggcgtggccccgtggactaatagtatttgaaagaacactgatatcacgtataattttcttgtatcaagtttataaattctgggctatttatttctggtttgtttatgtaaaattgtattttgcagtgacattacattttgctgttgcagactattacattagtgtttttactaaaatttaatataattattggcttttgtaaaaacttgatttttcaaagacagggggtgtctcttatattcttagttcttatccaatcaagtattctctatgtttgcatggatttgatggttttccaggtggtagatgtcatgctcatcctaataaaaactattcattgtttttagttataaaacatggttttcttaataaaacttaaaattgttgagaaatggtgttcatcttaataaaaactacaataaaaaggattagaagcattttaattaatcgaagcatctttaatgtgattttatgtatgattcttttatgcaattttagtcacattttagctttttaaggggagttaggcttaggaccttcgtaccatgcatgttaccataaacatgttattaattctcattaattgataaagttgtccgatgtagaatataacacattaattataccaattaccaattacttttttttccacatgattaaatatgacaaaaagatgttaaggatagcaacattaattacaatagacaaccgttgaaatgtggatgtgctcgtacaaaaaaatgtttttaaaaattaaatcaaagtaaggattggatggagaacttttacactagccgatttaataagggttccatttgaaaatctgctgcaaagttattttttatagagtgcagaatatcttgacaagtacttaatggagtatttttatataaaaaatctttaaatattaattaatgtaaattttcataccatggccacatcgaaaacaagctagattagatggaagcttctcattagtgggcaatcatggtagtgaaatgtttaattttcgaggaaagagataacgtcaaaattttcttccaccaagagatttgaggggtacatataatcgtatatgaggttgaaggaccatcatttttaagtgagagtgctaatgatttaattttgtgtttgttgtggaaagtttggcatagtaggaaccaacttctacattgtggagtcataaactctccaacagagataatcaattatatatggaaatccggatattttcatgcatagcaaagatgtgttattagtggcggagccagcccaacattttagtagaagcaaaaaaaatttttttttgaagcattaaagaaaaatatacaaataaataaatatataatgtgagaataaaagttaaaaatataaattttgtgaggataaatataaaaatatgtaaggataaaaatgaagaaaaataatttttatgaggtcaaaatatataaaatttatatgaaataaaaagttgggggagggggggggggggggggtcgaatgaccccacatgcccctccttccctccgccactgtgtgctaccctaccaggctaccaccaactagcatatttcagcaatttgtaactgctctggtatggagagttcatccgacaacgtaattcaactaaaatagcgtttgattgaaaggaatgaaaatataagattatgaatga

SEQ ID NO: 218861 - DNA, 3553 bp, Cannabis indica
ttacactaataataatattacatatgataaaaggtgttagttgtgttttccatttctcataattttaccattaggttagttatgaatggcaattttaaaattttccgataagtaggcacaaaaataataataatcccatgcttaattataagaaataaaaacaccaatttgtatcgtttctcaacaactttgataaagaagaaattaatatataataaggaataacaccatcccaaattttggatttagcaaagggttagagtctagtggaatgttcagtgtgtagtccttttccaatttggttattatattaatgctaaaacttgaccaatcttaaaaactctagatacattcacatcaagagacttctgcaatatgaaaaataaataaataaataaattatagtaaacttaaatagaagagaaatgtaattttggttaaatgataggccccttttctggccttgttgacattttgaaacctgaaaaatgggccaaataaataatcatatgatgcatgtggatatctcttggactactctacaagctaaattacttacccaactcaaggaagtgtgtgtttgtggggaggggaacttaaccaagtagaaagagagcattgttatatttgtccgaaatttaaattttaatatcgaattctatattatctattttaaacaatacttgtattataatgtgtcatattcgatattaaattaaattaatcactacacattttattgggtaattgtatagtacacccttgaaagtaacgttctagtatactttcaatatgtttcagcaattaatttttagtttaattttttttttcataatgaagtatgttctgttagagttatttaagaccacctatgaatttttgaaaaattctaaattatttacattgttgaaaagaaagttaaaatattttgtgtaattattttttcttacgttgaagagtataccaaaacggtcctaccgaccttcagaaaggtgtacgttaaatttttcatttttattaagtggtattagacatgtgtatcatttatcaatatatatacttatatataaaactcgatattaaattatatcaatcagtatcacgtgaatcatattaactgatattacacattggtctccttttccaataatgaccaaaactagggttaaaatatcaagactagtgttaaaatggttgagtcaagtgaacattcaggactacccacatgacatggacctaactgaaaccctagctatgtacctaggtagctatagtattccatgccaaaaaaaaaaaaaaaaaaaattcaatggatggatagggtataagcttaaccctgtacagttgtataaactgtgcccactaagataaagaaagcacaagaagcaaaagaagttttttttctcttttgtatgtaggtgtttacaggtgtattgaacctataaatataaatatatatatatatatataaatgtatgtgtgtgtgtgtaggaatataggatggtccaaaagaatttgtacatacttgtcacttaatatttttggtccagagcctagtgaagtacatctagtttgtgtggttggagaggccagaatcaatctagtgaatgtagttttaggcaagtcccatgtgaaatgcctcatgagatttcttttgggatgtttggtttttggatcaattcaaaacttcatattttcaacccattctgtcccactttcatttatgactttaactcagtcaacattaccttatttatgtccaaactcttaacccatttattgcctcaattatcaaaaccagttggatttggatatttaatcagaacatacaaagcaaacaaaatagaatacaaacaaatttcatttttttttaattgaatggactccaattccaagtctttagatatggatgtgtaatattaaataatatattgactctatttatatgtattacacagattatgattcttgtttattttctttcccgatgacaacgtagtctcctcttctgaaagattaggtcaaaatcaattgtgatgttaaagttgattgtgattcgatgtgcgtggtggctttggctagggatcacaaggagacagttttgtgggtggcttccaaagtgctcaacttctctgaccctctaattggagaagttgtggcatgtctgttagctgcggaatcaacggtctcgaagaagcataattttgtgctgattaagagtgactctgagaaggttatcaatgcgctaaaagaaacttgctcctattgggtattggtagctatgtaattcagtgtaaacaactctcgaatcttttgttaagttgtaattttacttttatttctagacaatgtaattttgcagctcataatgtggctaagtgagctttcgccaggaatgtaactgggatgatcgatcatgtcgtactgctaaataatattttatgtaatgaccatgaggtctaatttgtagttttaatctaaaaacgctttattcaaaaaaaaaaaaatctttagatatgtataaaaggatcaagagatatgaatttattgagaaaccctaagtactagtggtatccaatactactacgaaatgtcatattcttattataatataattaaatatctgattttacatattttaatttaataattattaatagcaagctcgaacttatgggctagtaacgctatctaatcctatatttgatgttattgtattaattatgaaataattttgactacaacttgattcaataagtttcaattgttagttttgacaaactcttttaaaagagaactcttaaaacttccaaacccttaaaagtgaaaagagtgggcattctacaaaactctccaactcttccacttgaagcttctaacaaaccaaacaaaacatcctaaaagatattcactcctttaggaaaagaacacgaactctcattcattcttttaccaaacaaacataggattcaactctaaacaataaaaagattaaaccatttttttatatatacaaaatatcaaatctaccaacaaaagattatttaagaaaataatataaataaattgaatgaatttatgggtgtacaatgcggtggctgattcatgccacttgtgatattgctgatatgactttagttagttaaaacaattaaattcacttatcttaagcggagtttggtaatgaaatgaaaagttatttttatttaattgcattttaaaatattagaatagaacaatttttccatttgttggaaaagaatgaaaaaattatttcaacgcaagatttaaaaaaatttaataattttctatcaattttcttttcatgcatttaaatttgtattccatttttcattactattccggtgatttcattcctccaaaccaaacttcaccttcgtatttattaattcagttaaccttctttgggatttaaaaatcagagaaaagtttcgagacttgatgtgagtatttttttaatcaagaacaagacttctttagtgctcgatttgtactattcttctcgagtataaataaaattcataagccattg

SEQ ID NO: 218862 - DNA, 3085 bp, Cannabis indica
tactgtttataatgacaataataatagtgctcaaaaaaaaaataatgacaataataggagctaacgtttagtttcattatctcgtcgtacatacttcaaatggataacaaattaaattaatatagataaatcattttctaattatagagcattccttttgcacatgatcaatcaatatcatcttaatttccaaattaaatcaagtataatcttttgtcaaaccaaatgagttctaacttattattaaactgcaagataaacatcaatttattctacaaagaagaagaagaagaacaattaatcttattccatagttttcaattaactaataatttacatcatcacaatattaggatatgtttcaaacgatttgaatcttaatttttgagatagtgatgataattctccaatatctatcatcatggtcattgatattcttaactaatttaatttaattttatagcttaaggtgttaattataattagtactttcaatcaatttccgggggcctgaattacatcttcagggaaagtcatccgtacttgcttcattatcattttaaaagtaacacatatatgagtccaataatatcgatcggttgcgggtggtaaagaacttagaaaatgcaaaagcaatatatgatcgatcatttcatagtctctctctgcgactacgactggttattgtcacacattaattggagggtcagccctataagttaactttttactttatgcgcaagagtataattgtaccttatttacaataaattattaattattaaatttaaataatatatgtatataagtatattatgattatgatcatgcatgtactactagtattaatgtgtatgtttacgttatatataatataagaaaatgaagtactaatttcattctcaggtcccgaccttgtataatttggatccctctagtctcgatctctctctattagagttagtctaacgttacttatgtatgaaaataaattgtgatatataagatcaatgggctactcttcccatgttgccaattagttttgagatggaacttcattcatcttatcccaaattctaacatagtatcagagccacttgtgatctgttgtgagccaaaatgctgtcgatccaaacagatacttctgtctcccctttaacctccatttgggacttttcagccaatgtgtgccagtttccagtgggattctttcaaacgtgaggagagtgtattagagttagtcccacattactaatgtgtaaaataaattgtgatatataagatgaatggcctcctcctctcattgctaattggttttgaaatagaacctcattcatcttatcccaaattctaactatgctgtgatttctttttggttgcagctcacaatattagtgtataacatttttgtagtgttatatcactatatattttgatttaataatttttaaaaaatatccaaaataaattaaaaaaaaaaaaatataggtgtcgtttagtaacacttttattttctaattttttaatcacaaaatgaaattaaattttcgttttaaaaaattttgtttttgaaaaaaaaaaatgcattcggtaaccacttttgtttttcaattttaaaaacagaaaataaaaatatattctgtaaagttcatttttattttcatattttgattttatttaagtttggtctaggtttaggagcaaatggagttcgggtcagatgtcgggtttagcaccaaggccgtgggaggagaatttgggtccgagtctagtcggagtccaaaatattgattaaaaaatttgttaataaaatattgaaagtaacttattttattttaaaattttgattctcaattaaaaaattgaaaagtgaaaacagttttataaaatatgtttttaaaaaatattttcactttttaaattttaaaaataaaaaattgaataaaaatgtaacgcgtaacaatccgctatataaaaattaataactaataggcaccaataaaaatgtacttttatatattatttatatatatattgtatagacttccgtcaccatatcttcttttggaatacctactaatttatagtatattatatataatattggagtatggtaccacaagagcatgggcatccacatgaaggtaggaccctcatttgattaaagccttttaacacgtgaaggaagcatgaggcaaccctactattttctcaatattatagtggtttgttcactacctaataacattttgataggaaaaatattaaaacgcattaatagtatctaacactcttttacgtactaatattgttattagtacaataagtatcgaaactcatattacttattattatcatgatttttgcctacctaacgtggcatgcttacatagacaaaatcaacatcatgtagcaatgcagctcaccaacaaaaaggtcaaatcagcacctcagcaaacggggatctcggcactcaaacaggacaaccagtgacagaccagctgcctcaaaggagttgttcggccaggattggacctggcaggatcctctgactaattttacatgtggattgggagatggactgagaattgggccttaacagcccaatgaagtagctgagaatatctatgtttaagatcattttagtcttttgtatttaattaatttaatatacaaatatctacttattttattgttgagtaaataccaatttagaccctgtgttttgcaaaagttaccaattggaccctctgtgttgttaaatgacaaaatagaccccatattttccaaaatagtaaaaattggaccccgagcttaatttttaacaattttatttttcaatataactaactttaagacaatttctaacacgagcagacacagaaaatgtaaccagttttgtcaaaaaattagaatattattaagttttattttgacaaaaaatttgttcagggtcctatttgtacaattttagaaaatacagggtccatattttcatttaacaaaataaaaggtccaatcggtaactttcacaaaatacagggtcaaaaatggtatataccctttattattaaattagagttta

SEQ ID NO: 218863 - DNA, 2117 bp, Cannabis indica
ctaactctatcaatacatattgtttcataaccattttatacttttgatctaatcagataaataaaactatttttgatttagagatctatagaaaaaaacttagttaatattattgtattcaatattatatacaatctagcagcttgggtttattttactttttctgacagacccttcctaaaactatgggttagtctctctataaactcagagcaaaaaattgagagcttcagtggaaaactattggttagtttcgcgccaaactacacttgtacatatttgagtgataaagaaattttaagatggtatttagctgagaggaattaaaacattaaaatatgagtgtgaatatgaatgtgagggtgaatgtcaatatcaataggaattgaatggaatcaaattaaaatgcataaaaaaaattgataaaaaaattattaaattttttctcatcttgtattagaatgattttttattcatttgcaaaatgtaatcttctaacaaaataatagaaaaattattctaaaagaataatattctaatacattaaactaaacaaataaatggaataaaaaattttcttctcatttattacctctaaccaaatacaccctaattataagagaaatgctaaagggcaccagtagtgcctagcaccctcttatgtgtcaatatcgctattggtccaactaagtatcgggtgccatataatttaatataatagtttttaggagtatcgctaaccaatcataacgcgacatgtcgagtgctaggcaccaccggtaccttatagcaatgctctaaatataattacctgttactaattacatttgactttattggaggaagtaaaaagaaaagaaaaaaaaacgtaatgcgtactatatatatgtaggggaactttagctcattgacttcaagatagacagtactcttgtatgaattaaaattatgtgtgggaatcatgcggtgcatgtgcggccgatataatcatatagtttccctattaattacttatcaacatgatgattaattactaagatcgagtactataatagttttggttattgactatgcatgtataaataatggatgtgtatgaaagcttagcctcagctgaaaactagctgtataattagtcaacttttgaaaagcgtacgtacgtcaaaagaaaaaaaccatcccattagcgggatactgttcatttaattttaatcagccataattaatggttatctttttgctatacatataatcatcgagctggctattaattattaggagcattacgtgtttaaaccaaaacacttccgctgggagtggaactatactatttactgttattatcaattcctcgtggaccatttcattacgtattataatgtcgtttagtactggattctattctaccattgacctctgtcacgattggtatataattagcacatgtaattattaattcatatgtaacatgtttgttttgtatgtcagctcctaattatttgaatgcaaattttaacatgtaataaattatatccattgaacttttaagattgttaaatttaatgattttttgtctaattttagtaaaaaaatctaatattgatgaaaattcacggaacataatttagtatatgtcaaaatttgagagataacaatttgtagacattaaagtctgaggagcatgatttagtacataaacaatagtaaaattgaataaaattaaacaaaaatccttaaatctaataatctcaatagttaaaaagcatttttaacgaccttaaaagataaatggtataattcaatacttgtcaaattcagaaagaaagcaaaaatcttaaatagtttattttcaaactaaataatcaacatcaatagtatataagatgtacgtacgtgaggatagtcgcaccgtgcaacttggaataattctccaaatttcaaactaactatgcaaatctaaatcaaatttgacatcggtacctcaaattataattatttaatagggattattggtttaatgatgtttttgttatttattcttaaaattaggaaacaagtcgagtttcaggtgcagttatattttatttaataatatatattaaattttaaaatttaat
